United States Patent Application Publication US 2007/0072175 A1 - sequence listing, part 8

SEQ ID NO: 21150 - DNA, 725 bp, Macaca Mulatta
cgagaggctgatctttacagatttttttaagccatcagacgaatacaagagaggctcaaacaagaaattcactgtgtacactctctaagacgttctccaaattgattttatctctttaaataaaaactttaaataaaagcattagaaatgttttctctgcatagaaattaggaaacttgaagtcaactttgctgtgcttctgatttcagccttttggcaagagttctgtcttattaggtcattttctgctcactgaccctcacataaagctgattgttgttgaaattcatccagcccactgtgtcctgaggagcacctctgtcacttagggatcacatgtagcactcagctgctgcacccaggacaacactgtggcctcatgattgtcatcctttgtacccagaatgcttcaggcacgctcagttaagcaaactaagtgactttttagtatttgcagtcaccttgtctcagtttcatttaagattttgatagtttagatagaataaatacagatgtttgagtattacaaattcctttctaaacatttttgtttctatttttaaaaattcatcattaaaaacactttaatatagtgaattaaaaatatttctaaagtacatttccataagatgttttttgttttcatcttgtctgtgttagcttggaaatataacttcagctaagaacaattctactgtgctcttccacattttaatgctgggcca

SEQ ID NO: 21151 - DNA, 706 bp, Macaca Mulatta
accctcctgcactactgggccacccagcagccagaaaagcagcagacgcccaacaagaggccttgggagagcctccggaaagcccacgggacgcccacgtgggtgaagaaggagctggagccgctgcagccgtcgccgctggagcttcgcagcgtggagtgggagaggtcgggcgccacgatcccgctggtgggccaggacatcatcgacctccagaccgaggtctgagcgggtgggcggcggccacgcactgggccatggaggagggatgctgctccgcccgctcctgccgcagacgggcacagacacgctcgcgggcggcgggccaggcccgcgccccggcctcagggcgctcagacggcggccaggcacagggcccgcagtgctgggaccagagccagatgcaggacaggaggcagcccggccagcgggcacagggcaccagaggctgaaggtgactcagactctgccctcctcgggccgaggcccggcgggcagatgggcagacggctgtggaccatggacaggcccagtgcggccagcgtcccagggtgcccacctgagctcctgctgcggaggaccagcctgcttggcccggccggcctggcaccgttttttaaacacccccatcccttgggaggcagccagccccctacaccttccagggccctgggcccctcctagacccaggtggagagcacagccc

SEQ ID NO: 21152 - DNA, 780 bp, Macaca Mulatta
  misc_feature (1)...(780): n = A,T,C or G
gctctccattgtggctgtgggcttccacatattccgaaccctcgaggtgaatcggctcatggggaagctcctgcagcagccaaacacatatgcagactttgagttcctcgccttctggcagacgcagtacaacaacatgaatgctgtcaacctcttcttcgcctggatcaagnagatattcaagtacatcagcttcaacaaaaccatgacccagctctcctccacgctggcccgctgtgccaaggacatcctgggcttcgccgtcatgttcttcattgttttcttcgcctatgcccaactcggctacctgcttttcgggacccaagtggaaaactttagcactttcatcaagtgcatnnnnnnnnnnnnnnnnnnnnnnnnnnnnnnnnnnnnnnnnnnnnnnnnnnnnnnnnnnnnnnnnnnnnnnnnnnnnnnnnntttcactcagttccggataatcctcggggactttgactacaatgctatcgacaatgccaaccgcatcctgggccctgcctactttgtcacctannnnnnnnnnnnnnnnnnnnnnnnnnnnnnnnnnnnnnnnnnnnnnnnnnnnnnnnnnnnnnnnnnnnnnnnnnnnnnnnnnnnnnnnnnnnnnnnnnnnnnnnnnnnnnnnnnnnnnnnnnnncagggctacaacaagaacctgctaagactgcgtctgaggaaggagagggtatcggatgtgcagaaggtcctgcagggtggggagcaggagatccagttgaaggatttcaccaacaccttaaggga

SEQ ID NO: 21153 - DNA, 2421 bp, Macaca Mulatta
  misc_feature (1)...(2421): n = A,T,C or G
gggataggggatgtggtttattacaaaggatgagtattttaatagcttcttattccttgagctgttctgcaggnnnnnnnnnnnnnnnnnnnnnnnnnnnnnnnnnnnnnnnnnnnnnnnnnnnnnnnnnnnnnnnnnnnnnnnnnnnnnnnnnnnnnnnnnnnnnnnnnnnnnnnnnnnnnnnnnnnnnnnnnnnnnnnnnnnnnnnnnnnnnnnnnnnnnnnnnnnnnnnnnnnnnnnnnnnnnnnnnnnnnnnnnnnnnnnnnnnnnnnnnnnnnnnnnnnnnnnnnnnnnnnnnnnnnnnnnnnnnnnnnnnnnnnnnnnnnnnnnnnnnnnnnnnnnnnnnnnnnnnnnnnnnnnnnnnnnnnnnnnnnnnnnnnnnnnnnnnnnnnnnnnnnnnnnnnnnnnnnnnnnnnnnnnnnnnnnnnnnnnnnnnnnnnnnnnnnnnnnnnnnnnnnnnnnnnnnnnnnnnnnnnnnnnnnnnnnnnnnnnnnnnnnnnnnnnnnnnnnnnnnnnnnnnnnnnnnnnnnnnnnnnnnnnnnnnnnnnnnnnnnnnnnnnnnnnnnnnnnnnnnnnnnnnnnnnnnnnnnnnnnnnnnnnnnnnnnnnnnnntcaggagcctgagaacaagggtgatcattcaaaggtacgaatatacactgctccttgcatgattcaagagcatcaggagaccctgaaacgactgtctgaggtctggcaaaaggtctctgaacaggatgatctcattcaagaacttcgaaataagctggcctgcagtaatgctttggtnnnnnnnnnnnnnnnnnnnnnnnnnnnnnnnnnnnnnnnnnnnnnnnnnnnnnnnnnnnnnnnnnnnnnnnnnnnnnnnnnnnnnnnnnnnnnnnnnnnnnnnnnnnnnnnnnnnnnnnnnnnnnnnnnnnnnnnnnnnnnnnnnnnnnnnnnnnnnnnnnnnnnnnnnnnnnnnnnnnnnnnnnnnnnnnnnnnnnnnnnnnnnnnnnnnnnnnnnnnnnnnnnnnnnnnnnnnnnnnnnnnnnnnnnnnnnnnnnnnnnnnnnnnnnnnnnnnnnnnnnnnnnnnnnnnnnnnnnnnnnnnnnnnnnnnnnnnnnnnnnnnnnnnnnnnnnnnnnnnnnnnnnnnnnnnnnnnnnnnnnnnnnnnnnnnnnnnnnnnnnnnnnnnnnnnnnnnnnnnnnnnnnnnnnnnnnnnnnnnnnnnnnnnnnnnnnnnnnnnnnnnnnnnnnnnnnnnnnnnnnnnnnnnnnnnnnnnnnnnnnnnnnnnnnnnnnnnnnnnnnnnnnnnnnnnnnnnnnnnnnnnnnnnnnnnnnnnnnnnnnnnnnnnnnnnnnnnnnnnnnnnnnnnnnnnnnnnnnnnnnnnnnnnnnnnnnnnnnnnnnnnnnnnnnnnnnnnnnnnnnnnnnnnnnnnnnnnnnnnnnnnnnnnnnnnnnnnnnnnnnnnnnnnnnnnnnnnnnnnnnnnnnnnnnnnnnnnnnnnnnnnnnnnnnnnnnnnnnnnnnnnnnnnnnnnnnnnnnnnnnnnnnnnnnnnnnnnnnnnnnnnnnnnnnnnnnnnnnnnnnnnnnnnnnnnnnnnnnnnnnnnnnnnnnnnnnnnnnnnnnnnnnnnnnnnnnnnnnnnnnnnnnnnnnnnnnnnnnnnnnnnnnnnnnnnnnnnnnnnnnnnnnnnnnnnnnnnnnnnnnnnnnnnnnnnnnnnnnnnnnnnnnnnnnnnnnnnnnnnnnnnnnnnnnnnnnnnnnnnnnnnnnnnnnnnnnnnnnnnnnnnnnnnnnnnnnnnnnnnnnnnnnnnnnnnnnnnnnnnnnnnnnnnnnnnnnnnnnnnnnnnnnnnnnnnnnnnnnnnnaaacgggagcagttgaagaagagcaaagaccgtgagaagctgatggaggaagaacttgaagctctgcggcaggaatttaaaaagaaagacaagacgngttgaaagagaattccagaaagttggaggaagaaaatgagaatctccgagaagagttacagtgttgttctacacaactggaatcctctgtcaacaaatacaacaccagccaacaggtcatccaagacttgaataaagagnnnnnnnnnnnnnnnnnnnnnnnnnnnnnnnnnnnnnnnnnnnnnnnnnnnnnnnnnnnnnnnnnnnnnnnnnnnnnnnnnnnnnnnnnnnnnnnnnnnnnnnnnnnnnnnnnnnnnnnnnnnnnnnnnnnnnnnnnnnnnnnnnnnnnnnnnnnnnnnnngaagctcaatcatgtgacctcggagacaaagagcctgcagcgaagcttgacacagacccaagagaagaaagctcagctggaagaggaaatcattgcttatgaggaaaggatgaaaaagctcaatatggaattaaaaaaactgcggggcttccaccaggagagtgagctggaggtg

SEQ ID NO: 21154 - DNA, 210 bp, Macaca Mulatta
caggtaaagcaaatgaaattgaaggactcgcgcatcaagctgatgagtgagatcctgaatggcatcaaggtgctgaagctgtacgcctgggaacccagcttcctgaagcaggtggagggcatcaggcagggtgagctccagctgctgcgcacggcggcctacctccacgccatatccaccttcacctggatgtgtacccccttcctggtg

SEQ ID NO: 21155 - DNA, 1057 bp, Macaca Mulatta
  misc_feature (1)...(1057): n = A,T,C or G
ctatattgaactccatgcacaaataccagccccggttccacattgtaagagccaatgacatcttgaaactgccttatagtacatttcggacatacttattccccgaaactgaattcatcgctgtgactgcataccagaatgataagngataactcagttaaaaatagacaacaacccttttgcaaaaggtttccgggacactggaaatggccgaagagaaaaaagnagaaaacagctcaccctgcagtccatgagggtgtttgatgaaagacacaaaaaggagaacgggacctctgacgagtcctccagcgaacaagcagctttcaactgcttcgcccaggcttcttctccagccgtctccactgtagggacatcgaacctcaaannnnnnnnnnnnnnnnnnnnnnnnnnnnnnnnnnnnnnnnnnnnnnnnnnnnnnnnnnnnnnnnnnnnnnnnnnnnnnnnnnnnnnnnnnnnnnnnnnnnnnnnnnnnnnnnnnnnnnnnnnnnnnnnnnnnnnnnnnnnnnnnnnnnnnnnnnnnnnnnnnnnnnnnnnnnnnnnnnnnnnnnnnnnnnnnnnnnnnnnnnnnnnnnnnnnnnnnnnnnnnnnnnnnnnnnnnnnnnnnnnnnnnnnnnnnnnnnnnnnnnnnnnnnnnnnnnnnnnnnnnnnnnnnnnnnnnnnnnnnnnnnnnnnnnnnnnnnnnnnnnnnnnnnnnnnnnnnnnnnnnnnnnnnnnnnnnnnnnnnnnnnnnnnnnnnnnnnnnnnnnnnnnnnnnnnnnnnnnnnnnnnnnnnnnnnnnnnnnnnnnnnnnccaacagttcttcaacgggcacccgctcttcctgcaccccagccagtttgccatggggggcgccttctccagcatggcagccgccggcatggggcccctcctggccaccgtgtctggggcctccactggcgtctcgggcctggattccacggccatggcctctgccgccgcggcgcagggactgtccggggcgtccgcggccaccctgcccttccacctccagcagcacgtcctggcctctcaggn

SEQ ID NO: 21156 - DNA, 241 bp, Macaca Mulatta
gtgccctgggcttgctgtacttcatccggcgaggaaagcagtgtctggatttcactgtcactgtccatttctttcacctcctgggctgctggttctacagctcccgtttcccctcggcgctgacctggtggctggtccaagccgtgtgcattgcactcatggctgtcatcggggagtacctgtgcatgcggacggagctcaaggagatacccctcaactcagcccctaaatccaatgtcta

SEQ ID NO: 21157 - DNA, 650 bp, Macaca Mulatta
  misc_feature (1)...(650): n = A,T,C or G
tcggcacgaggcagccttgcatgtattccnttggctgaatgggagagtgccccatgttctgcaagactacttggtattcttgcagggccgacactaaataaaagccaaaccttgggcactgttttttctccctggtgctcagagcatctgtgggaaaggttgctgtctctctcagtacaatccaaatttgtcgtagacttgtgcaatatttactgttgtgggttggagaaaagtggaaagctacactgggaagaaactcccttccttcaatttctcagtgacatggatgaggggtcctcagaagacctcaagtttcccaaaccgaatcacctgaagaaggacagggctagggcatttggccaggatggccaccctcctgctgttgccccttagtgaggaatcttcccccacttcctctgcccccaggttcccctccccacagccagtcccctttcctggatttcttaactgctcaattttgactcaaaggtgctatttaccaaacactctccctacccattcctgccagctctggctccttttcaactctccacattttgtattgccttcccagaacctgcttccagtctttattgctttaaagtcactttgggcccacaagaccaagagctaaattttctggcttgtgg

SEQ ID NO: 21158 - DNA, 628 bp, Macaca Mulatta
  misc_feature (1)...(628): n = A,T,C or G
ggaaaaagcagcagtagaattgttgattagtcttgcagaaggctatagttctcgctgccatccggtttttcagcctaaaaaacaggtncaggtgctgagctgtgaggagagtatcagggtttgggctctgctgcctttccccaaagaactcannnnnnnnnnnncagattagaagataattctgaaacaaatgccagccactctttaattacaaaaatgacggatgagctgtatcaccatatgcctgaggatcattgtgttttaaaggacttggatcatcttcctactgagacgtnnnnnnnnnnnnnnnnnnnnnnnnnnnnnnnnnnnnnnnnnnnnnnnnnnnnnnnnnnnnnnnnnnnnnnnnnnnnnnnnnnnnnnnnnnnnnnnnnnnnnnnnnnnnnnnnnnnnnnnnnnnnnnnnnnnnnnnnnnnnnnnnnnnnnnnnnnnnnnnnnnnnnnnnnnnnnnnnnnnnnnnnnnnnnnnnnnnnnnnnnnnnnnnnnnnnnnntagtatcagactactgtcccctgtgctcagcctgatcctgttactcattacgctggaggtggtcaacattcatgctgtttgtgggaagaatgcgcatgcgtatcatcagtacctaaag

SEQ ID NO: 21159 - DNA, 686 bp, Macaca Mulatta
cagccctccctccccgcagctgggactggaaggagcaggagccccagccggtggggtgctagaaacagctttcagctcacagaggttacagcatgcgctgggcccctgcagctcagctgtctccccagaccaccccctgaccctggggcgccgctgaaggaagcattagtatccacccactgccctccaaaaaacggacctgggctgacgggaagaggctgtcccatgtgggcaaggggtatggggcagaggcttggcctcctggcctgattatctgtgacccactaggtggtccgcgcaaaggagcgcctggacgaggaactcaaaatccaggcccaggaggacagagaaaaagggcagaagccccacacgtgacttcttggctccccccacccaccccgccacctctaatttatagcttggtaataaatgtcttttctgcatttctcgtgtgcatgtgtccggattccagaaggcaggttgcttctcctgccacttggagggctgtgggtgctggggatggggaggcagcagcctttaacagcccagaagggccgggctgggtgaggttggcgggcagccagccagtgggtcccagctgagtcctgtcacgtacaggatgcagccgctcctgcttccacagcacccgagccagcgttaggctccctctcatggcgtccctgccc

SEQ ID NO: 21160 - DNA, 876 bp, Macaca Mulatta
  misc_feature (1)...(876): n = A,T,C or G
cgacacgagcgacgtcctgcagcagatcatggccgtcaccgaccaaagcctggacgaggcgcaggccagnnnnnnnnnnnnnnnnnnnnnnnnnnnnnnnnnnnnnnnnnnnnnnnnnnnnnnnnnnnnnnnnnnnnnnnnnnnnnnnnnnnnnnnnnnnnnnnnnnnnnnnnnnnnnnnnnnnnnnnnnnnnnnnnnnnnnnnnnnnnnnnnnnnnnnnnnnnnnnnnnnnnnnnnnnnnnnnnnnnnnnnnnnnnnnnnnnnnnnnnnnnnnnnnnnnnnnnnnnnnnnnnnnnnnnnnnnnnnnnnnnnnnnnnnnnnnnnnnnnnnnnnnnnnnnnnnnnnnnnnnnnnnnnnnnnnnnnnnnnnnnnnnnnnnnnnnnnnnnnnnnnnnnnnnnnnnnnnnnnnnnnnnnnnnnnnnnnnnnnnnnnnnnnnnnnnnnnnnnnnnnnnnnnnnnnnnnnnnnnnnnnnnnnnnnnnnnnnnnnnnnnnnnnnnnnnnnnnnnnnnnnnnnnnnnnnnnnnnnnnnnnnnnnnnnnnnnnnnnnnnnnnnnnnnnnnnnnnnnnnnnnnnnnnnnnnnnnnnnnnnnnnnnnnnnnnnnnnnnnnnnnnnnnnnnnnnnnnnnnnnnnnnnnnnnnnnnnnnnnnnnnnnnnnnnnnnnnnnnnnnnnnnnnnnnnnnnnnnnnnnnnnnnnnnnnnnnnnnnnnnnnnnncaggtctccaactggtttggcaacaaaagaatccggtataaaaagaacatggggaagtttcaagaagaagctaccatttacatgggtaaaacagctgcagataccaccgaagttggggtcccaggaaaccatgccagctgcctgtcaacacccagctccgg

SEQ ID NO: 21161 - DNA, 929 bp, Macaca Mulatta
aaacatctcaaatacagcaaaggctttggtccgaattcccttctcatgcatcaggaatcccaccaggtgggaaaatccatataaatgtgctgattgtgggaaaagcttcagtcggagtgcacgactcattagacaccggagaatccacactggagagaaaccttataaatgtcttgactgtggaaaaagtttccgtgacagttcaaatttcatcacccataggagaatccacacaggagagaaaccttatcaatgtggtgagtgtgggaaacgcttcaatcagagctcaagccttatcattcaccagagaacccacacaggagaaaagccctatcaatgtgaagagtgtggaaaaagcttcaataacagttctcattttagtgcacatcggaggatacacacaggagagagacctcatgtgtgtactgactgtggaaagagtttcagtaagagttctgacttacgtgcacatcatagaacccacacaggagagaaaccctatgggtgtcatgactgtggcaagtgcttcagtaaaagctctgcccttaataagcaccgagaaatccatgcacgggaaaagcttctgtcacagtcagcacctaagtaagcccctaaggatatataaaggaaagaggctcaataaatgtattgtttagaaagtcttccagtagtgagatccatctcctgttctgtgtccagctagcttaggaaattctctaggatttatgccaccattccttgtttttcctgatctagagtcgaatccccaggacagtctaaagaacgaaaggaagattttagtccctctccttgcctgcatctgaattgatggataacatcttttccctctcagtgcctatggtgttcccttaatataagcagggaggacatggtagcagatcctatgaatttgataagcatccttcttt

SEQ ID NO: 21162 - DNA, 555 bp, Macaca Mulatta
aagaaaccatcatgagagaaagacactctggtggagggactctagctaccatgcacatgtatatatccacagaatatgggaagtgggaatggctacgtacatggctttagtagtctggagagatctactccccttggccaggacatgctgctgctactgctaacagccaattttatagacagagaaagtattttgtgttcaaataaactttaattatcaagtcatttttgctaaacccagtccttctttcttccctaggggtatctagcttcatcaccatcatagaatgtagaaaaagatggaatcacagggtcagagcacggcttctctacctactctaccaaacagtacattttcacttaccctgccaggtttttctcaactccaaatactgctttaggttaagtatattctgctgccaagggaagtgtaggtttgagtctaaacaggctctgaaacagattgtgcaaaaaaacctcaggcctccctccttcctcgggaagttccaactgtggcagaaatgaagatggaacttctcaagtataaacagttttg

SEQ ID NO: 21163 - DNA, 1654 bp, Macaca Mulatta
  misc_feature (1)...(1654): n = A,T,C or G
cacccttggctcaagctgatcctgccagggtaggcactccaccaacagggtgggactgcctcccctctgactgtatagcctcagctacaggctccagcacagatgatgtggagctggccacggagttcccagccacagaggcctggcagtgtgagctagaaggcctggttgaagagaggcctgccccatgcccgtccccgcaagccctatttcccaagctgggctgggatgacgaactgcagaaacccggcgcccagacctacatgcgcttcatgcaggagcacacctgctatgatgccatggcaactagctccaagctggtcatcttcgacaccacgctggannnnnnnnnnnnnnnnnnnnnnnnnnnnnnnnnnnnnnnnnnnnnnnnnnnnnnnnnnnnnnnnnnnnnnnnnnnnnnnnnnnnnnnnnnnnnnnnnnnnnnnnnnnnnnnnnnnnnnnnnnnnnnnnnnnnnnnnnnnnnnnnnnnnnnnnnnnnnnnnnnnnnnnnnnnnnnnnnnnnnnnnnnnnnnnnnnnnnnnnnnnnnnnnnnnnnnnnnnnnnnnnnnnnnnnnnnnnnnnnnnnnnnnnnnnnnnnnnnnnnnnnnnnnnnnnnnnnnnnnnnnnnnnnnnnnnnnnnnnnnnnnnnnnnnnnnnnnnnnnnnnnnnnnnnnnnnnnnnnnnnnnnnnnnnnnnnnnnnnnnnnnnnnnnnnnnnnnnnnnnnnnnnnnnnnnnnnnnnnnnnnnnnnnnnnnnnnnnnnnnnnnnnnnnnnnnnnnnnnnnnnnnnnnnnnnnnnnnnnnnnnnnnnnnnnnnnnnnnnnnnnnnnnnnnnnnnnnnnnnnnnnnnnnnnnnnnnnnnnnnnnnnnnnnnnnnnnnnnnnnnnnnnnnnnnnnnnnnnnnnnnnnnnnnnnnnnnnnnnnnnnnnnnnnnnnnnnnnnnnnnnnnnnnnnnnnnnnnnnnnnnnnnnnnnnnnnnnnnnnnnnnnnnnnnnnnnnnnnnnnnnnnnnnnnnnnnnnnnnnnnnnnnnnnnnnnnnnnnnnnnnnnnnnnnnnnnnnnnnnnnnnnnnnnnnnnnnnnnnnnnnnnnnnnnnnnnnnnnnnnnnnnnnnnnnnnnnnnnnnnnnnnnnnnnnnnnnnnnnnnnnnnnnnnnnnnnnnnnnnnnnnnnnnnnnnnnnnnnnnnnnnnnnnnnnnnnnnnnnnnnnnnnnnnnnnnnnnnnnnnnnnnnnnnnnnnnnnnnnnnnnnnnnnnnnnnnnnnnnnnnnnnnnnnnnnnnnnnnnnnnnnnnnntcagccttcccagattgcccttgccctgcctgtgttcccagaagccctcggacatgcccagtgcaccatggcatgatgaaattaaggagaacagctgagtcaagtctggaggtccctgaaccagaggcactaggattaccccagggccatctgtgctccatgcccactcatccccttgcagcctaactgggtcggacggccccagtgggtttagtcagggcttctggattcctcggtttctgggctacctatggctccagccttcagctcctgggagtcccagctgttgttcccagcaatgtcgccactgccctcctactctccaggctttatcatttcagagctgctgaaatgctgcttttc

SEQ ID NO: 21164 - DNA, 202 bp, Macaca Mulatta
gaagagggagtgggcaggcagagggctgggcagccgctgggctgagagtgacgcagcagacaaagccaccaaccctggcttggtatttttaaactgtgcgtgggtgggaagtgggggcggggactggaagggggcctcttcttgagggaggagctgggaggctggcttcctgtgctccccctgatttggctaccaaaacact

SEQ ID NO: 21165 - DNA, 944 bp, Macaca Mulatta
gggattccagcggcggacagcacccgggccgagatgtctcgctcagtggccttagccgtgctggcgctactctctctttctggcctggaggctatccagcgtactccaaagattcaggtttactcacgccatccaccagagaatggaaagccaaatttcctgaattgctatgtgtctggatttcatccatctgatattgaagttgacttactgaagaatggagagaaaatgggaaaagtggagcattcagacttgtctttcagcaaagactggtctttctatctcttgtactacactgaattcacccccaatgaaaaagatgagtatgcctgccgtgtgaaccatgtgactttgtcaaggcccaggacagttaagtgggatcgagacatgtaagcagcatcatggaggtttgaaaatgccgcatttggattggatgaattccaaattctgccttccttgctattttaataattgataatgccttaatactgtttttatggcaaaaaaactgccagaagctctataacttaatgttttaaattaacgggggcaatgaatactctccctttataaaaattttcttaccatttttgaaagtggccttaattcctcccaccgatttatggaataggctatccctggtgggccaactcttagatcttatttaagggaaagggggctctgggacaaaaaatttataaaaaggttggggggaaagccacagaaaaaaaatttccctcccaatatttccggaaaagattcaataccatttacttgtgcgggcaaaagaatattgcaaaaagcctcttatttcaagatctcctcatttgggcaactaacgggaaaagatttggtgtatatcaacaaaatagatataaatgcgaggcgaaattatataaggtataaaatattgtccaaaaatgtttaacatgtatcaccggggg

SEQ ID NO: 21166 - DNA, 636 bp, Macaca Mulatta
gccagcacgggcagtgcacaggagttggctgccgctgtgatgccggctggaccgggtccaactgcagtgaagagtgtcacttggctggcacgggccgggctgccagaggccttgtgagtgtgagcaccattgtccctgtgaccccaagactgccaactgcagcgtctccggagtaaagcagtgtctccagccatctgaagccaccctgagggcgggagaactctcctttttcaccaggaccacctggctagccctcaccctggcgctggccttcctcctgctgctcagcctcgccgcgaacctgtccttgctcctgtccagagcagaaaggaaccggcgcctgcgtggggactatgcataccacccgctgcaggagatgaacggggagcttctggccgtagagaaggagcagccagggggcgcccacaagcccttcaaggactgaagcctccagctgccccgggtggcacgtcccgaaagcttgttttccccatcgtctggcttctgcaggggaaatttcaaggccactggcgtggaccatctgggtgtcctcagtccctgtggggcagccaagttcctgatagcacttgtgcctcagcccctcacctggccacccgccagggcacctgtgatcct

SEQ ID NO: 21167 - DNA, 192 bp, Macaca Mulatta
caggggcatgtatggcctttcttcttagattaccgagtatatgcagcaggcgggatgggcctggacctacgtccacacagccacctccaacactatgacatgctcaaggacatgtgggtgtcgctagcacccatgcccaccccgagatatgctgccacctccttcctccgaggctccaagatctacgtgctg

SEQ ID NO: 21168 - DNA, 339 bp, Macaca Mulatta
tactaggtattttgaccaacgtgatttagctgatgagccatcttgatgtagctgatctctcagggatagaagatatttctcatgaaggcagcctaactctgaggaaagcagtgccaattcaagtacagattgcaacacatcttcaacactatgtgaagggttcacatcttaacctgtgcaattcagattgatactcagaatataggttgtattgatttgaatatctgaaatatcaatggaaaatcccactcaatttttgataaacagtttgaacagttttctgtaatcaagcagcttgcatagaaattgtatgatgaaattttacataggttcttggtg

SEQ ID NO: 21169 - DNA, 4516 bp, Macaca Mulatta
  misc_feature (1)...(4516): n = A,T,C or G
tcctgaagcacctacagggaaaactggagcaggaggctttcgtgctggtgtcctcggggcagacggaggtgctggagcagttgaaggngccctgcagatggacatcaccagcctgtacaacctcaagttccagccgcccgccctgggcccggaacctgcctcccagacccccgagggcagcccggtacacggctccgggccttccaaggacagctttggggagctgagccgggccaccatccggctgctggaggaactggaccgggaacggtgnnngtgtttgctgctgaatgagattgagaaggaggagaaggagaagctttggtactactctcagctgcagggcctgtccaagcgcctggacgagctgccgcacgtggagacgngcagttctcgatgcagatggacttgatccggcagcaacttgagttcgaggcccagcacatccgctcgctgatggaggagcgcttcggcacctcggacgagatggtgcagcgggcacagnnnnnnnnnnnnnnnnnnnnnnnnnnnnnnnnnnnnnnnnnnnnnnnnnnnnnnnnnnnnnnnnnnnnnnnggccncaggccttgctggcggtgaagtctgtgccggtggacgaggacccggagacagaggtccccacacaccctgaggatggcacccctcaaccgggcaacagcaaggtnnnnnnnnnnnnnnnnnnnnnnnnnnnnnnnnnnnnnnnnnnnnnnnnnnnnnnnnnnnnnnnnnnnnnnnnnnnnnnnnnnnnnnnnnnnnnnnnnnnnnnnnnnnnnnnnnnnnnnnnnnnnnnnnnnnnnnnnnnnnnnnnacggtactgaggccgcggccgggggtcgcgccggggccccaggagcaccgggcgccaaagacgcacgcatgcgcgccaacgcggcgctgcacaacatcgtcttctcgcagccggaccaaggcctggcacgcaaggagatgcgcgtcctgcacgtgctggagcagatccgtgcctactgcgagacctgctgggactggctgcaggcccgagacggcgcgcccgagggaggcggcgccnnnnnnnnnnnnnnnnnnnnnnnnnnnnnnnnnnnnnnnnnnnnnnnnnnnnnnnnnnnnnnnnnnnnnnnnnnnnnnnnnnnnnnnnnnnnnnnnnnnnnnnnnnnnnnnnnnnnnnnnnnnnnnnnnnnnnnnnnnnnnnnnnnnnnnnnnnnnnnnnnnnnnnnnnnnnnnnnnnnnnnnnnnnnnnnnnnnnnnnnnnnnnnnnnnnnnnnnnnnnnnnnnnnnnnnnnnnnnnnnnnnnnnnnnnnnnnnnnnnnnnnnnnnnnnnnnnnnnnnnnnnnnnnnnnnnnnnnnnnnnnnnnnnnnnnnnnnnnnnnnnnnnnnnnnnnnnnnnnnnnnnnnnnnnnnnnnnnnnnnnnnnnnnnnnnnnnnnnnnnnnnnnnnnnnnnnnnnnnnnnnnnnnnnnnnnnnnnnnnnnnnnnnnnnnnnnnnnnnnnnnnnnnnnnnnnnnnnnnnnnnnnnnnnnnnnnnnnnnnnnnnnnnnnnnnnnnnnnnnnnnnnnnnnnnnnnnnnnnnnnnnnnnnnnnnnnnnnnnnnnnnnnnnnnnnnnnnnnnnnnnnnnnnnnnnnnnnnnnnnnnnnnnnnnnnnnnnnnnnnnnnnnnnnnnnnnnnnnnnnnnnnnnnnnnnnnnnnnnnnnnnnnnnnnnnnnnnnnnnnnnnnnnnnnnnnnnnnnnnnnnnnnnnnnnnnnnnnnnnnnnnnnnnnnnnnnnnnnnnnnnnnnnnnnnnnnnnnnnnnnnnnnnnnnnnnnnnnnnnnnnnnnnnnnnnnnnnnnnnnnnnnnnnnnnnnnnnnnnnnnnnnnnnnnnnnnnnnnnnnnnnnnnnnnnnnnnnnnnnnnnnnnnnnnnnnnnnnnnnnnnnnnnnnnnnnnnnnnnnnnnnnnnnnnnnnnnnnnnnnnnnnnnnnnnnnnnnnnnnnnnnnnnnnnnnnnnnnnnnnnnnnnnnnnnnnnnnnnnnnnnnnnnnnnnnnnnnnnnnnnnnnnnnnnnnnnnnnnnnnnnnnnnnnnnnnnnnnnnnnnnnnnnnnnnnnnnnnnnnnnnnnnnnnnnnnnnnnnnnnnnnnnnnnnnnnnnnnnnnnnnnnnnnnnnnnnnnnnnnnnnnnnnnnnnnnnnnnnnnnnnnnnnnnnnnnnnnnnnnnnnnnnnnnnnnnnnnnnnnnnnnnnnnnnnnnnnnnnnnnnnnnnnnnnnnnnnnnnnnnnnnnnnnnnnnnnnnnnnnnnnnnnnnnnnnnnnnnnnnnnnnnnnnnnnnnnnnnnnnnnnnnnnnnnnnnnnnnnnnnnnnnnnnnnnnnnnnnnnnnnnnnnnnnnnnnnnnnnnnnnnnnnnnnnnnnnnnnnnnnnnnnnnnnnnnnnnnnnnnnnnnnnnnnnnnnnnnnnnnnnnnnnnnnnnnnnnnnnnnnnnnnnnnnnnnnnnnnnnnnnnnnnnnnnnnnnnnnnnnnnnnnnnnnnnnnnnnnnnnnnnnnnnnnnnnnnnnnnnnnnnnnnnnnnnnnnnnnnnnnnnnnnnnnnnnnnnnnnnnnnnnnnnnnnnnnnnnnnnnnnnnnnnnnnnnnnnnnnnnnnnnnnnnnnnnnnnnnnnnnnnnnnnnnnnnnnnnnnnnnnnnnnnnnnnnnnnnnnnnnnnnnnnnnnnnnnnnnnnnnnnnnnnnnnnnnnnnnnnnnnnnnnnnnnnnnnnnnnnnnnnnnnnnnnnnnnnnnnnnnnnnnnnnnnnnnnnnnnnnnnnnnnnnnnnnnnnnnnnnnnnnnnnnnnnnnnnnnnnnnnnnnnnnnnnnnnnnnnnnnnnnnnnnnnnnnnnnnnnnnnnnnnnnnnnnnnnnnnnnnnnnnnnnnnnnnnnnnnnnnnnnnnnnnnnnnnnnnnnnnnnnnnnnnnnnnnnnnnnnnnnnnnnnnnnnnnnnnnnnnnnnnnnnnnnnnnnnnnnnnnnnnnnnnnnnnnnnnnnnnnnnnnnnnnnnnnnnnnnnnnnnnnnnnnnnnnnnnnnnnnnnnnnnnnnnnnnnnnnnnnnnnnnnnnnnnnnnnnnnnnnnnnnnnnnnnnnnnnnnnnnnnnnnnnnnnnnnnnnnnnnnnnnnnnnnnnnnnnnnnnnnnnnnnnnnnnnnnnnnnnnnnnnnnnnnnnnnnnnnnnnnnnnnnnnnnnnnnnnnnnnnnnnnnnnnnnnnnnnnnnnnnnnnnnnnnnnnnnnnnnnnnnnnnnnnnnnnnnnnnnnnnnnnnnnnnnnnnnnnnnnnnnnnnnnnnnnnnnnnnnnnnnnnnnnnnnnnnnnnnnnnnnnnnnnnnnnnnnnnnnnnnnnnnnnnnnnnnnnnnnnnnnnnnnnnnnnnnnnnnnnnnnnnnnnnnnnnnnnnnnnnnnnnnnnnnnnnnnnnnnnnnnnnnnnnnnnnnnnnnnnnnnnnnnnnnnnnnnnnnnnnnnnnnnnnnnnnnnnnnnnnnnnnnnnnnnnnnnnnnnnnnnnnnnnnnnnnnnnnnnnnnnnnnnnnnnnnnnnnnnnnnnnnnnnnnnnnnnnnnnnnnnnnnnnnnnnnnnnnnnnnnnnnnnnnnnnnnnnnnnnnnnnnnnnnnnnnnnnnnnnnnnnnnnnnnnnnnnnnnnnnnnnnnnnnnnnnnnnnnnnnnnnnnnnnnnnnnnnnnnnnnnnnnnnnnnnnnnnnnnnnnnnnnnnnnagcactacgtgcagcaggacgtggagctgcggctgctgccctcggcctgcccagagcgcggcgggggcacagggggcgccggcctccactttgcagggcaccggcgacgggaggaggggccagcgcccacgggttctcgcccccgcggtgccgcggaccaggagttggagctgctgcgggagtgcctgggggccgccgtgcctgccaggctgcgcaaggtggcctcggcgctggtgccaggtcgccgcgcgctccccgtgcccgtctacatgttggtgcccgcccctgcccgggcccaggaggacgactcctgcactgactccgcggagggcacgccagtcaacttctccagcgccgcctccctcagcgacgagacactgcagggaccccccagggaccagcccgggggaccagagggcaggcaaagacccaccggccgccccacctctgccaggcaggccgtggggcaccggcacaaggcgggaggcgccggccgcagcgtggagcaggctcggggcaccggcaagaaccgagcagggctggagctgcccctgggccggcccccgagcgcccccgcagacaaggacgactcgaagcccggccggacccgtggggacggggcacttcagtcgctgtgcctcacaacgcccaccgaggaggccgtgtactgcttctatggcaacgactcggacgaggagcccccggcagctgcgcccacgcccacccaccggcgcacatcggccatcccccgcgctcttacccgcgagcgcctgcagggccggaaggaggcccctgccccg

SEQ ID NO: 21170 - DNA, 276 bp, Macaca Mulatta
gttcctgacataacctttaataaagtgctttgggtgccattccaagcaagagagtatctgtgccctttatagctaattgttctaaaaggagtttctaaaaacacttaagaagtccagtgatgttcagcaatttacccaaggtcttggcatgccaggggactgatcctccctgtgttgttaacttcttaaaaatggcctggcgagctgaggctcctcctatgcaggcggctggccagctgccaaggactcacacaagagggcagaccaggcttcatg

SEQ ID NO: 21171 - DNA, 994 bp, Macaca Mulatta
  misc_feature (1)...(994): n = A,T,C or G
ctccgctcttttattttacacttccctctctatctccctgggaccgggattctttcaggatttcttgctttgacaagcgctagtcctactatttctcctgtggtctctgcacctacacagttctcttttaataagcggcaggtgcacttctcgttctctctctcaaggcactacttgcggttncccaaagctttctactcattcttttcaagactaacccacccctgtgtattttcgataggttttttttctcaactgccgccattattctctctanccggggaaatcttaggttcttaggtctgtgatgctccccgagccaacctacaggcccggtttcggtccttnngaaaatggtctttctcggtatcggccactttcccttttcacaattttttgcgctccaatatttctggtccttcgatccatctctccccagagggtttttccaatcattcctagtctaatggactgggcacatgatttttgggctcaccacaggtgccagggtttcttttcggctttttcttctcgcatctccactagttgtggcacaggacgtttctttnctccttacgtcttccttagccctttttccactttttcttccttcattcatccagatcccaaagagatccaatattcatcatcatcctttactatcggtagcttccacttcccgttagcgtcttccacatcagcaggacaatacttgcccaaagtttccttcactcctcgcaggctgccctcttccttttcgtaggacctgatgtgattataccaacgtagggcatgacacaagtcagcaggcggtggcccggacacggcttcaaatattgccacatctgcttgtgatggcacatacccctcgatgtagctcttgtccgccaggtaatcgttgagcacctggaggccggcggggcttttcaggtctccgaaacccatggtgtcggctgtatccgagagctgggaaacagcagaaagagagcgcccc

SEQ ID NO: 21172 - DNA, 1524 bp, Macaca Mulatta
  misc_feature (1)...(1524): n = A,T,C or G
aatatgacctggtctctgcctatgaggttgaccacaggggcgattacgtgtcccacgaaatcatgcaccatcaacggcggcgaagagcagtgaccatgtcaggggttgagtctcttcaccttcggctgaaaggctccaggcatgacttccacatggatttgaggacttccagcagcctggtggctcccggctttattgtgcagacgttgggaaagacaggcactaagtctgtgcnnnnnnnnnnnnnnnnnnnnnnnnnnnnnnnnnnnnnnnnnnnnnnnnnnnnnnnnnnnnnnnnnnnnnnnnnnnnnnnnnnnnnnnnnnnnnnnnnnnnnnnnnnnnnnnnnnnnnnnnnnnnnnnnnnnnnnnnnnnnnnnnnnnnnnnnnnnnnnnnnnnnnnnnnnnnnnnnnnnnnnnnnnnnnnnnnnnnnnnnnnnnnnnnnnnnnnnnnnnnnnnnnnnnnnnnnnnnnnnnnnnnnnnnnnnnnnnnnnnnnnnnnnnnnnnnnnnnnnnnnnnnnnnnnnnnnnnnnnnnnnnnnnnnnnnnnnnnnnnnnnnnnnnnnnnnnnnnnnnnnnnnnnnnnnnnnnnnnnnnnnnnnnnnnnnnnnnnnnnnnnnnnnnnnnnnnnnnnnnnnnnnnnnnnnnnnnnnnnnnnnnnnnnnnnnnnnnnnnnnnnnnnnnnnnnnnnnnnnnnnnnnnnnnnnnnnnnnnnnnnnnnnnnnnnnnnnnnnnnnnnnnnnnnnnnnnnnnnnnnnnnnnnnnnnnnnnnnnnnnnnnnnnnnnnnnnnnnnnnnnnnnnnnnnnnnnnnnnnnnnnnnnnnnnnnnnnnnnnnnnnnnnnnnnnnnnnnnnnnnnnnnnnnnnnnnnnnnnnnnnnnnnnnnnnnnnnnnnnnnnnnnnnnnnnnnnnnnnnnnnnnnnnnnnnnnnnnnnnnnnnnnnnnnnnnnnnnnnnnnnnnnnnnnnnnnnnnnnnnnnnnnnnnnnnnnnnnnnnnnnnnnnnnnnnnnnnnnnnnnnnnnnnnnnnnnnnnnnnnnnnnnnnnnnnnnnnnnnnnnnnnnnnnnnnnnnnnnnnnnnnnnnnnnnnnnnnnnnnnnnnnnnnnnnnnnnnnnnnnnnnnnnnnnnnnnnnnnnnnnnnnnnnnnnnnnnnnnnnnnnnnnnnnnnnnnnnnnnnnnnnnnnnnnnnnnnnnnnnnnnnnnnnnnnnnnnnnnnnnnnnnnnnnnnnnnnnnnnnnnnnnnnnnnnnnnnnnnnnnnnnnnnnnnnnnnnnnnnnnngcactgctcaagctatctgccttgctgatcaaccaaagcctgtgaaggaatataagtatcctgagaaattgccaggagaattatatgatgcaaacacacagtgcaagtggcagttcggagagaaagccaagctctgcatgctggactttaaaaaggcaagnnnnnnnnnnnnnnnnnnnnnnnnnntattggaaggaaatgtgagactaaatttatgccagcagcagaaggcactatttgtgggcatgac

SEQ ID NO: 21173 - DNA, 741 bp, Macaca Mulatta
  misc_feature (1)...(741): n = A,T,C or G
ccagctgcctgtttccttccaggcccagtatgaggccagcaagggacatttgggatgcccgggccgcggagtaagctcgggcactggttgcagagcaagggcaaggacaggctctgtgagtgtccagtggcagccagaacaggtgacacagagcaggggcttcagccccagagacgcgctcaggaggccagaagcccacacccaaggtgttcnnnnnnnnnnncctgaagtgtccgggagggtccatcagctgcctccagcatccagtggctgctggtgtacagcctcatcaccacgtccctacccctcccctgtgtgtctgtgaccctgtgtgccatctctgtgtgtnnnnnnnnnnnnnnnnnnnnnnnnnnnnnnnnnagacagggccttgctctgtcccccaggcaggagtacagtgccatgatcatagctcactgcagcctcgaacccctggtctcaagcgatcttcctgcctcagcctcctgggtatctggggttgcaggtgtgcgctgccatacccagtctctttttggtagggccaccactcactgggtttaaggtcccccagtccactgtgatctcattttaactaattaaatcgtcaaaacccgtgtttccaaacaaggtcacctgtctgggtggacatgaatttgaggggcccctccctagtctgctgcagggagccgtgctgcaccccagccttcacaggacatggtctctagcttcttcatcctgcca

SEQ ID NO: 21174 - DNA, 142 bp, Macaca Mulatta
agcactgtggaaaccttcaacagggctctgattctgagatggatccttcttgttgcagtttggatttgctcatgaaaaagataaaaggaaaagacctacagctcttagaaatgcacaaagagaatgaagtattgaaaatcaa

SEQ ID NO: 21175 - DNA, 14574 bp, Macaca Mulatta
  misc_feature (1)...(14574): n = A,T,C or G
tggctcatgcagcctcacaattaaagaaaaacagggatttggaaatcaatgctgaagaagagcctgagaaaaaaaggaaacaccgcaaacggtcccgggatcggaagaaaaagnnnnnnnnnnnnnnnnnnnnnnnnnnnnnnnnnnnnnnnnnnnnnnnnnnnnnnnnnnnnnnnnnnnnnnnnnnnnnnnnnnnnnnnnnnnnnnnnnnnnnnnnnnnnnnnnnnnnnnnnnnnnnnnnnnnnnnnnnnnnnnnnnnnnnnnnnnnnnnnnnnnnnnnnnnnnnnnnnnnnnnnnnnnnnnnnnnnnnnnnnnnnnnnnnnnnnnnnnnnnnnnnnnnnnnnnnnnnnnnnnnnnnnnnnnnnnnnnnnnnnnnnnnnnnnnnnnnnnnnnnnnnnnnnnnnnnnnnnnnnnnnnnnnnnnnnnnnnnnnnnnnnnnnnnnnnnnnnnnnnnnnnnnnnnnnnnnnnnnnnnnnnnnnnnnnnnnnnnnnnnnnnnnnnnnnnnnnnnnnnnnnnnnnnnnnnnnnnnnnnnnnnnnnnnnnnnnnnnnnnnnnnnnnnnnnnnnnnnnnnnnnnnnnnnnnnnnnnnnnnnnnnnnnnnnnnnnnnnnnnnnnnnnnnnnnnnnnnnnnnnnnnnnnnnnnnnnnnnnnnnnnnnnnnnnnnnnnnnnnnnnnnnnnnnnnnnnnnnnnnnnnnnnnnnnnnnnnnnnnnnnnnnnnnnnnnnnnnnnnnnnnnnnnnnnnnnnnnnnnnnnnnnnnnnnnnnnnnnnnnnnnnnnnnnnnnnnnnnnnnnnnnnnnnnnnnnnnnnnnnnnnnnnnnnnnnnnnnnnnnnnnnnnnnnnnnnnnnnnnnnnnnnnnnnnnnnnnnnnnnnnnnnnnnnnnnnnnnnnnnnnnnnnnnnnnnnnnnnnnnnnnnnnnnnnnnnnnnnnnnnnnnnnnnnnnnnnnnnnnnnnnnnnnnnnnnnnnnnnnnnnnnnnnnnnnnnnnnnnnnnnnnnnnnnnnnnnnnnnnnnnnnnnnnnnnnnnnnnnnnnnnnnnnnnnnnnnnnnnnnnnnnnnnnnnnnnnnnnnnnnnnnnnnnnnnnnnnnnnnnnnnnnnnnnnnnnnnnnnnnnnnnnnnnnnnnnnnnnnnnnnnnnnnnnnnnnnnnnnnnnnnnnnnnnnnnnnnnnnnnnnnnnnnnnnnnnnnnnnnnnnnnnnnnnnnnnnnnnnnnnnnnnnnnnnnnnnnnnnnnnnnnnnnnnnnnnnnnnnnnnnnnnnnnnnnnnnnnnnnnnnnnnnnnnnnnnnnnnnnnnnnnnnnnnnnnnnnnnnnnnnnnnnnnnnnnnnnnnnnnnnnnnnnnnnnnnnnnnnnnnnnnnnnnnnnnnnnnnnnnnnnnnnnnnnnnnnnnnnnnnnnnnnnnnnnnnnnnnnnnnnnnnnnnnnnnnnnnnnnnnnnnnnnnnnnnnnnnnnnnnnnnnnnnnnnnnnnnnnnnnnnnnnnnnnnnnnnnnnnnnnnnnnnnnnnnnnnnnnnnnnnnnnnnnnnnnnnnnnnnnnnnnnnnnnnnnnnnnnnnnnnnnnnnnnnnnnnnnnnnnnnnnnnnnnnnnnnnnnnnnnnnnnnnnnnnnnnnnnnnnnnnnnnnnnnnnnnnnnnnnnnnnnnnnnnnnnnnnnnnnnnnnnnnnnnnnnnnnnnnnnnnnnnnnnnnnnnnnnnnnnnnnnnnnnnnnnnnnnnnnnnnnnnnnnnnnnnnnnnnnnnnnnnnnnnnnnnnnnnnnnnnnnnnnnnnnnnnnnnnnnnnnnnnnnnnnnnnnnnnnnnnnnnnnnnnnnnnnnnnnnnnnnnnnnnnnnnnnnnnnnnnnnnnnnnnnnnnnnnnnnnnnnnnnnnnnnnnnnnnnnnnnnnnnnnnnnnnnnnnnnnnnnnnnnnnnnnnnnnnnnnnnnnnnnnnnnnnnnnnnnnnnnnnnnnnnnnnnnnnnnnnnnnnnnnnnnnnnnnnnnnnnnnnnnnnnnnnnnnnnnnnnnnnnnnnnnnnnnnnnnnnnnnnnnnnnnnnnnnnnnnnnnnnnnnnnnnnnnnnnnnnnnnnnnnnnnnnnnnnnnnnnnnnngagtggcctgaccccactccatttggctgctcaagaagatcgagtgaatgtggcagaagtcctcgtaaaccaaggggctcatgtggacgctcagacaaagnnnnnnnnnnnnnnnnnnnnnnnnnnnnnnnnnnnnnnnnnnnnnnnnnnnnnnnnnnnnnnnnnnnnnnnnnnnnnnnnnnnnnnnnnnnnnnnnnnnnnnnnnnnnnnnnnnnnnnnnnnnnnnnnnnnnnnnnnnnnnnnnnnnnnnnnnnnnnnnnnnnnnnnnnnnnnnnnnnnnnnnnnnnnnnnnnnnnnnnnnnnnnnnnnnnnnnnnnnnnnnnnnnnnnnnnnnnnnnnnnnnnnnnnnnnnnnnnnnnnnnnnnnnnnnnnnnnnnnnnnnnnnnnnnnnnnnnnnnnnnnnnnnnnnnnnnnnnnnnnnnnnnnnnnnnnnnnnnnnnnnnnnnnnnnnnnnnnnnnnnnnnnnnnnnnnnnnnnnnnnnnnnnnnnnnnnnnnnnnnnnnnnnnnnnnnnnnnnnnnnnnnnnnnnnnnnnnnnnnnnnnnnnnnnnnnnnnnnnnnnnnnnnnnnnnnnnnnnnnnnnnnnnnnnnnnnnnnnnnnnnnnnnnnnnnnnnnnnnnnnnnnnnnnnnnnnnnnnnnnnnnnnnnnnnnnnnnnnnnnnnnnnnnnnnnnnnnnnnnnnnnnnnnnnnnnnnnnnnnnnnnnnnnnnnnnnnnnnnnnnnnnnnnnnnnnnnnnnnnnnnnnnnnnnnnnnnnnnnnnnnnnnnnnnnnnnnnnnnnnnnnnnnnnnnnnnnnnnnnnnnnnnnnnnnnnnnnnnnnnnnnnnnnnnnnnnnnnnnnnnnnnnnnnnnnnnnnnnnnnnnnnnnnnnnnnnnnnnnnnnnnnnnnnnnnnnnnnnnnnnnnnnnnnnnnnnnnnnnnnnnnnnnnnnnnnnnnnnnnnnnnnnnnnnnnnnnnnnnnnnnnnnnnnnnnnnnnnnnnnnnnnnnnnnnnnnnnnnnnnnnnnnnnnnnnnnnnnnnnnnnnnnnnnnnnnnnnnnnnnnnnnnnnnnnnnnnnnnnnnnnnnnnnnnnnnnnnnnnnnnnnnnnnnnnnnnnnnnnnnnnnnnnnnnnnnnnnnnnnnnnnnnnnnnnnnnnnnnnnnnnnnnnnnnnnnnnnnnnnnnnnnnnnnnnnnnnnnnnnnnnnnnnnnnnnnnnnnnnnnnnnnnnnnnnnnnnnnnnnnnnnnnnnnnnnnnnnnnnnnnnnnnnnnnnnnnnnnnnnnnnnnnnnnnnnnnnnnnnnnnnnnnnnnnnnnnnnnnnnnnnnnnnnnnnnnnnnnnnnnnnnnnnnnnnnnnnnnnnnnnnnnnnnnnnnnnnnnnnnnnnnnnnnnnnnnnnnnnnnnnnnnnnnnnnnnnnnnnnnnnnnnnnnnnnnnnnnnnnnnnnnnnnnnnnnnnnnnnnnnnnnnnnnnnnnnnnnnnnnnnnnnnnnnnnnnnnnnnnnnnnnnnnnnnnnnnnnnnnnnnnnnnnnnnnnnnnnnnnnnnnnnnnnnnnnnnnnnnnnnnnnnnnnnnnnnnnnnnnnnnnnnnnnnnnnnnnnnnnnnnnnnnnnnnnnnnnnnnnnnnnnnnnnnnnnnnnnnnnnnnnnnnnnnnnnnnnnnnnnnnnnnnnnnnnnnnnnnnnnnnnnnnnnnnnnnnnnnnnnnnnnnnnnnnnnnnnnnnnnnnnnnnnnnnnnnnnnnnnnnnnnnnnnnnnnnnnnnnnnnnnnnnnnnnnnnnnnnnnnnnnnnnnnnnnnnnnnnnnnnnnnnnnnnnnnnnnnnnnnnnnnnnnnnnnnnnnnnnnnnnnnnnnnnnnnnnnnnnnnnnnnnnnnnnnnnnnnnnnnnnnnnnnnnnnnnnnnnnnnnnnnnnnnnnnnnnnnnnnnnnnnnnnnnnnnnnnnnnnnnnnnnnnnnnnnnnnnnnnnnnnnnnnnnnnnnnnnnnnnnnnnnnnnnnnnnnnnnnnnnnnnnnnnnnnnnnnnnnnnnnnnnnnnnnnnnnnnnnnnnnnnnnnnnnnnnnnnnnnnnnnnnnnnnnnnnnnnnnnnnnnnnnnnnnnnnnnnnnnnnnnnnnnnnnnnnnnnnnnnnnnnnnnnnnnnnnnnnnnnnnnnnnnnnnnnnnnnnnnnnnnnnnnnnnnnnnnnnnnnnnnnnnnnnnnnnnnnnnnnnnnnnnnnnnnnnnnnnnnnnnnnnnnnnnnnnnnnnnnnnnnnnnnnnnnnnnnnnnnnnnnnnnnnnnnnnnnnnnnnnnnnnnnnnnnnnnnnnnnnnnnnnnnnnnnnnnnnnnnnnnnnnnnnnnnnnnnnnnnnnnnnnnnnnnnnnnnnnnnnnnnnnnnnnnnnnnnnnnnnnnnnnnnnnnnnnnnnnnnnnnnnnnnnnnnnnnnnnnnnnnnnnnnnnnnnnnnnnnnnnnnnnnnnnnnnnnnnnnnnnnnnnnnnnnnnnnnnnnnnnnnnnnnnnnnnnnnnnnnnnnnnnnnnnnnnnnnnnnnnnnnnnnnnnnnnnnnnnnnnnnnnnnnnnnnnnnnnnnnnnnnnnnnnnnnnnnnnnnnnnnnnnnnnnnnnnnnnnnnnnnnnnnnnnnnnnnnnnnnnnnnnnnnnnnnnnnnnnnnnnnnnnnnnnnnnnnnnnnnnnnnnnnnnnnnnnnnnnnnnnnnnnnnnnnnnnnnnnnnnnnnnnnnnnnnnnnnnnnnnnnnnnnnnnnnnnnnnnnnnnnnnnnnnnnnnnnnnnnnnnnnnnnnnnnnnnnnnnnnnnnnnnnnnnnnnnnnnnnnnnnnnnnnnnnnnnnnnnnnnnnnnnnnnnnnnnnnnnnnnnnnnnnnnnnnnnnnnnnnnnnnnnnnnnnnnnnnnnnnnnnnnnnnnnnnnnnnnnnnnnnnnnnnnnnnnnnnnnnnnnnnnnnnnnnnnnnnnnnnnnnnnnnnnnnnnnnnnnnnnnnnnnnnnnnnnnnnnnnnnnnnnnnnnnnnnnnnnnnnnnnnnnnnnnnnnnnnnnnnnnnnnnnnnnnnnnnnnnnnnnnnnnnnnnnnnnnnnnnnnnnnnnnnnnnnnnnnnnnnnnnnnnnnnnnnnnnnnnnnnnnnnnnnnnnnnnnnnnnnnnnnnnnnnnnnnnnnnnnnnnnnnnnnnnnnnnnnnnnnnnnnnnnnnnnnnnnnnnnnnnnnnnnnnnnnnnnnnnnnnnnnnnnnnnnnnnnnnnnnnnnnnnnnnnnnnnnnnnnnnnnnnnnnnnnnnnnnnnnnnnnnnnnnnnnnnnnnnnnnnnnnnnnnnnnnnnnnnnnnnnnnnnnnnnnnnnnnnnnnnnnnnnnnnnnnnnnnnnnnnnnnnnnnnnnnnnnnnnnnnnnnnnnnnnnnnnnnnnnnnnnnnnnnnnnnnnnnnnnnnnnnnnnnnnnnnnnnnnnnnnnnnnnnnnnnnnnnnnnnnnnnnnnnnnnnnnnnnnnnnnnnnnnnnnnnnnnnnnnnnnnnnnnnnnnnnnnnnnnnnnnnnnnnnnnnnnnnnnnnnnnnnnnnnnnnnnnnnnnnnnnnnnnnnnnnnnnnnnnnnnnnnnnnnnnnnnnnnnnnnnnnnnnnnnnnnnnnnnnnnnnnnnnnnnnnnnnnnnnnnnnnnnnnnnnnnnnnnnnnnnnnnnnnnnnnnnnnnnnnnnnnnnnnnnnnnnnnnnnnnnnnnnnnnnnnnnnnnnnnnnnnnnnnnnnnnnnnnnnnnnnnnnnnnnnnnnnnnnnnnnnnnnnnnnnnnnnnnnnnnnnnnnnnnnnnnnnnnnnnnnnnnnnnnnnnnnnnnnnnnnnnnnnnnnnnnnnnnnnnnnnnnnnnnnnnnnnnnnnnnnnnnnnnnnnnnnnnnnnnnnnnnnnnnnnnnnnnnnnnnnnnnnnnnnnnnnnnnnnnnnnnnnnnnnnnnnnnnnnnnnnnnnnnnnnnnnnnnnnnnnnnnnnnnnnnnnnnnnnnnnnnnnnnnnnnnnnnnnnnnnnnnnnnnnnnnnnnnnnnnnnnnnnnnnnnnnnnnnnnnnnnnnnnnnnnnnnnnnnnnnnnnnnnnnnnnnnnnnnnnnnnnnnnnnnnnnnnnnnnnnnnnnnnnnnnnnnnnnnnnnnnnnnnnnnnnnnnnnnnnnnnnnnnnnnnnnnnnnnnnnnnnnnnnnnnnnnnnnnnnnnnnnnnnnnnnnnnnnnnnnnnnnnnnnnnnnnnnnnnnnnnnnnnnnnnnnnnnnnnnnnnnnnnnnnnnnnnnnnnnnnnnnnnnnnnnnnnnnnnnnnnnnnnnnnnnnnnnnnnnnnnnnnnnnnnnnnnnnnnnnnnnnnnnnnnnnnnnnnnnnnnnnnnnnnnnnnnnnnnnnnnnnnnnnnnnnnnnnnnnnnnnnnnnnnnnnnnnnnnnnnnnnnnnnnnnnnnnnnnnnnnnnnnnnnnnnnnnnnnnnnnnnnnnnnnnnnnnnnnnnnnnnnnnnnnnnnnnnnnnnnnnnnnnnnnnnnnnnnnnnnnnnnnnnnnnnnnnnnnnnnnnnnnnnnnnnnnnnnnnnnnnnnnnnnnnnnnnnnnnnnnnnnnnnnnnnnnnnnnnnnnnnnnnnnnnnnnnnnnnnnnnnnnnnnnnnnnnnnnnnnnnnnnnnnnnnnnnnnnnnnnnnnnnnnnnnnnnnnnnnnnnnnnnnnnnnnnnnnnnnnnnnnnnnnnnnnnnnnnnnnnnnnnnnnnnnnnnnnnnnnnnnnnnnnnnnnnnnnnnnnnnnnnnnnnnnnnnnnnnnnnnnnnnnnnnnnnnnnnnnnnnnnnnnnnnnnnnnnnnnnnnnnnnnnnnnnnnnnnnnnnnnnnnnnnnnnnnnnnnnnnnnnnnnnnnnnnnnnnnnnnnnnnnnnnnnnnnnnnnnnnnnnnnnnnnnnnnnnnnnnnnnnnnnnnnnnnnnnnnnnnnnnnnnnnnnnnnnnnnnnnnnnnnnnnnnnnnnnnnnnnnnnnnnnnnnnnnnnnnnnnnnnnnnnnnnnnnnnnnnnnnnnnnnnnnnnnnnnnnnnnnnnnnnnnnnnnnnnnnnnnnnnnnnnnnnnnnnnnnnnnnnnnnnnnnnnnnnnnnnnnnnnnnnnnnnnnnnnnnnnnnnnnnnnnnnnnnnnnnnnnnnnnnnnnnnnnnnnnnnnnnnnnnnnnnnnnnnnnnnnnnnnnnnnnnnnnnnnnnnnnnnnnnnnnnnnnnnnnnnnnnnnnnnnnnnnnnnnnnnnnnnnnnnnnnnnnnnnnnnnnnnnnnnnnnnnnnnnnnnnnnnnnnnnnnnnnnnnnnnnnnnnnnnnnnnnnnnnnnnnnnnnnnnnnnnnnnnnnnnnnnnnnnnnnnnnnnnnnnnnnnnnnnnnnnnnnnnnnnnnnnnnnnnnnnnnnnnnnnnnnnnnnnnnnnnnnnnnnnnnnnnnnnnnnnnnnnnnnnnnnnnnnnnnnnnnnnnnnnnnnnnnnnnnnnnnnnnnnnnnnnnnnnnnnnnnnnnnnnnnnnnnnnnnnnnnnnnnnnnnnnnnnnnnnnnnnnnnnnnnnnnnnnnnnnnnnnnnnnnnnnnnnnnnnnnnnnnnnnnnnnnnnnnnnnnnnnnnnnnnnnnnnnnnnnnnnnnnnnnnnnnnnnnnnnnnnnnnnnnnnnnnnnnnnnnnnnnnnnnnnnnnnnnnnnnnnnnnnnnnnnnnnnnnnnnnnnnnnnnnnnnnnnnnnnnnnnnnnnnnnnnnnnnnnnnnnnnnnnnnnnnnnnnnnnnnnnnnnnnnnnnnnnnnnnnnnnnnnnnnnnnnnnnnnnnnnnnnnnnnnnnnnnnnnnnnnnnnnnnnnnnnnnnnnnnnnnnnnnnnnnnnnnnnnnnnnnnnnnnnnnnnnnnnnnnnnnnnnnnnnnnnnnnnnnnnnnnnnnnnnnnnnnnnnnnnnnnnnnnnnnnnnnnnnnnnnnnnnnnnnnnnnnnnnnnnnnnnnnnnnnnnnnnnnnnnnnnnnnnnnnnnnnnnnnnnnnnnnnnnnnnnnnnnnnnnnnnnnnnnnnnnnnnnnnnnnnnnnnnnnnnnnnnnnnnnnnnnnnnnnnnnnnnnnnnnnnnnnnnnnnnnnnnnnnnnnnnnnnnnnnnnnnnnnnnnnnnnnnnnnnnnnnnnnnnnnnnnnnnnnnnnnnnnnnnnnnnnnnnnnnnnnnnnnnnnnnnnnnnnnnnnnnnnnnnnnnnnnnnnnnnnnnnnnnnnnnnnnnnnnnnnnnnnnnnnnnnnnnnnnnnnnnnnnnnnnnnnnnnnnnnnnnnnnnnnnnnnnnnnnnnnnnnnnnnnnnnnnnnnnnnnnnnnnnnnnnnnnnnnnnnnnnnnnnnnnnnnnnnnnnnnnnnnnnnnnnnnnnnnnnnnnnnnnnnnnnnnnnnnnnnnnnnnnnnnnnnnnnnnnnnnnnnnnnnnnnnnnnnnnnnnnnnnnnnnnnnnnnnnnnnnnnnnnnnnnnnnnnnnnnnnnnnnnnnnnnnnnnnnnnnnnnnnnnnnnnnnnnnnnnnnnnnnnnnnnnnnnnnnnnnnnnnnnnnnnnnnnnnnnnnnnnnnnnnnnnnnnnnnnnnnnnnnnnnnnnnnnnnnnnnnnnnnnnnnnnnnnnnnnnnnnnnnnnnnnnnnnnnnnnnnnnnnnnnnnnnnnnnnnnnnnnnnnnnnnnnnnnnnnnnnnnnnnnnnnnnnnnnnnnnnnnnnnnnnnnnnnnnnnnnnnnnnnnnnnnnnnnnnnnnnnnnnnnnnnnnnnnnnnnnnnnnnnnnnnnnnnnnnnnnnnnnnnnnnnnnnnnnnnnnnnnnnnnnnnnnnnnnnnnnnnnnnnnnnnnnnnnnnnnnnnnnnnnnnnnnnnnnnnnnnnnnnnnnnnnnnnnnnnnnnnnnnnnnnnnnnnnnnnnnnnnnnnnnnnnnnnnnnnnnnnnnnnnnnnnnnnnnnnnnnnnnnnnnnnnnnnnnnnnnnnnnnnnnnnnnnnnnnnnnnnnnnnnnnnnnnnnnnnnnnnnnnnnnnnnnnnnnnnnnnnnnnnnnnnnnnnnnnnnnnnnnnnnnnnnnnnnnnnnnnnnnnnnnnnnnnnnnnnnnnnnnnnnnnnnnnnnnnnnnnnnnnnnnnnnnnnnnnnnnnnnnnnnnnnnnnnnnnnnnnnnnnnnnnnnnnnnnnnnnnnnnnnnnnnnnnnnnnnnnnnnnnnnnnnnnnnnnnnnnnnnnnnnnnnnnnnnnnnnnnnnnnnnnnnnnnnnnnnnnnnnnnnnnnnnnnnnnnnnnnnnnnnnnnnnnnnnnnnnnnnnnnnnnnnnnnnnnnnnnnnnnnnnnnnnnnnnnnnnnnnnnnnnnnnnnnnnnnnnnnnnnnnnnnnnnnnnnnnnnnnnnnnnnnnnnnnnnnnnnnnnnnnnnnnnnnnnnnnnnnnnnnnnnnnnnnnnnnnnnnnnnnnnnnnnnnnnnnnnnnnnnnnnnnnnnnnnnnnnnnnnnnnnnnnnnnnnnnnnnnnnnnnnnnnnnnnnnnnnnnnnnnnnnnnnnnnnnnnnnnnnnnnnnnnnnnnnnnnnnnnnnnnnnnnnnnnnnnnnnnnnnnnnnnnnnnnnnnnnnnnnnnnnnnnnnnnnnnnnnnnnnnnnnnnnnnnnnnnnnnnnnnnnnnnnnnnnnnnnnnnnnnnnnnnnnnnnnnnnnnnnnnnnnnnnnnnnnnnnnnnnnnnnnnnnnnnnnnnnnnnnnnnnnnnnnnnnnnnnnnnnnnnnnnnnnnnnnnnnnnnnnnnnnnnnnnnnnnnnnnnnnnnnnnnnnnnnnnnnnnnnnnnnnnnnnnnnnnnnnnnnnnnnnnnnnnnnnnnnnnnnnnnnnnnnnnnnnnnnnnnnnnnnnnnnnnnnnnnnnnnnnnnnnnnnnnnnnnnnnnnnnnnnnnnnnnnnnnnnnnnnnnnnnnnnnnnnnnnnnnnnnnnnnnnnnnnnnnnnnnnnnnnnnnnnnnnnnnnnnnnnnnnnnnnnnnnnnnnnnnnnnnnnnnnnnnnnnnnnnnnnnnnnnnnnnnnnnnnnnnnnnnnnnnnnnnnnnnnnnnnnnnnnnnnnnnnnnnnnnnnnnnnnnnnnnnnnnnnnnnnnnnnnnnnnnnnnnnnnnnnnnnnnnnnnnnnnnnnnnnnnnnnnnnnnnnnnnnnnnnnnnnnnnnnnnnnnnnnnnnnnnnnnnnnnnnnnnnnnnnnnnnnnnnnnnnnnnnnnnnnnnnnnnnnnnnnnnnnnnnnnnnnnnnnnnnnnnnnnnnnnnnnnnnnnnnnnnnnnnnnnnnnnnnnnnnnnnnnnnnnnnnnnnnnnnnnnnnnnnnnnnnnnnnnnnnnnnnnnnnnnnnnnnnnnnnnnnnnnnnnnnnnnnnnnnnnnnnnnnnnnnnnnnnnnnnnnnnnnnnnnnnnnnnnnnnnnnnnnnnnnnnnnnnnnnnnnnnnnnnnnnnnnnnnnnnnnnnnnnnnnnnnnnnnnnnnnnnnnnnnnnnnnnnnnnnnnnnnnnnnnnnnnnnnnnnnnnnnnnnnnnnnnnnnnnnnnnnnnnnnnnnnnnnnnnnnnnnnnnnnnnnnnnnnnnnnnnnnnnnnnnnnnnnnnnnnnnnnnnnnnnnnnnnnnnnnnnnnnnnnnnnnnnnnnnnnnnnnnnnnnnnnnnnnnnnnnnnnnnnnnnnnnnnnnnnnnnnnnnnnnnnnnnnnnnnnnnnnnnnnnnnnnnnnnnnnnnnnnnnnnnnnnnnnnnnnnnnnnnnnnnnnnnnnnnnnnnnnnnnnnnnnnnnnnnnnnnnnnnnnnnnnnnnnnnnnnnnnnnnnnnnnnnnnnnnnnnnnnnnnnnnnnnnnnnnnnnnnnnnnnnnnnnnnnnnnnnnnnnnnnnnnnnnnnnnnnnnnnnnnnnnnnnnnnnnnnnnnnnnnnnnnnnnnnnnnnnnnnnnnnnnnnnnnnnnnnnnnnnnnnnnnnnnnnnnnnnnnnnnnnnnnnnnnnnnnnnnnnnnnnnnnnnnnnnnnnnnnnnnnnnnnnnnnnnnnnnnnnnnnnnnnnnnnnnnnnnnnnnnnnnnnnnnnnnnnnnnnnnnnnnnnnnnnnnnnnnnnnnnnnnnnnnnnnnnnnnnnnnnnnnnnnnnnnnnnnnnnnnnnnnnnnnnnnnnnnnnnnnnnnnnnnnnnnnnnnnnnnnnnnnnnnnnnnnnnnnnnnnnnnnnnnnnnnnnnnnnnnnnnnnnnnnnnnnnnnnnnnnnnnnnnnnnnnnnnnnnnnnnnnnnnnnnnnnnnnnnnnnnnnnnnnnnnnnnnnnnnnnnnnnnnnnnnnnnnnnnnnnnnnnnnnnnnnnnnnnnnnnnnnnnnnnnnnnnnnnnnnnnnnnnnnnnnnnnnnnnnnnnnnnnnnnnnnnnnnnnnnnnnnnnnnnnnnnnnnnnnnnnnnnnnnnnnnnnnnnnnnnnnnnnnnnnnnnnnnnnnnnnnnnnnnnnnnnnnnnnnnnnnnnnnnnnnnnnnnnnnnnnnnnnnnnnnnnnnnnnnnnnnnnnnnnnnnnnnnnnnnnnnnnnnnnnnnnnnnnnnnnnnnnnnnnnnnnnnnnnnnnnnnnnnnnnnnnnnnnnnnnnnnnnnnnnnnnnnnnnnnnnnnnnnnnnnnnnnnnnnnnnnnnnnnnnnnnnnnnnnnnnnnnnnnnnnnnnnnnnnnnnnnnnnnnnnnnnnnnnnnnnnnnnnnnnnnnnnnnnnnnnnnnnnnnnnnnnnnnnnnnnnnnnnnnnnnnnnnnnnnnnnnnnnnnnnnnnnnnnnnnnnnnnnnnnnnnnnnnnnnnnnnnnnnnnnnnnnnnnnnnnnnnnnnnnnnnnnnnnnnnnnnnnnnnnnnnnnnnnnnnnnnnnnnnnnnnnnnnnnnnnnnnnnnnnnnnnnnnnnnnnnnnnnnnnnnnnnnnnnnnnnnnnnnnnnnnnnnnnnnnnnnnnnnnnnnnnnnnnnnnnnnnnnnnnnnnnnnnnnnnnnnnnnnnnnnnnnnnnnnnnnnnnnnnnnnnnnnnnnnnnnnnnnnnnnnnnnnnnnnnnnnnnnnnnnnnnnnnnnnnnnnnnnnnnnnnnnnnnnnnnnnnnnnnnnnnnnnnnnnnnnnnnnnnnnnnnnnnnnnnnnnnnnnnnnnnnnnnnnnnnnnnnnnnnnnnnnnnnnnnnnnnnnnnnnnnnnnnnnnnnnnnnnnnnnnnnnnnnnnnnnnnnnnnnnnnnnnnnnnnnnnnnnnnnnnnnnnnnnnnnnnnnnnnnnnnnnnnnnnnnnnnnnnnnnnnnnnnnnnnnnnnnnnnnnnnnnnnnnnnnnnnnnnnnnnnnnnnnnnnnnnnnnnnnnnnnnnnnnnnnnnnnnnnnnnnnnnnnnnnnnnnnnnnnnnnnnnnnnnnnnnnnnnnnnnnnnnnnnnnnnnnnnnnnnnnnnnnnnnnnnnnnnnnnnnnnnnnnnnnnnnnnnnnnnnnnnnnnnnnnnnnnnnnnnnnnnnnnnnnnnntgatgccttaacttcggtcttgacaaaaattaatcgaatagatatagtgacactgctagaaggaccaatatttgattatggaaatatttcaggcaccagaagttttgcagatgagaacaatgttttccatgaccctgttgatggtnnnnnnnnnnnnnnnnnnnnnnnnnnnnnnnnnnnnnnnnnnnnnnnnnnnnnnnnnnnnnnnnnnnnnnnnnnnnnnnnnnnnnnagccctgaccagtgtagagattccattacctcatatctcaaaggagaatctgtaaaatttgaagcaaatggaagccatacagaaatcactccagaagcaaagacaaaatcttactttccagaatcccaaaatgatgtgggaaaacagagtaccaaggaaactctgaaaccaaaaatacatggatctggtcatgttgaagaaccagcatcaccactagcagcgtatcagaaatctctagaagaaagcagcaagtttgtaatagaagagactaaaccctgtgtgcctgtcagtatgaaaaagatgagtaggacttctccagcagatggcaagccaaggcttaacctccannnnnnnnnnnnnnnnnnnnnnnnnnnnnnnnnnnnnnnnnnnnnnnnnnnnnnnnnnnnnnnnnnnnnnnnnnnnnnnnnnnnnnnnnnnnnnnnnnnnnnnnnnnnnnnnnnnnnnnnnnnnnnnnnnnnnnnnnnnnnnnnnnnnnnnnnnnnnnnnnnnnnnnnnnnnnnnnnnnnnnnnnnnnnnnnnnnnnnnnnnnnnnnnnnnnnnnnnnnnnnnnnnnnnnnnnnnnnnnnnnnnnnnnnnnnnnnnnnnnnnnnnnnnnnnnnnnnnnnnnnnnnnnnnnnnnnnnnnnnnnnnnnnnnnnnnnnnnnnnnnnnnnnnnnnnnnnnnnnnnnnnnnnnnnnnnnnnnnnnnnnnnnnnnnnnnnnnnnnnnnnnnnnnnnnnnnnnnnnnnnnnnnnnnnnnnnnnnnnnnnnnnnnnnnnnnnnnnnnnnnnnnnnnnnnnnnnnnnnnnnnnnnnnnnnnnnnnnnnnnnnnnnnnnnnnnnnnnnnnnnnnnnnnnnnnnnnnnnnnnnnnnnnnnnnnnnnnnnnnnnnnnnnnnnnnnnnnnnnnnnnnnnnnnnnnnnnnnnnnnnnnnnnnnnnnnnnnnnnnnnnnnnnnnnnnnnnnnnnnnnnnnnnnnnnnnnnnnnnnnnnnnnnnnnnnnnnnnnnnnnnnnnnnnnnnnnnnnnnnnnnnnnnnnnnnnnnnnnnnnnnnnnnnnnnnnnnnnnnnnnnnnnnnnnnnnnnnnnnnnnnnnnnnnnnnnnnnnnnnnnnnnnnnnnnnnnnnnnnnnnnnnnnnnnnnnnnnnnnnnnnnnnnnnnnnnnnnnnnnnnnnnnnnnnnnnnnnnnnnnnnnnnnnnnnnnnnnnnnnnnnnnnnnnnnnnnnnnnnnnnnnnnnnnnnnnnnnnnnnnnnnnnnnnnnnnnnnnnnnnnnnnnnnnnnnnnnnnnnnnnnnnnnnnnnnnnnnnnnnnnnnnttttgcaaacactacaatatcctgtaacacaaaagattttatctgtaaacacaaagcccttcctctaatatttgttgctattgccaatttttcaatgaaatgacctaaaaacaacaaaaaaaaaataacctatacggtagttgctttagggggtggggggatgctaactgttagtgcttaaaagggggtaaatgcttgccgctttagaggtggatggtgctcataagaggccccagtcgggggtatttaaaacggactgaacagaaattcttagctagtagaatggcagcacgctgtaaaattattactgtattgtgtactggctataagatgtagacacctttcagtaagccaatcatttgtaaccattctagcagtgtcatattaggttaataaggctgctgtgttttcaagggcatttttatttgggttttggtgaaattctttaatttgttgattatattcacataaaatcagcattcattgacacatagctctaatgacatatgtatgaaaaaccatacactggatgacctagtcgattatttaagcataaaataaattgtgttaaactcttcacct

SEQ ID NO: 21176 - DNA, 735 bp, Macaca Mulatta
  misc_feature (1)...(735): n = A,T,C or G
ggattcatattgttttgattacccttgtgttatacaagatggcaataaatgctgtgggattgtttgtatttaaaaatttacattgcttcttcctattcatcagtagagactttttacacactaacaccgttcgttgttggtatttactttagttttctgaagggtggcagttgccttgagcacttggtattcgcagagcttggacctgtagattttgaggcagattaggaattctgcctgacaggtaagcttccagtattgggaggtggagaaggggagggttcacaaaaataaattggggttattgcactaataaatgtcttcatcacttctggttctggatgctggaataccagagtttctaacctaaataggttgggtacgttatttaattgggtcagtattgctcaacactgtaactgagtcactgtgaggtctttgtgaattttatcactaagatcagaatgtgagaagtatttgggtataggcaaagaatgaagtgcctttcaagtactttaaaaatgagttaagagtttacaggaaagagactgagattggtaatctgaaaaggaccacaagcacagctggtaggtaaattgttaggcagaataatggtataaagagaaacacacctgtctcttattcctatctcttaagaattttggttctttcccccaantgattttctgggttgaattctttatgttggggcagggttttcccttttcccccaac

SEQ ID NO: 21177 - DNA, 303 bp, Macaca Mulatta
  misc_feature (1)...(303): n = A,T,C or G
agcaggagggtgaaaatgaaagccggctgtagcatcgtggaaaagccagaaggaggtggaggnagggtatcagtttcctgactgggcctacaaaacagagtcgtccccaggctcccggcagatccagctgtggcacttcatcctggagctgctgcagaaggaagagttccgccatgtcatcgcctggcagcagggagagtacggggaatttgtcatcaaggatccagatgaggtggcccgcctctggggccgcaggaaatgcaaaccacagatgaattatgacaagctgagccgggccctcag

SEQ ID NO: 21178 - DNA, 258 bp, Macaca Mulatta
ccaccttctcagacagcaacaggcttctctgcctcaatatagaacagttaatccctatgccagaggccttagatcaaagccctttctatactgagagcatggcagagcagtgtgaaggcaggcaaaggggaatgaggaggtctgaattcatctactccatccctgggaggttgtaggcatgtcaccttggccatctgtttctaaagctgaaagtctgaggcagcacaagggtccaggtaggtattcattattgtgccc

SEQ ID NO: 21179 - DNA, 4382 bp, Macaca Mulatta
  misc_feature (1)...(4382): n = A,T,C or G
aggtggagtgggagaatgcggagctgaggggccagctcctgggggtgacacaggagagggactcagcccttcgcaagagccagggcctgcaaagcaagctggagagcctggagcaagtgctgaannnnnnnnnnnnnnnnnnnnnnnnnnnnnnnnnnnnnnnnnnnnnnnnnnnnnnnnnnnnnnnnnnnnnnnnnnnnnnnnnnnnnnnnnnnnnnnnnnnnnnnaggcccaggcagaagccaagaaggaacatgaaggagccgtgcagctgctgganagtctaccttggattccatgcagnnnnnnnnnnnnnnnnnnnnnnnnnnnnnnnnnnnnnnnnnnnnnnnnnnnnnnnnnnnnnnnnnnnnnnnnnnnnnnnnnnnnnnnnnnnnnnnnnnnnnnnnnnnnnnnnnnnnnnnnnnnnnnnnnnnnnnnnnnnnnnnnnnnnnnnnnnnnnnnnnnnnnnnnnnnnnnnnnnnnnnnnnnnnnnnnnnnnnnnnnngaccttgacctcccgccgggctcccctgggcgctgcaccccaaagtcttccgagcctgcccctgccaccctcactggggtccctcgaaggacagccaagaaggcagagtctctctccaactcctcccactccgagtccatccacaacagccccaagtcatgccctacacctgaggtnnnnnnnnnnnnnnnnnnnnnnnnnnnnnnnnnnnnnnnnnnnnnnnnnnnnnnnnnnnnnnnnnnnnnnnnnnnnnnnnnnnnnnnnnnnnnnnnnnnnnnnnnnnnnnnnnnnnnnnnnnnnnnnnnnnnnnnnnnnnnnnnnnnnnnnnnnnnnnnnnnnnnnnnnnnnnnnnnnnnnnnnnnnnnnnnnnnnnnnnnnnnnnnnnnnnnnnnnnnnnnnnnnnnctcatggatggccgaaggggcctgtttcattccaattttgtagagcgtgtgtcggatgacgacctcctgacctccctccctccggagctggccgatttgtcccacagctcaggccctgaactcagtttcctgagtgtgggtgggggtggcagcagtagcgggggccaaagcagcgggggacggagccagcccagacctgaggaggaggatgcaggggacgacctcagtgtgagcccatcaccggagggcctgggcgagcctcctgctgtgccttacccccgctgtctggtggtcctcaagcagctggcccacagtgtagtgctggcctgggaaccccctcctgagcgagtggagctacacggcttccatatctgtgtgaatggggagctgcggcaggccctggggcctggggcgccacccaaggctgtgctggagaacctggacctgcgggccgggccccttcacatttctgtccaggccctgaccagccggggcagctccgacccactgcgctgttgcttggcggtgggtgcccgggctggagtggtgcccagccagctgcgggtccatcggttgacagccacatctgctgagatcacctgggtgcccggcaatagcaacttggcccatgccatctacctcaatggnggaagagtgcccacctgccagccccagtacctactgggccaccttctgccacttacggcctggcacaccctatcaggcccaagtggaggctcagctcccaccccaaggccctgggaaccagctggggaaagctggaacaccgggctgccaccctgcagttcccacactcccannnnnnnnnnnnnnnnnnnnnnnnnnnnnnnnnnnnnnnnnnnnnnnnnnnnnnnnnnnnnnnnnnnnnnnnnnnnnnnnnnnnnnnnnnnnnnnnnnnnnnnnnnnnnnnnnnnnnnnnnnnnnnnnnnnnnnnnnnnnnnnnnnnnnnnnnnnnnnnnnnnnnnnnnnnnnnnnnnnnnnnnnnnnnnnnnnnnnnnnnnnnnnnnnnnnnnnnnnnnnnnnnnnnnnnnnnnnnnnnnnnnnnnnnnnnnnnnnnnnnnnnnnnnnnnnnnnnnnnnnnnnnnnnnnnnnnnnnnnnnnnnnnnnnnnnnnnnnnnnnnnnnnnnnnnnnnnnnnnnnnnnnnnnnnnnnnnnnnnnnnnnnnnnnnnnnnnnnnnnnnnnnnnnnnnnnnnnnnnnnnnnnnnnnnnnnnnnnnnnnnnnnnnnnnnnnnnnnnnnnnnnnnnnnnnnnnnnnnnnnnnnnnnnnnnnnnnnnnnnnnnnnnnnnnnnnnnnnnnnnnnnnnnnnnnnnnnnnnnnnnnnnnnnnnnnnnnnnnnnnnnnnnnnnnnnnnnnnnnnnnnnnnnnnnnnnnnnnnnnnnnnnnnnnnnnnnnnnnnnnnnnnnnnnnnnnnnnnnnnnnnnnnnnnnnnnnnnnnnnnnnnnnnnnnnnnnnnnnnnnnnnnnnnnnnnnnnnnnnnnnnnnnnnnnnnnnnnnnnnnnnnnnnnnnnnnnnnnnnnnnnnnnnnnnnnnnnnnnnnnnnnnnnnnnnnnnnnnnnnnnnnnnnnnnnnnnnnnnnnnnnnnnnnnnnnnnnnnnnnnnnnnnnnnnnnnnnnnnnnnnnnnnnnnnnnnnnnnnnnnnnnnnnnnnnnnnnnnnnnnnnnnnnnnnnnnnnnnnnnnnnnnnnnnnnnnnnnnnnnnnnnnnnnnnnnnnnnnnnnnnnnnnnnnnnnnnnnnnnnnnnnnnnnnnnnnnnnnnnnnnnnnnnnnnnnnnnnnnnnnnnnnnnnnnnnnnnnnnnnnnnnnnnnnnnnnnnnnnnnnnnnnnnnnnnnnnnnnnnnnnnnnnnnnnnnnnnnnnnnnnnnnnnnnnnnnnnnnnnnnnnnnnnnnnnnnnnnnnnnnnnnnnnnnnnnnnnnnnnnnnnnnnnnnnnnnnnnnnnnnnnnnnnnnnnnnnnnnnnnnnnnnnnnnnnnnnnnnnnnnnnnnnnnnnnnnnnnnnnnnnnnnnnnnnnnnnnnnnnnnnnnnnnnnnnnnnnnnnnnnnnnnnnnnnnnnnnnnnnnnnnnnnnnnnnnnnnnnnnnnnnnnnnnnnnnnnnnnnnnnnnnnnnnnnnnnnnnnnnnnnnnnnnnnnnnnnnnnnnnnnnnnnnnnnnnnnnnnnnnnnnnnnnnnnnnnnnnnnnnnnnnnnnnnnnnnnnnnnnnnnnnnnccccacgcgggagaggggtggcctccctgtaattgagggccccaggactggactagaggctagcgggagagggcggctgggcccttcccggaggtgctcccgtggctgggcgctggagcctggcctggccagctgcctttcccccaagtgcttggaaatcagcattgaatatgactcggaggaggagcaggaggcgggcagcgggggcatcagcatcaccagctcctgctaccctggagatggggaggcctggggcacagcaaccgtaggaaggcccagggggcctccgaaggccaattcaggccccaaaccctacccacccctcccagcctgggagaaaggggagccagagcagagaggccgcagtgcgacgggcagagccaaggagccactctcccggnggcaacagagactagggaagccagagggcaggacagctctgggcggagaggcccccagaagagaggtgcccgagtccccaggccaagcactgcagannnnnnnnnnnnnnnnnnnnnnnnnnnnnnnnnnnnnnnnnnnnnnnnnnnnnnnnnnnnnnnnnnnnnnnnnnnnnnnnnnnnnnnnnnnnnnnnnnnnnnnnnnnnnnnnnnnnnnnnnnnnnnnnnnnnnnnnnnnnnnnnnnnnnnnnnnnggtgtttggggacaaggatgccgacggcttctaccggggcgaaggtgggggccggacaggctacattccctgcaacatggtggctgatgtggctgtggacagccctgccgggagacagcagctgctccagcggggttatttgtccccagatattctcctcgagggctcaggnnnnnnnnnnnnnnnnnnnnnnnnnnnnnnnnnnnnnnnnnnnnnnnnnnnnnnnnnnnnnnnnnnnnnnnnnnnnnnnnnnnnnnnnnnnnnnnnnnnnncaggcccccctaagctggtcccctccgctgagctgaaaactccccactccatggtggctgcatttgactacaacccccaggagagttcccccaatatggacgtcgagnnnnnnnnnnnnnnnnnnnnnnnnnnnnnnnnnnnnnnnnnnnnnnnnnnnnnnnnnnnnnnnnnnnnnnnnnnnnggggaattaaatggacaaagggaaactggttccatccaacttcctggagggccctgggcctgaggcannnnnnnnnnnnnnnnnnnnnnnnnnnnnnnnnnnnnnnntcagagaacgaggaggagaagagtccagtgcta

SEQ ID NO: 21180 - DNA, 207 bp, Macaca Mulatta
ggcccgggaggtatctaacaagattgttggctatctgaatgaggagggtgttctggaccaaaacaggtccctgttcttcatgcagtggggtcagattgtagatcacgacctggattttgcccctgacaccgagctggggagtagtgagtactccaaagcccagtgtgatgagtactgtatccagggagacaactgcttccccatcat

SEQ ID NO: 21181 - DNA, 1557 bp, Macaca Mulatta
  misc_feature (1)...(1557): n = A,T,C or G
aggggtgctgagttcttcacctttcagactgagatctgccaagttttccggcaatgctcttgaggatctcagagaggctcttaagannnnnnnnnnnnnnnnnnnnnnnnnnnnnnnnnnnnnnnnnnnnnnnnnnnnnnnnnnnnnnnnnnnnnnnnnnnnnnnnnnnnnnnnnnnnnnnnnnnnnnnnnnnnnnnnnnnnnnnnnnnnnnnnnnnnnnnnnnnnnnnntatgtttttacccagtacaacaaaccattcttcagcacctttgcaaaaacatctatgtttgttttataccttttgggctttattatttggaagccatggagacaacagtgtacaagaggacttcgcggaaagcatgctgctttttttgcagatgctgaaggttactttgctgcttgcacaacagatacaaccatgaacagttctttagtgaacctctgtatgttcctgtgaaattccatgatcttccaagtgaaaaacctgagagcacaaacattgatactgaaaaaannnnnnnnnnnnnnnnnnnnnnnnnnnnnnnnnnnnnnnnnnnnnnnnnnnnnnnnnnnnnnnnnnnnnnnnnnnnnnnnnnnnnnnnnnnnnnnnnnnnnnnnnnnnnnnnnnnnnnnnnnnnnnnnnnnnnnnnnnnnnnnnnnnnnnnnnnnnnnnnnnnnnnnnnnnnnnnnnnnnnnnnnnnnnnnnnnnnnnnnnnnnnnnnnnnnnnnnnnnnnnnnnnnnnnnnnnnnnnnnnnnnnnnnnnnnnnnnnnnnnnnnnnnnnggactttttaccttaatccttgctgcagtatttccaagtaacagtggagatagatttaccctttctaaactattnnnnnnnnnnnnagcattggaggtgttgtactggtaaacctgtcaggatctgaaaaatctgctggaagagatacaataggnnnnnnnnnnnnnnnnnnnnnnnnnnnnnnnnnnnnnnnnnnnnnnnnnnnnnnnnnnnnnnnnnnnnnnnnnnnnnnnnnnnnnnnnnnnnnnnnnnnnnngttttgtaggtttatttaatctgctgctcttatggccaggtttctttttacttcattatactggatttgaggacttcgagtttcccaataaagtagtattaatgtgcattatcattaatggccttattggaacagtactctcagagttcctnnnnnnnnnnnnnnnnnnnnnnnnnnnnnnnnnnnnnnnnnnnnnnnnnnnnnnnnnnnnnnnnnnnnnnnnnnnnnnnnnnnnnnnnnnnnnnnnnnnnnnnnnnnnnnnnnnnnnnnnnnnnnnnnnnnnnnnnnnnnnnnnnnnnnnnnnnnnnnnnnnnnnnnnnnnnnnnnnnnnnnnnnnnnnnnnnnnnnnnnnnnnnnnnnnnnnnnnnnnnnnnnnnnnnnnnnnnnnnnnnnnnnnnnnnnnnnnnnnnnnnnnnnnnagagttccagaagacagcgaacagtgtgagagtctcatttctatgcacagtgtttctcaggaggatggagctagttagctgttgtctgtagccca

SEQ ID NO: 21182 - DNA, 3979 bp, Macaca Mulatta
  misc_feature (1)...(3979): n = A,T,C or G
gtggacaagaaggtctcgtgccagggtctgggcctgctccaggtccccttggtgctcccgccggacactgagacccttgatctctctgggaaccagctgcggagtatcctggcctcacccctgggcttctacacggcacttcgtcacctggacctgagcaccaatgagatcaacttcctccagccaggagccttccaggccctgacccacctggagcacctcagcctggctcacaaccggctggcgatggccactgcgctgagtgccggtggtctgggccccctgccacgtgtgacctccctggacctgtctgggaacagcctgtacagcggcctgctggagcggctgctaggggaggcacccagcctgcataccctctcactggcggagaacagtctgannnnnnnnnnnnnnnnnnnnnnnnnnnnnnnnnnnnnnnnnnnnnnnnnnnnnnnnnnnnnnnnnnnnnnnnnnnnnnnnnnnnnnnnnnnnnnnnnnnnnnnnnnnnnnnnnnnnnnnnnnnnnnnnnnnnnnnnnnnnnnnnnnnnnnnnnnnnnnnnnnnnnnnnnnnnnnnnnnnnnnnnnnnnnnnnnnnnnnnnnnnnnnnnnnnnnnnnnnnnnnnnnnnnnnnnnnnnnnnnnnnnnnnnnnnnnnnnnnnnnnnnnnnnnnnnnnnnnnnnnnnnnnnnnnnnnnnnnnnnnnnnnnnnnnnnnnnnnnnnnnnnnnnnnnnnnnnnnnnnnnnnnnnnnnnnnnnnnnnnnnnnnnnnnnnnnnnnnnnnnnnnnnnnnnnnnnnnnnnnnnnnnnnnnnnnnnnnnnnnnnnnnnnnnnnnnnnnnnnnnnnnnnnnnnnnnnnnnnnnnnnnnnnnnnnnnnnnnnnnnnnnnnnnnnnnnnnnnnnnnnnnnnnnnnnnnnnnnnnnnnnnnnnnnnnnnnnnnnnnnnnnnnnnnnnnnnnnnnnnnnnnnnnnnnnnnnnnnnnnnnnnnnnnnnnnnnnnnnnnnnnnnnnnnnnnnnnnnnnnnnnnnnnnnnnnnnnnnnnnnnnnnnnnnnnnnnnnnnnnnnnnnnnnnnnnnnnnnnnnnnnnnnnnnnnnnnnnnnnnnnnnnnnnnnnnnnnnnnnnnnnnnnnnnnnnnnnnnnnnnnnnnnnnnnnnnnnnnnnnnnnnntgcaggggaaccgggtcagcccctgtgggggccgaatgagcccggccccgccagctgtgtggccttctctggcatcgcctccctccgcagcctgagcctggtggataatgagatagagctgctcagggcaggggccttcctccataccccactgactgagctggacctttcttccaaccctgggctggaggtggccacaggggccttgacaggcctggaggcctccttggaagtcctagcactgcagggcaatgggttgacggtcctgcaggtggacctgccctgcttcatctgcctcaagcggctcaatcttgccgagaaccgcctgagccaccttcccgcctggacacaggctgtgtcactggaggtgctggacctgcgaaacaacagcttcagcctcctgccaggcagtgccatgggtggcctggagaccagcctccggcgcctctacctgcaggggaatccactcagctgctgtggcaatggctggctggcagcccagctgcaccagggccgtgtggacgtggacgccacccaggacctgatctgccgcttcagctcccaggaggaggtgtccctgagccatgtgcgtcccgaggactgtgagaagggggggctcaagaacatcaacctcatcatcatcctcaccttcatactggtctctgccatcctcctcaacacgctggccacctgctgctgtgtccgccggcagaagtttaaccaacagtataaagcctaaagaannnnnnnnnnnnnnnnnnnnnnnnnnnnnnnnnnnnnnnnnnnnnnnnnnnnnnnnnnnnnnnnnnnnnnnnnnnnnnnnnnnnnnnnnnnnnnnnnnnnnnnnnnnnnnnnnnnnnnnnnnnnnnnnnnnnnnnnnnnnnnnnnnnnnnnnnnnnnnnnnnnnnnnnnnnnnnnnnnnnnnnnnnnnnnnnnnnnnnnnnnnnnnnnnnnnnnnnnnnnnnnnnnnnnnnnnnnnnnnnnnnnnnnnnnnnnnnnnnnnnnnnnnnnnnnnnnnnnnnnnnnnnnnnnnnnnnnnnnnnnnnnnnnnnnnnnnnnnnnnnnnnnnnnnnnnnnnnnnnnnnnnnnnnnnnnnnnnnnnnnnnnnnnnnnnnnnnnnnnnnnnnnnnnnnnnnnnnnnnnnnnnnnnnnnnnnnnnnnnnnnnnnnnnnnnnnnnnnnnnnnnnnnnnnnnnnnnnnnnnnnnnnnnnnnnnnnnnnnnnnnnnnnnnnnnnnnnnnnnnnnnnnnnnnnnnnnnnnnnnnnnnnnnnnnnnnnnnnnnnnnnnnnnnnnnnnnnnnnnnnnnnnnnnnnnnnnnnnnnnnnnnnnnnnnnnnnnnnnnnnnnnnnnnnnnnnnnnnnnnnnnnnnnnnnnnnnnnnnnnnnnnnnnnnnnnnnnnnnnnnnnnnnnnnnnnnnnnnnnnnnnnnnnnnnnnnnnnnnnnnnnnnnnnnnnnnnnnnnnnnnnnnnnnnnnnnnnnnnnnnnnnnnnnnnnnnnnnnnnnnnnnnnnnnnnnnnnnnnnnnnnnnnnnnnnnnnnnnnnnnnnnnnnnnnnnnnnnnnnnnnnnnnnnnnnnnnnnnnnnnnnnnnnnnnnnnnnnnnnnnnnnnnnnnnnnnnnnnnnnnnnnnnnnnnnnnnnnnnnnnnnnnnnnnnnnnnnnnnnnnnnnnnnnnnnnnnnnnnnnnnnnnnnnnnnnnnnnnnnnnnnnnnnnnnnnnnnnnnnnnnnnnnnnnnnnnnnnnnnnnnnnnnnnnnnnnnnnnnnnnnnnnnnnnnnnnnnnnnnnnnnnnnnnnnnnnnnnnnnnnnnnnnnnnnnnnnnnnnnnnnnnnnnnnnnnnnnnnnnnnnnnnnnnnnnnnnnnnnnnnnnnnnnnnnnnnnnnnnnnnnnnnnnnnnnnnnnnnnnnnnnnnnnnnnnnnnnnnnnnnnnnnnnnnnnnnnnnnnnnnnnnnnnnnnnnnnnnnnnnnnnnnnnnnnnnnnnnnnnnnnnnnnnnnnnnnnnnnnnnnnnnnnnnnnnnnnnnnnnnnnnnnnnnnnnnnnnnnnnnnnnnnnnnnnnnnnntgagactattgaatccaacctccccattgcacagatggggaaactgaggcttaggaagagaatgctacttgtggagagctatacagagcctctggggaaaaaaaagagagccctatttggggatgagattaggggttggaccatagtgatgtcctctcttggctgtcacatcacaagataatgctggctccaaacttcctttctgtgcctcctcatgcannnnnnnnnnnncctcttggaaaaataggtagaaaggctcacccagataaccccctatccctctttttttggagtcatgagctgtctgggaagaatgtacacgctgggaccaactcatgatcttgtgttgctgtcttcatcatcttacctgtgcttggcccacagtctggctcatgatgtgggctcagtaatgtgcaagaaaatgaaaatgccactctctccaccccattttactgaggataacaccnnggcccagaggaagttaagggagagtcaatgggcagagccagggctaggccctggtgatgtgtggagcacccaggcagacccagtcctggttgggatcacaaccacaggtgctactgcacgtgacactcttccttaggcctggaggccaaggtgtgggtcctcacgcctgatctttgaaaacactacacaatgctgctgtcagttcccaggacccaggccgcagcccaggcctcgggaccaactctttgtataacctacctgaatgtattaaaaactaattttggagaa

SEQ ID NO: 21183 - DNA, 338 bp, Macaca Mulatta
  misc_feature (1)...(338): n = A,T,C or G
aggtaaatcgtgagttaaaaaagttactggtggcttctgttggggatgatcttcagtatcactttgaacgtctagcccgtgagaaaaatcagcttattttagaaaatgaagccctaggtcgaaacacagctacagctttctgaacagttagaacgtatgtcaatacagtgtgatgtatggcgaagtaaattccttgcaagcaggnnncagggtaatggcagatgagttaaccaactcaagagcagttttacagcgtcaaaaccgtgatgcacacggggctatacaggatctcctaagtgaacgggaacagtttcgtcaagaaatgatagctacccaga

SEQ ID NO: 21184 - DNA, 553 bp, Macaca Mulatta
tatgacttgagacgcccccatcagtatttgcatccgggggcaggggacagcaggttacgggaaccggtgctctacagccccccgagtgctgtctttgtagaacccaaccggaacgaatatctggagttaaaagcaaaactaaacgttgagccggactacctcgaagtgctggaaaaacagaccacatttagccagttctaaaagcaaagaaactcccttggagcttttgcatttaaaacaaacaagcaagctgacacacacggtgaacacattagaataattgtgttgtttcaacgtttagggtgaagtgccttggcacgggatttctcagcttcggtggaagatacgaaaagggtgtgcaatttcctttaaaatttacacgtgggaaacatttgtgtaaactgggcacatcactttctcttcttgcgtgtggggcaggtgtggagaagggctttaaggagggcaatttgctgcgcgggtgatttgtgaaaggccgcagtcgtttttgtagtggttggaagtgctaagaatggtggatgatggcagagcatag

SEQ ID NO: 21185 - DNA, 259 bp, Macaca Mulatta
  misc_feature (1)...(259): n = A,T,C or G
caggctccgtgtgtttgacagtggcgtcatggtaattgagcttcaatctcacaaggaagaagaaatggtggcctcggccctggagacagtnnnnnnnnnnnnnnnnnnnnnnnnnnnnnnnnnnnnnnnnnnnnnnnnnnnnnnnnnnnnnnnnnnnnnnnnnaggttgctgcttgcagagaagatgggccatctttgccgtgatgactcagtggaaggcctgcgtttttacccanaatttatatatgacacagagcta

SEQ ID NO: 21186 - DNA, 764 bp, Macaca Mulatta
  misc_feature (1)...(764): n = A,T,C or G
ggagctaatcaaccattatttttcattttgtttgttctaagaggattgaaaatcagtttagtttaaatgtctttctgttaggcctttctttcttaacaatgaagaagagatgattcttctagtttatggttaaaagtttttgaagtgtctcaaaaatattttactaactgtaaccctaaaactgttgtcttttggtttatgaaatgggtaatttttgatatttccccagttctttttaatggggtcaataatggacattctagtttaaggtggttgatggatttagccatatatgctgctaaagaaattgtctaccttttcttcctcacctgttccatttatgtaaggttgagattagagggaaagcattttctatatcaattgtgtttaaacctttcaagaaggttatttagctagcttagtgttgaactaaattttttttaaacaaggcgaggtctaatgctgttttgagattctgaaattaaatgaaaatacttatttcagaaatgcatttaatgctttttttcttgtgacagtttcgcaaataaccgctggaattccatatgtcccctgaattatttttatcataaagccacaaatgtattataacaagggcaaattggaattatatataaacccttaactcattacccatgttctcgggnnnnnnnnnnnnnnnnnngaattgaaaaagtactgaaaattccaaggtgaccttttaaaatgcaaaattttccctatttattttgagtaaaaaaaccccc

SEQ ID NO: 21187 - DNA, 173 bp, Macaca Mulatta
gacacagcacgatggccatcggcattgcagtgtacattctgggctgcacgggcactttggaggaccgagcagccactctgagtaaggtcatccaggtggcagtggaactgaaggattccatgggggacctctattccttctcagctctcatgaaagccctggaaatgccacag

SEQ ID NO: 21188 - DNA, 787 bp, Macaca Mulatta
gacttgaccccattggcccagacccctgtttcctgccgctggatgagggctcctgtactgcctacaccctgcgctggtaccatcgggctgtgccaggcagcacagaggcctgtcacccttttgtctatggcggctgtggagggaatgccaaccgttttgggacccgtgaggcctgtgagcgccgctgcccaccccgagtggcccagagccaggggataggtatgagctgagcccccacagtggggggactgggcactgaacctgcctggatcagggtctgggggaggagtccttgggccagggtcccaggtcagggtcctggaggagacgctccttcacactaggggacctggggcagacacccagaccaaagagctgaatattgagcaccagctgtggagcccccagtagggtccccttccatgttcccttctttaaagacctaagtatggacccttctgaggtcagagcccccacttcctgttgtaacctcaactccctccccatgggtgcctctgcctgagcttctctgggtaaggtcagatggctgatgaccgtttccaacctgtcctcaccaggtgctatccaggactgaggcccagatgatgagctgagattcagcatcccctagaggagtcagggtctcagcagaacccgctgtccctccccttggtgctagaggcttgtgtgcacgtgagcgtgcgtgtgcatgtctgttatttcagtgacttggtcccgtgggtctggccttcccccctgtggacaaacccccattgtggctcctgcc

SEQ ID NO: 21189 - DNA, 1723 bp, Macaca Mulatta
  misc_feature (1)...(1723): n = A,T,C or G
agcggtcccctcaccggcccatcctgcaagcagggttgcccgccaacaagacagtggccctgggtagcaacgtggagttcatgtgtaaggtgtacagtgacccacagccgcatatccagtggctaaagcacatcgaggtgaacgggagcaagattggtccagacaacctgccttatgtccagatcttgaagnagactgctggagttaataccaccgacaaagagatggaggtgcttcacttaaganaagaaatgtctcctttgccgacgcaggggagtatacgtgcttggcgggtaactctatcggactctcccatcactctgcatggttgaccgttctggaagnnctggaagagaggccggcggtgatgacctcgcccctgtacctggagatcatcatctattgcacaggggccttcctcatctcctgcatggtagggtcggtcatcgtctacaagatgaagagtggcaccaagaagagcgacttccacagccagatggctgtgcacaagctggccaagagcatccctctgcgcagacaggnnnnnnnnnnnnnnnnnnnnnnnnnnnnnnnnnnnnnnnnnnnnnnnnnnnnnnnnnnnnnnnnnnnnnnnnnnnnnnnnnnnnnnnnnnnnnnnnnnnnnnnnnnnnnnnnnnnnnnnnnnnnnnnnnnnnnnnnnnnnnnnnnnnnnnnnnnnnnnnnnnnnnnnnnnnnnnnnnnnnnnnnnnnnnnnnnnnnnnnnnnnnnnnnnnnnnnnnnnnnnnnnnnnnnnnnnnnnnnnnnnnnnnnnnnnnnnnnnnnnnnnnnnnnnnnnnnnnnnnnnnnnnnnnnnnnnnnnnnnnnnnnnnnnnnnnnnnnnnnnnnnnnnnnnnnnnnnnnnnnnnnnnnnnnnnnnnnnnnnnnnnnnnnnnnnnnnnnnnnnnnnnnnnnnnnnnnnnnnnnnnnnnnnnnnnnnnnnnnnnnnnnnnnnnnnnnnnnnnnnnnnnnnnnnnnnnnnnnnnnnnnnnnnnnnnnnnnnnnnnnnnnnnnnnnnnnnnnnnnnnnnnnnnnnnnnnnnnnnnnnnnnnnnnnnnnnnnnnnnnnnnnnnnnnnnnnnnnnnnnnnnnnnagtgcatacaccgagacctggccgccaggaatgtcctggtgacagaggacaatgtgatgaagatagcagactttggcctcgcacgggacattcaccacatcgactactataaaaagacaaccaacnnnnnnnnnnnnnnnnnnnnnnnnnnnnnnnnnnnnnnnnnnnnnnnnnnnnnnnnnnnnnnnnnnnnnnnnnnnnnnnnnnnnnnnnnnnnnnnnnnnnnnnnnnnnnnnnnnnnnnnnnnnnnnnnnnnnnnnnnnnnnnnnnnnnnnnnnnnnnnnnnnnnnnnnnnnnnnnnnnnnnnnnnnnnnnnnnnnnnnnnnnnnnnnnnnnnnnnnnnnnnnnnnnnnnnnnnnnnnnnnnnnnnnnnnnnnnnnnnnnnnnnnnnnnnnnnnnnnnnnnnnnnnnnnnnnnnnnnnnnnnnnnnnnnnnnaggagtacctggacctgtccatgcccctggaccagtactccccgagctttcccgacacccggagctctacatgctcctcaggggaggattccgtcttctctcatgagccgctgcccgaggagccctgcctgccccgacacccagcccagcttgccaatggcggactcaaacgccgctga

SEQ ID NO: 21190 - DNA, 644 bp, Macaca Mulatta
ggggccagaagattttttcatttgcccaccagactatcagtgctttgatcaaagcagagctggcagaattgcccttaagactttttcttcaaggagcactagctgctggggaaattggttttgaaaatcatgaaacagtcgcatatgaattcatgtcccaggccttttctctgtatgaagatgaaatcagcgattccaaagcacagttagctgccatcaccttgatcattggcacttttgaaaggatgaagtgcttcagtgaagagaatcacgaacctctgaggactcagtgtgcccttgctgcatccaaacttctgaagaaacccgatcagggccgagctgtgagcacctgtgcacacctcttctggtctggcagaaacacggacaaaaatggggaggagcttcacggaggcaagagggttatggagtgcctaacgaaagctctaaaaatagcaaatccgtgcatggacccctctctatccgtccccttttttataaaattctcaacaaaatttcttttttttacaatggaatatcttcgtacccctcggtttcaccctctaatcaatactctaacatctccccatcttgacctctcattacaatcaaactttatttcatatcaaggacatattctcccgcag

SEQ ID NO: 21191 - DNA, 2240 bp, Macaca Mulatta
  misc_feature (1)...(2240): n = A,T,C or G
caagccgcacaccaatatgctgaccattttagccgaggagaacctgcccttcgccaaggagatcgtctctctcatcgaggcccaaaccgccaaggnaggctccttcctcagagaagcttcctgttatgtaccttatggattctattgtgaaaaacgttggaagagagtatctcactgcctttactaaaaatctagttgcaacatttatttgtgtgtttgaaaaggtnaggtggatgaaaatactaggaaaagtttatttaagttacgttccacatgggatgaaatattccctttgaagaaactttatgccctggatgtcagagtcaattcattagatcctgcttggcctattaaacctctaccccccaatgtgaatacgtctagcatccatgtgaatcctaaatttttaaataaatcgngcccgaggagccttcaacacctggtacagtggtcagttcccctagcatctccactcctccaattgttcctgatatacaaaagaatcttacacaagaacaactaataaggcagcagttactggcaaagcaaaaacagttgttagaacttcagcagaaaaagctggagcttgagctagagcaagctaaggcacannnnnnnntttctcttagtgttcagcaggaaacatccaatttaggtcctggatctgcaccatctaaattacatgtttcacagattccctctatggcagttaaagctcctcatcaggttcctgtgcaatctgagaaaagccgtccaggaccatccttacaaattcaggatgtgaaaggaactaaccgggatcctcgtctgaacaggatgagccaacattctcatggaaaagatcaaagtcacaggaaagaatttctaatgaacacattaaaccagtctgatattaagacagagtaaaacttatacccttctgaaaaactaaatttcatccaagcaagaaaaaannnnnnnnnnnnnnnnnnnnnnnnnnnnnnnnnnnnnnnnnnnnnnnnnnnnnnnnnnnnnnnnnnnnnnnnnnnnnnnnnnnnnnnnnnnnnnnnnnnnnnnnnnnnnnnnnnnnnnnnnnnnnnnnnnnnnnnnnnnnnnnnnnnnnnnnnnnnnnnnnnnnnnnnnnnnnnnnnnnnnnnnnnnnnnnnnnnnnnnnnnnnnnnnnnnnnnnnnnnnnnnnnnnnnnnnnnnnnnnnnnnnnnnnnnnnnnnnnnnnnnnnnnnnnnnnnnnnnnnnnnnnnnnnnnnnnnnnnnnnnnnnnnnnnnnnnnnnnnnnnnnnnnnnnnnnnnnnnnnnnnnnnnnnnnnnnnnnnnnnnnnnnnnnnnnnnnnnnnnnnnnnnnnnnnnnnnnnnnnnnnnnagatctcgatcacccaagtctaggtcaccaattatacattccccaaagagaagagataggcggtcacccaagcgaaggcaaagaagtatgtctccaacgtcgacacctaaagctggaaagattcgccaatctggagttaagcagtcacatatggaagagtttacaccaccttctagggaagacagaaatgctaagagaagtactaaacaggatattcgggatccaaggcgaatgaaaaagactgaagaggagcggccacaagaaactacaaatcagcattctacaaagtcaggcactgaaccaaaggagaatgtagaaaactggcaaagttccaagtctgccaaaagatggaaatctggttgggaggaaaataaaagnagcttacagcaggttgatgaacatagtaaacctcctcatctgaggcatagggagagctggtcaagcactaaaggaattttatcgcctcgagccccaaagcagcaacagcatcgattaagtgtagatgccaatcttcagattcctaaagagttaactcttgcaagcaaaagagaattacttcaaaagnagacgagtgaacgtttagcatctggtgaaattacacaggatgacttccttgttgttgtgcatcaaattcgacagctatttcagtatcaagaaggtnaaggtgtgcgagaagagcagagatctccattcaatgatcgttttccacttaagcgacctcgatatgaagattcagataaaccatttgtagatagcccagcatcaagatttcgcggcctggatacaaatcagcgacttacagctttagctgaagacagaccattatttgatggacctggtagggcatcagtagcaagagatgggcccaaccaagatgattttt

SEQ ID NO: 21192 - DNA, 644 bp, Macaca Mulatta
  misc_feature (1)...(644): n = A,T,C or G
ggccggtgtcctgncttagtgaagacggacggtacttcaatggccaggactgccagccctgccaccgcttctgcgccacttgtgctggggcaggagctgatgggtgcattaactgcacagagggctacttcatggaggatgggagatgcgtgcagagctgtagtatcagctattactttgaccactcttcagagaatggatacaaatcctgcaaaaaatgtgataccagttgtttgacgtgcaatggcccaggattcaagaactgtacaagctgccccagtgggtatctcttagacttaggaatgtgtcaaatgggagccatttgcaaggatgcaacggaagagtcctgggcggaaggaggcttctgtatgcttgtgaaaaagaacaatctgtgccaacggaaggttcttcaacaactttgctgcaaaacatgtacatttcaaggctgagcagccatcttagatttctttgttcctgtagacttatagattattccatattannnnnnnnnnnnnnnnnnnnnnnnnnnnnnnnnnnnnnnnnnnnnnnnnnnnnnnnnnnnnnnnnnnnnnnnnnnnnnnnnnnnnnnnnnnnnnnnnnnnnnnnnnnnnnnnnnnnnnnnnnnnnnnnnnnnnnnngcgtaa

SEQ ID NO: 21193 - DNA, 116 bp, Macaca Mulatta
gtttgccatgcagaacttgaattggggacttgttttcaagcagtaaatagcagaattcagttacaaattcttgaggcacaataccttccaagctcctcaacacctttgactttgag

SEQ ID NO: 21194 - DNA, 267 bp, Macaca Mulatta
  misc_feature (1)...(267): n = A,T,C or G
ttttaaagaaggtggcattgattcaaatcaaagtaacactctaacaataggtgcttatcaattgtctcagaggtaattntcagagaaaaattcacatgttcctgtggtatgactttcttagattatactattatgtcttattctaaaagggctgtcattcaattaaaaatgaatatcttccattttgtatttaatctgcatttcttaatagtatcttagaaaaaatgactataggaaatgagttcttttccatggtaatttattatt

SEQ ID NO: 21195 - DNA, 1630 bp, Macaca Mulatta
  misc_feature (1)...(1630): n = A,T,C or G
tccggaatggtggctccaacacccttaatttccagttccacgaccccgcgcccaggactgtgtgcaatggctgctacacaccaagacaagatgcttcccggcacccgnnnnnnnnnnnnnnnnnnnnnnnnnnnnnnnnnnnnnnnnnnnnnnnnnnnnnnnnnnnnnnnnnnnnnnnnnnnnnnnnnnnnnnnnnnnnnnnnnnnnnnnnnnnnnnnnnnnnnnnnnnnnnnnnnnnnnnnnnnnnnnnnnnnnnnnnnnnnnnnnnnnnnnnnnnnnnnnnnnnnnnnnnnnnnnnnnnnnnttgacagccccagagactggtaccggagaatgttccagcagattcaccggaaaatgccagnncagacctgcagctggactggaccttcgaggagccacccagannnnnnnnnnnnnnnnnnnnnnnnnnnnnnnnnnnnnnnnnnnnnnnnnnnnnnnnnnnnnnnnnnaagaagctgggaccactctgaagagttacctagaagcaccttcagctacagacctggagcgttctccactgtgctgcagcccccaaatcaggtnnnnnnnnnnnnnnnnnnnnnnnnnnnnnnnnnnnnnnnnnnnnnnnnnnnnnnnnnnnnnnnnnnnnnnnnnnnnnnnnnnnnnnnnnnnnnnnnnnnnnnnnnnnnnnnnnnnnnnnnnnnnnnnnnnnnnnnnnnnnnnnnnnnnnnnnnnnnnnnnnnnnnnnnnnnnnnnnnnnnnnnnnnnnnnnnnnnnnnnnnnnnnnnnnnnnnnnnnnnnnnnnnnnnnnnnnnnnnnnnnnnnnnnnnnnnnnnnnnnnnnnnnnnnnnnngcccggcctcagcctggagcttcagctctccgaatgcaccttacctgggttccgcccggtccctgagaccccgcagaatggctgatggaggannnnnnnnnnnnnnnnnnnnnnnnnnnnnnnnnnnnnnnnnnnnnnnnnnnnnnnnnnnnnnnnnnnnnnnnnnnnnnnnnnnnnnnnnnnnnnnnnnnnnnnnnnnnnnnnnnnnnnnnnnnnnnnnnnnnnnnnnnnnnnnnnnnnnnnnnnnnnnnnnnnnnnnnnnnnnnnnnnnnnnnnnnnnnnnnnnnnnnnnnnnnnnnnnnnnnnnnnnnnnnnnnnnnnnnnnnnnnnnnnnnnnnnnnnnnnnnnnnnnnnnnnnnnnnnnnnnnnnnnnnnnnnnnnnnnnnnnnnnnnnnnnnnnnnnnnnnnnnnnnnnnnnnnnnnnnnnnnnnnnnnnnnnnnnnnnnnnnnnnnnnnnnnnnnnnnnnnnnnnnnnnnnnagggagagcacatctgcctgatccgcaaagtgaatgagaactggtacgaggggcgcatcacgggcacggggcgccaaggcatattccccgccagctacgtgcaggtgtctcgtgaaccccggctccggctctgtgacgacggcccccagctccccgcatctccccgcctgactgctgccgcccgttcagcccatcaccccagctccccctcagccccgcgcagcccagctgaccccaccgactggggagggcagacctccccccgccgcactggcttctcattctccacccaggagcctagaccccagaccca

SEQ ID NO: 21196 - DNA, 582 bp, Macaca Mulatta
acctgcccttcctgcagatggcttctcacactcgggcatcatggaagagcgcctcctagacgcagtggtgcccttcctcccactgcagcggcaccacgtccggcactgcgtgctcaacgagctggcccagctgggcctggagccgagggatgaggttgtccaggctgtgctggacagcaccaccttcttccctgaggacgagcagctcttctcctccaatggctgcaagaccgtggcctctcgaatctccttctttctctgactccccgggtggtatccttggcccctctaatggccaggccatgcaggaaaggcctggggcctctgtcacaggaacccagcgcaccaagtgagatgaagggagtggcggctgggccacgggacagatggctgggaagggccctggcctctaacctggctcaagagcatcttggccctggccaccttccccagggaaacccctggtcaccccagaacctcactgagccttgacctcgccctgcagcctgagccttcttactgtgaattataactcagggactgtggctcgtggcggcgctccctcctcagtctgccaccctt

SEQ ID NO: 21197 - DNA, 667 bp, Macaca Mulatta
aaccctccattctcttctgctgcttctgaagctctgtgtactcctcatagaggagtttacgcggaaaggcgaggaggagaaccagaatgctgcggaggccgagggagatgaggggagctgagcacctcgctctggtgcccgtctgtgtgggagcccccactgtaacactctaataaatcagtgtgttcagatgtgcctggcgatctcttgcctatttcctcttcctggaggatcatggtttttctgagaacaatcttccccacctccaccccttcgccgtgattacactacacttagcccgtgcttttcccttacactgaccccaacttcctgtgacacggtcagcggccatccctctctccaccccatgaccccactctagtggccataggattgcgctgaacacgaggcacagtgcatgctgtgatgaggggaccgagggggcgtggccgtgcccaggtctgggtgtgaagccaatggccgacagcggacgttagtagagtatggcatgacgtctggcggcgcatgctgaacgtccgaagccattttggctgccatctacctgaagcgatgtctgcctttggtcacgactaggactgaatggagggcggaggctttgggcttgaagccgccccagaaccgaaaccagtctctgtgcaaatctaac

SEQ ID NO: 21198 - DNA, 113 bp, Macaca Mulatta
gaaggcctccgaaagtggatggtgcagcacggtggggacggctgggtggtggaggaaaacaggacaaccgtgcctggggccccttctcagacgtgcttcgtgacctcattcag

SEQ ID NO: 21199 - DNA, 143 bp, Macaca Mulatta
gcagcttttagaagagaagaacatccttgcagaacaactacaagcagagactgagctctttgctgaagcagaagagatgagggcaagacttgctgctaaaaagcaggaattagaagagattctacatgacttggagtctaggg

SEQ ID NO: 21200 - DNA, 848 bp, Macaca Mulatta
  misc_feature (1)...(848): n = A,T,C or G
gctaattttttgtgttttttagtagaannnnnnnnnnnnnnnnnnagccaggatggtgttgatctcctgaccttgcgatccacccgtnnnnnnnnnnnnnnnnnnnnnnnnnnnnnnnnnnnnnnnnngcccctggccctaaattgaattcttaaatccctcttgttcataaaacaatatttcggtttacaggacattttcacattcagtattttgtttgtgcctcacaaaatcctatgaaatttaaatgaccttctgtaattttcatgacataattgtggcagtgctgggtcctggaaataaactattgtacacttcctactgccaggaactatgcaaagagggatccatatacgttacttataccttgcaactcaggtttagtagtagttcctcatcttattgatgaggaaatgaaccccacagtagttagtgacttgattaaggtcacattaggcagctgctggagctgagctaaatggtttcccacctacccacagtgttagtgctatacctgtcaccatgtagtgggtacttggactggaagcctctgctttcaagttgcctcacatctctgccctggatccttgtatataaaataaggttagcagaaaccctggctcactggggcagtggtgtagaataaatgagaatgctatttgagtgcccaannnnnntnncaaccnccaaaaataacacagttaaaacaacaaacccgacggaataaaaaacccttggcggcccccctggaccctcaaaaaactttttttgaaccttttcttttggggcccccggggccccattaggaaaagtgaacaaggggtccaaaacgctggtttccctagggg

SEQ ID NO: 21201 - DNA, 501 bp, Macaca Mulatta
atgcccggctttgccccactgaccagccggggcagccagcagtaccgggccctgacggtggctgagcttacgcagcagatgtttgatgctaggaatatgatggccgcgtgtgacccccgtcatggccgctacctaacggcagatgccattttcaggggtcgcatgcccatgagggagggggatgaacaaatgttcaacattcaaaataacagcagctacttcgctgactggctcccccacaatgtcaaaacagccgtctgtgacatcccgccccgggggctaaaaatttcagccaccttcattgggaacaacacggccatccaggagctcttcaagcgtgtctcagagcagtttacagcaatgttccggggcaaggccttcctccattggtacacctgcgaggggatggatgagatggaatttaccgaggctttgagcaacgtgaacgacctggtttctgagtattaacagtatcaggatgccacagccgaggaggaggag

SEQ ID NO: 21202 - DNA, 372 bp, Macaca Mulatta
  misc_feature (1)...(372): n = A,T,C or G
gtgatggaccctcaaccggagctgtggatagagtccaactacccccaggccccttgggagaacatcacgctttggtgccgaagcccctctcggatatcaagcaagttcctgttgctgaaggataagacacagatgacctggatccgcccttcccacaagaccttccaagtttcattccttataggtgcccttactgagtccaatgcaggtctttaccggtgctgctactggaaggagccaggctggtcaaagcccagtaaagttctagagttggaggcaccaggnggccagctgcccaagcccatcttctggattcaggctgagaccccccctcttcctggatgtaatgttaacatcctctgccatggctgg

SEQ ID NO: 21203 - DNA, 103 bp, Macaca Mulatta
ccagactcgctctttactgagcgtgtttgaagaagatgctggcaccctcacagactacaccaaccagctgctgcaggcgatgcagcgcgtctatggagcccag

SEQ ID NO: 21204 - DNA, 427 bp, Macaca Mulatta
ggttaaagacttaggtcagggcataccgaattcagtaacagacaggcctgaaaccacagaaaatgtctgtcctgaagcttcgaggctgttacttgaatatgaaccacctaccagccatccatcatcaagtcctgccattcttccaccattgatttttcctgctgcagatattgaccggattctccgtgctggctttactttgcaggaagctcttggagctctgcatcgagttggtgggaatgcagaccttgcacttcttgttttgctcgcaaaaaacatcgtagttcctacatgactatgggaaagtgggctagactgttgtccattccctttaaacaaaagaaagctctctctctatacacacacatacacactcaccacatatacagtatatgtagagacctgcaagcagaatgttgagccagat

SEQ ID NO: 21205 - DNA, 1919 bp, Macaca Mulatta
  misc_feature (1)...(1919): n = A,T,C or G
gggaagtccgtgggagtgaccggaggcggtggcggcgagcgtttccttgtggggctagaagaatcctgcaaaaatgtcgctctatccatctcttgaagacttgaaggtagacaaagtaattcaggctcaaactgctttttctgcaaaccctgccaatccagcaattttgtcagaagcttctgctcctatctctcaagatcgaaatctctatcccaaactatatccggagctgtctcaatacatggggctgagtttaaatgaagaagaaatacgtgcaaatgtggccgtggtttctggtgcaccacttcaggggcagttggtagcaagaccttccagtgtgaactatatggtggctcctgtaactggtaatgatgttggaattcgtagagcagaaattaagcaagggattcgtgaagtcattttgtgtaaggatcaagatggaaaaattggactcaggcttaaatcaatagataatggtatatttgttcagctagtccaggctaattctccagcctcattggttggtctgagatttggggaccaagtactccagatcaatggtgaaaactgtgcagggtggagctcagataaagcgcacaaggtgctcaaacaggcttttggagagaagattaccatgaccattcgtgacaggcccctttgaacggacgattaccatgcataaggatagcactggacatgttggttttatctttaaaaatggaaaaaataacatccatagtgaaagatagctctgcagccagaaatggtcttctcacagaacataacatctgtgaaatcaatggacagaatgtcattggattgaaggactctcaaattgcagacatactatcaacatctgggactgtagttactattacaatcatgcctgcttttatctttgaacatattattaagcggatggcaccaagcatcatgaaaagcctaatggaccacaccattcctgaggtttaaaattcacggcaccatggaaatgcagctgaacgtctccagtttccttctttggcaacttctgtattatgcacatgaagctttcccggagccagcaagcatatgctgcatgaggacttttctatcttacattatggctgggaatcttactattttcatctgataccttgttcagatttcaaaatagttgtagccttatcctggttttacagatgtgaaactttcaagagatttactgactttcctagaacagtttctctactggaaacctgatgcttttataagccattgtgattaggatgaactgatacaaggcttagcctttgtgtgaaaaccagtcaccttttctcctaggtaaatgagtagtgcctgtttcaatattactttaagttccatatagcatattttgcatttttttaacctggctaccatagtacatttagaatgattgcctttgattttttaaaaaaattcggtgtgtgtataaaatgccaattaagaacactggtttcattccatgtaagcattaaacagtgtatgtaggttgcaagagattgtgatgattcttaaattttaactaccttcatttaatatgcttaaactgtcgccttaactatgctgagcatctagactaaaagccaaaatataattattgctgcctttctaaaacccaaaatggagatctctattaacctgaaatgtacactagcccagaacagtttaatggtacttactgagctatagcgtagctgcttagttgtttttgagattttttagtcaatgcataatggaaacttcgttcttctagaaggggccagcaccacgttgtgagaagtgaatgactatatatttaatgtaaaagttattacactacacacgataaactgttgactcctcatatggtcatttggggacnannngagaatactgctgagaattcctaacnttnt

SEQ ID NO: 21206 - DNA, 429 bp, Macaca Mulatta
  misc_feature (1)...(429): n = A,T,C or G
gaggtgctccacgtgtcccttctcttcctccgggtcatcagcgcctgcgcagatggcaagatcagaatttacaatttcctcaacgggaactgtatgaaggtgataaaagccaatggcagaggcgatcctgtgctgtccttctttattcagggcaacaggnnnnnnnnnnnnnnnnnnnnnnnnnnnnnnnnnnnnnnnnnnnnnnnnnnnnnnnnnnnnnnnnnnnnnnnnnnnnnnnnnnnnnnnnnnnnnnnnnnnnnnnnnnnnnnnnnnnnnnnnnnnnnnctcatggaaattctctctaagtctaatatgcaggttcacagcccgagagaatctgtatccagtaaacaaactgtgatccaagagcttctaccgagcaaacctcccaagtcccgagtactcctgaagccagccaagttctcttca

SEQ ID NO: 21207 - DNA, 4426 bp, Macaca Mulatta
  misc_feature (1)...(4426): n = A,T,C or G
tctcctacgcctggctgtggttgcttctcttcctcctgctgccgctgctgctactgccactgcccagcacacaccgccagcccctcggggtgtggtttccccagacctgcccccaacggtgggacccagccttctcccggcctcccctgccagcttcctgcaaagcccaggagcccccctccccggagacacacccaactccctttcaacaccccaccctcctcttaaccccattttgggggtaacccccttcctcttatttagtcttcatagatcccctgggtgctctgggactgtgcccaacttcctaacatttgagtccnnnnnnnnnnnnnnnnnnnnnnnnnnnnnnnnnnnnnnnnnnnnnnnnnnnnnnnnnnnnnnnnnnnnnnnnnnnnnnnnnnnnnnnnnnnnnnnnnnnnnnnnnnnnnnnnnnnnnnnnnnnnnnnnnnnnnnnnnnnnnnnnnnnnnnnnnnnnnnnnnnnnnnnnnnnnnnnnnnnnnnnnnnnnnnnnnnnnnnnnnnnnnnnnnnnnnnnnnnnnnnnnnnnnnnnnnnnnnnnnnnnnnnnnnnnnnnnnnnnnnnnnnnnnnnnnnnnnnnnnnnnnnnnnnnnnnnnnnnnnnnnnnnnnnnnnnnnnnnnnnnnnnnnnnnnnnnnnnnnnnnnnnnnnnnnnnnnnnnnnnnnnnnnnnnnnnnnnnnnnnnnnnnnnnnnnnnnnnnnnnnnnnnnnnnnnnnnnnnnnnnnnnnnnnnnnnnnnnnnnnnnnnnnnnnnnnnnnnnnnnnnnnnnnnnnnnnnnnnnnnnnnnnnnnnnnnnnnnnnnnnnnnnnnnnnnnnnnnnnnnnnnnnnnnnnnnnnnnnnnnnnnnnnnnnnnnnnnnnnnnnnnnnnnnnnnnnnnnnnnnnnnnnnnnnnnnnnnnnnnnnnnnnnnnnnnnnnnnnnnnnnnnnnnnnnnnnnnnnnnnnnnnnnnnnnnnnnnnnnnnnnnnnnnnnnnnnnnnnnnnnnnnnnnnnnnnnnnnnnnnnnnnnnnnnnnnnnnnnnnnnnnnnnnnnnnnnnnnnnnnnnnnnnnnnnnnnnnnnnnnnnnnnnnnnnnnnnnnnnnnnnnnnnnnnnnnnnnnnnnnnnnnnnnnnnnnnnnnnnnnnnnnnnnnnnnnnnnnnnnnnnnnnnnnnnnnnnnnnnnnnnnnnnnnnnnnnnnnnnnnnnnnnnnnnnnnnnnnnnnnnnnnnnnnnnnnnnnnnnnnnnnnnnnnnnnnnnnnnnnnnnnnnnnnnnnnnnnnnnnnnnnnnnnnnnnnnnngcctggccacgtggctgccttttgcccgggcggcagcggtgggctggctgcccctggcccagcagcccctgcccccagcaccgggggtgaagacatctcgaggagatgaggttctggtggtgaacgtgagcggacggcgctntgagacctggaagaatacgctggaccgctacccagataccttgttgggcagctcagagaaggaattcttctacgatgctgactcaggcgagtacttcttcgatcgcgaccctgacatgttccgccatgtgctgaacttctaccgaacggggcgtctgcactgcccacggcaggagtgcatccaggccttcgacgaagagctggccttctacggcctggtccccgagctagttggtgactgctgccttgaagagtatcgggaccgaaagaaggagaatgccgagcgcctggcagaggatgaggaggccgagcaggccggggacggcccagccctgcctgcgggcagctccctgcggcagcggctctggcgggccttcgagaatccacatacgagcactgcagccctcgttttctactacgtgaccggcttcttcatcgccgtgtcggtcatcgccaatgtggtggagaccatcccatgccgcggcgctgcacgcaggtcctcgagggagcagccctgtggcgaacgcttcccacaggcctttttctgcatggacacagcctgtgtactcatattcacaggtgaatatctcctgcggctgtttgctgcccccagccgttgccgcttcctgcggagtgtcatgagcctcattgacgtggtggccatcctgccctactacattgggcttttggtgcccaagaacgacgatgtctcaggcgcctttgtcaccctgcgtgtgttccgggtgtttcgcatcttcaagttctccaggcactcacagggcttgaggattctgggctacacactcaagagctgtgcctctgagctgggctttctcctcttttctctaaccatggccatcatcatcaaggcactgtcatgttttatgnnnnnnnnnnnnnnnnnnnnnnnnnnnnnnnnnnnnnnnnnnnnnnnnnnnnnnnnnnnnnnnnnnnnnnnnnnnnnnnnnnnnnnnnnnnnnnnnnnnnnnnnnnnnnnnnnnnnnnnnnnnnnnnnnnnnnnnnnnnnnnnnnnnnnnnnnnnnnnnnnnnnnnnnnnnnnnnnnnnnnnnnnnnnnnnnnnnnnnnnnnnnnnnnnnnnnnnncgggctgacaagcgccgagcacagcagngcagaaggtgcgcttggcaaggatccgattggcaaagagtggtaccaccaatgccttcctgcagtacaagcagaatgggggccttgaggnaggacagcggcagtggcgaggaacaggctctttgtgtcaggaaccgttctgcctttgaacagcaacatcaccacttgctgcattgtctagagaagacaacgnnnatgagttcacagacgagctcaccttcagcgaagccctgggagccgtctcgccgggtggccgcaccagccgcagcacctctgtgtcttcccagccaatgggacacggaagcctgctgtnnnnnnnnnnnnnnnnnnnnnnnnnnnnnnnnnnnnnnnnnnnnnnnnnnnnnnnnnnnnnnnnnnnnnnnnnnnnnnnnnnnnnnnnnnnnnnnnnnnnnnnnnnnnnnnnnnnnnnnnnnnnnnnnnnnnnnnnnnnnnnnnnnnnnnnnnnnnnnnnnnnnnnnnnnnnnnnnnnnnnnnnnnnnnnnnnnnnnnnnnnnnnnnnnnnnnnnnnnnnnnnnnnnnnnnnnnnnnnnnnnnnnnnnnnnnnnnnnnnnnnnnnnnnnnnnnnnnnnnnnnnnnnnnnnnnnnnnnnnnnnnnnnnnnnnnnnnnnnnnnnnnnnnnnnnnnnnnnnnnnnnnnnnnnnnnnnnnnnnnnnnnnnnnnnnnnnnnnnnnnnnnnnnnnnnnnnnnnnnnnnnnnnnnnnnnnnnnnnnnnnnnnnnnnnnnnnnnnnnnnnnnnnnnnnnnnnnnnnnnnnnnnnnnnnnnnnnnnnnnnnnnnnnnnnnnnnnnnnnnnnnnnnnnnnnnnnnnnnnagccaggaaatgggaaacttccccccaccccagacatttttcctggtgggagctgaagcactgggcttccacaggcccctggcctccttgccccagcacactgggactggccccactctcccagctggactcctgcatgctcctccccttgggctctcagttgaaggtaaagctttgatctgatatctgaggtctggcctaagaaggagagttgagacttccacctccctctggctgggatatggagctttggaggttcagagaagagaaccctcacctctgatctggcctctacacgaggtcctcaccctctatctggcccaacaattcccagattctgaagcttggaatgcaaacacaggcttcatgggctgtggcctctgcagtgacctgccatccccaggccttgcctgaggggtcaggctgcctctcccaacacacagatagcacaaattctaccatccccttccctggctgctggaaatgggaccccgcaaccctgtcctctgccgggcccccagcaaactctagcaatagcagctgctgccgtgtcattatgcaaagcctctgaccagtttgctgcagcatttnnnnnnnnnnnnnnnnnnnnnnnnnnnnnnnnnnnnnnnnnnnnnnnnnnnnnnnnnnnnnnnnnnnnnnnnnnnngttgggctggagtctggactggccaagataagagcctggcaaccagcaagagctgggctgtatttggagatcatgggctgattccatgttcttgggcaagagtccagaagcatcaggggctcaggcctgggatgtttttgaactttgggagttataggagacaggaggaacttctcctcctcctcccctacaattccttttcccatattcctttcttctccctcttgggtcaccttccagaactctgctctcaggctgaaatctggcatcatctcaggttccctgtccccagcactgtccccatggagctggcggctgacaaagatgtagtttccatcagtcaataaaacctgagaggag

SEQ ID NO: 21208 - DNA, 432 bp, Macaca Mulatta
atgagatagatcactacttctgttatgtgtatcctttgctgaaattggcttgttctaatatactcatgataggtctcttagtcattgctaattcgggcttaattgctttggtgacatttgttgtcttgatgttgtcttacgtttttatattgtataccatcagaggcatattctgcagagagccgcagcaaagctctttccactggcagttctcatgtaatggttgtagtcctgtttttagcacctgcaatattcatttacattagaccggtcacaacgttctcagaagataaagtgtttgcccttttttataccatcattgctcccatgttcaaccctctcatctacaatctgagaaacagggagatgaagaacaccatgaggaaagtgtggtgttgtcaaatactcctgaaaggaaatgaacttttctga

SEQ ID NO: 21209 - DNA, 937 bp, Macaca Mulatta
  misc_feature (1)...(937): n = A,T,C or G
gggaaaacgttcttcgccgagagtcgtcggggtttcctgcttcaacagtgcttggacggaacccggcgctcgtcccccatcccggccggccgcccatagccagccttccgtctcctcttcaccgcgtcctcggactgccccaagggccccgccgccgctccagcgccgcgcagccaccgccgccgccgcctgtccttagcctccgccatgacgaccgcgtccacctcgcaggtgcgccagaactaccaccaggactcagaggccgccatcaaccgccagatcaatctggagctctacgcttcctacgtttacctgttcatgtcttactactttgaccgcgatgatgtggctttgaagaactttgccaaatacttttcttcaccaaatctcatgaggaaaggggaacatgcctgagaaaactggattgaagcctggcggaaacaaacggagggtggggccgaaaatctttccctttccggggataattttaaggaaaaaccccggaaacttaattgaaacggaaccggctgaatgcaatggactgggggccctttggaaaatggcccaacatgggggaaagattgggggggcctttttataaacattttttgannnnnnnnnnnnnnnnnnnnnnnnnggggggaaaattcacaaagtgtccaccattaaacaggggagaaaaaatagggggaccacaaaaacagggggggggccccctcggtggggccgcaaaaaaatatggtgggannnnnnnnnnnnnnnnnttnnnnnnnnnnnnnnnnccttttcccctttgggggggaggaccaccccctttttaaccccttgggggaaaaagtggggagcccacggggggnnnnnnnnnnnnnnnnnnccattnnnnnnnnnnnnnnnnnnnnnnnnnnnnnnnnaaaaacccaccgtgtggggtaagcaa

SEQ ID NO: 21210 - DNA, 1106 bp, Macaca Mulatta
  misc_feature (1)...(1106): n = A,T,C or G
gtgtttgtgaccctcacctgcgccttccgctatggccgtgaagacctggatgtgctgggcttgtccttccgtaaagacctgttcatcgccacctaccaggccttccccccggtgcccaacccgccccggcctgccacccgcctgcaggaccggctgctgaggaagcttggccagcatgcacaccccttcttcttcaccnnnnnnnnnnnnnnnnnnnnnnnnnnnnnnnnnnnnnnnnnnnnnnnnnnnnnnnnnnnnnnnnnnnnnnnnnnnnnnnnnnnnnnnnnnnnnnnnnnnnnnnnnnnnnnnnnnnnnnnnnnnnnnnnnnnnnnnnnnnnnnnnnnnnnnnnnnnnnnnnnnnnnnnnnnnnnnnnnnnnnnnnnnnnnnnnnnnnnnnnnnnnnnnnnnnnnnnnnnnnnnnnnnnnnnnnnnnnnnnnnnnnnnnnnnnnnnnnnnnnnnnnnnnnnnnnnnnnnnnnnnnnnnnnnnnnnnnnnnnnnnnnnnnnnnnnnnnnnnnnnnnnnnnnnnnnnnnnnnnnnnnnnnnnnnnnnnnnnnnnnnnnnnnnnnnnnnnnnnnnnnnnnnnnnnnnnnnnnnnnnnnnnnnnnnnnnnnnnnnnnnnnnnnnnnnnnnnnnnnnnnnnnnnnnnnnnnnnnnnnnnnnnnnnnnnnnnnnnnnnnnnnnnnnnnnnnnnnnnnnnnnnnnnnnnnnnnnnnnnnnnnnnnnnnnnnnnnnnnnnnnnnnnnnnnnnnnnnnnnnnnnnnnnnnnnnnnnnnnnnnnnnnnnnnnnnnnnnnnnnnnnnnnnnnnnnnnnnnnnnnnnnnnnnnnnnnnnnnnnnnnnnnnnnnnnnnnnnnnnnnnnnnnnnnnnnnnnnnnnnnnnnnnnnnnnnnnnnnnnnnnnnnnnnnnnnnnnnnnnnnnnnnnnnnnnnnnnnnnnnnnnnnnnnnnnnnnnnnnnnnnnnnnnnnnnnnnnnnnnnnnnnnnnnnnnnnnnnnnnnnnnnnnnnnnnnnnnctatgccacagatgatgacattgtgtttgaggactttgcccggcttcggctgaaggggatgaaggatgacgactatgatgaccaactctgcta

SEQ ID NO: 21211 - DNA, 400 bp, Macaca Mulatta
  misc_feature (1)...(400): n = A,T,C or G
agagtctgtctttcagagcacaggatggaacaagaactccagccactgactctgtctcatgtatctgcaagggcctaggagattaatgacccaaggaggctatgatatggtccaaaaacttttcctggattttttcnnnnnnnnnnnnnnnnnnnnnnnnnnnnnnnnnnnnnnnnnnnnnnnnnnnnnnnnnnnnnnnnnnnnnnnnnnnnnnnnnnnnnnnnnnnnnnnnnnnnnnnnnnnnnnnnnnnnnnnnnnnnnnnnnnnnnnnnnnnnnnnnnnnnnnnnnnnggaaagaaagatcctcatccgcttcagtgactacgtggaggtggctgacgctcaggactatgaccgcagggcagataagccgtggacccgcctcactgctgcagacaaa

SEQ ID NO: 21212 - DNA, 181 bp, Macaca Mulatta
ctcaatacttaggatgccttgccaagaagccaagcaatgactcacatctcagctcagaagttcctccaaagatgacatgggtagatcagaggtttccaaacataagagagacttagaatgacttggggaaaatataatgaatccgaatcttaaggtttgtggaggttctcagagggatcac

SEQ ID NO: 21213 - DNA, 792 bp, Macaca Mulatta
  misc_feature (1)...(792): n = A,T,C or G
gggaaaactgccgccttattgaggaacttgaaaatggctctgaagatattgatatacttcctagtgggctggcttttatctccagtggattaaaatatccaggcctgccaaactttgcaccagatgagccaggaaaaatcttcttgatggatctgaatgaacaaaatccaagggcacaagcactagaaatcagtggtggatttgacaaagaattatttaatccacatgggatcagtattttcatcgacaaagaccatacagtgtatctttatgttgtgaatcatccccacatgaagtccaccgtggagatatttaaatttgaggaacaacaacgttctctggtatacctgaaaactataaaacacgaacttctcaaaagtgtgaatgacattgtggtacttggaccagaacagttctatgccaccagagaccactattttaccacccccttcctgtcattatttgagatgatcttggatcttcgctggaactatgttcttttctacagcccaaaagaggtttaaagtggtgcgccaaaggattttgtaagtgccaatggggatcgcagtcccccgcagaaccagaaagtattgtctaatgtcagcctgaaggtataccacccaagaaacctttcccatttaatgggaaaaaaccatgattaacctgggggatttttaacctccaccttggaagggaaagacatttttttggccaatggaatgccccacatcccttatatccctcaatgaanaagcctgcccttgaatccttaaatatacaccctgtgacagg

SEQ ID NO: 21214 - DNA, 1795 bp, Macaca Mulatta
  misc_feature (1)...(1795): n = A,T,C or G
caagatcgctgtgctggtgctgctgaacgagatgagccgcacaggcgagggcgccgtcagcctcatggagcggcggaggctcaaccagctgctcctgcccctgctgcaggnnnnnnnnnnnnnnnnnnnnnnnnnnnnnnnnnnnnnnnnnnnnnnnnnnnnnnnnnnnnnnnnnnnnnnnnnnnnnnnnnnnnnnnnnnnnnnnnnnnnnnnnnnnnnnnnnnnnnnnnnnnnnnnnnnnnnnnnnnnnnnnnnnnnnnnnnnnnnnnnnnnnnnnnnnnnnnnnnnnnnnnnnnnnnnnnnnnnnnnnnnnnnnnnnnnnnnnnnnnnnnnnnnnnnnnnnnnnnnnnnnnnnnnnnnnnnnnnnnnnnnnnnnnnnnnnnnnnnnnnnnnnnnnnnnnnnnnnnnnnnnnnnnnnnnnnnnnnnnnnnnnnnnnnnnnnnnnnnnnnnnnnnnnnnnnnnnnnnnnnnnnnnnnnnnnnnnnnnnnnnnnnnnnnnnnnnnnnnnnnnnnnnnnnnnnnnnnnnnnnnnnnnnnnnnnnnnnnnnnnnnnnnnnnnnnnnnnnnnnnnnnnnnnnnnnnnnnnnnnnnnnnnnnnnnnnnnnnnnnnnnnnnnnnnnnnnnnnnnnnnnnnnnnnnnnnnnnnnnnnnnnnnnnnnnnnnnnnnnnnnnnnnnnnnnnnnnnnnnnnnnnnnnnnnnnnnnnnnnnnnnnnnnnnnnnnnnnnnnnnnnnnnnnnnnnnnnnnnnnnnnnnnnnnnnnnnnnnnnnnnnnnnnnnnnnnnnnnnnnnnnnnnnnnnnnnnnnnnnnnnnnnnnnnnnnnnnnnnnnnnnnnnnnnnnnnnnnnnnnnnnnnnnnnnnnnnnnnnnnnnnnnnnnnnnnnnnnnnnnnnnnnnnnnnnnnnnnnnnnnnnnnnnnnnnnnnnnnnnnnnnnnnnnnnnnnnnnnnnnnnnnnnnnnnnnnnnnnnnnnnnnnnnnnnnnnnnnnnnnnnnnnnnnnnnnnnnnnnnnnnnnnnnnnnnnnnnnnnnnnnnnnnnnnnnnnnnnnnnnnnnnnnnnnnnnnnnnnnnnnnnnnnnnnnnnnnnnnnnnnnnnnnnnnnnnnnnnnnnnnnnnnnnnnnnnnnnnnnnnnnnnnnnnnnnnnnnnnnnnnnnnnnnnnnnnnnnnnnnnnnnnnnnnnnnnnnnnnnnnnnnnnnnnnnnnnnnnnnnnnnnnnnnnnnnnnnnnnnnnnnnnnnnnnnnnnnnnnnnnnnnnnnnnnnnnnnnnnnnnnnnnnnnnnnnnnnnnnnnnnnnnnnnnnnnnnnnnnnnnnnnnnnnnnnnnnnnnnnnnnnnnnnnnnnnnnnnnnnnnnnnnnnnnnnnnnnnnnnnnnnnnnnnnnnnnnnnnnnnnnnnnnnnnnnnnnnnnnnnnnnnnnnnnnnnnnnnnnnnnnnnnnnnnnnnnnnnnnnnnnnnnnnnnnnnnnnnnnnnnnnnnnnnnnnnnnnnnnnnnnnnnnnnnnnnnnnnnnnnnnnnnnnnnnnnnnnnnnnnnnnnnnnnnnnnnnnnnnnnnnnnnnnnnnnnnnnnnnnnnnnnnnnnnnnnnnnnnnnnnnnnnnnnnnnnnnnnnnnnnnnnnnnnnnnnnnnnnnnnnnnnnnnnnnnnnnnntcagtgtcctactgtccgtggcagagctgtactggcgatcttcctcccctaccatcgcgctgcccatgctcctgcaggccttggccctctccaatgagtaccggttacaatacttggcctctgaaacggtgctgaacttggcttttgcgca

SEQ ID NO: 21215 - DNA, 827 bp, Macaca Mulatta
gcttgggccttatcccagttctgttacagactccttctaggaagagggtccccctcctcttctcctgagtgtccccgtcaggatgtagcctcctggctgtgaggcctgttttgcagattgttgacggtatctttgggaggtgatgtgtgctgctgttagcacccatggtgttggcggcttcatcagggctggggtccagggcagaggctggagcacgccccagggatgagcctgttggttctcccagctcagggatgtaacttgactgtttcttcccagtcaattcaacactttttgagtgcttttacaagcagagcatagtacttttattctggaagctgaccgggtagtggtgccttcctgtctgtaatatgtatgcacacatataccacgtgggtcagtgcctctcagatctctgggctcagctggaaatagcagaaggacaggctccttggtggacccgctgagttatgtctcttccgcaggagcaagtgccgagaggttgccccgatgggctctgcccactggacgtgttcttgaacgccatgtcagtttataccttaagcccaggagaataccacacactctgctctcaaactcaggtgatggaagttggaaatggagagtaactgatttatacaagcaggatgtgttgattttaaaataaagtgcctttatacaatgcctcctgctttgtgtgtttgggaagaggagagagcaaggggtaaggtactttaatataaggtaaggatatttcctttctgtgggtatattaaggtttcttcctgaaaggaaaaggggtataatattgagaccaaaaggatatt

SEQ ID NO: 21216 - DNA, 612 bp, Macaca Mulatta
  misc_feature (1)...(612): n = A,T,C or G
ncagactccagcctgcttcaggacaacgtggccttcgtgctgtgcctggacaccgtgggccgaggcagcagcctgcacctgcacgtgtccaagccgccccgggagggcaccttgcagcacgccttcctgcgggagctggagacggtgnnnnnnnnnnnnnnnnnnnnnnnnnnnnnnnnnnnnnnnnnnnnnnnnnnnnnnnnnnnnnnnnnnnnnnnnnnnnnnnnnnnnnnnnnnnnnnnnnnnnnnnnnnnnnnnnnnnnnnnnnnnnnnnnnnnnnnnnnnnnnnnnnnnnnnnnnnnnnnnnnnnnnnnnnnnnnnnnnnnnnnnnnnnnnnnnnnnnnnnnnnnnnnnnnnnnnnnnnnnnnnnnnnnnnnnnnnnnnnnnnnnnnnnnnnnnnnnnnnnnnnnnnnnnnnnnnnnnnnnnnnnnnnnnnnnnnnnnnnnnnnnnnnnnnnnnnnnnnnnnnnnnnnnnnnnnnnnnnnnnnnnnnnnnnnnnnnnnnnnnnnnnnnnnnggtggacaaggacagcaccttcctctcacgctggagcaccacctgagccgctacctgaaggacgttaagcagcaccacgtcaaggccgacaagcgg

SEQ ID NO: 21217 - DNA, 153 bp, Macaca Mulatta
ggcagctgtgctgagaatacagcaaagaagctgaatattgcacgagatgaacaggacgcttatgctattaattcttataccagaagtaaagcagcatgggaagctgggaaatttggaaatgaagttattcctgtcacagttacagtaaaaggt

SEQ ID NO: 21218 - DNA, 526 bp, Macaca Mulatta
atcttccttagctgaaagtgaaaatgaagcctaagccctggtctaaacgctgggaacgtccaaattttgatattaaaggaatcagatttgatctttgtttaactgaagagcaaatggaagaagctcagaagtggagtcagccatggcttgaatttgatatgatgagggaatatgatacttcaaaaattgaagctgcaatatggaaggaaattgaagcgtcgaaaaggtcttgattctgagaatgaatttggttagttgcagaagattattggctctaagaggatatattttgagaccaatttaatttcatttataagaacatagtaattaagtgacctaaacattcattgttttaatacttttttgtaaaataaaacttgtacaccagtttattactctaaaaagagaattacacatgccaaatggtccgatgtccatttgcttattggaggtaaagctacaatagaagtcagagcatcaccagaatgttctttaatgagcatggaacctgagcaaggggaatagt

SEQ ID NO: 21219 - DNA, 923 bp, Macaca Mulatta
acgctcggacttgctagacgcttctcaaaactggacagtcactgccactttgcacattttgattttttttaaacaaacattgtgttgacattaagaatgttggtttactttcaaatcggtcccctgtcgagttcggctctgggtggggagcaggaccaccagtgtggggttctgctgggaccttggagagcctgcctcccaggacgctgggtggccctgcagcctcctccacctcacctccatgacagcggtaaaagttggtgacggttgggagcctctggggctgttgaagtcaccttgtgtgttccaagtttccaaacaacagaaagtcactccttcttttttaaaatggtgcttaagttccagcagatgccacgtaaggggtttgccatttgatacccctggggaacatttctgtaaataccattgacacatccgccttttgtatacgtcctgggtaatgagaggtggcttttgcggccagtattagactggaagttcatacctaagtactgtaataatacctcaatgtttgaggagcatgttttgtatacaaatatattgttaatctctgttatgtactgtactaattcttacactgcctgtatactttagtatgacgctgatacataactaaatttgatacttatattttcgtatgaaaatgagttgtgaaagttttgagtagatattactttatcactttttgaactaagaaacttttgtaaagaagtaaactatatatatatgcctttttcctagcctgtttcttcctgttaatgtatttgttcatgtttggtgcatagaactgggtaaatgcaaagttctgtgtttaatttcttcaaaatgtatatatttagtgctgcatcttatagcactttgaaatacctcatgtttatgaaaataaatagcttaaaattaaa

SEQ ID NO: 21220 - DNA, 3563 bp, Macaca Mulatta
  misc_feature (1)...(3563): n = A,T,C or G
acctgctcaaagtccttaccagggaaaaagaaaactatccacactttttcctggattttgaatgctcagcctacagaaggagagagagaaatctggaaccagatcagcgccgtccttcaggattctgagagcatccttgcagacctgcaggcttacaaaggcgcaggcccagagatccgagannnnnnnnnnnnnnnnnnnnnnnnnnnnnnnnnnnnnnnnnnnnnnnnnnnnnnnnnnnnnnnnnnnnnnnnnnnnnnnnnnnnnnnnnnnnnnnnnnnnnnnnnnnnnnnnnnnnnnnnnnnnnnnnnnnnnnnnnnnnnnnnnnnnnnnnnnnnnnnnnnnnnnnnnnnnnnnnnnnnnnnnnnnnnnnnnnnnnnnnnnnnnnnnnnnnnnnnnnnnnnnnnnnnnnnnnnnnnnnnnnnnnnnnnnnnnnnnnnnnnnnnnnnnnnnnnnnnnnnnnnnnnnnnnnnnnnnnnnnnnnnnnnnnnnnnnnnnnnnnnnnnnnnnnnnnnnnnnnnnnnnnnnnnnnnnnnnnnnnnnnnnnnnnnnnnnnnnnnnnnnnnnnnnnnnnnnnnnnnnnnnnnnnnnnnnnnnnnnnnnnnnnnnnnnnnnnnnnnnnnnnnnnnnnnnnnnnnnnnnnnnnnnnnnnnnnnnnnnnnnnnnnnnnnnnnnnnnnnnnnnnnnnnnnnnnnnnnnnnggagtacagaagtaggtttacgagtgaagagaccctgatgttctgcatgagggtgatggtgggagtcatcatcctctatgaccatgtccaccctgtgggagctttctgcaagacgtccaagatcgannnnnnnnnnnnnnnnnnnnnnnnnnnnnnnnnnnnnnagacagtgtggaggggctgctaaatgccctcaggnnnnaggttcactacaaagcacttgaatgatgaatcgacttccaaacagattcgagcaatgcttcagtagagctctgctcaaagaagaggatctatgtgctgacctcagaagatgtatatgtttacataatttaatacagattgatgttaatacttgtgtatttacataaccgtttccttcttgtcactgaaatatatggaccttaatttgtatcctaactgactcaacccagcagagcataaattgacttgagagccttacctttgatgtctgaaatgaaacccccttctccaaaggcaaaattcagagactttgatctttgctactggagtcctttaacaacacctgtaacgataaaaaattcctaattgtttgtggtagtattttaattctagacgtgttatctctctgggacgtatagtttatagaaacacaacatatttgatttcctgtgtcggctcagctacaagaaacacaactgttatcttgacagaggaagaggggaatccaagaaaaatgcatgtggagaattaaacccaagtgttctgaattcagcacaccccttctctgtcctcagactggagtccacacgtgcaacttttctgtttgcacgtgttttattaatcagcatattccttttctgtttggatttatatccctctaatgnnnnnnnnnnnnnnnnnnnnnnnnnnnnnntcctgtattttaatcagttagtaggagagcagcagaaatagatagatgtgctgttgccactggactgatgaaggtggctgtcttggaactgggagacaggtccacagaggtgcactcaggcaacaggacagccatctctctgcttcagccctctgcctatagggattagggaaatggagctctggctttgaagttatttgtgagtttagcaacttccagttacctgcagagtgctgggtgcacagcaccccctcataggagccctgttctctgaagactctacaagaaaaaaggtctagggtactccattagctaccagaatggtataggggaatttagaggggaaaaaaatccatgttttctgtttcccaggtttttaaaaagtagctcttccccaaccccattgctagcttgttgcaatgtgaaagctctggtgcacctgaatttactcctggccttactaatgannnnnnnnnnnnnnnnnnnnnnnnnnnnnnnnnnnnnnnnnnnnnnnnnnnnnnnnnnnnnnnnnnnnnnnnnnnnnnnnnnnnnnnnnnnnnnnnnnnnnnnnnnnnnnnnnnnnnnnnnnnnnnnnnnnnnnnnnnnnnnnnnnnnnnnnnnnnnnnnnnnnnnnnnnnnnnnnnnnnnnnnnnnnnnnnnnnnnnnnnnnnnnnnnnnnnnnnnnnnnnnnnnnnnnnnnnnnnnnnnnnnnnnnnnnnnnnnnnnnnnnnnnnnnnnnnnnnnnnnnnnnnnnnnnnnnnnnnnnnnnnnnnnnnnnnnnnnnnnnnnnnnnnnnnnnnnnnnnnnnnnnnnnnnnnnnnnnnnnnnnnnnnnnnnnnnnnnnnnnnnnnnnnnnnnnnnnnnnnnnnnnnnnnnnnnnnnnnnnnnnnnnnnnnnnnnnnnnnnnnnnnnnnnnnnnnnnnnnnnntttccagtagaaggagccacccagacgtttagtgaatgataatcctagaagttgagtctgagtacatcagagtttggcattatttgcaatatcccaggaaggagctgtaagacaccattgctttctggactttagtgaccagctgatctacccttggatcctccaagaaaagggaaaaaacacttgtcttatgttgttttagcaagggagttcagtcaagtggcaggaaagattccctggtctgcatctaaacatcagtccacagagaaggaaaaggctcttttacttggagattttcaagttgaagaagtacaactgcttggatggagggcctgtcatcagaatagaaatatgctagatggtcttcaagacctttttgaacctatggattctaaaccctagaggaagccagaatatgtgatcataccatctgaggaaagttaggagatattcatcttaagagatattctatttggcagtcacttgttacacttgagcaacaattgtctaaactagaaagatagaaccacacaatgtttatcatcattgggtcaatttctccccctctatcgagtgaggagattaaggcttgaagaaaggaaaggacttgccaaccaccacagggctcatgagggacttggacccatgtcctgtgtctctaccacagctgactctcagctggctaaaggagaaaatgtgaggaattacctgtcaaattagattgagctcagagtaaatagatgagcacattgataactctaaattagactttctacaaatgggaccaaacatatggaaggggctgctggcctgcctcaatgtagccaggccaccttgtctcaaagccaagactcagcagtacatggattctgagaagtccagggtctgaattgtctctgattactggaaggacaggttaactgaatgtctgtgatcactaacaggtgatgggctttgtgcccactccagagatattgtgggagacaaattctaacaggctgtcctcccggcatcaggagtcaaaggacaatcatggatt

SEQ ID NO: 21221 - DNA, 145 bp, Macaca Mulatta
tcagacatccagtagcatcatttttccacttattctttcgagtcagtgcaatcgtcgtctatcttctctgtgagttgctcagcagcagctttattacctgtatggtgacaattatcttgttgttgtcgtgtgacttttgggcagt

SEQ ID NO: 21222 - DNA, 127 bp, Macaca Mulatta
cctgcctgggaccagggcaacaggaaggggggccctcgtgtgagagaacaacttcacctgctgaagcaacagctaagacatctgcaagagcacatcctacaggctgccaagcccagggacacagctc

SEQ ID NO: 21223 - DNA, 743 bp, Macaca Mulatta
  misc_feature (1)...(743): n = A,T,C or G
aattggcgggaaactccctttatgatatctgcagcacctgtaataataccncagagaacagctttgctactgcgaaatcttggattcactgccatccccctccatggacaaatgagtcagagtaagcgcctaggatcccttaataagtttaaggccaaggcccgttccattcttctagcaactgacgttgccagccggggtttggacatacctcatgtagatgtagttgtcaactttgacattcctacccattccaaggattacatccatcgagtaggtcgaacagctagagctgggcgctccggaaaggctattacttttgtcacgcagtatgacgtggaactcttccagcgcatagaacacttaattgggaagaaactaccagtctttccaacacaggatgatgaggttatgatgctggcagaacgcgtggctgaagcccaaagatttgcccgaatggagttaagggagcatggagaaaagaagaaacgctcgcgagaggatgctggagataatgatgatacagagggcgctattggtgtcaggaacaaggtggctggaggaaaaatgaagaagcggaaaggccgttaatcacttttatgaaggctcacgttctgctgttctgtgaaagagaactggagaatgaaacctgctccgacagagatcgtgagactgaaatctgtcagaattgtgtgcagaatgtgctccgtgaattcagtactcttccccattctgggttggag

SEQ ID NO: 21224 - DNA, 1016 bp, Macaca Mulatta
  misc_feature (1)...(1016): n = A,T,C or G
gcagggccgccacgcctcacaggacgagctggcagcctcagcataccaggcagtggaggtggatcggcagtttgacggggccgctgtgcaggttcgagtcaggatggggacggagccacgccacttcatggccatcttcaaagggaagctagttatctttgagnnnnnnnnnnnnnnnnnnnnnnnnnnnnnnnnnnnnnnnnnnnnnnnnnnnnnnnnnnnnnnnnnnnnnnnnnnnnnnnnnnnnnnnnnnnnnnnnnnnnnnnnnnnnnnnnnnnnnnnnnnnnnnnnnnnnnnnnnnnnnnnnnnnnnnnnnnnnnnnnnnnnnnnnnnnnnnnnnnnnnnnnnnnnnnnnnnnnnnnnnnnnnnnnnnnnnnnnnnnnnnnnnnnnnnnnnnnnnnnnnnnnnnnnnnnnnnnnnnnnnnnnnnnnnnnnnnnnnnnnnnnnnnnnnnnnnnnnnnnnnnnnnnnnnnnnnnnnnnnnnnnnnnnnnnnnnnnnnnnnnnnnnnnnnnnnnnnnnnnnnnnnnnnnnnnnnnnnnnnnnnnnnnnnnnnnnnnnnnnnnnnnnnnnnnnnnnnnnnnnnnnnnnnnnnnnnnnnnnnnnnnnnnnnnnnnnnnnnnnnnnnnnnnnnnnnnnnnnnnnnnnnnnnnnnnnnnnnnnnnnnnnnnnnnnnnnnnnnnnnnnnnnnnnnnnnnnnnnnnnnnnnnnnnnnnnnnnnnnnnnnnnnnnnnnnnnnnnnnnnnnnnnnnnnnnnnnnnnnnnnnnnnnnnnnnnnnnnnnnnnnnnnnnnnnnnnnnnnnnnnnnnnnnnnnnnnnnnnnnnnnnnnnnnnnnnnnnnnnnnnnnnnnnnnnnnnnnnnnnnnnnnnnnnnnnnnnnnnnnnnnnnnnnnacatgaagaatgcaaccctctccgtgaattctattgacagtgagtcaaaatattaccctatagcagttctgttgaaaaaccagaatcaggagctacctgaggatgtaaaccctgccaaaaaggag

SEQ ID NO: 21225 - DNA, 587 bp, Macaca Mulatta
gatgttcgccatccagccagggctagctgaggggggccaattcctggtggacccacctcctggagtatgtcagcccgagctccaaccagacaacaactccaacttcatggcaagtgccaaggatgctaatgagaattggcatgggatgccaggcagagtggaacctatcctgaggaggagctcctctgagtcgccctctgacaaccaggacttccaggcccctggatcccctgaggaaggggtgcgcagccccccagagggggcagagattcccggggctgagcctgagaagatgggtggtcctggcacagtctgctcccctctggaggacaatggctatgccagcagttccttgagtatcaacagccctagcagcagtcctgagcctgcctgtgggaccccgcgaggccttggccctcccgatccccttctgccctcagtggcccaggctgtgcagcacttacaagcccaggagcgctacaaagagcaggagaaagaaaagcaccacgtgcacttggtgatgtaccgtcgcctggcactgctccagtggatccggggcctgcagcatcagttgattgaccagcagg

SEQ ID NO: 21226 - DNA, 217 bp, Macaca Mulatta
acataggaggcacatgcacaggcgcttttaggggtcctggcgcccctgggaaaagtagagaagaaccgcactccagctttcaaaaatcttgtacagcaagtgtggtttggaaagcaggacgcagcatggcacaggggctatcactcctggctaatgaataagccttaggctccagggcttgcttgctgctacttccacacaatgcctgcccctcatc

SEQ ID NO: 21227 - DNA, 772 bp, Macaca Mulatta
ggggccacttccgggcgcgtcgccggcttgctgccactgccccgccatggaagacacgccgttggtgatatcaaaacagaagacggaggtggtgtgcggggtccccacccaagtggtgtgcacggccttcagcagtcacatcctggtggtggtgactcagttcgggaagatgggtaccttggtctccctggagcccagcagcgtggccagtgacgtcagcaagcctgtgctcaccacgaaagtccttctggggcaggatgagcctctcatccatgtctttgcaaagaacctggtagcatttgtgtctcaagaagctggaaacagagcagtcctccttgccgtggccgtgaaggacaaaaacatggagggtctgaaggcgctgagggaggtgatccgggtgtgccaggtgtggtgacctggaggcagctgccccgcactgctcagcaggacacgtgaggacccagacacccactcagggactcaagtctcgcctccctccccggtggagggaggaactttgtctggcactaacccttggagcccagaaaaaaaattcgtgtctcaagcagactcttaatctggtttactaaaatcatctgtgcatgaacgggaagggtggaaacgggtgccaagggaagttgtgaaatggattctcactggggaacctgaaactttgcttgtggtttaagaacttggcaggaaatgaattccatcagggcgtggggctcatgggcccccccgtggtaccggaaatccaatggggggaaagaaa

SEQ ID NO: 21228 - DNA, 574 bp, Macaca Mulatta
cagccatattgaaatccctaatgtacttaaaatataatccatacaattgctctgaaataaatctattatgtgaaatcatcaatatgaaatggccatgagacttctactctgtttcataccctggcattcttttggtctctggcattaattagctcaaaagttcttggttgttctaagcgttacctggaaaacaatgacataattaggaataacaaaagataacttttccttaccaaaagttaacatagcatattatagcagtccatacctaaacaattggcactatgttactttgagtaatgaataaaaacgttaagtttgaattggtattcatgtttaatgttctatatttaggagaagatgggcggctggcatatgaacaattggataaatttcctcgagactgtgtcaaagtcggaggtcgtcatggaactgaagttgccacagccttttaattacaggttaactgcctaacagctgtcttaatatctgacccttttcatcaagatggtgctgtggttttggctggaaattgtttagagcctgagagacatgaaaactaaaataaaaatgt

SEQ ID NO: 21229 - DNA, 843 bp, Macaca Mulatta
gtaaaagtaagttcagaacctatcttgtttgttaatacagcttgatagaagtcacgtaaacgtagcatctactttgtaatgctcaacatgtcactgctctactccttcaacatgggctaaatcagacttttgctttgctgcttagcacttttatatttttattctcaaggctattttttttttgtttgtctttttgtaatggggcctcaaactgctggctttgggaaatcagtcaggaagatatcaggatgaaaattttaaaagctctgattatgtcttgtttaaaaaacagcaaaaacttagggaggttatatatcaccaaacacagaaatagtcttacccttcctcttcttcccctttatatactcacaatttcaaccaccctttgtgatttctttttcttatttcgtgggggatgagggcaaggaatagcaaagtaacccattgtagaggggatgggaagatgccagaaccaagaaccttttatgctttaaatcttgttaacttatgtcctcagtgccttttgtgctgctgtgcatatttttgaaagaaatgattcaaactctagaattagttgaatgatctttaatatctctgcatgctacaagattaccaaaaaaatacagaaaaataaggcatcaatttagagttcatcaggcttccttttaaagatacattgactatttagatgatctataaaagccttcctaaattttgaaaagataagccaagctattattttagtgtttgatgtttatattgcaagcatattcatttttaacacagtggagttgtactttttatggctttgtgtatactttttcatctactggaatatcttct

SEQ ID NO: 21230 - DNA, 832 bp, Macaca Mulatta
  misc_feature (1)...(832): n = A,T,C or G
gggaggggccagacgcccggcgcgggaggaggatggcgctagcggtgctgcgcttggcgctgctgctcctggcagttaccttcgcaggccctctgttccgtcgattttcaaaatataaaacgccattctgcgctcggtatcaattaccaggatgtcccagggactttaaccctgtgtgtggcactgacatgatcacttaccccaatgaatgtactctgtgcatgaaaatcagggaaagtggtcaaaatattaaaatcctccgacgtggaccctgctgatggagcagtttacagaacagaagatggagagaccaccttcactggcagactagataaattgcgtttcccctttttctcttttcctgtatttctttacataaaatttgttaacacacatcttctgagagcaggtatggaagacagccatgtgtagtgatggataatttaaagaaaaaaagaatccttgtttcttggcttttgctcctagagttaagcttgctgcccagataacttgtgcattgctttatttagttgaaataaaaatcagcattgaattttngaaacaaccacgacctccataatataccatacaaccttttctcataaaccattaagtaatgtaagatgtataagttatcacacttcccccatttgtactaagtataaataaatttantttttgtgggggcgcccctttgccccctcnnnnnnnnnnnnnnnnnnnnnnnnnnnnnnnnnnnnnnnnnnnnnnnncgggggtaaagtgaaaaagggggcccacgactggttttcccagaaaaaaacccgggttcctagaacaaaggggtttggta

SEQ ID NO: 21231 - DNA, 270 bp, Macaca Mulatta
cgtggtggtgttcctcattgctgggatgctggttgtagaggcagctgtcacgggagttcctgttaaaggtcaagacactgtcaaaggccgtgttccgttcaatggacaagatcccgttaaaggacaagtttcagttaaaggtcaagatagagtcaaagggcgagggccagtcaaaggtcccgtctccactaagcctggctcctgccccaatatcttgatccggtgcgccatgttgaatccccctaaccgctgcttgaaagatactgactg

SEQ ID NO: 21232 - DNA, 512 bp, Macaca Mulatta
  misc_feature (1)...(512): n = A,T,C or G
agttcgacatcagcgaggatgacattgatgatggattcaggagactgtttgcccagttggcaggggagnnnnnnnnnnnnnnnnnnnnnnnnnnnnnnnnnnnnnnnnnnnnnnnnnnnnnnnnnnnnnnnnnnnnnnnnnnnnnnnnnnnnnnnnnnnnnnnnnnnnnnnnnnnnnnnnnnnnnnnnnnnnnnnnnnnnnnnnnnnnnnnnnnnnnnnnnnnnnnnnnnnnnnnnnnnnnnnnnnnnnnnnnnnnnnnnnnnnnnnnnnnnnnnnnnnnnnnnnnnnnnnnnnnnnnnnnnnnnnnnnnnnnnnnnnnnnnnnnnnnnnnnnnnnnnnnnnnnnnnnnnnnnnnnnnnnnnnnnnnnnnnnnnnnnnnnnnnnnnnnnnnnnnnnnnnnnnnnnnnttttgataattttgttcggtgtttggttcggctggaaacnnnnnnnngatatttaagcagctggatcccgagaatactggaacaatagagctcgaccttatctct

SEQ ID NO: 21233 - DNA, 1087 bp, Macaca Mulatta
tgatggacccagaagaaacttcagtttatttggattattactatgctacgagcccaaacccggacatcagggagacccactcccatgttccttacacctctgtcttccttccagtcttttacacagctgtgttcctgactggagtgctggggaacctcgttctcatgggagcgttgcatttcaaacccggcagccgaagactgatcgacatctttatcatcaatctggctgcctctgacttcattttccttgtcacgttgcccctctgggtggataaagaagcatctttaggactgtggaggacgggctccttcctgtgcaaagggagctcctacatgatctccgtcaatatgcactgcagtgtcttcctgctcacttgcatgagtgttgaccgctacctggccattgtgtgcccagtcgtatccaggaaattcagaaggacagactgtgcatatgtagtctgtgccagcatctggtttatctcctgcctgctggggttgcctactcttctatccagggagctcacactgattgatgataagccatactgtgcagagaaaaaggcaactccacttaaactcatatggtccctggtggccttaattttcaccttttttgtccctttgttgagcattgtgacctgctactgttgcattgcaaggaagctgtgtgcccattaccagcagtcaggaaagcacaacaaaaagctgaagaaatctataaagatcatctttatcgtcgtggcagcctttcttgtctcctggctgcccttcaatactttcaagctcctggccattgtctctgggttgcagcaagaacgctattttccctcagccatgcttcagcttggtatggaggtgagtggacccttggcatttgccaacagctgtgtcaaccctttcatttactatatcttcgacagctacatccgccgggctattgtccactgcttgtgcccttgcctgaaaaactatgactttgggagtagcaccgagacatcagatagtcacctcactaaggctctctccaccttcattcatgcagaagattttaccaggaggaggaagaggtctgtgtcactctaaag

SEQ ID NO: 21234 - DNA, 791 bp, Macaca Mulatta
gaggaggaagaggtgagtaaggttggctaggggttatggaggaggccttcctgtaggcggggagtagggagggcggagattcaggatctttctctcgtgttgtacctctcctttatacgtggaggcttccattctggcggcaaccggggtcgtggtcggggaggaaaaagaggaaaccagtcggggaagaatgtgatggtggagccgcatcggcatgagggtgtcttcatttgtcgaggaaaggaagatgcactggtcaccaaaaacctggtccctggggaatcagtttatggggagaagagagtctctatttcggaaggagatgacgaaattgagtaccgagcctggaaccctttccgctccaagctggctgcagcaatcctgggtggtgtggaccagatccacatcaaaccgggggctaaggtgctctaactcggggctgcctcgggcaccaccgtctcccatgtctctgacatcgtcggtccggatggtctagtctatgcagtcgagttctcccaccgctctggccgtgacctcattaacttggccaagaagaggaccaacatcattcctgtgatcgaggatgctcggcacccacacaaataccgcatgctcatcgcaatggtggatgtgatctttgctgatgtggcccagccagaccagacccggattgtggccctgaatgcccacaccttcctgcgtaatggaggacactttgtgatttccattaaggccaactgcattgactccacagcctcagccgaggctgtgtttgcctccgaagtgaaaaa

SEQ ID NO: 21235 - DNA, 904 bp, Macaca Mulatta
  misc_feature (1)...(904): n = A,T,C or G
gtgggcttaaaattgaattcagtggatccaacaatgagcattgatcttaaatacttgggagtacagttacctttggctccagctactagttttcctttttggaacctttcgggaaccaaccctgcctctcctgngatgcgggatttccctttgtttctaggacagggaaaaccaatgatttcactaagatcaagggatggaggggaaaatttcatagtgcttctgcatctaggaatgaaggtnnnaggtggaaattcagaaagttcactgaaaaatcgttctgctttctgtagtgataagctagatgaatacttggaaaatgaaggcaagctgatggaaacaagcatgggtttctcttctaatgctcccacatnnnnnnnnngtaccagcttcccactaagagtaccagctatgtacgaacacttgatagtgtactaaagaagcaatctactatttccccttctacctcttactctttgaaacctcattctgtaccccctgcctctcgaaaggcaaagtctcaaaacagacaggcaactttcagtggccgaactaaatcatcttacaagtccattttaccataccctgtttcaccaaagcagaaatactctcatatgattctgggagataaggttaccaagaattcttcaggcatcatctcagaaaatcaggcgaataactttgttgtgccaactttagatgaaaatgtgtttccaaagcagattagtttgcggcaggcnnnnnnnnnnnnnnnnnnnnacagggaagtcgtcctccaggcttgtctaaatctcaggtgaagctaatggacctggaagactgtgcactttgggaaggaaaaccgaggacgtatatcacagaagagcgagcagatgtatccttaacaactctacttacagctcaa

SEQ ID NO: 21236 - DNA, 322 bp, Macaca Mulatta
  misc_feature (1)...(322): n = A,T,C or G
caaacagcagcctggttcctaagtattatttttaatattgtaccatagaaggagaaaatattcttataagcagagtaatcaataagaattctaagacagctagaggatatgtatattttaatattctgaataaccaaaataaagtgctttgaatggaatccatattttctttccatagggaagtttcttcatcagtcatcatggatgaattaattctgtttgaggcttgtgtcacctcanatctgatctattaatattatagaatcttcctggcttctttttattttgcacaaactagtcattggtctcttcaataaccact

SEQ ID NO: 21237 - DNA, 117 bp, Macaca Mulatta
ttgctgctgtatctcctggcctctgcttttgtgtctctcaaaaatggagcttgtcttaccatgtatttctcaataaacctgcattagttggcattgcaaatgtatgtctcagcagag

SEQ ID NO: 21238 - DNA, 772 bp, Macaca Mulatta
  misc_feature (1)...(772): n = A,T,C or G
ggggtagcgctggtatatggtcaaatgaatgaaccacctggtgctcgtgcccgggtagctcttactggactgactgtggctgaatacttcagagaccaannnnnnnnnnnnnnnnnnnnnnnnnnnnnnnnnnnnnnnnnnnnnnnnnnnnnnnnnnnnnnnnnnnnnnnnnnnnnnnnnnnnnnnnnnnnnnnnnnnnnnnnnnnnnnnnnnnnnnnnnnnnnnnnnnnnnnnnnnnnnnnnnnnnnnnnnnnnnnnnnnnnnnnnnnnnnnnnnnnnnnnnnnnnnnnnnnnnnnnnnnnnnnnnnnnnnnnnnnnnnnnnnnnnnnnnnnnnnnnnnnnnnnnnnnnnnnnnnnnnnnnnnnnnnnnnnnnnnnnnnnnnnnnnnnnnnnnnnnnnnnnnnnnnnnnnnnnnnnnnnnnnnnnnnnnnnnnnnnnnnnnnnnnnnnnnnnnnnnnnnnnnnnnnnnnnnnnnnnnnnnnnnnnnnnnnnnnnnnnnnnnnnnnnnnnnnnnnnnnnnnnnnnnnnnnnnnnnnnnnnnnnnnnnnnnnnnnnnnnnnnnnnnnnnnnnnnnnnnnnnnnnnnnnnnnnnnnnnnnnnnnnnnnnnnnnnnnnnnnnnnnnnnnnnnnnnnnnnnnncatatggggaagctggtacccctgaaggagaccatcaaaggattccagcagattttggcaggtgaatatgaccatctcccagaacaggccttctatatggtggggacccatttgaagaaagctgtggcaaaat

SEQ ID NO: 21239 - DNA, 198 bp, Macaca Mulatta
  misc_feature (1)...(198): n = A,T,C or G
cgactggaatgtgctgaccttctagaaacaagaggaatggtgctccgtgaccccactctgttctcttttctttgggtggtagatttcncactctttctccccaaggaggaaaatcccagagagctggaatcggcccaccacccatttactgctccccaccccagtgacatacacctcctgtacactgagcccaaaaag

SEQ ID NO: 21240 - DNA, 147 bp, Macaca Mulatta
gatctgcagtggtgcgaaggtccaacaccagccccatgggcttcctccggctgggatcatgctccccggtgccagcagacacagcacagacagttggacgaaggctctccactgggtcttctaggccttactcaccttcccctttgg

SEQ ID NO: 21241 - DNA, 891 bp, Macaca Mulatta
ggaaggaggatgcttccagggaagattgggagaagagcagccaaggcgacccttgggccgagggtggccaggagagagactatgcaagcagagatgagtgtctcagcttcagggcttttcagagtaccccgcggggtccctcttttttgattacttatacttcaagcacagagatgagagtttgaaagattactggagaggaaaatgaaaaacaagcagtgcttttaggtatctaagtggacagtttaaaaatacattttgaaaatgagaacgaggcagttcaaatatagctttctgcatgaactgtcattttctggagactggcaaatagtaccaatctctacaaatggcttagactaaataagcagggatgtaggtaatggaaagccttctcaggtcattcacggggcccttgatacccttcacacatgtgcagggtcttcttcagtggcgtttgatgcatcgccagtataataaactgtgagtattcttctagatatctaatcgtaagctgatgctgaggtgcttttagaaattctactttcctctgatttatatgcaatacatggtaaatttctaattgcaaaaatatggtgcttgaggtgtcaccttattaataactaggtgaatccgtgaaggttataatattttccagatagatgaaaatattagtagttgtatatattaaaatagcctttattctataaccaaacatgtcagaaatggcacaggaggatgaaatgctgaagagaatgctctcgagtagttgctgcagatataaggtaaaatttcaggagaagaataattttgactaagggaaactggtgacctagaatacttagattttcttgttctatgttggctgtcttcatcagattgagcatttggagc

SEQ ID NO: 21242 - DNA, 799 bp, Macaca Mulatta
  misc_feature (1)...(799): n = A,T,C or G
ggaatgcagattttcgtgaaaacccttacggggnnnnnnnnnnnnnnnnnnnnnnnnnnnnnnnnnnnnnnnnnnnnnnnnnnnnnnnnnnnnnnnnnnnnnnnnnnnnnnnnnnnnnnnnnnnnnnnnnnnnnnnnnnnnnnnnnnnnnnnnnnnnnnnnnnnnnnnnnnnnnnnnnnnnnnnnnnnnnnnnnnnnnnnnnnnnnnnnnnnnnnnnnncttcgtggtggtgctaagaaaaggaagaagaagtcttacaccactcccaagaagaataagcacaagagaaagaaggttaagctggctgtcctgaaatattataaggtggatgagaatggcaaaattagtcgccttcgtcgagagtgcccatctgatgaatgtggtgctggggtgtttatggcaagccactttgacagacattattgtggcaaatgttgtctgacttactgtttcaacaagccagaagacaagtaactgtatgagttaataaaagacacgaactaaccaccaacaatatcgtgcagcataaatcaaaaatatgtctttgtcggcagacctgggaaccctctgaaaaatttttctgagaccaattgatttgagcgtacaggtgcccccttggggccccccgccacccccgcccccccaaaaagagtttttttgaaaacaaatttcctgtgttgggccaatcggaggtggccttgtgttgatcttatagcacaaatacggagggatccccccgccgcttgtctgttcccacaatctaagaagaattcctttcgggggcaaaacatatatataa

SEQ ID NO: 21243 - DNA, 1382 bp, Macaca Mulatta
  misc_feature (1)...(1382): n = A,T,C or G
gtgaaaatatcactttcatagccaaagtcaaggctgaagatcttctgagaaaacccactgtcaaatggttcaaaggaaaatggatggatctggccagcaaagccgggaagcaccttcagttgaaagaaacctttgagaggcacagtcgggtnnnnnnnnnnnnnnnnnnnnnnnnnnnnnnnnnnnnnnnnnnnnnnnnnnnnnnnnnnnnnnnnnnnnnnnnnnnnnnnnnnnnnnnnnnnnnnnnnnnnnnnnnnnnnnnnnnnnnnnnnnnnnnnnnnnnnnnnnnnnnnnnnnnnnnnnnnnnnnnnnnnnnnnnnnnnnnnnnnnnnnnnnnnnnnnnnnnnnnnnnnnnnnnnnnnnnnnnnnnnnnnnnnnnnnnnnnnnnnnnnnnnnnnnnnnnnnnnnnnnnnnnnnnnnnnnnnnnnnnnnnnnnnnnnnnnnnnnnnnnnnnnnnnnnnnnnnnnnnnnnnnnnnnnnnnnnnnnnnnnnnnnnnnnnnnnnnnnnnnnnnnnnnnnnnnnnnnnnnnnnnnnnnnnnnnnnnnnnnnnnnnnnnnnnnnnnnnnnnnnnnnnnnnnnnnnnnnnnnnnnnnnnnnnnnnnnnnnnnnnnnnnnnnnnnnnnnnnnnnnnnnnnnnnnnnnnnnnnnnnnnnnnnnnnnnnnnnnnnnnnnnnnnnnnnnnnnnnnnnnnnnnnnnnnnnnnnnnnnnnnnnnnnnnnnnnnnnnnnnnnnnnnnnnnnnnnnnnnnnnnnnnnnnnnnnnnnnnnnnnnnnnnnnnnnnnnnnnnnnnnnnnnnnnnnnnnnnnnnnnnnnnnnnnnnnnnnnnnnnnnnnnnnnnnnnnnnnnnnnnnnnnnnnnnnnnnnnnnnnnnnnnnnnnnnnnnnnnnnnnnnnnnnnnnnnnnnnnnnnnnnnnnnnnnnnnnnnnnnnnnnnnnnnnnnnnnnnnnnnnnnnnnnnnnnnnnnnnnnnnnnnnnnnnnnnnnnnnnnnnnnnnnnnnnnnnnnnnnnnnnnnnnnnnnnnnnnnnnnnnnnnnnnnnnnnnnnnnnnnnnnnnnnnnnnnnnnnnnnnnnnnnnnnnnnnnnnnnnnnnnnnnnnnnnnnnnnnnnnnnnnnnnnnnnnnnnnnnnnnnnnnnnnnnnnnnnnnnnnnnnnnnnnnnnnnnnnnnnnnnnnnnnnnnnnnnnnnnnnnnnnnnnnnnnnnnnnnnnnnnnnnnnnnnnnnnnnnnnnnnnnnnggatacacaagttagtgatagccaatgccctcattgaagatgaaggtgattatgtatttgcacctgatgcctacaatgttactctgcctgccaaagttcgtgttattgngatcctcctaagatcatcctggatggtcttgatgctga

SEQ ID NO: 21244 - DNA, 293 bp, Macaca Mulatta
aagaacaatatagacgtttgtcctgaatgtggtcacctgaagcagaaacacgtcctttgtggctactgctatgaaaaggtgcgcaaggagactgcagagatccgacgacagatagggaaacaagaagggggcccttttaaggctcccaccatagagactgtggtgctgtacacgggagagacgccgtctgaacaagatcagggcaagaggatcattgaacgagacagaaagcgaccatcctggttcacccagaattgacaccaaagatgttaaaaggataacttcacagtaaa

SEQ ID NO: 21245 - DNA, 375 bp, Macaca Mulatta
  misc_feature (1)...(375): n = A,T,C or G
tagggatgacaaaagtgaaagttgggaaggaagattcttcttctgcagaatttcttgaaaaacggagggctgctttagaaaggtanaggtaccttcagaggattgtgaatcatcctaccatgttacaggaccctgacgtcagagagttcttggagaaagaagagnnnnnnnnnnnnnnnnnnnnccagacattgagtgggtggctggtctcctcaagatgttcaacaaagccacagatgccgtcagcaaaatgaccatcaagatgaatgaatcagacattntggtttgaagagaagctccaggaggtagagtgtgaggagcagcgcttacggaaactgcatgctgttgtagaaactctagtcaaccataggaaag

SEQ ID NO: 21246 - DNA, 578 bp, Macaca Mulatta
  misc_feature (1)...(578): n = A,T,C or G
agttgtccttattggagattctggcgttggaaagagtaatctcctgtctcgatttactcgaaatgagtttaatctggaaagcaagagcaccattggagtagagtttgcaaccagaagcatccaggttgatggaaaaacaataaaggcacagatatgggacacagcagggcaagagcgataccgagctataacatcagnnnnnnnnnnnnnnnnnnnnnnnnnnnnnnnnnnnnnnnnnnnnnnnnnnnnnnnnnnnnnnnnnnnnnnnnnnnnnnnnnnnnnnnnnnnnnnnnnnnnnnnnnnnnnnnnnnnnnnnnnnnnnnnnnnnnnnnnnnnnnnnnnnnnnnnnnnnnnnnnnnnnnnnnnnnnnnnnnnnnnnnnnnnnnnnncagaaaagaatggtttgtcgttcattgagacttctgctctagactccacaaatgtagaagctgcttttcagaccattttaacannagagatttaccgcattgtttctcagaagcaaatgtcagacagacgcgaaaatgacatgtctccaagcaacaatgtggttcctattcatgttccaccaaccactc

SEQ ID NO: 21247 - DNA, 769 bp, Macaca Mulatta
gggagatttgtttatttttaaattgtggcaaaatatacatgaaatctaccatcctaaccatattttttaacagaagtttattatatggctgtttacgtatatcactgtatttttagcctaatagagtagttcttgaactagtgaattatattgctttgttttgcatctaaactcttgtcttaccttttaggaaccagagcctgaaacagaagcagtaagttctagccaggaaatacccacgatgcctcagccaatcgaaaaagtctccgtgtcaactcagaccaagaagttaagtgcctcttcaccaagaatgctgcatcggagcacccagaccaccagtgatggcgtgtgtcagagcatgtgccatgacaaatacacgaagatcttcaatgacttcaaagaccggatgaagtcggaccacaagcgggagacagagcgtgttgtccgagaagctctggagaaggtaatgcttgtcgccacactgggtgccctgctgcagccggcactcctgtcatggttaggctccttttactcatgcatcaacccagtagcagcttttaaatgtagcaatagaatgacaccagtatcttttatagcatttcaagtaataacgatactttttctcacctagatttttttacaccatgtaaatgaaggggaaaaaccggtaccctcaatgcaaagtaaggaaccgaagtggttaaaagttttgtttcccctttgtaaaggccgggtcctggtggtaccgttccgtggcgccttcctttaa

SEQ ID NO: 21248 - DNA, 546 bp, Macaca Mulatta
atccttatctttatgaaggtgccagcaataatactctcagttttaatatgaaacaccctgttctaaaacacataatactgttttgtggtcataaactttgaaaatggaataaaaaggacgcaatcaatactaatactacataatacctaatttaatatatgatatatacaacatgcggtgtgtattataatattgaatactaattaattatggaaaatatcagagaaataaactttctaattgaaaattataaatatttcatgtcaaccaatgtaacacatcttcatgtatgtgtttttccagtgataggtataaggtattcgtagatttatttaatctttcaacatacctgattccccgacactggataccgaagatgaacccaaccattcacaaatttctgtatacagctgaatactgtgatagctcctacttcagcagtgatgaatcatattaaaatcatctgcaaaatctatgaagaatactggtttcacaggctattttttattttctatgaattttcataaatagttttaatatatgtat

SEQ ID NO: 21249 - DNA, 827 bp, Macaca Mulatta
  misc_feature (1)...(827): n = A,T,C or G
gcctgggcctttgatctggacacaaaaccctctagttggaatcgaacacgctgcactttacaaccactgcactacttgactcaggaatcggctccagaaggtgaagctagaggaacaagacctcatcaacccaacaccaaagacgccattggaccagcagcgcccgcagcacccaccccccaccagcgactccatcttcatggccaccccctgcggcggacggttgaccaccagccaccgcgtcatcccagagctgagctcctccagcgggatgaccccgtccccaccacctccctcttcttcttcttcatccttctgtctctttgtttctgagctttcctgtctttcctttctctgagagattcaaagcctccccgactctgtttcccccgtcccttctgaatttaatttgcactaagtcatttgcactggttggagttgtggagacggccttgagtctcggtgcgagtgtgtgtgagtgtgagccaccttggcaagtgcccgcccaggacccggccgcccttcatctgggctgggtgactgggcgccggctgtgtgcccgaggcctcactctgccctcgcctagtctggaagctccaacatcacggggcaaccttcaagcattccattacgccccatctcgccctgtgcccctccccaccagggcttcagcaggagccctggactcatcatcaataaacactgttacagcannnnnnnnnnnnnnnnnnnnnnnnnnnnnnnnnnnnnnnnnnnnnnnnnnannnnnnnnnnnnnnnnnnnnnnnnnnnnnnnnnnnnnnnnnnnnnnnnnnnnnnnnnnnnnga

SEQ ID NO: 21250 - DNA, 577 bp, Macaca Mulatta
gggcaggagcagatgcccaggatgggtttggcagttgccatttggggacctgtcgggaccttcagggccagatatgccatcttcattccatggtgttgatactgccagcctcgtggcctggggggcatccagaccacaagagtgggggtctcgctgtctgcctccatctcccccaaaggtacttgctgtcattcccaactcattctagcttatttggtgttggaggagggacaggacagctggcccaggacctgctaattatagctgctcaagtatttgaatagaggccttgagtactcaccaccatgtcatgtttcttgcttacagacaaatgaaccctttaacccttgtcttgagtgccagcccatcccattcactggcccacctcccctgcccgcccacctgatccctgggggaggtcgacatgggacctctgccccgcatcttaccttgatgtgggctgcaagtggtcaagtggatctcctcccgtcctgtgcctctagagccttgctgctcactaaaaagttattgaatacatttgtttctttaattatgaaagtccagtctttttgacatg

SEQ ID NO: 21251 - DNA, 352 bp, Macaca Mulatta
  misc_feature (1)...(352): n = A,T,C or G
caggatcgactgcgggccacctgcacactctcagggaaccgggacaccctctggcatctcttcagtacccttcagcggcggcccggctgggttgagtccttcattgcggcgctgagggactgtgagctagctgatctcgcggacgaagtggcctgtgtctaccagagctaccagcctcggacctcggaccgtcccccagacccactggagccaccgtcacttcctgctgaggggccagggccccccacacctgctgcggcccacagtatcccctacaacggctacagagagaaggagccaagttaccccatgcctgtccaggagacccaggcgccagactccccaggagagn

SEQ ID NO: 21252 - DNA, 3032 bp, Macaca Mulatta
  misc_feature (1)...(3032): n = A,T,C or G
tgtggggcagcgatcgcctggcgggtgctgggggaggcggggcggcagtgactgtggccttcaccaacgctcgcgactgcttcctccacctgccgcggggtctcgtggcccagctgcacctgctgcagnagaatcaagctatagaagtggtccgtagtcagcagcctgcattcttgagctgggtggaaggcaggcattttagtgatcaaggtgaaaatgtggctgaaattaacagacaagttggtcaaaaacttggactctcaaatgggggacaggtannnnnnnnnnnnnnnnnnnnnnnnnnnnnnnnnnnnnnnnnnnnnnnnnnnnnnnnnnnnnnnnnnnnnnnnnnnnnnnnnnnnnnnnnnnnnnnnnnnnnnnnnnnnnnnnnnnnnnnnnnnnnnnnnnnnnnnnnnnnnnnnnnnnnnnnnnnnnnnnnnnnnnnnnnnnnnnnnnnnnnnnnnnnnnnnnnnnnnnnnnnnnnnnnnnnnnnnnnnnnnnnnnnnnnnnnnnnnnnnnnnnnnnnnnnnnnnnnnnnnnnnnnnnnnnnnnnnnnnnnnnnnnnnnnnnnnnnnnnnnnnnnnnnnnnnnnnnnnnnnnnnnnnnnnnnnnnnnnnnnnnnnnnnnnnnnnnnnnnnnnnnnnnnnnnnnnnnnnnnnnnnnnnntgtgggaatcactgaatctaacgaaaacgagtcagagattccagttgactcatcatcagtagcaagtttatggactatgataggaaacattttttcctttcgatctgagaagaaacaagagacatcctggggtttaactgaaatcagtgcgttcaaaaatatgcagtcaaaggttgttcctctagacaatattttcagagtatgcaaatctcaacctcctagtatatataatgcgtcagcaacctctgtttttcataaacactgtgccattcatgtatttccttgggaccaggaatattttgatgtagagcccagctttactgtgacatatggaaagctagttaagctactttctccaaagcaacagcaaagtaaaacaaaacaaaatgtcttatcacctgaaaaagagaagcagatgtcagagccactagatcaaaaaaaaacgaggtcagatcgtagtgaagaagatgagaaggcctgtgtgctacaagtagtctggaatggacttgaagaattgaagaatgccatcaaatacaccaaaaacgtagaagttctccatcttgggaaagtctggnnnnnnnnnnnnnnnnnnnnnnnnnnnnnnnnnnnnnnnnnnnnnnnnnnnnnnnnnnnnnnnnnnnnnnnnnnnnnnnnnnnnnnnnnnnnnnnnnnnnnnnnnnnnnnnnnnnnnnnnnnnnnnnnnnnnnnnnnnnnnnnnnnnnnnnnnnnnnnnnnnnnnnnnnnnnnnnnnnnnnnnnnnnnnnnnnnnnnnnnnnnnnnnnnnnnnnnnnnnnnnnnnnnnnnnnnnnnnnnnnnnnnnnnnnnnnnnnnnnnnnnnnnnnnnnnnnnnnnnnnnnnnnnnnnnnnnnnnnnnnnnnnnnnnnnnnnnnnnnnnnnnnnnnnnnnnnnnnnnnnnnnnnnnnnnnnnnnnnnnnnnnnnnnnnnnnnnnnnnnnnnnnnnnnnnnnnnnnnnnnnnnnnnnnnnnnnnnnnnnnnnnnnnnnnnnnnnnnnnnnnnnnnnnnnnnnnnnnnnnnnnnnnnnnnnnnnnnnnnnnnnnnnnnnnnnnnnnnnnnnnnnnnnnnnnnnnnnnnnnnnnnnnnnnnnnnnnnnnnnnnnnnnnnnnnnnnnnnnnnnnnnnnnnnnnnnnnnnnnnnnnnnnnnnnnnnnnnnnnnnnnnnnnnnnnnnnnnnnnnnnnnnnnnnnnnnnnnnnnnnnnnnnnnnnnnnnnnnnnnaggaaaaaggcttgaaaacatacaaaaaaccctagaggtggctttctcagaggcagtgtggatgcagccatctgttgttctgctggatgaccttgaccacattgctggaccgcctgctgtcccggaacatgagcacagtcctgatgcggcgcagagccagcggcttgctcatnnnnnnnnnnnnnnnnnnnnnnnnnnnnnnnnnnnnnnnnnnnnnnnnnnnnnnnnnnnnnnnnnnnnnnnnnnnnnnnnnnnnnnnnnnnnnnnnnnnnnnnnnnnnnnnnnnnnnnnnnnnnnnnnnnnnnnnnnnnnnnnnnnnnnnnnnnnnnnnnnnnnnnnnnnnnnnnnnnnnnnnnnnnnnnnnnnnnnnnnnnnnnnnnnnnnnnnnnnnnnnnnnnnnnnnnnnnnnnnnnnnnnnnnnnnnnnnnnnnnnnnnnnnnnnnnnnnnnnnnnnnnnnnnnnnnnnnnnnnnnnnnnnnnnnnnnnnnnnnnnnnnnnnnnnnnnnnnnnnnnnnnnaattagttttaacaacattggacttccaaaaggctctccatggatttattcctgcgtctttgcgaagtgtcaacctgcataaacctagagacctgggttgggacaagattggtgggttacatgaagttaggcagatactcatggatactatccagttacctgccaannnnnnnnnnnnnnnnnnnnnnnnnnnnnnnnnnnnnnnnnnnnnnnnnnnnnnnnnnnnnnnnnnnnnnnnnnnnnnnnnnnnnnnnnnnnnnnnnnnnnnnnnnnnnnnnnnnnnnnnnnnnnnnnnnnnnnnnnnnnnnnnnnnnnnnnnnnnnnnnnnnnnnnnnnnnnnnnnnnnnnnnnnnnnnnnnnnnnnnnnnnnnnnnnnnnnnnnnnnnnnnnnnnnnnnnnnnnnnnnnnnnnnnnnnnnnnnnnnnnnnnnnnnnnnnnnnnnnnnnnnnnnnnnnnnnnnnnnnnnnnnnnnnnnnnnnnnnnnnnnnnnnnnnnnnnnnnnnnnnnnggtgtttatgtattggctgcgactagtcgccctgacttgattgaccctgccctgcttaggcctggtcgactagataaatgtgtatactgtcctcctcctgatcaggt

SEQ ID NO: 21253 - DNA, 3995 bp, Macaca Mulatta
  misc_feature (1)...(3995): n = A,T,C or G
ccgggagctgtcgtgccctctctttctccctttggcccctctcctgctgccttacagtacccccagagccgggcgggggcacggacttcacctcctggtcctgtgttccccaggtatggcgctcacagtggatgtggccgggccagcgccctggggcttccgtatcacagggggcagggattaccacacgcccatcatggtgannnnnnnnnnnnnnnnnnnnnnnnnnnnnnnnnnnnnnnnnnnnnnnnnnnnnnnnnnnnnnnnnnnnnnnnnnnnnnnnnnnnnnnnnnnnnnnnnnnnnnnnnnnnnnnnnnnnnnnnnnnnnnnnnnnnnnnnnnnnnnnnnnnnnnnnnnnnnnnnnnnnnnnnnnnnnnnnnnnnnnnnnnnnnnnnnnnnnnnnnnnnnnnnnnnnnnnnnnnnnnnnnnnnnnnnnnnnnnnnnnnnnnnnnnnnnnnnnnnnnnnnnnnnnnnnnnnnnnnnnnnnnnnnnnnnnnnnnnnnnnnnnnnnnnnnnnnnnnnnnnnnnnnnnnnnnnnnnnnnnnnnnnnnnnnnnnnnnnnnnnnnnnnnnnnnnnnnnnnnnnnnnnnnnnnnnnnnnnnnnnnnnnnnnnnnnnnnnnnnnnnnnnnnnnnnnnnnnnnnnnnnnnnnnnnnnnnnnnnnnnnnnnnnnnnnnnnnnnnnnnnnnnnnnnnnnnnnnnnnnnnnnnnnnnnnnnnnnnnnnnnnnnnnnnnnnnnnnnnnnnnnnnnnnnnnnnnnnnnnnnnnnnnnnnnnnnnnnnnnnnnnnnnnnnnnnnnnnnnnnnnnnnnnnnnnnnnnnnnnnnnnnnnnnnnnnnnnnnnnnnnnnnnnnnnnnnnnnnnnnnnnnnnnnnnnnnnnnnnnnnnnnnnnnnnnnnnnnnnnnnnnnnnnnnnnnnnnnnnnnnnnnnnnnnnnnnnnnnnnnnnnnnnnnnnnnnnnnnnnnnnnnnnnnnnnnnnnnnnnnnnnnnnnnnnnnnnnnnnnnnnnnnnnnnnnnnnnnnnnnnnnnnnnnnnnnnnnnnnnnnnnnnnnnnnnnnnnnnnnnnnnnnnnnnnnnnnnnnnnnnnnnnnnnnnnnnnnnnnnnnnnnnnnnnnnnnnnnnnnnnnnnnnnnnnnnnnnnnnnnnnnnnnnnnnnnnnnnnnnnnnnnnnnnnnnnnnnnnnnnnnnnnnnnnnnnnnnnnnnnnnnnnnnnnnnnnnnnnnnnnnnnnnnnnnnnnnnnnnnnnnnnnnnnnnnnnnnnnnnnnnnnnnnnnnnnnnnnnnnnnnnnnnnnnnnnnnnnnnnnnnnnnnnnnnnnnnnnnnnnnnnnnnnnnnnnnnnnnnnnnnnnnnnnnnnnnnnnnnnnnnnnnnnnnnnnnnnnnnnnnnnnnnnnnnnnnnnnnnnnnnnnnnnnnnnnnnnnnnnnnnnnnnnnnnnnnnnnnnnnnnnnnnnnnnnnnnnnnnnnnnnnnnnnnnnnnnnnnnnnnnnnnnnnnnnnnnnnnnnnnnnnnnnnnnnnnnnnnnnnnnnnnnnnnnnnnnnnnnnnnnnnnnnnnnnnnnnnnnnnnnnnnnnnnnnnnnnnnnnnnnnnnnnnnnnnnnnnnnnnnnnnnnnnnnnnnnnnnnnnnnnnnnnnnnnnnnnnnnnnnnnnnnnnnnnnnnnnnnnnnnnnnnnnnnnnnnnnnnnnnnnnnnnnnnnnnnnnnnnnnnnnnnnnnnnnnnnnnnnnnnnnnnnnnnnnnnnnnnnnnnnnnnnnnnnnnnnnnnnnnnnnnnnnnnnnnnnnnnnnnnnnnnnnnnnnnnnnnnnnnnnnnnnnnnnnnnnnnnnnnnnnnnnnnnnnnnnnnnnnnnnnnnnnnnnnnnnnnnnnnnnnnnnnnnnnnnnnnnnnnnnnnnnnnnnnnnnnnnnnnnnnnnnnnnnnnnnnnnnnnnnnnnnnnnnnnnnnnnnnnnnnnnnnnnnnnnnnnnnnnnnnnnnnnnnnnnnnnnnnnnnnnnnnnnnnnnnnnnnnnnnnnnnnnnnnnnnnnnnnnnnnnnnnnnnnnnnnnnnnnnnnnnnnnnnnnnnnnnnnnnnnnnnnnnnnnnnnnnnnnnnnnnnnnnnnnnnnnnnnnnnnnnnnnnnnnnnnnnnnnnnnnnnnnnnnnnnnnnnnnnnnnnnnnnnnnnnnnnnnnnnnnnnnnnnnnnnnnnnnnnnnnnnnnnnnnnnnnnnnnnnnnnnnnnnnnnnnnnnnnnnnnnnnnnnnnnnnnnnnnnnnnnnnnnnnnnnnnnnnnnnnnnnnnnnnnnnnnnnnnnnnnnnnnnnnnnnnnnnnnnnnnnnnnnnnnnnnnnnnnnnnnnnnnnnnnnnnnnnnnnnnnnnnnnnnnnnnnnnnnnnnnnnnnnnnnnnnnnnnnnnnnnnnnnnnnnnnnnnnnnnnnnnnnnnnnnnnnnnnnnnnnnnnnnnnnnnnnnnnnnnnnnnnnnnnnnnnnnnnnnnnnnnnnnnnnnnnnnnnnnnnnnnnnnnnnnnnnnnnnnnnnnnnnnnnnnnnnnnnnnnnnnnnnnnnnnnnnnnnnnnnnnnnnnnnnnnnnnnnnnnnnnnnnnnnnnnnnnnnnnnnnnnnnnnnnnnnnnnnnnnnnnnnnnnnnnnnnnnnnnnnnnnnnnnnnnnnnnnnnnnnnnnnnnnnnnnnnnnnnnnnnnnnnnnnnnnnnnnnnnnnnnnnnnnnnnnnnnnnnnnnnnnnnnnnnnnnnnnnnnnnnnnnnnnnnnnnnnnnnnnnnnnnnnnnnnnnnnnnnnnnnnnnnnnnnnnnnnnnnnnnnnnnnnnnnnnnnnnnnnnnnnnnnnnnnnnnnnnnnnnnnnnnnnnnnnnnnnnnnnnnnnnnnnnnnnnnnnnnnnnnnnnnnnnnnnnnnnnnnnnnnnnnnnnnnnnnnnnnnnnnnnnnnnnnnnnnnnnnnnnnnnnnnnnnnnnnnnnnnnnnnnnnnnnnnnnnnnnnnnnnnnnnnnnnnnnnnnnnnnnnnnnnnnnnnnnnnnnnnnnnnnnnnnnnnnnnnnnnnnnnnnnnnnnnnnnnnnnnnnnnnnnnnnnnnnnnnnnnnnnnnnnnnnnnnnnnnnnnnnnnnnnnnnnnnnnnnnnnnnnnnnnnnnnnnnnnnnnnnnnnnnnnnnnnnnnnnnnnnnnnnnnnnnnnnnnnnnnnnnnnnnnnnnnnnnnnnnnnnnnnnnnnnnnnnnnnnnnnnnnnnnnnnnnnnnnnnnnnnnnnnnnnnnnnnnnnnnnnnnnnnnnnnnnnnnnnnnnnnnnnnnnnnnnnnnnnnnnnnnnnnnnnnnnnnnnnnnnnnnnnnnnnnnnnnnnnnnnnnnnnnnnnnnnnnnnnnnnnnnnnnnnnnnnnnnnnnnnnnnnnnnnnnnnnnnnnnnnnnnnnnnnnnnnnnnnnnnnnnnnnnnnnnnnnnnnnnnnnnnnnnnnnnnnnnnnnnnnnnnnnnnnnnnnnnnnnnnnnnnnnnnnnnnnnnnnnnnnnnnnnnnnnnnnnnnnnnnnnnnnnnnnnnnnnnnnnnnnnnnnnnnnnnnnnnnnnnnnnnnnnnnnnnnnnnnnnnnnnnnnnnnnnnnnnnnnnnnnnnnnnnnnnnnnnnnnnnnnnnnnnnnnnnnnnnnnnnnnnnnnnnnnnnnnnnnnnnnnnnnnnnnnnnnnnnnnnnnnnnnnnnnnnnnnnnnnnnnnnnnnnnnnnnnnnnnnnnnnnnnnnnnnnnnnnnnnnnnnnnnnnnnnnnnnnnnnnnnnnnnnnnnnnnnnnnnnnnnnnnnnnnnnnnnnnnnnnnnnnnnnnnnnnnnnnnnnnnnnnnnnnnnnnnnnnnnnnnnnnnnnnnnnnnnnnnnnnnnnnnnnnnnnnnnnnnnnnnnnnnnctaggcttggggctgtggctgccacaggaagggggatacccccatactttgggtgttgtctcagatcctgcccccgcgccccacagggctcaggttcctgtgagctgatcctgggctaggtcgtatctg

SEQ ID NO: 21254 - DNA, 631 bp, Macaca Mulatta
ggtattttttttatttcttgaaggtattttaaaaatcttggcacatcatatctatctgtgggaccttgggtccaaaggtcctacataactgatatgaaccataattctctgtattaacaaaggctcggaaattgaaaccaagatcacttaacttgctcactttggccaatatagtatgaatttcagtttctttccaagagaaaagtcctgagatgttaatatgcagcagttctgctgatgtgcattttaacttcctgcaccaaggaagaaaagctaagaaattcacaaaagtaaaatcagcccctgaaaaacagatgctggtgattggcgaaaaaaagagcagtagaattaaggtgttttataaaccagagagtgttttgtttttgttaggtaaagggatttcttcatatgttattttgataaaagggaatttcataggtaaaaaccaatattcaaaattgtaaaacaaatagaactctctgtgcacaatcactgcatcaaaaatttgcaagagattcaacagaaacctcgtgccgaattcggcacgaggggaacgcggccatcgcgctggcgctcatcgatttccagaaccgccgcgccctgcaggactttcgcagccgccaggaacgca

SEQ ID NO: 21255 - DNA, 487 bp, Macaca Mulatta
  misc_feature (1)...(487): n = A,T,C or G
caggaaaggaaaaggaggggaaatctcgacatggaaaaattcttcaatgaaaatgaaggaatgctttggaaccaaggaaagatagaaaatgaagaacagctaccggacgagggaaagccagaagtagcttgtactctggaagacaagacgttagaaaacgagagaaagacagaaaacaagggcaagacaggagatgaggaaccgttaaaggataaagaaaagccagagagtgnnnnnnnnnnnnnnnnnnnnnnnnnnnnnnnnnnnnnnnnnnnnnnnnnnnnnnnnnnnnnnnnnnnnnnnnnnnnnnnnnnnnnnnnnnnnnnnnnnnnnnnnnnnnnnnnnnnnnnnncagtgaaagagagccagagagtgagggagagccagaaagtgaaaggagttctgcaggaaagaacccagctgaggatgatatacccaggaaagccaaaagaaaaacattctaggggaaggctcagtacctcaagca

SEQ ID NO: 21256 - DNA, 671 bp, Macaca Mulatta
  misc_feature (1)...(671): n = A,T,C or G
gaggcaggacaatcacttgcaacctgtgaggcggaagttgcagtcgagccgagtatcannnnnnnnnnnnnnnnnnnnnnnnnnnnnnnnnnnnngtctnnnnnnnnnnnnnnnnnnnatgtaacaaggaattagccccaaaaccacatggttttggatgtgctaattgaactgttgtatatctatttgtgagagacctcttgaaattgtttaaatggttatatcaagagtttaatattcactaaactggcatcataaaattggatgactttctccagccttgtctgatcatgcttatcgtctcccagctctgtaataagctttgcaggatccagcctgttctgacctatccctactgagtcccgatagcattttgttccctcctatggctcttaccctgtggagtatgcacatggaggacttctcttcctaatggcaggatcctaacaggacagatctgtgtacctatctttctatcctctctgagcctggtaccaactagattcttcatatgtatttgtaacagattaaattgtaaagcaaacacagtattgataaaagtctgtnnnnnnnnnnnnnnnnnnnnnnnnnnnnnnnnnnnnnnnnnnnnnnnnnnnnnnnnnnnnnnnnnnnnnnnnnnnnnnnnnnnnnnnnnnnnnnnnnnnnnnnnn

SEQ ID NO: 21257 - DNA, 238 bp, Macaca Mulatta
atttattattattaaagtgacctaaattctctcctagtgattattactaggcatctaaattttcttttggacaaataagttctaaattcaatcatgaagcaaaaaacttctgctataaattgcaaagaagcttgctaacatgaatcatgaccataaattcaggagcacaagaaatgtcactttatgctcagaacaaattagtttctatttgagaatgccatcctactggcttagtggg

SEQ ID NO: 21258 - DNA, 1256 bp, Macaca Mulatta
  misc_feature (1)...(1256): n = A,T,C or G
aggatccaaaaagaagccccttcacttgattagctcttctgacaaacctggattagatcttttgaaagtggagtatattaagnnnnnnnnnnnnnnnnnnnnnnnnnnnnnnnnnnnnnnnnnnnnnnnnnnnnnnnnnnnnnnnnnnnnnnnnnnnnnnnnnnnnnnnnnnnnnnnnnnnnnnnnnnnnnnnnnnnnnnnnnnnnnnnnnnnnnnnnnnnnnnnnnnnnnnnnnnnnnnnnnnnnnnnnnnnnnnnnnnnnnnnnnnnnnnnnnnnnnnnnnnnnnnnnnnnnnnnnnnnnnnnnnnnnnnnnnnnnnnnnnnnnnnnnnnnnnnnnnnnnnnnnnnnnnnnnnnnnnnnnnnnnnnnnnnnnnnnnnnnnnnnnnnnnnnnnnnnnnnnnnnnnnnnnnnnnnnnnnnnnnnnnnnnnnnnnnnnnnnnnnnnnnnnnnnnnnnnnnnnnnnnnnnnnnnnnnnnnnnnnnnnnnnnnnnnnnnnnnnnnnnnnnnnnnnnnnnnnnnnnnnnnnnnnnnnnnnnnnnnnnnnnnnnnnnnnnnnnnnnnnnnnnnnnnnnnnnnnnnnnnnnnnnnnnnnnnnnnnnnnnnnnnnnnnnnnnnnnnnnnnnnnnnnnnnnnnnnnnnnnnnnnnnnnnnnnnnnnnnnnnnnnnnnnnnnnnnnnnnnnnnnnnnnnnnnnnnnnnnnnnnnnnnnnnnnnnnnnnnnnnnnnnnnnnnnnnnnnnnnnnnnnnnnnnnnnnnnnnnnnnnnnnnnnnnnnnnnnnnnnnnnnnnnnnnnnnnnnnnnnnnnnnnnnnnnnnnnnnnnnnnnnnnnnnnnnnnnnnnnnnnnnnnnnnnnnnnnnnnnnnnnnnnnnnnnnnnnnnnnnnnnnnnnnnnnnnnnnnnnnnnnnnnnnnnnnnnnnnnnnnnnnnnnnnnnnnnnnnnnnnnnnnnnnnnnnnnnnnnnnnnnnnnnnnnnnnnnnnnnnnnnnnnnnnnnnnnnnnnnnnnnnnnnnnnnnnnnnnnnnnnnnnnnnnnnnnnnnnnnnnnnnnnnnnnnnnnnnnnnnnnnnnnnnnnnnnnnnnnnnnnnnnnnnnnnnnnnnnnnnnnnnnnnnnnnnnnnnnnnnnnnnnnnnnnnnnnnnnnnnnnnnttagtctaaatcaagaagatcttaatcttttatttaggatactatccgaaaatcttggtgagggtactgaagacttggataaagtgaaaccaagagtacaagagacaggt

SEQ ID NO: 21259 - DNA, 788 bp, Macaca Mulatta
  misc_feature (1)...(788): n = A,T,C or G
gggtcttacaagcatgcctagttctaatcatctcatcctgtgtttgtgattgatgtgtgcctgcctaaatgtacaaaccaccattgtgtccaaagcacagctattcatgacttaattttctaatcccaccacagagaaagtggctcatgccaaagaagaaaaccttagtatgcatcagatgctggatcagactttactggagttaaacaacatgtgaaaacctccttagctgcgaccacattctttcannnnnnnnnnnnnnnnnnnnnnnnnnnnncacctgcttaccccttaaatgcatttttatttacttttaccactgtcacagaaacatccacgaaataccagctaggtcagggggtggagaaaacacacacaaaaaggcaagcccatgtcagggcgatcctggtttaaatgtgccatttcccgggttgatgttgccacactttgtagagagtttagcaacacggtatgcttagtcagtgtaggaatcctcaataaagcagaagaagttccattcaaagtgccaatgatagagtcaacaggaagatgaatgttggaaacacaatcaggtgtggatttggtgctactttaaacaaaaggtcccccctgtgggtccctttgttcaacattgtacaaattgtagaaactctgtccaacactaaatttatttttgtctttggagttttactaccaagatgagaactatgggatccccgcatgccctgaaattcaactaaagccaaaggggtctgtaaagccaaggctggcttcttcaaaaactttca

SEQ ID NO: 21260 - DNA, 781 bp, Macaca Mulatta
ttacctaacataagaaaattaacttccttttatctggctaccttctacttattcaaccatagcttttcccaaggagggcctccctgatttcttccttaaatctaatctcaaaaaaatatagagaaacccacagaaaacaatatctttacatgaatgattaccatgaattctgcataagtttattctgataaactgatcaaaacaaaaatataaagcactacagttctttttagcttgtggttgtaactagcagtcatgccaaactttaaggatataagggtaagttttattacaaataccaataaagaagagtgcacttattggggggaaatattatatttattcttcagtaattttaaggtaataaataaaaatattgtaaataaacatggtactaatatttttattgttatataggtatatatgtaaaatttaggaatggattcagatgaaactatcactttacttttagcattctgttataaaatatacatagaaatctggagtttaaatattagatgactcactaaatatgagagaaagatctaactctcgtgttgcatcttacacttacactttatattttcttaaaggcaaaatcatcagaattcttgcaaattgaaggaaaagaagttaagcaaatgcagaaacgtgtatcactgagaccaagaaagtcttcaaaacctctttgtgataaaaaactacgtgaaaagtaattttcttacatttataattttcctattggaagaggagttattcagtagcattgagacgtgaaaat

SEQ ID NO: 21261 - DNA, 273 bp, Macaca Mulatta
taaatgcaataacaggtagactcagatggtgccaggtgcaagctggaggggcagtctagcggggcagggtgggcacaactatgaggggccctcgacatcctgcctccccaccagcatcggagctcccctggagcacaagctggggaaggcaacccttgggcagcaccccctccacaagcaggcttcaggctccgtcttcccacccagctaggcttgggtggtgtggggaggtggcactgaggctctgctgaggtgactgcccaccccaggtct

SEQ ID NO: 21262 - DNA, 2393 bp, Macaca Mulatta
  misc_feature (1)...(2393): n = A,T,C or G
ggacttgaacctgaccgatgaggcactgagattcaagtacctggggccccggcagacacagctgttcatgcccatctgtgtcacgtacctgctgatcttcacggtgggcgctgtgggcaatgggctgacctgtctggtcatcctgcgccacaaggccatgcgcacgcccaccaactactacctcttcagcctggccgtgtcagacctgctggtgctgctggtgggcctgcccctggagctctatgagatgtggcacaactaccccttcctgctgggcgctggtggctgctatttccgcacactgctgttcgagatggtctgcctggcctcagtgctcaacgtcactgccctgagcgtggaacgctatgtggccgtggtgcacccgctccaggccaggtccatggtgacacaggcccacgtgcgccgagtgcttggggctgtctggggtcttgccatcctctgctccctgcccaacaccagcctgcacggcatccagcagctgtatgtgccctgccggggcccagtgccagactcagatctttgcacgctggtccgcccacgggccctctacaacctggcggtgcagatcactgcgctgctcttcttctgcctgcccatggctgtcatcagcgtgctctacctgctcattgggctgcgactgcggcgggagaggctactgctcatgcaggaggctaagggcaggggctctgcagcagccatgtccagagacacctgcaggctccagcggcgcgatcggggccggagacaagtgaccaagatgctgtnnnnnnnnnnnnnnnnnnnnnnnnnnnnnnnnnnnnnnnnnnnnnnnnnnnnnnnnnnnnnnnnnnnnnnnnnnnnnnnnnnnnnnnnnnnnnnnnnnnnnnnnnnnnnnnnnnnnnnnnnnnnnnnnnnnnnnnnnnnnnnnnnnnnnnnnnnnnnnnnnnnnnnnnnnnnnnnnnnnnnnnnnnnnnnnnnnnnnnnnnnnnnnnnnnnnnnnnnnnnnnnnnnnnnnnnnnnnnnnnnnnnnnnnnnnnnnnnnnnnnnnnnnnnnnnnnnnnnnnnnnnnnnnnnnnnnnnnnnnnnnnnnnnnnnnnnnnnnnnnnnnnnnnnnnnnnnnnnnnnnnnnnnnnnnnnnnnnnnnnnnnnnnnnnnnnnnnnnnnnnnnnnnnnnnnnnnnnnnnnnnnnnnnnnnnnnnnnnnnnnnnnnnnnnnnnnnnnnnnnnnnnnnnnnnnnnnnnnnnnnnnnnnnnnnnnnnnnnnnnnnnnnnnnnnnnnnnnnnnnnnnnnnnnnnnnnnnnnnnnnnnnnnnnnnnnnnnnnnnnnnnnnnnnnnnnnnnnnnnnnnnnnnnnnnnnnnnnnnnnnnnnnnnnnnnnnnnnnnnnnnnnnnnnnnnnnnnnnnnnnnnnnnnnnnnnnnnnnnnnnnnnnnnnnnnnnnnnnnnnnnnnnnnnnnnnnnnnnnnnnnnnnnnnnnnnnnnnnnnnnnnnctgccagtttctgaaacggtcccacagggtccttgctgtccttcccagttcctgttcaggttctggcaggggcccagggatccaggggacctggttccagtctcagccctgctgtcgccaccttgtcatgtgccatcaagcatatcagcctacctttctttttttttgagatggagtctcactctgtcgcccaggctagagtgcagtggtgcgattttggctcactgcaacctccgcctcccgggttcaagcgattctcctgcctcagcctcccgagtagctgggactacaggcaagccccagcactcccagctaattttttaaaaatttttagtagagacagggttttaccatgttggccaggctggtctcaaactcttgacttcaggtgatccgcccacctcggcctcccaaagtcctgggattacaggcatgagccactgcgcccagccaatcagtccacctttctaggcctcagttccttgccagaaaaatgaaagaggcgctggctttccacagtgttttggcactttagctgtggttttctttctctgtgtgtgtaaggcaccgcttgtaatgaaaccaacaataccctcagattgacagggcggaaattattatctgcatctttatcaaccccaagccctacttcctccctgacctccacatgccctccccaacctctcccagcacaagtagggcagagccggcatggatgctgaccccaccaccacagcccacctccgtcctcacgtacgtgcagactggcttgggggtccagtgagcagagtattggacttggctggccagtgggtctcagagcaagagacatggccaaccaagggcaaggagcgaccctgtggagggttctgccgaactcaatgcagtgagaagagggacaggg

SEQ ID NO: 21263 - DNA, 134 bp, Macaca Mulatta
  misc_feature (1)...(134): n = A,T,C or G
natggcggctctggcctacaacctgggcaagcgggagatcaaccactacttcagcgtgaggagcgccaaggtgctggcgctggtggccgtgctgctgctcgcagcgtgccacctcgcctcccgccgctaccgag

SEQ ID NO: 21264 - DNA, 636 bp, Macaca Mulatta
  misc_feature (1)...(636): n = A,T,C or G
gcccctggagaccagcgggggctctgagctccggaaagnnnnnnnnnnnnnnnnnnnnnnnnnnnnnnnnnnnnnnnnnnnnnnnnnnnnnnnnnnnnnnnnnnnnnnnnnnnnnnnnnnnnnnnnnnnnnnnnnnnnnnnnnnnnnnnnnnnnnnnnnnnnnnnnnnnnnnnnnnnnnnnnnnnnnnnnnnnnnnnnnnnnnnnnnnnnnnnnnnnnnnnnnnnnnnnnnnnnnnnnnnnnnnnnnnnnnnnnnnnnnnnnnnnnnnnnnnnnnnnnnnnnnnnnnnnnnnnnnnnnnnnnnnnnnnnnnnnnnnnnnnnnnnnnnnnnnnnnnnnnnnnnnnnnnnnnnnnnnnnnnnnnnnnnnnnnnnnnnnnnnnnnnnnnnnnnnnnnnnnnnnnnnnnnnnnnnnnnnnnnnnnnnnnnnnnnnnnnnnnnnnnnnnnnnnnnnnnnnnnnnnnnnnnnnnnnnnnnnnnnnnnnnnnnntcaggaactggatgcatttcagccataccccattgaaatcatgccaggggaggtcttcctcggcaatntcagtcaagcctgtgaccccaaaattcagaaggacttgaaaatcaaagcccatgtcaatgtctccatggatacagggccct

SEQ ID NO: 21265 - DNA, 456 bp, Macaca Mulatta
tggtggcggtcaatagcggtggtgttcagttcactcaatgccagtctggaccccttgctcttctatttctcttcttctgtggtgcgcagggcatttgggagagggctgcaggtgctaaggaatcagggctcctccatgttgggacgcagaggcaaagacacagcagaggggacaaatgaggacaggggtgtgagtcagggagaggggatgccaagttcggacttcactacggagtagcagtttccctggaccttcggagatgtccagggttacacaggcgctgggaagcctgggagaggcggagcaggaaggctcccgtccggattcagaaatcctcagacccagcccaggactgggactttgaaaaaatgcctttcaccagcttggtatcccttcctgactgatttttcctactcaaaggagcataactcagagatgcaggaagaagtagttagt

SEQ ID NO: 21266 - DNA, 853 bp, Macaca Mulatta
ttgtcagtgagaatatttattgagggtttattgagtgcagggagaagggctggatgccttggggtgggaggagagacccctcccctgggatcctgcagctccaggcccccgtggctgggatgaggcttgggaacctatgaacattctgcaggggccactgtcttctccacggtgctcccttcgtgcgtgacctggcagctgtagctcttgtgggacttccactggtcggacgtcaggctcaggtagctgctggccgcgtacttgttgttgctctgtttggagggtttggtggtctccactcccgcgttgacagcgctgccatctgccttccaggccacttccacggctcccgggtagaagtcactgatcagacacactagtgtggccttgttggcttgaagctcctcagaggagggcgggaagagagtgaccgagggggcagccttgggctgacctaggacggtcagccgggtccctcctccgaataagccaccactcaggctgctgtcccatgctgagcagtaataatcagcctcatccccagcctggagcccagtgatggtcagggaggctgaggtaccagacttggagccagagaatcggtcagaaatccctgagggtcgcttattatcgtcatagatgaggagtttgggggccgttcctgggagctgctggtaccaggatacataataacctccaatgttggagctgcccccagtgcaggagatggtgaccctctgccctggggccccagacactgagggcggctgagtcagcacagactgggcccaggatcctgtgcagtgagcgaggagggtgaggaggagaggagaccaggccatgctggagactg

SEQ ID NO: 21267 - DNA, 584 bp, Macaca Mulatta
  misc_feature (1)...(584): n = A,T,C or G
nnnnnnnnnnnnnnnnnnnnnnnnnnnnnnnnnnnnnnnnnnnnnnnnnnnnnnnnnnnnnnnnnnnnnnnnnnnnnnnnnnnnnnnnnnnnnnnnnnnnnnnnnnnnnnnnnnnnnnnnnnnnnnnnnnnnnnnnnnnnnnnnnnnnnnnnnnnnnnnnnnnnnnnnnnnnnnnnnnnnnnnnnnnnnnnnnnnnnnnnnnnnnnnnnnnnnnnnnnnnnnnnnnnnnnnnnnnnnnnnnnnnnnnnnnnnnnnnnnnnnnnnnnnnnnnnnnnnnnnnnnnnnnnncatcgaaaaggaagacaaacagaaatttattcatttttacccttagcatggctgtgaaaaagagttaaattaaaaaatcaagtacactgaaatgtctaagtcctgaatgagtccaaatatttgaccacgtagaatattgtcatcttcaagagtaggagtaataacacaggtttttatgagcagtttttaatccataaatacaataagcattttggtattttggccaccagaaaacaaaagttgtagtatcagtaaaggtctgagatggttcacttttgtagattcaattcagtgcc

SEQ ID NO: 21268 - DNA, 836 bp, Macaca Mulatta
tcatgagcttctcttccctgcctactgaaatacagtcattgctctttctgacatttctaaccatctacctggtcactctgatgggaaagagcctcattattctggttaccctagccgaccccatgctacacagccccatgtacttcttcctcagacacttatccttcctggagattggcttcaacctagtcattgtggccaaaatgctggggaccctgcttgcccaggacacaaccatctccttccttggctgtgccactcagatgtatttctttttcttctttggggtggctgaatgcttcgtcctggctaccatggcatatgaccgctatgtgaacatctgaagtcccttgcactacccagtcatcatgaaccaaagggcacgggccaaactggctgctgcttcctggttcccaggctttcctgtagctactgtgcagaccacgtggctcttcagctttccattctgtggcaccaacaaggtgaaccacttcttctgtgacagcccacctgtgctgaagctggtctgtgtagacacagcactgtttgagatctacaccatcactggaaccattttggtggtcatgatcccctgcttgctgatcttgtgttcctacactctcattgctgctgccatcctcaagatcccatcagctaaagggaaacataaagccttctctatgtgatcctcacatctccttgttgtctctcttttctatatatcattaaacctcacatattttcagcctaaatgaaataattctcctgaaagcaaaaagctgctatcattgtcctacactgttgtgactcccatgttgaaccccattatctacagc

SEQ ID NO: 21269 - DNA, 849 bp, Macaca Mulatta
  misc_feature (1)...(849): n = A,T,C or G
atactgactttctcttagttaactgtgaaatcatttagctaaagaatataattctttctttttcattctgacttcttctgaatttaaatccggatcctctatagcaggggtccccaacccncaggtcacggacaggtccatgacctgttaggaaccaggctgcacggaggaggtgagtggcaggcaagcgagtgaagcttcatctgtatttccagccactccccgttgctcacattaccacctgagttctgcctcctgtcagatcagcaaaggcattagattcccgtaggagtgaaaaccctattgtgaattgcacattcaagggatctacgtcacatgctccttatgagactctaatgcctgatggtatgtcatcgtctcctatctcttcaagatgggaccatctagttgcagaaaaacaagctcaggactcccattgattctacattatgatgagtcgtgtaattatttcattatgtattacaatgtagtaataatagaaataaagtgcacaatagatgtcatatgcttgaatcatcatcctgaaaccatcccccaaacccccatctgtggaaaaattatctttcacaaaactggtgcctggtgccaaaaaagttggggactgctgctctatagcttctgcactaggatctaccaatgagtaaactctaaatcaataactagttttaaaagcataacaagaatatgtgctggctgcctgcagtggcttatgcctgttttctcagcactttgggaggccagagcgggtggatcaagtgaggccaggagttcaagaccagcctggacaatatgaagggaccctgtctctactaaaaatacaaaaattag

SEQ ID NO: 21270 - DNA, 762 bp, Macaca Mulatta
  misc_feature (1)...(762): n = A,T,C or G
gggcggctccggtgactgaacgcgcggggaaatggccacggggacagaccaggtggtgggactcggcctcgtcgccgttagcctgatcatcttcacctactacaccgcctgggtgattctcttgccattcatcgacagtgagcatgtcatccacaagtatttcctgccccgagcctatgctgtcgccatcccactggctgcaggcctcctactgctcctgtttgtgggactgttcatcacctacgtgatgctgaagagcgagagggtgaccaagaaggctcagtgaaggtcccgcggggatgaggctgccagccccttctctgcttcccctccagcacagggaccaagtaggggagcctgcagaacctgtccaggcacagtggcgcctccagcctgcctgtcctgcagagtccccatgacatggagctcacccctgcctgaccggagccccctccctgactctcacttccagaagctaggagggaggaatacctggaagactccagtcacccccttcttgctcanggcctaaaagatgctggtctcccaacctcactctcagactccctgccaccttttcccccgggttctgccatgttgcctcacttcccctcctgtcacatgctgacattggacttagcgggttctagggccgcatgtgtgacctctctgacctccctcccaagtcctgctcctcagcaaggcagctttccttagcctgacatancccaagaccccgcaaagccctctgggacctggaat

SEQ ID NO: 21271 - DNA, 1323 bp, Macaca Mulatta
  misc_feature (1)...(1323): n = A,T,C or G
agacagttaaatctcacacagaaacagatgagaaacaaacagagaaccgcaccgtcaccccacctgctgcacccaaaccaaaacgggaggagaaccctcannnnnnnnnnnnnnnnnnnnnnnnnnnnnnnnnnnnnnnnnnnnnnnnnnnnnnnnnnnnnnnnnnnnnnnnnnnnnnnnnnnnnnnnnnnnnnnnnnnnnnnnnnnnnnnnnnnnnnnnnnnnnnnnnnnnnnnnnnnnnnnnnnnnnnnnnnnnnnnnnnnnnnnnnnnnnnnnnnnnnnnnnnnnnnnnnnnnnnnnnnnnnnnnnnnnnnnnnnnnnnnnnnnnnnnnnnnnnnnnnnnnnnnnnnnnnnnnnnnnnnnnnnnnnnnnnnnnnnnnnnnnnnnnnnnnnnnnnnnnnnnnnnnnnnnnnnnnnnnnnnnnnnnnnnnnnnnnnnnnnnnnnnnnnnnnnnnnnnnnnnnnnnnnnnnnnnnnnnnnnnnnnnnnnnnnnnnnnnnnnnnnnnnnnnnnnnnnnnnnnnnnnnnnnnnnnnnnnnnnnnnnnnnnnnnnnnnnnnnnnnnnnnnnnnnnnnnnnnnnnnnnnnnnnnnnnnnnnnnnnnnnnnnnnnnnnnnnnnnnnnnnnnnnnnnnnnnnnnnnnnnnnnnnnnnnnnnnnnnnnnnnnnnnnnnnnnnnnnnnnnnnnnnnnnnnnnnnnnnnnnnnnnnnnnnnnnnnnnnnnnnnnnnnnnnnnnnnnnnnnnnnnnnnnnnnnnnnnnnnnnnnnnnnnnnnnnnnnnnnnnnnnnnnnnnnnnnnnnnnnnnnnnnnnnnnnnnnnnnnnnnnnnnnnncgccacctccacgccggccccttccccctcctcccagagctgcacagcgaactgtaaccagggggaagagactaaataacagagcccctctaggagaagccacgggatcccggcggcgaggagagcagaacactgaagactctagaaaagcaaagccggatttctggaaagtgcagaattcttttggttctttggttccagagagagagaagatgcttgtgccaggtggcaccagagtttgccaattgatccttcttattctgtgtgtacatgcaaagattggaccatgttacatgaaatagtgccagctggaggttctttgccagcaccatgccaagtgaaataatatatttactctctctattatacaccagtgtgtgcctgcagcagcctccacagccacgatgggtttgtttctgttttcttgggtggggagcagggacgggcggagggaggagagcaggtttcagatccttacttgccgagccgtttg

SEQ ID NO: 21272 - DNA, 3183 bp, Macaca Mulatta
  misc_feature (1)...(3183): n = A,T,C or G
gtcctgtccaaaatgcattgctgtcttcacaagagtcagtgagccaaggatacaatttccagcttccaggatcctactctcatccaataccagcaaagactttgaatccagtctctggacagtctaactatggtggttctcagggatctaggcagactcttaatagaccatctgtggcctctaatccagtgacacctttgcttcatagtggtcctgctccccgaatgccattacctacttctcagaactcatgtactacaccaatgccttctagtagctttcttcctggagccaacctgccaccacctttgaattggcaatataactatccatccacagccacacaaacaaaccattgtcctcctgcatcatcccaaccaactgtatctggaaatacaagcttaaccacaaatcatcaatatgtttcttctggatatccttcacttcaaaatagcttcgtaaagtcaggtnnnnnnnnnnnnnnnnnnnnnnnnnnnnnnnnnnnnnnnnnnnnnnnnnnnnnnnnnnnnnnnnnnnnnnnnnnnnnnnnnnnnnnnnnnnnnnnnnnnnnnnnnnnnnnnnnnnnnnnnnnnnnnnnnnnnnnnnnnnnnnnnnnnnnnnnnnnnnnnnnnnnnnnnnnnnnnnnnnnnnnnnnnnnnnnnnnnnnnnnnnnnnnnnnnnnnnnnnnnnnnnnnnnnnnnnnnnnnnnnnnnnnnnnnnnnnnnnnnnnnnnnnnnnnnnnnnnnnnnnnnnnnnnnnnnnnnnnnnnnnnnnnnnnnnnnnnnnnnnnnnnnnnnnnnnnnnnnnnnnnnnnnnnnnnnnnnnnnnnnnnnnnnnnnnnnnnnnnnnnnnnnnnnnnnnnnnnnnnnnnnnnnnnnnnagactcccttaggtgctaatcatttaaccacaagcatgagtggattaagtctacgtccagagggtctaagagttgtcaatcttcttcaagaaagaaacatgcttccgtcaacacctttgaagcctccagttccaaatttacatgaagacatccagaaactcaactgtaacccagagnttatttcgatgcacgctgactagcattcctcagacgcaggccttattgaataaagccaaacttcctttggggctgctgcttcatcctttcaaagacttagtgaattgcctgtggttacctccagtacaattgtgagatgccgttcatgcaggacacatatcaatccttttgtcagctttcttgatcaaaggagatggaagtgtaacttatgttatcgagtcaatgatgnnnnnnnnnnnnnnnnnnnnnnnnnnnnnnnnnnnnnnnnnnnnnnnnnnnnnnnnnnnnnnnnnnnnnnnnnnnnnnnnnnnnnnnnnnnnnnnnnnnnnnnnnnnnnnnnnnnnnnnnnnnnnnnnnnnnnnnnnnnnnnnnnnnnnnnnnnnnnnnnnnnnnnnnnnnnnnnnnnnnnnnnnnnnnnnnnnnnnnnnnnnnnnnnnnnnnnnnnnnnnnnnnnnnnnnnnnnnnnnnnnnnnnnnnnnnnnnnnnnnnnnnnnnnnnnnnnnnnnnnnnnnnnnnnnnnnnnnnnnnnnnnnnnnnnnnnnnnnnnnnnnnnnnnnnnnnnnnnnnnnnnnnnnnnnnnnnnnnnnnnnnnnnnnnnnnnnnnnnnnnnnnnnnnnnnnnnnnnnnnnnnnnnnnnnnnnnnnnnnnnnnnnnnnnnnnnnnnnnnnnnnnnnnnnnnnnnnnnnnnnnnnnnnnnnnnnnnnnnnnnnnnnnnnnnnnnnnnnnnnnnnnnnnnnnnnnnnnnnnnnnnnnnnnnnnnnnnnnnnnnnnnnnnnnnnnnnnnnnnnnnnnnnnnnnnnnnnnnnnnnnnnnnnnnnnnnnnnnnnnnnnnnnnnnnnnnnnnnnnnnnnnnnnnnnnnnnnnnnnnnnnnnnnnnnnnnnnnnnnnnnnnnnnnnnnnnnnnnnnnnnnnnnnnnnnnnnnnnnnnnnnnnnnnnnnnnnnnnnnnnnnnnggttgtatttctcggtattcagcaggtagtgtctattactatccctcttaccatcatcagcacaacccagtccaagtgcagaagttacagaaggaactacagagataccttactcggaagattggctttgaggcagtcgtgaggattcggtgcaccaaagnnnnnnnnnnnnnnnnnnnnnnnnnnnnnnnnnnnnnnnnnnnnnnnnnnnnnnnnnnnnnnnnnnnnnnnnnnnnnnnnnnnnnnnnnnnnnnnnnnnnnnnnnnnnnnnnnnnnnnnnnnnnnnnnnnnnnnnnnnnnnnnnnnnnnnnnnnnnnnnnnnnnnnnnnnnnnnnnnnnnnnnnnnnnnnnnnnnnnnnnnnnnnnnnnnnnnnnnnnnnnnnnnnnnnnnnnnnnnnnnnnnnnnnnnnnnnnnnnnnnnnnnnnnnnnnnnnnnnnnnnnnnnnnnnnnnnnnnnnnnnnnnnnnnnnnnnnnnnnnnnnnnnnnnnnnnnnnnnnnnnnnnnnnnnnnnnnnnnnnnnnnnnnnnnnnnnnnnnnnnnnnnnnnnnnnnnnnnnnnnnnnnnnnnnnnnnnnnnnnnnnnnnnnnnnnnnnnnnnnnnnnnnnnnnnnnnnnnnnnnnnnnnnnnnnnnnnnnnnnnnnnnnnnnnnnnnnnnnnnnnnnnnnnnnnnnnnnnnnnnnnnnnnnnnnnnnnnnnnnnnnnnnnnnnnnnnnnnnnnnnnnnnnnnnnnnnnnnnnnnnnnnnnnnnnnnnnnnnnnnnnnnnnnnnnnnnnnnnnnnnnnnnnnnnnnnnnnnnnnnnnnnnnnnnnnnnnnnnnnnnnnnnnnnnnnnnnnnnnnnnnnnnnnnnnnnnnnnnnnnnnnnnnnnnnnnnnnnnnnnnnnnnnnnnnnnnnnnnnnnnnnnnnnnnnnnnnnnnnnnnnnnnnnnnnnnnnnnnnnnnnnnnnnnnnnnnnnnnnnnnnnnnnnnnnnnnnnnnnnnnnnnnnnnnnnnnnnnnnnnnnnnnnnnnnnnnnnnnnnnnnnnnnnnnnnnnnnnnnnnnnnnnnnnnnnnnnnnaaggtatgagagtccaatgaaagcaaacttccttccaacatgatagaagacagaacagaatctgcactatcatattatgaattcctgttgcatatacagcaacaagtgaataaatga

SEQ ID NO: 21273 - DNA, 846 bp, Macaca Mulatta
gggagactgctgggcgctgggtgggacagcgctggcgcggagactgcttgcggattccaggtacctcgagtggcggcagctagccccagacttctgtcttttcagccgcagtgagggctcggggctgcagaattgcaaccttgccaatggacctgatcggttttggttatgcagccctcgtgacatttggaagcatttttggatataagcggagaggtggtgttctatctttgattgctggtctttttgttggatgtttggctggctatggagcttaccgtgtctccaatgacaaacgagatgtaaaagtgtcactgtttacagctttcttcctggctaccataatgggtgtgagatttaagaggtccaagaaaataatgcctgctggtctggttgcaggtttgagcctcatgatgatcctgagacttgtcttgttgctgctctgagcatctggaggaacagaaaactaagttcatgtcatcctgctgtaatgggcagagcatatttttttgtatttaaaagataaacttcaatatggaatgctagaaacacaaatagcactgtcacctctaatatgaacattagtttgaggtagttttttcctaaagcaaaagttttaactgttttctaattgtcaagcgctgttttcattaaaagtgtctaatgaatcatgatacgctcttccatttgctgtggtccattttctatatatttggcattttttgaaaattccaaatactcatgtctcaagtaagctttaaactacaacttgtcacataaagcagtttcttagttggatttcacagaaaggctaatgtatctattttggccatttggggtaaattc

SEQ ID NO: 21274 - DNA, 611 bp, Macaca Mulatta
gaggagcggccgggtccttgttggcaggcatgcacacgctgctccagcaagccctccgtctgcccccgccagcctgaagcctgacaccttcagggaccagctccaggagctctgcatcccccaagacctggtcggggacttggccagcgtggtatttgggagccagcggcccctccttgattgcgtggcccagcagcagggggcctggctgccccatgttgctgactttcggtggcgggtggatgtagcaatctctaccagtgccctggctcgctccctgcagcccagcgtcctgatgcagctgaagctttcagatgggtcagcataccgcttcgaggtccccacagccaaattccaggagctgcggtacagcgtggctctggtcctgaaggagatggcagatctggagaagaggtgtgagcgcagactgcaggactgacccctcacttggccagtcccattcaggtcaggcttggacaggcacctgagatggtgccaaagtgccgttgactcttcccaggacagctctgtccttgccatgaggcaggctcttaagtgagagtgtttgaacgtaattatgtagtcttctgtttaattgaaaaagagaacta

SEQ ID NO: 21275 - DNA, 697 bp, Macaca Mulatta
  misc_feature (1)...(697): n = A,T,C or G
caccaatccaaaatgctggctttaaaatgtccctcttccaatggaaagcccaaccatgcagacatcttgctcataaacttacagtatgtttccgaagtggaaataattaatgaccgaacagaaacccctccttcccctagctgcactcaatngttagtaagcttgccagcaaagcacggacagagaaggaggaaaagctgagtcaggcctatgcaatcagtgctggtgtctctctagagggccagcagctcttctagaccaatcacaagaccattaaagactgtaaatggcaagaaaaaaacatcgtagtcatggaagaagttgttattacacccccatattatgtggaaaactgtaaatgcaaagaggggcgtgcactgagccatgtacgcaaaatagttgaaaaacattttagagacgtggaaagccaaaagatactgcaacgttcacaagcccagcaaccacagaaggaggctgccctgtcatcctgagttcgtacacctggaggactcttccagcaaccagccaaggaggcgctggtggtggcttcagcggaggcaggcgcggggagggaagggatcctatatgtcctgttggctgttaacaaagggtcagcatttccaaatcttagacttgaacaaacaaagcacccaacaaaaaagaacaggagaataattaaaaagttgaatcattactt

SEQ ID NO: 21276 - DNA, 264 bp, Macaca Mulatta
  misc_feature (1)...(264): n = A,T,C or G
agactgtgcaatacttagagaacctatagcatcttctcattcccatgtggaacaggatgcccacatactgtctaattaataaattttcaattttttttcaaacaagtatgaatctagttgattgatgcctttttttcatgacaataaagtattttctttaaaaattgttgtaattcagagtatttctgttgagggaggcgcttcttanaaatgaggaggaatatagcactgcagtgagcaggaagctgagggggtagggtgcag

SEQ ID NO: 21277 - DNA, 473 bp, Macaca Mulatta
actacctccaggcactgctacagcccatgctttgtggtttaagggccagctagttacaatgacagttagctagttactggttccatgtaattttcgtaaaggtattaaatttttctaaatattagagctgtaactttcactttctcttgaaggcacagaaagggagtcacaagacacggttgcagagaatgatgatggcggcttcagtgaggaatgggaagcccagagggacagtcatctagggcctcatcgctctacacctgagtcacgagctgctgtccaggaactttccagcagcatccttgctggtgaagatccagaagaaagtatgtacattcctctatgttgcaaagtcatggattcctttaggtggctacattatcaacctttttgagaataaaatgaattcagagtgttacagtctaattctgtgtcacatgtaacttttatttggaaatatcattaatagtgct

SEQ ID NO: 21278 - DNA, 249 bp, Macaca Mulatta
atggaaggaaactggaaaagacagaacatttcaggaaactatacatgcactttgtttggatgaagaacagagcactcaaatttgagctatgggggaagcctgatttcctaagctactgtgtaccagcagtgaactgggaagatagagataaataaaattccactgttatgtagctcagcagtggagctcaccacttcctgataaagtggaggaagacctaagtaaataactccaacacaaacgtttttc

SEQ ID NO: 21279 - DNA, 101 bp, Macaca Mulatta
atccatttagcatccaggcctctgttgaaaagataatatgagggagaagggaacacatttccttctgcacttacttccctaagtcactttccgttatgttt

SEQ ID NO: 21280 - DNA, 943 bp, Macaca Mulatta
  misc_feature (1)...(943): n = A,T,C or G
gtactatactctgtattctcacaaatagagaagactaatattgcagacctggtgacagctctgattgtccttttggttgtatccatttttaaagaaataaatcagcgcttcaaagacaaacttccagtgcctattccaatcgaatnnnnnnnnnnnnnnnnnnnnnnnnnnnnnnnnnnnnnnnnnnnnnnnnnnnnnnnnnnnnnnnnnnnnnnnnnnnnnnnnnnnnnnnnnnnnnnnnnnnnnnnnnnnnnnnnnnnnnnnnnnnnnnnnnnnnnnnnnnnnnnnnnnnnnnnnnnnnnnnnnnnnnnnnnnnnnnnnnnnnnnnnnnnnnnnnnnnnnnnnnnnnnnnnnnnnnnnnnnnnnnnnnnnnnnnnnnnnnnnnnnnnnnnnnnnnnnnnnnnnnnnnnnnnnnnnnnnnnnnnnnnnnnnnnnnnnnnnnnnnnnnnnnnnnnnnnnnnnnnnnnnnnnnnnnnnnnnnnnnnnnnnnnnnnnnnnnnnnnnnnnnnnnnnnnnnnnnnnnnnnnnnnnnnnnnnnnnnnnnnnnnnnnnnnnnnnnnnnnnnnnnnnnnnnnnnnnnnnnnnnnnnnnnnnnnnnnnnnnnnnnnnnnnnnnnnnnnnnnnnnnnnnnnnnnnnnnnnnnnnnnnnnnnnnnnnnnnnnnnnnnnnnnnnnnnnnnnnnnnnnnnnnnnnnnnnnnnnnnnnnnnnnnnnnnnnnnnnnnnnnnnnnnnnnnnnnnnnnnnnnnnnnnnnnnnnnnnnnnnnnnnnnnnnnnnnnccataatgcagcacactggctaatattggaagaagcaacatctataagaataaaaaagattattatgatnatgtatgagctgaaaggagtgaaaattttcagatgtccatctcctatctactttgcaaacattggtttctttaagcagaaacttatcgatgctgt

SEQ ID NO: 21281 - DNA, 648 bp, Macaca Mulatta
caggtatcagtgcaaccagtgctcctatcgctgccaccgggctgatcagctgagcagccacaagctgcggcatcagggcaagtctctgatgtgtgaggtgtgtgccttcgcctgcaagcggaagtatgagctgcagaagcacatggcttcccagcaccaccctggcacaccggccccgctctacccttgtcactactgcagttaccagagccgccacaagcaggctctgctgagccatgagaactgcaagcatacccgcctccgtgagttccactgtgccctctgtgactaccgcaccttcagcaacaccacactcttgttccacaaacgcaaggcccatggctatgtgcctggagaccaggcctggcagctccgctatgcgagccaggagccagaaggggccatgcagggcccgacacccccaccagattcagagccctcaagccagctgtctgcccagtccaaggggccaggtcacgaacctgggactgtggtggaccccagcttggaccaggccctgccagagacaagtgaggaggtcaacactggaagacaggagggcagtgaggctccccatggggttgacctggttggcagttccagaccagcagaggtggaagagggcagctgcacactacacctagaggc

SEQ ID NO: 21282 - DNA, 736 bp, Macaca Mulatta
  misc_feature (1)...(736): n = A,T,C or G
gagtggatggtttggttgggtccccacgaggtgagtggtcatatgcgatgacgtgtgttcacgcaccctcctgtgtgcaccctcagggtcaccgaagtcccccgcacgctggctctccccacccctcctgttccagaaagcatgtctgaaagcagtccacgggattattaaggagtcaccatgaatccacttcggttttaaaaccattcccgaatgtcctagtggattgtgctgtgctgcctaagctgctggctgcaagagccagagcacggactccctcaggagcagcagcaggcgggcctccacggtggcnnnnnnnnnnnnnnnnnnnnnnnnnnnnnnnagacagagtctcactctttcacccaggctgggatgtagtggcgcgatctcggctcactgtaacctccacctcctgaattcaagcgattctcctgcctcagcctccctggtagctgggattacaggtgcccgccaccacgcccaagtaacttttatatttttagtagagatggggttttgccatgttggccaggctggtcttgaactcctagcctgaaatgatccacccacctccacctaccgaagtgctggaattgcaggcatgagcctccactcccagcctgctttttctttttgaagacaagacttaggtctcctcctcctgaactgtaaacctgcgtgtgtggctgtgcacccctcgtttgtggcctcacctcaggtctggggaagtctg

SEQ ID NO: 21283 - DNA, 2556 bp, Macaca Mulatta
gacggctgctgttgctacaggagacccgggacagaggactgctgtctgcactctctcttcactctgcctaacttgaggatctgtaagtaacacaaaacttaaactttcctgtcgaggtttgaacattgaagctgtgcacctaatctgacctgtgactcctgggccaccccagagggacctagtgggtgaatcccctgctgtgcatttctgtctgaacctctgggggctgctgggagcattggctaccagctcaattaatagagaaactcaaggaatttccttctaattacatgtgtcctacttgacacgtccaacagagacaacaatagctccttaaaacacccttttgtttggagagaagccgatcctgatcctcggcctgtttttcaatcaggttatttgttatttgctattgagttgtttgattgccttatgtatttagatgtttaccctttctaccacttagggtttgcaactattgtctttcattttctgggttgctttttcactcagttgattatttatttgtttgtttggttttttgacgtgcatttgctttagaggtcagtgcagccccacttgtctcttttcccgtttattgcctgtgtctttggtgtcatagcaaagatatcattaccaacatcaatgtcaaagcgttatcttcatatgttcctctcgtcgttttatggtttcaggtctatgtttgggtcttcaatccattttgagttggtttgtgtatatagatatgataaaggccacatgtatcaaacatcaaatcctaaggtggagtacagtagatatataccatttttcattcttattcatatctctatagagctggaaatgaatttttgggtgtagatgaaatttttaccttgatatgtctgtgttcatttcacctatcgtatgatagggtcattgttctcttcacattggcccctacaggaggctactcacctcatgccttcgtgagtgtggtcatgcctttgatgcctgcaataaatgactctttacttgataggaaattcatgcctgctgccagagtgtagacctatagagagtagtggggccatctgaaggaaaggagacatttgtatcctgaacttattgaataaagtcactgctgttatcctttggtagaagagttaaaagtaaatatttagtgaagtgagaaacaggagaaagatgccaggttcatcatcttcaccatcatctaaatcagcacagacactaaacatagagattcaaactagagtgaaagctgggagagcaaaagaagaaaacatggacattgagaccaatgggatcccatacaatctccagtgaaatgcacagctcctctctctgagaaggttcaaggtttcctgtctctgagccttctctctgcagacatagaaatccagactaactcctctctcccgacttgtctgctcctgctcttcctcttccaggtcactccagccatgaggaccttcgccctcctcaccgccatgcttctcctggtggccctgcacgctcaggcagaggcacgtcaggcaagagctgatgaagctgccgcccagcagcagcctggagcagatgatcagggaatggctcattcctttacatggcctgaaaacgccgctcttccgctttcaggtgagacaggccggcatgcagagctgcagggtctagagggatggatgggagacagagtcgggaatcgagtctcagtggtccttgtcacctagatggcttcatttagcatctctgggccttggttttctcatctataaattgaatagagagccaaataagtctagcaggttttctgtctataaagatttgaggcagctctgcctggagagtaaccattcttttattcctttacttccttaatgatcctttcactttagagaatcaataaaattaaaaaataagacttgaaatcaagatatgtctgtgaaattcaagtaggtttaagatatgaagagacagtctgactagttctttctggattcaaacaagtcatcttcattacatggataatatttgactgtatctatacaaccgtttctaagagtagagacaagcctaagagtgcgttcaggtgtttgtgtttgatggggcagaggcacaaaaatgagagcaaatgagaataagtctcaaatcctgtgtgaccagcactgctctgtgtatttattcttaatgactgaggttgttcatgctaccggccctaatgcagctgacatcactcattagctagcacatgacttctccaggattccctttgtcactcactgctgaccttctgatccatttatgatgctttctctgtgttcccagagtcagcgagaggcttgaggtgcatttgcagacgaggattttgccgtttgttataatgtcgttttgggtcctgcgcttttcgtggttgactctgccggatctgctgccgctgagcttccagaatcaagaaaaatatgctcagaagttactttgagagttgaaagaaattcttgttactgctgtaccttgtcctcagtttccttttctcatcccaaataaataccttctcgc

SEQ ID NO: 21284 - DNA, 2023 bp, Macaca Mulatta
  misc_feature (1)...(2023): n = A,T,C or G
gtgttcacttcacagcatatatcgcttgttttcagcagaccggaagcgagttgaaactgctttagaggcttgtagtcttccatcttcaaggaatgattcaatacctcaagaagatttcactccagaagtgtacagagttttcctcaacaacctttgccctcgacctgaaattgataacatcttttcagaatnnnnnnnnnnnnnnnnnnnnnnnnnnnnnnnnnnnnnnnnnnnnnnnnnnnnnnnnnnnnnnnnnnnnnnnnnnnnnnnnnnnnnnnnnnnnnnnnnnnnnnnnnnnnnnnnnnnnnnnnnnnnnnnnnnnnnnnnnnnnnnnnnnnnnnnnnnnnnnnnnnnnnnnnnnnnnnnnnnnnnnnnnnnnnnnnnnnnnnnnnnnnnnnnnnnnnnnnnnnnnnnnnnnnnnnnnnnnnnnnnnnnnnnnnnnnnnnnnnnnnnnnnnnnnnnnnnnnnnnnnnnnnnnnnnnnnnnnnnnnnnnnnnnnnnnnnnnnnnnnnnnnnnnnnnnnnnnnnnnnnnnnnnnnnnnnnnnnnnnnnnnnnnnnnnnnnnnnnnnnnnnnnnnnnnnnnnnnnnnnnnnnnnnnnnnnnnnnnnnnnnnnnnnnnnnnnnnnnnnnnnnnnnnnnnnnnnnnnnnnnnnnnnnnnnnnnnnnnnnnnnnnnnnnnnnnnnnnnnnnnnnnnnnnnnnnnnnnnnnnnnnnnnnnnnnnnnnnnnnnnnnnnnnnnnnnnnnnnnnnnnnnnnnnnnnnnnnnnnnnnnnnnnnnnnnnnnnnnnnnnnnnnnnnnnnnnnnnnnnnnnnnnnnnnnnnnnnnnnnnnggaatctggagttcctcttccaagccctatggagttaatgtataaaattttggtgaaaaataagaataaatcacacaagtcatcacaaggaagcggtaaaaagaagctctcagaacaagcctccaacacctgcagcgactcctccagcatgttcgagacctcatccccaggnnnnnnnnnnnnnnnnnnnnnnnnnnnnnnnnnnnnnnnnnnnnnnnnnnnnnnnnnnnnnnnnnnnnnnnnnnnnnnnnnnnnnnnnnnnnnnnnnnnnnnnnnnnnnnnnnnnnnnnnnnnnnnnnnnnnnnnnnnnnnnnnnnnnnnnnnnnnnnnnnnnnnnnnnnnnnnnnnnnnnnnnnnnnnnnnnnnnnnnnnnnnnnnnnnnnnnnnnnnnnnnnnnnnnnnnnnnnnnnnnnnnnnnnnnnnnnnnnnnnnnnnnnnnnnnnnnnnnnnnnnnnnnnnnnnnnnnnnnnnnnnnnnnnnnnnnnnnnnnnnnnnnnnnnnnnnnnggaatgcgggttgtcagatggtggcacttaatttccagacaatgnnnnnnnnnnnnnnnnnnnnnnnnnnnnnnnnnnnnnnnnnnnnnnnnnnnnnnnnnnnnnnnnnnnnnnnnnnnnnnnnnnnnnnnnnnnnnnnnnnnnnnnnnnnnnnnnnnnnnnnnnnnnnnnnnnnnnnnnnnnnnnnnnnnnnnnnnnnttatatcaggtcagtttctttctgataagaaagtcgggacttacgtggaagtggatatgtttggtttgcctgtggatacaaggaggaaggcatttaagaccaagacatcccaaggaaatgctgtgaatcctgtctgggaagaagaacctattgtgttcaaaaaggtnnnnggtggttcttcctactctggcctgtttgagaatagcagtttatgaagaaggaggtaaattcattggccaccgtatcttgccagtgcaagccattcggccaggnnnnnnnnnnnnnnnnnnnnnnnnnnnnnnnnnnnnnnnnnnnnnnnnnnnnnnnnnnnnnnnnnnnnnnnnnnnnnnnnnnnnnnnnnnnnnnnnnnnnnnagatgtcattgaagctttatcaaacccaatccggtatgtgaacctgatggagcagagagctaagcaattggctgctttgacactggaagatgaagaagaagtaaagaaagag

SEQ ID NO: 21285 - DNA, 135 bp, Macaca Mulatta
agtgccctcggagacggaggctgtgcagggcaaccccatgaagctgcgctgcatctcctgcatgaagagagaggaggtggaggccaccacggtggtggaatggttctacaggcccgagggcggtaaagatttcct

SEQ ID NO: 21286 - DNA, 190 bp, Macaca Mulatta
gtcacggtgcatacctgtttaccatccagagttcatcactgctgacgagtcttgggaagacggctctgctgattgggagcgaaggtacctgctgagcagggaggtgtctggtctgtctgcctctgcctcctcggagaagggggaccttctggacagcccgcacgtccggctccgtctttccaagctgagg

SEQ ID NO: 21287 - DNA, 2519 bp, Macaca Mulatta
  misc_feature (1)...(2519): n = A,T,C or G
agttgggtgactgtatttcagaagacagttatccagatggcaacatcacatggtacaggaatggaaaagtgctacatccccttgaaggannnnnnnnnnnnnnnnnnnnnnnnnnnnnnnnnnnnnnnnnnnnnnnnnnnnnnnnnnnnnnnnnnnnnnnnnnnnnnnnnnnnnnnnnnnnnnnnnnnnnnnnnnnnnnnnnnnnnnnnnnnnnnnnnnnnnnnnnnnnnnnnnnnnnnnnnnnnnnnnnnnnnnnnnnnnnnnnnnnnnnnnnnnnnnnnnnnnnnnnnnnnnnnnnnnnnnnnnnnnnnnnnnnnnnnnnnnnnnnnnnnnnnnnnnnnnnnnnnnnnnnnnnnnnnnnnnnnnnnnnnnnnnnnnnnnnnnnnnnnnnnnnnnnnnnnnnnnnnnnnnnnnnnnnnnnnnnnnnnnnnnnnnnnnnnnnnnnnnnnnnnnnnnnnnnnnnnnnnnnnnnnnnnnnnnnnnnnnnnnnnnnnnnnnnnnnnnnnnnnnnnnnnnnnnnnnnnnnnnnnnnnnnnnnnnnnnnnnnnnnnnnnnnnnnnnnnnnnnnnnnnnnnnnnnnnnnnnnnnnnnnnnnnnnnnnnnnnnnnnnnnnnnnnnnnnnnnnnnnnnnnnnnnnnnnnnnnnnnnnnnnnnnnnnnnnnnnnnnnnnnnnnnnnnnnnnnnnnnnnnnnnnnnnnnnnnnnnnnnnnnnnnnnnnnnnnnnnnnnnnnnnnnnnnnnnnnnnnnnnnnnnnnnnnnnnnnnnnnnnnnnnnnnnnnnnnnnnnnnnnnnnnnnnnnnnnnnnnnnnnnnnnnnnnnnnnnnnnnnnnnnnnnnnnnnnnnnnnnnnnnnnnnnnnnnnnnnnnnnnnnnnnnnnnnnnnnnnnnnnnnnnnnnnnnnnnnnnnnnnnnnnnnnnnnnnnnnnnnnnnnnnnnnnnnnnnnnnnnnnnnnnnnnnnnnnnnnnnnnnnnnnnnnnnnnnnnnnnnnnnnnnnnnnnnnnnnnnnnnnnnnnnnnnnnnnnnnnnnnnnnnnnnnnnnnnnnnnnnnnnnnnnnnnnnnnnnnnnnnnnnnnnnnnnnnnnnnnnnatgaaaacagagagaaggtgaatgaccaggcaaaactcattgtgggaatcgttgttggtctcctccttgctgcccttgttgctggtgtcgtctactggctgtacatgaagaagtcaaagnnnnnnnnnnnnnnnnnnnnnnnnnnnnnnnnnnnnnnnnnnnnnnnnnnnnnnnnnnnnnnnnnnnnnnnnnnnnnnnnnnnnnnnnnnnnnnnnnnnnnnnnnnnnnnnnnnnnnnnnnnnnnnnnnnnnnnnnnnnnnnnnnnnnnnnnnnnnnnnnnnnnnnnnnnnnnnnnnnnnnnnnnnnnnnnnnnnnnnnnnnnnnnnnnnnnnnnnnnnnnnnnnnnnnnnnnnnnnnnnnnnnnnnnnnnnnnnnnnnnnnnnnnnnnnnnnnnnnnnnnnnnnnnnnnnnnnnnnnnnnnnnnnnnnnnnnnnnnnnnnnnnnnnnnnnnnnnnnnnnnnnnnnnnnnnnnnnnnnnnnnnnnnnnnnnnnnnnnnnnnnnnnnnnnnnnnnnnnnnnnnnnnnnnnnnnnnnnnnnnnnnnnnnnnnnnnnnnnnnnnnnnnnnnnnnnnnnnnnnnnnnnnnnnnnnnnnnnnnnnnnnnnnnnnnnnnnnnnnnnnnnnnnnnnnnnnnnnnnnnnnnnnnnnnnnnnnnnnnnnnnnnnnnnnnnnnnnnnnnnnnnnnnnnnncccaaaggtggcagcttgtgaagactggggacactcacattgccctaatcaaaaactgtgatttttatcacaagggaggggaggccaagagtcagagtgatagacaccataagagccgactctttgatgtgccaccagcagactctcagaagtaaatcacagatgcatatagacacacatacataacggtactcccaaactgacaattttacctattctaaaaaagacataaaacagaatttggtagcacttacctctacagacacctgctaataaattattttctgtcaaaagaaaaaacacaagcatgtgtgagagacactttggaaaaatcatggtcaacattcccattttcatagatcacaaagtaaatcgctgtaattacaaattggtgttaaatcctttgggttatccactgccttaaaattatacctacttcatgtttaaaaagatatcagtcagaattagagtttttaacagtggtcattatcaaagccgtgttattttccacagaatatagaatatatatttttttcgtgtgtgtttttgttaacttccctacagatactgaatgcacctgcagataatttagtgtttttaactgatacataatttatcaagcagtacatgaaagtgtaataataaaatgtctatgtatctttagttacattccaatttgtaactttataaacatgttttatgctcgaggaaatttttggggtggtagtataaatggaaacttt

SEQ ID NO: 21288 - DNA, 1205 bp, Macaca Mulatta
  misc_feature (1)...(1205): n = A,T,C or G
aggcaacatttttgtgaacatatagatgaatggcggaaaatctatgacagtaaagagccacataatgctaaatttccagcaccaatggataagaacctaaaggaactacagaaaataataattcttcggtgtttaagacccgataannnnnnnnnnnnnnnnnnnnnnnnnnnnnnnnnnnnnnnnnnnnnnnnnnnnnnnnnnnnnnnnnnnnnnnnnnnnnnnnnnnnnnnnnnnnnnnnnnnnnnnnnnnnnnnnnnnnnnnnnnnnnnnnnnnnnnnnnnnnnnnnnnnnnnnnnnnnnnnnnnnnnnnnnnnnnnnnnnnnnnnnnnnnnnnnnnnnnnnnnnnnnnnnnnnnnnnnnnnnnnnnnnnnnnnnnnnnnnnnnnnnnnnnnnnnnnnnnnnnnnnnnnnnnnnnnnnnnnnnnnnnnnnnnnnnnnnnnnnnnnnnnnnnnnnnnnnnnnnnnnnnnnnnnnnnnnnnnnnnnnnnnnnnnnnnnnnnnnnnnnnnnnnnnnnnnnnnnnnnnnnnnnnnnnnnnnnnnnnnnnnnnnnnccagtatcaattctacagaatggagtaaaaatgtctaatgaccctacctcgggtgttgggctgaatctccttcaatagtatctcactgatccagtttctgatcgtgagtctttcaagggatgccgtgcgaaggaactnnnnnnnnnnnnnnnnnnnnnnnnnnnnnnnnnnnnnnnnnnnnnnnnnnnnnnnnnnnnnnnnnnnnnnnnnnnnnnnnnnnnnnnnnnnnnnnnnnnnnnnnnnnnnnnnnnnnnnnnnnnnnnnnnnnnnnnnnnnnnnnnnnnnnnnnnnnnnnnnnnnnnnnnnnnnnnnnnnnnnnnnnnnnnnnnnnnnnnnnnnnnnnnnnnnnnnnnnnnnnnnnnnnnnnnnnnnnnnnnnnnnnnnnnnnnnnnnnnnnnnnnnnnnnnnnnnnnnnnnnnnnnnnnnntccaaggatcttcaacaaataacaccctcttcgagtctttgctcctcacccagggaggctccaaacagacaggagccgcgggaagcactgaccagattctgttagaaattgccaaagatatcctcaacaagnagctccctagtgatttcgacattgaaatggcactacagaagtatcctgtgagatatgaagaaagcatgaatactgtgttagtacaagaaatg

SEQ ID NO: 21289 - DNA, 1333 bp, Macaca Mulatta
  misc_feature (1)...(1333): n = A,T,C or G
ncagagtccaagccctgggcagtgccacctttactcagcccagccctgaagacagaatgagaggggcttcctatctccagatcctgctccttctggtgctggnnnnnnnnnnnnnnnnnnnnnnnnnnnnnnnnnnnnnnnnnnnnnnnnnnnnnnnnnnnnnnnnnnnnnnnnnnnnnnnnnnnnnnnnnnnnnnnnnnnnnnnnnnnnnnnnnnnnnnnnnnnnnnnnnnnnnnnnnnnnnnnnnnnnnnnnnnnnnnnnnnnnnnnnnnnnnnnnnnnnnnnnnnnnnnnnnnnnnnnnnnnnnnnnnnnnnnnnnnnnnnnnnnnnnnnnnnnnnnnnnnnnnnnnnnnnnnnnnnnnnnnnnnnnnnnnnnnnnnnnnnnnnnnnnnnnnnnnnnnnnnnnnnnnnnnnnnnnnnnnnnnnnnnnnnnnnnnnnnnnnnnnnnnnnnnnnnnnnnnnnnnnnnnnnnnnnnnnnnnnnnnnnnnnnnnnnnnnnnnnnnnnnnnnnnnnnnnnnnnnnnnnnnnnnnnnnnnnnnnnnnnnnnnnnnnnnnnnnnnnnnnnnnnnnnnnnnnnnnnnnnnnnnnnnnnnnnnnnnnnnnnnnnnnnnnnnnnnnnnnnnnnnnnnnnnnnnnnnnnnnnnnnnnnnnnnnnnnnnnnnnnnnnnnnnnnnnnnnnnnnnnnnnnnnnnnnnnnnnnnnnnnnnnnnnnnnnnnnnnnnnnnnnnnnnnnnnagggtgattctgggggacccctgacccgcctgcagtctgggagctgggtcctggtgggcgtggtgagctggggcaagggttgtgccctgcccaaccgtccaggtgtctacaccaacgtggccacatatagcccctggattcaggctcacgtaagcttctaatgctagccagtgaggctgacctggggccagctgctggggtccctcagtctcctggttcatccggggacctgcccataccccacatctcttctgccttgaggccaagatgcctaataaagctaaaagccacccccaacccccacctcctgcctcctctcctctttggggctcaccagatctgactccaccaaccctcatccagggatctgccatgagtcccagggggtgacactcccccctcccttcctggcttgtatttacttttctcggccctggtcagggatgggtgcaaggcacgcagcggtgggcagaccagctgctgcccatctggcctgtgtgcccatctttttctggagaaagtcagattcacagcatgacagagatttcacaccagggagatcctccatagctggctttgaggacacggggaccacag

SEQ ID NO: 21290 - DNA, 1070 bp, Macaca Mulatta
  misc_feature (1)...(1070): n = A,T,C or G
gggggactgcatggacccagatgatgtggtaccagttggccaaagaagagcctggtgttggtgcatgtgctttggactggcatttatgcttgcaggtgttattctaggaggagcatacttgtacaaatattttgcacttcaaccagatgacgtgtactactgtggaataaagtacatcaaagatgatgtcatcttaaatgagccctctgcggatgccccagctgctctctaccagacaattgaagagaatattaaaatctttgaagaagaagaagttgaatttatcagtgtgcctgttccagagtttgcagatagtgatcctgccaacattgttcatgactttaacaagaaacttacagcctatttagatcttaacctggataagtgctatgtgatccctctgaacacttccattgttattgccacccagaaaccctactggagttacttattaacatcaaggctggaacctatttgcctcagtcgtatctgaattcatgagcacatggttattactgatcgcattgaaaaacatttatcacctgggtttctttatttatcgactgtgtcatgaacaaggaaacttacaaactgccaaccgcaagagaaactattaaaaggtatttcagaaaacgtggagaccaggctattgtttccgcaattcggcattttgaaaacaaatttgcccgtggaaaacttttaatttggtccctctagaacaagtcgagaaaaacattattgaggaaaattaataccacagcataatcccaccctttacattttgtgcagtgattattttttaaaatcttctttcatgtaagtagcaaacagggctttactatcttttcatctcattaattcaattaaaaccattaccnnnnnnnnnnnnnnnnnnncaagtgtggtgtcttttatatttgaattagtaactgtatgaagtcatagataatagtacatgtcaccttaggtagtaggagaatacatttctaatcatactgatttagtatactcaaacgttcggaatcttgcctaagcagcttgtggcctatcttcagtcttagctaannnna

SEQ ID NO: 21291 - DNA, 632 bp, Macaca Mulatta
gtaaaacaaaaattcacaagctgactccctgtccacccccgcctccctcccctgcccgcggtcttcggcattggttccctttgctccaccccactcacagagacacagggcatccaactgagaaaacgaaactgctctaagtacatggagacgtgatgaagggaggaggtgaactgtttccacattcaagattaaactgagtgaatctgcatttctgggttctgggtggttgcccttcattagccaaattgaaaaaagaaactccctggaccagatgcttcaaagctgaagcctccaggaccgccgaagaaagccttgaagatattgtttggatcaaaatcacccatattcatgccctcctcatctaggtcctgtccactgtcatagcgagtctttttcttgggatcagagaggatagtaaaggcctctccaacttccttgaacttcttctcctcctccttctgaacctcagcactggctccactatgccgatctggatggtgcatcaaggcccgtttccgataagctttcttgatctcgtcctcagaggcattcttgtccactcccagaatcttgtagtaatctttcctcttactcttcttcagttccagctgtgcatttttaggagctgt

SEQ ID NO: 21292 - DNA, 618 bp, Macaca Mulatta
gttaagatttcaggccctggtgaaaacatgttcaggatgccctttctcccctttgcccagcaagagtggactgattaaagttggacctgaggtttctaggaatatgaaactgagttgttctgaatagagggagccgtggcctcccagtgctgccagttacaggaagtgacttcccttctcccatcagcccaaaccaggagccttcatcacagaacccaagagtgaggggagggtcaggccggttggacagtggccgtatcatgggatggatcaggagccttttactacactctcctttcccctgtatcccattgtcttagatcacctggacttgccttttcccctaatgccgccccctcaccgctcttcataattgaagaaattgtgtcaataaattgaccaaagagatgcaggttgtgctccatgataatttaataaatgctagtgattcagaccaacttgaatttacacggatcaactcctactgtgttttgtaacctcaaatgcatgaaattgattatctcccctaaaattatatatacagatatgtgtatatgcatatttatttctattttgttatttgtgaaatttaaaaaagtttaaatgaatcacagttta

SEQ ID NO: 21293 - DNA, 1476 bp, Macaca Mulatta
  misc_feature (1)...(1476): n = A,T,C or G
gcgaggagatgctagagggcgccgcgccgccggcaccatgcgccccccgccagcgctggccctggccgggctctgcctgctggcgctgcccgccgccgccgcctcctacttcggngcctgaccgggcgggaggtcctgacgcccttcccaggactgggcactgcagcggccccggcacagggcgggggcccacctgaagcagtgcgacctgctgaagctgtcccggcggcagaagcagctctgccggagggagcctggcctggctgagaccctgcgggacgctgcgcacctcggcctgcttgagtgccagttccagttccggcatgagcgctggaactgtagcctggagggcaggacgggcctgctcaagagaggnaggcttcaaagagacagctttcctgtatgcggtgtcctctgccgccctaacccacaccctggcccgggcctgcagcgctgggcgcatggagcgctgcacctgtgatgactctccggggctggagagccggcaggcctggcagtggggcgtgtgtggtgacaacctcaagtacagcaccaagtttctgagcaacttcctggggtccaagagaggaaacaaggacctgcgggcacgggcagacgcccacaacacccacgtgggcatcaaggnaggctgtgaagagtggcctcaggacgacgtgtaagtgccacggcgtgtcaggctcctgtgccgtgcgcacctgctggaagcagctctccccattccgtgagacgggccaggtgctgaaactgcgctatgactcggctgtcaaggtgtccagtgccaccaatgaggccttgggccgcctagagctgtgggccccttccaggcagggcagccccaccaaaggcctggccccaaggtctggggacctggtctacatggaggactcgcccagcttctgccggcccagcaagtactcgcctggcacggcaggtagggtgtgctcccgggaggccagctgcagcagcctgtgctgcgggcggggctatgacacccagagccgcctggtggccttctcctgccactgccaggtgcagtggtgctgctacgtggagtgccagcaatgtgtgcaggaggagcttgtgtacacctgcaagcactaggcctactgcccagcaagccagtctggcactgccaggacctcccgtggcacccttccagctgcccagccggcctgctgggcaggcagtcatcacatacgtgcataaaccggcatgtgtgccaatgcacacaagtgtgccgctcaccaccattccttggccagccttttgcctcccttgatactcaacaaagagaagcaaagcctcatccctgaacccaagcgtctccaacctttgttgaggacttggagaggagggcagagtgagaaagatgtggagggaaataagggagaccaagagcacaccaggactgaagttttggaggggagagaggggctattccatcttgcttcctgg

SEQ ID NO: 21294 - DNA, 328 bp, Macaca Mulatta
aggctgcccttctccgagttgtgcctagatttcggggaaaagctgcgtgggaaaggcctctccatgggctgtggtgctgcagtgggcaggaggatcctaagaggtgtgtggggagcaggtcacccacctcgaaggagaaaccaccaaaccaagagactgagaaattctggatgttttaccgttttgatgccatcagaatctttgggttcctgtctcgactgaagttggcacagactgccctgacagtggtagttttgccaccagcctgttactggtattcccagggcctcctgactctcaacaccgtgtgcctgatgagtgggatatc

SEQ ID NO: 21295 - DNA, 1472 bp, Macaca Mulatta
  misc_feature (1)...(1472): n = A,T,C or G
tagaacctggcccgttagatgaaacccagatcgctactatattaagagaaatactgaaaggacttgattatctccattcggagaagaaaatccacagagacattaaagnnnnnnnnnnnnnnnnnnnnnnnnnnnnnnnnnnnnnnnnnnnnnnnnnnnnnnnnnnnnnnnnnnnnnnnnnnnnnnnnnnnnnnnnnnnnnnnnnnnnnnnnnnnnnnnnnnnnnnnnnnnnnnnnnnnnnnnnnnnnnnnnnnnnnnnnnnnnnnnnnnnnnnnnnnnnnnnnnnnnnnnnnnnnnnnnnnnnnnnnnnnnnnnnnnnnnnnnnnnnnnnnnnnnnnnnnnnnnnnnnnnnnnnnnnnnnnnnnnnnnnnnnnnnnnnnnnnnnnnnnnnnnnnnnnnnnnnnnnnnnnnnnnnnnnnnnnnnnnnnnnnnnnnnnnnnnnnnnnnnnnnnnnnnnnnnnnnnnnnnnnnnnnnnnnnnnnnnnnnnnnnnnnnnnnnnnnnnnnnnnnnnnnnnnnnnnnnnnnnnnnnnnnnnnnnnnnnnnnnnnnnnnnnnnnnnnnnnnnnnnnnnnnnnnnnnnnnnnnnnnnnnnnnnnnnnnnnnnnnnnnnnnnnnnnnnnnnnnnnnnnnnnnnnnnnnnnnnnnnnnnnnnnnnnnnnnnnnnnnnnnnnnnnnnnnnnnnnnnnnnnnnnnnnnnnnnnnnnnnnnnnnnnnnnnnaagatgaaagacatcccaaagaggcctttctctcagtgtttatctacaattatttctcctctctttgcagangttgaaggagaagagccaggcatgcggcgggaacttggggtccattgaagagctgcgaggggccatcttcctagcggaggaggcgtgccccggcatttccgacaccatggtggcccagctcgtgcagcggctccagagnnnnnnnnnnnnnnnnnnnnnnnnnnnnnnnnnnnnnnnnnnnnnnnnnnnnnnnnnnnnnnnnnnnnnnnnnnnnnnnnnnnnnnnnnnnnnnnnnnnnnnnnnnnnnnnnnnnnnnnnnnnnnnnnnnnnnnnnnnnnnnnnnnnnnnnnnnnnnnnnnnnnnnnnnnnnnnnnnnnnnnnnnnnnnnnnnnnnnnnnnnnnnnnnnnnnnnnnnnnnnnnnnnnnnnnnnnnnnnnnnnnnnnnnnnnnnnnnnnnnnnnnnnnnnnnnnnnnnnnnnnnnnnnnnnnnnnnnccatagtgcacatattcaaggaaagtgtctttaaacacaaaaaccctgaaatgtatatttgggattatgataaggcaactaaagacatgaaacctcaggaatcctgctttaagttgatagctccctctgggagctggagaatcgctctggtggatggctgtacagatttgtatatagtgtcatttttacggaaaccctttcggcgtgcataaggaatcactgtgtacaaactggccaagtgcttctg

SEQ ID NO: 21296 - DNA, 1254 bp, Macaca Mulatta
  misc_feature (1)...(1254): n = A,T,C or G
gaaagagagactcgctcaagtacgaaagcagatctcacgagaagaacatgaaaatcgacatatgggaaattatannnnnnnnnnnnnnnnnnnnnnnnnnnnnnnnnnnnnnnnnnnnnnnnnnnnnnnnnnnnnnnnnnnnnnnnnnnnnnnnnnnnnnnnnnnnnnnnnnnnnnnnnnnnnnnnnnnnnnnnnnnnnnnnnnnnnnnnnnnnnnnnnnnnnnnnnnnnnnnnnnnnnnnnnnnnnnnnnnnnnnnnnnnnnnnnnnnnnnnnnnnnnnnnnnnnnnnnnnnnngcctctgtgttctatgcctgagagtactgagataatgaaaagaccgaagtactacagcagtgacagcagttatgatagtagcagcagctcttcagaatctgannnnnnnnnnnnnnnnnnnnnnnnnnnnnnnnnnnnnnnnnnnnnnnnnnnnnnnnnnnnnnnnnnnnnnnnnnnnnnnnnnnnnnnnnnnnnnnnnnnnnnnnnnnnnnnnnnnnnnnnnnnnnnnnnnnnnnnnnnnnnnnnnnnnnnnnnnnnnnnnnnnnnnnnnnnnnnnnnnnnnnnnnnnnnnnnnnnnnnnnnnnnnnnnnnnnnnnnnnnnnnnnnnnnnnnnnnnnnnnnnnnnnnnnnnnnnnnnnnnnnnnnnnnnnnnnnnnnnnnnnnnnnnnnnnnnnnnnnnnnnnnnnnnnnnnnnnnnnnnnnnnnnnnnnnnnnnnnnnnnnnnnnnnnnnnnnnnnnnnnnnnnnnnnnnnnnnnnnnnnnnnnnnnnnnnnnnnnnnnnnnnnnnnnnnnnnnnnnnnnnnnnnnnnnnnnnnnnnnnnnnnnnnnnnnnnnnnnnnnnnnnnnnnnnnnnnnnnnnnnnnnnnnnnnnnnnnnnnnnnnnnnnnnnnnnnnnnnnnnnnnnnnnnnnnnnnnnnnnnnnnnnnnnnnnnnnnnnnnnnnnnnnnnnnnnnnnnnnnnnnnnnnnnnnnnnnnnnnnnnnnnnnnnnnnnnnnnnnnnnnnnnnnnnnnnnnnnnnnnnnnnnnnnnnnnnnnnnnnnnnnnnnnnnnnnnnnnnnnnnnnnnnnnnnnnnnnnnnnnnnnnnnnnnnnnnnnnnnnnnnnnnnnncctttgcagctccagtgttgccagcgcctggtggagctttgtaaacagtgcctgctagtggtttacaaatatgcagctgacaaaagaggatcgctttcaggcattggtcctgactggggtaattccaggt

SEQ ID NO: 21297 - DNA, 456 bp, Macaca Mulatta
tcaagttagttgatctcttgtactgggaaaagctacttttttcctaaagaacacagtggagtggatatgttcactttttttttctaaaacatatatacaaagtgttaaaagaatcgtgcctaatgtcaaaactttactggtttgagaagaacaatcaaaaaggatttataccaataggacttactattgtttttttaaggatcctctctcacggtggtaatgaaacattaactgtaacaaatttataatttatgtgcttatgaaattagttttatgaatgaacaataaactgatgcatataatggcttaaatatatggttttaaaattgacttaacttgagcaagatacattatgaagttctttgatgagagtgtgtggtctcaagacctttacaatagattatccttaagtgtccatagctctctggtacagtgtttagatatagtttatctatc

SEQ ID NO: 21298 - DNA, 836 bp, Macaca Mulatta
  misc_feature (1)...(836): n = A,T,C or G
tgtgtcggtgttgctgaacttttcccaacagtaggagaacatgctcaaagaaactctggaatataaggtacgtttctctggtctaccgttacagcttccaaaatatgtcgtcagtcatcccagcagtagcagttgaagaccccttagcccccacgaatgtaggtaaccagcacagctgcatgatcagcttggctgctgttggatgaacttgatccaggcactttttagcaatgacatcctttgtgcccaaacgtctgtgctgtacttgaccaacaggccacgtgtttttcaaagcattttcattgattgtgctttactgagagccccaggtctggctcagcactcaaattcccaaagtgtctgcataaatgctctaataggaaaaaaacctacagttccactaccttattcctgtcaactcagtgtttttctctcatttccctccggtactgagcacgggcctgcagactggttattggaaccatcttcttgctgtgctcagagccaaaggcaggatgcgtggggggcaggagtgacaggctcaggggaggggaggggtggttcagtttccctggcactaagtcctgatttgcatctcagaagccttttctgtttcaaatgcagatgtcatggtttgggtccaaaccagctcccaaaggcagcatccggccatctatctcaaaccctcggataccatggtcctagaggggactacccaaggatggagctccgtgngttgacactttttctgtngaaagaacactgacacaccagtctgggtgggtttttaatcactgtaactgcagtattttgtacaagcgtctaaacattgttta

SEQ ID NO: 21299 - DNA, 260 bp, Macaca Mulatta
  misc_feature (1)...(260): n = A,T,C or G
ggtgaaaactatcgtggggatgtggctgttaccgtgtctgggcacacctgtcagcgctggagtgcccagacccctcacacacataacaggacaccagaaaactttccctgcaanaaatttggatgaaaactactgccgcaatcctgatggagaaaaggccccatggtgctatacaaccaacagccaagtgcggtgggagtactgtaagataccgtcctgtgagtcctccccagtatccacggaaccattggatcccacag

SEQ ID NO: 21300 - DNA, 991 bp, Macaca Mulatta
  misc_feature (1)...(991): n = A,T,C or G
gcccttcgagcttggacccccggacccccgcctggccatgggtagcgtgggcagtggggtggcccatgcccaggaatttgccatgaagagcgtgggtacccgcacagggggagggggcagccagggcagtttccctggcactcgaggcagtggcagtggggccagcagggagaggccaggccgctacccctcagaggacaagggtctcgccaactccctctacctcaatggcgatctgcggggcagtgaccacactgatgtctgtggcaacgtggttggcagtagcggtggcagcagcagcagtggtggcagtgacaaggcgccaccacaatatcgtgagcccagccacccacccaagctcctggccacctctggcaagctagaccanncagtgctcagaaccactagttcggccatcggccttcaagcctgtcgtacccaagaatttccactccatgcagaatttgtgccccccgcagaccaatgggactcctgagggacgacagggccctggtggcctcaaaggcggactggacaagtcccggaccatgactccagcgggcgggagtgggagtggcctctcagactcaggccggaactccctcacgagcctgcccacctacagctccagctacagccagcacctggcgcccctcagtgcctccaccagccacattaaccgcattggcactgccagctatggtagtggtagtggtggcagcagtggtggggggtcgggctaccaggacctggggacctccgatagtggacgggcctccagcaagagtggatcatcgtcatccatggggcggccaggccacctgggctctggggagggtggaggtggaggcctacctttcgcagcctgctcaccgccctcgcccagtgcactcatccaggagctggaggagcgcctgtgggagaaggagcaggagctggcagctggggggagcagcctggagcagagcgaggcggccgtggcccaggtact

SEQ ID NO: 21301 - DNA, 199 bp, Macaca Mulatta
aagcttccagaggatgagtgaccagttgctgagtggggctcaagaagtaccaccttccccacctcctgcctgccattctgacctcttctcagagcacctaattaaaggggctgaaagtccaactcgctaatgttgattgtgttgtgaaggggatacggggtaggggtgtcagaagctttaaaagggctgctgcagcctt

SEQ ID NO: 21302 - DNA, 294 bp, Macaca Mulatta
ctccccagcatcctgtctacctgtctgtggagtccgcctttgctttttcctgcagggaagaaggtccacctttgtgtcactcacctccccaggctcagagtccccaaggccctggggttccaactcactgtgcgtctcctccacacagaccagcaggtcctcctgtgctgactccaggttgcttcacacagggagggtggttgcagcttcacacacctaaggtcttagtgcttaacagtttaaaggaaagtccttgttgaggcagaactaagttcacagggaaaggtacacaca

SEQ ID NO: 21303 - DNA, 612 bp, Macaca Mulatta
  misc_feature (1)...(612): n = A,T,C or G
gggggtttactcgccgctgtgcccatctatcagcaggctccgggctgaagattgcttctcttctgtcctccaaggtctagcgacggagcctgcgcgcggcgccaccatgcggcagaaggcggtatcgcttttcttgtgctacctgctgctcttcacttgcagcggggtggaggcaggcaagaaagagtgctcggagagctcggacagcggttccgggttctggaaggccctgaccttcatggccatcggaggaggactcgcggtcgccgggctgcctgcgctgggcttcaccggcgccggcatcgcggccaactcggtggctgcctcgctgatgagctggtctgcgatcatgaatgggggcggcgtccccgccggggggctagtggccacgctgcagagcgttggggctggcggcagcagcatcgccatgggtaaaataggtgccctgctgggctacgccacccacaagtatctcgatagtgaggaggatgaagagtagccagcagctcccagaactcttcttccttcttagcctaactcttccagttaggatctagaactttnnnnnnnnnnnnnnnnnnnnnnnnnnnnnntgggttctcactatgttgc

SEQ ID NO: 21304 - DNA, 161 bp, Macaca Mulatta
gtggctgtggggactgtgcccgtggagctcggtgccatgggcttcacctcagtaggaatcgccgcgtcctccatagcagccaagatgacatctacagtggccattgccaacgggggcggagttgccgcgggcagtctggtggctactctgccgtcagtggg

SEQ ID NO: 21305 - DNA, 2798 bp, Macaca Mulatta
  misc_feature (1)...(2798): n = A,T,C or G
gagatttatggagaatagcagcataattgcttgctataatgaactgattcaaatagaacatggggaagttcgctcccagttcaaattacggnnnnnnnnnnnnnnnnnnnnnnnnnnnnnnnnnnnnnnnnnnnnnnnnnnnnnnnnnnnnnnnnnnnnnnnnnnnnnnnnnnnnnnnnnnnnnnnnnnnnnnnnnnnnnnnnnnnnnnnnnnnnnnnnnnnnnnnnnnnnnnnnnnnnnnnnnnnnnnnnnnnnnnnnnnnnnnnnnnnnnnnnnnnnnnnnnnnnnnnnnnnnnnnnnnnnnnnnnnnnnnnnnnnnnnnnnnnnnnnnnnnnnnnnnnnnnnnnnnnnnnnnnnnnnnnnnnnnnnnnnnnnnnnnnnnnnnnnnnnnnnnnnnnnnnnnnnnnnnnnnnnnnnnnnnnnnnnnnnnnnnnnnnnnnnnnnnnnnnnnnnnnnnnagattcacaagattcatcgtgattcaggagacaattctcagacagnnnnnnnnnnnnnnnnnnnnnnnnnnnnnnnnnnnnnnnnnnnnnnnnnnnnnnnnnnnnnnnnnnnnnnnnnnnnngcaccaagcctgcagaatcgtcgctatccatccatggcgaggatccactccatgaccatcgaggctcccatcacaaaggtnnnnnnnnnnnnnnnnnnnnnnnnnnnnnnnnnnnnnnnnnnnnnnnnnnnnnnnnnnnnnnnnnnnnnnnnnnnnnnnnnnnnnnnnnnnnnnnnnnnnnnnnnnnnnnnnnnnnnnnnnnnnnnnnnnnnnnnnnnnnnnnnnnnnnnnnnnnnnnnnnnnnnnnnnnnnnnnnnnnnnnnnnnnnnnnnnnnnnnnnnnnnnnnnnnnnnnnnnnnnnnnnnnnnnnnnnnnnnnnnnnnnnnnnnnnnnnnnnnnnnnnnnnnnnnnnnnnnnnnnnnnnnnnnnnnnnnnnnnnnnnnnnnnnnnnnnnnnnnnnnnnnnnnnnnnnnnnnnnnnnnnnnnnnnnnnnnnnnnnnnnnnnnnnnnnnnnnnnnnnnnnnnnnnnnnnnnnnnnnnnnnnnnnnnnnnnnnnnnnnnnnnnnnnnnnnnnnnnnnnnnnnnnnnnnnnnnnnnnnnnnnnnnnnnnnnnnnnnnnnnnnnnnnnnnnnnnnnnnnnnnnnnnnnnnnnnnnnnnnnnnnnnnnnnnnnnnnnnnnnnnnnnnnnnnnnnnnnnnnnnnnnnnnnnnnnnnnnnnnnnnnnnnnnnnnnnnnnnnnnnnnnnnnnnnnnnnnnnnnnnnnnnnnnnnnnnnnnnnnnnnnnnnnnnnnnnnnnnnnnnnnnnnnnnnnnnnnnnnnnnnnnnnnnnnnnnnnnnnnnnnnnnnnnnnnnnnnnnnnnnnnnnnnnnnnnnnnnnnnnnnnnnnnnnnnnnnnnnnnnnnnnnncattatcgaacgctgcgccaggctattattgacatggttttggnnnnnnnnnnnnnnnnnnnnnnnnnnnnnnnnnnnnnnnnnnnnnnnnnnnnnnnnnnnnnnnnnnnnnnnnnnnnnnnnnnnnnnnnnnnnnnnnnnnnnnnnnnnnnnnnnnnnnnnnnnnnnnnnnnnnnnnnnnnnnnnnnnnnnnnnnnnnnnnnnnnnnnnnnnnnnnnnnnnnnnnnnnnnnnnnnnnnnnnnnnnnnnnnnnnnnnnnnnnnnnnnnnnnnnnnnnnnnnnnnnnnnnnnnnnnnnnnnnnnnnnnnnnnnnnnnnnnnnnnnnnnnnnnnnnnnnnnnnnnnnnnnnnnnnnnnnnnnnnnnnnnnnnnnnnnnttgactacttcataacagacatgtttgatgcttggnnngcctttgcacatctgccagccctgatgcaacatttggctgacaactacaaacactggaagacactagatgacctaaagtgcaaaagtctgaggcttccatctgacagctaaagccaagccacagaagggggcctcttgacctacaaaggacactgtgaatcgcagtagcgtaaacaagaggccttcctttctaatgataatgacaggtattggtgaaggagctgatgtttaatatttgaccttgaatcattcaagtccccaaatttcatttttagaaagtcatgtttcatgaagaaaaatatatgtccttttgaatacttaatgacagaacaaatacttggcaaactcctttgctctgctatcatccggtgtacccttgtcaatccatggagctgattcactgtaactagcaggccacaggaagcaaagcctnnnnnnnnnnnnnnnnnnnnnnnnnnnnnnnnnnnnnnnnnnnnnnnnnnnnnnnnnnnnnnnnnnnnnnnnnnnnnnnnnnnnnnnnnnnnnnnnnnnnnnnnnnnnnnnnnnnnnnnnnnnnnnnnnnnnnnnnnnnnnnnnnnnnnnnnnnnnnnnnnnnnnnnnnnnnnnnnnnnnnnnnnnnnnnnnnnnnnnnnnnnnnnnnnnnnnnnnnnnnnnnnnnnnnnnnnnnnnnnnnnnnnnnnnnnnnnnnnnnnnnnnnnnnnnnnnnnnnnnnnnnnnnnnnnnnnnnnnnnnnnnnnnnnnnnnnnnnnnnnnnnnnnnnnnnnnnnnnnnnnnnnnnnnnnnnnnnnnnnnnnnnnnnnnnnnnnnnnnncatccacgatgagggaaaaagtggcatttcattttggggaatccatgagcttcccttatttctggctcacagaagcagccatgaggcactataacaagtattatataaaagccattaaatctgaatgcccttggacaagcttttctt

SEQ ID NO: 21306 - DNA, 797 bp, Macaca Mulatta
ggggaattgtgtgctgaatgatgtacgtagtctagaaaaaagcccaagtcttgtgcacatttaaatcatgtacataggtatttctgtatttcagtaaagtaggtaaggcagtcgttaaatagcattgttgacattgaccaaatattgcctgtttcctttaattcaaatgcattaggttcccgcctccctgtccctccctgccatgttgctgttttaaggcttcacatgtattaagatttctttgatcaaaattgtggctgttctccttatgaaccataatataatcatttgtgtgatgtacattgtgccatttttgatgactaaatgtctttatttctgctgttcctgtaagaaagggagttttttactgatagtagcaaatgttcacttcagccaaacttgggtgttcagtggtaaattacatagtatttagactggtaaaaatagtttgcatacaggaatagcctctgatttttagccatcttgtaatccaagtatcattgttcacggaattctctaggtcatttttattgtcttgttctaacaagacattattgctacaataatagttacaaaatattttctaaaatatccctttgaatttttacactaagtatgggtagagtaaagaggctaaaaccaaaagctggtttacttgaaaaacattggctttcagtcacccgaacatggtctaaaatactttaacctaaacctttcattggaagggtaggaatggggattaagaaaggggttttttatggccagggaaaagaaaagggccaattcaatttttttaa

SEQ ID NO: 21307 - DNA, 854 bp, Macaca Mulatta
attcatatcactgttcccattattaatcttgtgtctgccatagtatgaataacaggcttcctttgccccttctaaaccaatcttaatgagaatactcattgaaacatggaagcttcagtgtttggtggtttttattttagattttgctttcaaatgatagcttatgtaacaatatcaataatcttgaaatatgtatgcatcatgttaactttactaatatgctttttctttcttctacaggctttctaccagtataatagacttacagaattttaaagtcttattaccacacactacgtaataaaggcttttatgtgtctaactagagacataaagtgactgtgcaaagccttttaattatggacattcagcagaaagagacatagtctgacttcaagaattctgaactcttaaatagaaaatttaaatgctcacttgaatatttatgattcttaatagattatcgactacagatatttataaatgaagtatatacttttaaaacatgtaagttatactaattctgtgtttaatttcatgtgttttcatgtgctgaaaattctatttttcttagaattggatgtgcttttattctattatcctttaattccagctgtccaactttagatggctatgtctgcattctaataacactgttcacagtctgatatggactaagataactagggaacatatgttgcttcaggctggtgtcagtgataaaaaattatcaatagctttttaatgtgtctttactcttgcctcactctgtgtgagtcactttctataatatcaagcagtattatgatatttctatgatctggaactgtcaacatgatgaatgtccttttcat

SEQ ID NO: 21308 - DNA, 129 bp, Macaca Mulatta
tcctccaatctctgctcctccattcagttcaggaacccgcgactgctctcagggatctcttgaccactatgagcctcctgtccagtcgcccggcccgtgtcccgggtcctttgggctccttgtgcgcgc

SEQ ID NO: 21309 - DNA, 906 bp, Macaca Mulatta
  misc_feature (1)...(906): n = A,T,C or G
aggatgcagggtgccgggaaagcgctgcacgagttgctgctgtccgcgcagcgtcagggctgcctcactgccggcgtctacgagtcagccaaagtcctgaacgtgnggaccccgacaatgtgaccttctgcgtgctggctgccgatgaggaggacgagggcgacatcgcgctgcagatccattttacgctgatccaggctttctgctgcgagaacgacatcgacatagtgcgcgtgggcgatgtgcagcggctggcggctatcgtgggcgccggcgaggaggcgggcgcgccgggcgacctgcactgcatcctcatttcgnnnnnnnnnnnnnnnnnnnnnnnnnnnnnnnnnnnnnnnnnnnnnnnnnnnnnnnnnnnnnnnnnnnnnnnnnnnnnnnnnnnnnnnnnnnnnnnnnnnctccccgagtgacagcccggcggggaccttggtctgatcgacgtggtgacaccccggggcgcctagagcgcggctggctctgtggaggggccctccgagggtgcccgagtgcggcgtggagactggcaggcggggggggcgcctggagagtgaggaggcgcggcctctcgaggaggggcccggcggcggcagggccaggctggcccgagctgaggactctgcaagtgtctggagcggctgctcgcccaggaaggcctaggctaggacgttggcctcagggccaggaaggacagactggccgggcaggcgtgactcagcagcctgcgctcggcaggaaggagcggcgccctggacttggtacagttgcaggagcgtgaaggacttagccaactgcgctgctttttcaaaacggatccgggcaatgcttcgttttctaaaggatgctgctgttgaagctttgaattttacaataaactttttgaaacaa

SEQ ID NO: 21310 - DNA, 982 bp, Macaca Mulatta
  misc_feature (1)...(982): n = A,T,C or G
gggaggaggaagcgtctgccgcgctgggccgcgtaacgatttgataagatcaaagctgcaggaaaatggacagtgaggttcagagagatggaaggatcttggatttgattgatgatgcttggcgagaagacaagctgccttatgaagatgtcgcaataccactgaatgagcttcctgaacctgaacaagacaatggtggcaccacagaatctgtcaaagaacaagaaatgaagtggacagacttagccttacagtacctccatgagaatgttccccccattggaaactgacacttggctcctttcttgtatatggattttctaaaagcacacagataaagcatgttttgtttcagtctcctaaatcaaatctttgagtaataaatcagcactcaaaaatgtatacccatttagtttgtggtagcaaagtgcgatgtgaaaatgttcaccagaatgagaaactgagatttctcagtaatggtgaatatttggctctttaaacctaaaactcttcattgagtagcttgtatttgaacaagactggttaaacatttgcctttacttctgattttgctttactgtcaaagtttaacacctttcaactactcatgtgtgtcctgtaacacaggggattgaacgtatgagagggaaaggcaaaggaaaaagggaagccagatactggggagaattactaactttctcatacttccccacatttgagaagcatttcggaagtgtattttagccctggtaagtggttgtgaatatgcaaattattccaatttccctgggtttcctgggccatttcctaaaaatatcctttctggggtattttttcaaaaccttttgggaataaaactttttcctggaatttaaacaaaaggattacccctggaacagggttacaccctcccaggttttcctcccccccttaacagaacannnnnnnnnnnnnnnnnnnnngacccatgcccatcggaaat

SEQ ID NO: 21311 - DNA, 661 bp, Macaca Mulatta
taatgagtcacttggacatttattcttctgctgattctcttctcttctatttttctctccagcaccgtgtctcttctattttggatgcaggccttgttttagtcttttctgagggtattttagtggagtgtgatactgctccaaatttactcgcccacaagaatggcctcttttccactttggtgatgaccaacaagtagaccatcatgatctattgcgccaagtctgtcattctccggtagttatcttagcagtatcccctcagtaaggcatggctaatgctgtgaataaaggggagggctgggatgagggaactaactgcagggtgttattacaaaatcagctcaaccaagtgctttcgtcatgctcagtaccgaatggagctcatgcatgtgttttcaaatatatacatgcaaaagagagtatttatgaagcctatgaactgaatttacctcttattctaaggaccaatttcactagtccttagggatgttttataagcatccataaaaatgccatacacatttcttacctgccctggaggatgcattgtttcatttaaatagttacttgagtttcattcgtgagtaatgggagtggtgtatggagtgcttgctatgcttctacttccttggatgagtgcatgggagaaacagaaccc

SEQ ID NO: 21312 - DNA, 881 bp, Macaca Mulatta
gggattccagcggcggacagcacccgggccgagatgtctccctcagtggccttagccgtgctggcgctactctctctttctggcctggaggctatccagcgtactccaaagattcaggtttactcacgccatccaccagagaatggaaagccaaatttcctgaattgctatgtgtctggatttcatccatctgatattgaagttgacttactgaacaatggagagaaaatgggaaaagtggatcattcagacttgtcttttcacaaagactggtctttctatctcttgtacttacctgaattctcccccaatgaaaaagatgagtatgcctgccgtggtgaccattgtgactttgtcagggccccaaaacagttaaatggggatccagaacatgttagcctcttcctggaacgtttgaagatccctgcatttggtatttggacggaattcccaaattctgtcttccttggcttttttaaaaattgactaagcctttaaaaagtttcatgccccgaatgacgcacaaatcatcataaagtgtttgccgcggtgcttgtatcctcaccttattaaatctatttttaaagtggcctatcccccatgttactgaaggtatatctgtgccatcttaacttctttagcaaggtctgcgccaatcttatatattttgcggaaagtaaaacacaattcccagtaatccaatcgattttacatgcttgttggcggaaattttcggaccacctcctctcaacctacagtgttctcttcaccggctattcgatgctcaattaagttacctactccttcaaaataattgtaaatgtgttcgacacttttaaaaaataaccgcacgcccatatcggaactgagtactacgccta

SEQ ID NO: 21313 - DNA, 1912 bp, Macaca Mulatta
  misc_feature (1)...(1912): n = A,T,C or G
ggttgctgaacggctgatgacaatcgcctatgaaagtggtgttaacctctttgatactgctgaagtctatgctgctggaaagnnnnnnnnnnnnnnnnnnnnnnnnnnnnnnnnnnnnnnnnnnnnnnnnnnnnnnnnnnnnnnnnnnnnnnnnnnnnnnnnnnnnnnnnnnnnnnnnnnnnnnnnnnnnnnnnnnnnnnnnnnnnnnnnnnnnnnnnnnnnnnnnnnnnnnnnnnnnnnnnnnnnnnnnnnnnnnnnnnnnnnnnnnnnnnnnnnnnnnnnnnnnnnnnnnnnnnnnnnnnnnnnnnnnnnnnnnnnnnnnnnnnnnnnnnnnnnnnnnnnnnnnnnnnnnnnnnnnnnnnnnnnnnnnnnnnnnnnnnnnnnnnnnnnnnnnnnnnnnnnnnnnnnnnnnnnnnnnnnnnnnnnnnnnnnnnnnnnnnnnnnnnnnnnnnnnnnnnnnnnnnnnnnnnnnnnnnnnnnnnnnnnnnnnnnnnnnnnnnnnnnnnnnnnnnnnnnnnnnnnnnnnnnnnnnnnnnnnnnnnnnnnnnnnnnnnnnnnnnnnnnnnnnnnnnnnnnnnnnnnnnnnnnnnnnnnnnnnnnnnnnnnnnnnnnnnnnnnnnnnnnnnnnnnnnnnnnnnnnnnnnnnnnnnnnnnnnnnnnnnnnnnnnnnnnnnnnnnnnnnnnnnnnnnnnnnnnnnnnnnnnnnnnnnnnnnnnnnnnnnnncgtggtgcctgagaaatgaaggtgtgagttctgtgctcctgggatcatccacccctgaacaactcattgaaaaccttggtgccattcaggcaagtnnnnnnnnnnnnnnnnnnnnnnnnnnnnnnnnnnnnnnnnnnnnnnnnnnnnnnnnnnnnnnnnnnnnnnnnnnnnnnnnnnnnnnnnnnnnnnnnnnnnnnnnnnnnnnnnnnnnnnnnnnnnnnnnnnnnnnnnnnnnnnnnnnnnnnnnnnnnnnnnnnnnnnnnnnnnnnnnnnnnnnnnnnnnnnnnnnnnnnnnnnnnnnnnnnnnnnnnnnnnnnnnnnnnnnnnnnnnnnnnnnnnnnnnnnnnnnnnnnnnnnnnnnnnnnnnnnnnnnnnnnnnnnnnnnnnnnnnnnnnnnnnnnnnnnnnnnnnnnnnnnnnnnnnnnnnnnnnnnnnnnnnnnnnnnnnnnnnnnnnnnnnnnnnnnnnnnnnnnnnnnnaccttcaggcatttggtaactcaaagaaggctgtcctgatatattttttcaaaagaacaaaatccacagatgcaatgtgagttgcataagaaacagagtagacagactatattcagtgaaggaaaggaattcagagatttttcttaggaaatagattcttgttaagtaaatagttattaaaaatatatctcactgcnnnnnnnnnnnnnagtatcttcactcaaaagtcttgcttggaagaataagcagaaagaattttatatatttttttttctattttcacattcatattaacacgttttgttccatttgttgttcaacaaaactacaatttctgggtattttggctttattacctttcaaatatttactgttgcttggccccaagaatggccttgtacaacttatccagaatgtctattaggattctaatgttatatccacttacaagtagtgacagtaaaaggatgaataccccaatctttagtgacattgcagctgatttataaaagagagggctacactgctacggaaacttagctttgaagaaaatgcaatgtatctgcaattaggtgttcatttgttactacatttttattaaaacctgctttatactgtcaactgcttggaggcacaatttctgcaagtttaaatatttgagctttaaaaataaacataatacatgctcagttttttagtaaacctgtaaa

SEQ ID NO: 21314 - DNA, 898 bp, Macaca Mulatta
  misc_feature (1)...(898): n = A,T,C or G
ccatgtgaaaccactcactaattgtcctactctcttttggttttatctttttagcagacaccaaatgaggaatgtttgttcctggaaaggctggaggagaaccattacaacacctatacatccaagaagcacgcagagaagaattggtttgttggcctcaagaagaatggaagctgcaaacgtggtcctcggactcactatggccagaaagcaatcttgtttcttcccctgccagtctcttctgattaaagagatctgttctgggtgttgaccactccagagaagctttgaggggtcctcacctggttgaaccaaaaatgttcccttgaccattggctgcgctaacccctagcccacagagcctgaatttataagcaacttgcttctaaatgcccagttcacttccttgcagagccctttacccgtgcgcagtttagaacagagggaccaaattgcttctaggggtcaactggctggccagtctgggtctgggtttggatctcccattgcctcttgcaggctgagtccctcaatgcaaaggcggggccaaatgaagtgtgttaaggggtctgctgagtcattagtaactgcacactatttccctctactgagtaaaccctgtctgtgattcccccaaacatctggcatggctccctttgtcctttctatgccctgcnaatattagcaaagaagcttcatgccaggttaggaaggcagcattccatgaccagaaacagggacaaagaaatccccccctcagaacagagggatttaaaatgggaaagagagattggatttttggattgggatacttagaaggatgacatctccatgaagaaacatgaaagaaggggagcccagtggcagaaaggcagaatnaatccttgggagtcattag

SEQ ID NO: 21315 - DNA, 672 bp, Macaca Mulatta
caggacaggtgtctataatccatgcctcacccaagcatcacattttgtctcagattaggcctcaataaaagacttgagtgtattgctttggaaggagtccggttaaaaaatagaaaagcatggcttcaccagaaattgtgtattggcttttgcctcgtattccttttgagaactccctgaggaaaacagttcttatcctggctcccaggctcatacaaagcaggccttcaaccagccagactgactgcctctttctcttctcttctcattcaagaatttttatccagctcgagagacagaagattctgaaagggttcaatgaaatgagagtcatcttggacagtgaggagcagagagagctgcaaaagctggaggaaggtgaggtgaatgtgctggataacctggcagcagctagagaccagctggtccagcagaggcaggatgccagcaagctcatctcagatctccagcggaggttgagggggtcatcaatagagatgctgcaggatgtgattgacgtcatgaaaaggagtgaaaactggacactgaagaagccaaaacctgtttccaagaaactgaagagtgtattcagagcaccagaatctcagtaggatgttgcaagttcacaaagagctgaccgatgtccagtgctactgggtggacgtgatgctg

SEQ ID NO: 21316 - DNA, 726 bp, Macaca Mulatta
  misc_feature (1)...(726): n = A,T,C or G
tggattgggttatgaaacataatggtccaaatgacgctagtgatgggacagtacgacttcgtggactaccatttggttgcagcaaagaggaaatagttcagttctttcaaggnnnnnnnnnnnnnnnnnnnnnnnnnnnnnnnnnnnnnnnnnnnnnnnnnnnnnnnnnnnnnnnnnnnnnnnnnnnnnnnnnnnnnnnnnnnnnnnnnnnnnnnnnnnnnnnnnnnnnnnnnnnnnnnnnnnnnnnnaggtatattgagatcttcagaagtagcaggagtgaaatcaaaggattttatgatccaccaagaagattgctgggacagcgaccgggaccatatgatagaccaataggaggaagagggggttattatggagctgggcgtggaagnnnnnnnnnnnnnnnnnnnnnnnnnnnnnnnnnnnnnnnnnnnnnnnnnnnnnnnnnnnnnnnnnnnnnnnnnnnnnnnnnnnaggtatgggaggacatggctatggtggagctggtgatgcaagttcaggttttcatggtggtcatttcgtacatatgagagggttgccttttcgtgcaactgaaaatgacattgctaattcttctcaccactaaatccaatacgagttcatattgatattggagctgatggcagagccacaggagaagcagatgtagagtttgtgacacatgaagatgcagtagctgccatgtctaaagataaaaataacatg

SEQ ID NO: 21317 - DNA, 125 bp, Macaca Mulatta
gcagcaggcaaggatggatgtggttgacagccttcttgtgaatggaagcaacatcactcctccctgcgaactcgggctcgaaaatgagacgcttttctgcttggatcagcctcgtccctccaaag

SEQ ID NO: 21318 - DNA, 643 bp, Macaca Mulatta
tcttggcctcaggctccttctgttctggatgtcagatatgcgtctgcctcctgagaaactctggtggctttggacacttggtgtggactactgtgttatccgggatatcaggtattatgagacatcacctagccatctgcatcacatctctctggacaagcagctattaccaaaaaaggcatatacttccagtcctgtgctccatctgccttaattctttgctcgttcctccatgttggcgccacttcccagagagctccactgcatctcacactctgcccacgtgctggggaaatctcatggcctgcacatctcttgtgactctgggaaccgcctcccccgccggagcccccgagccccaccaatggcagctcttcccagtcagcagcttcagagcaggcagtctccttggaaggcccgactctgttcctgcatggcctgcaatttctactttgtgcatagagtaattttcagagtaaccgcgaccctgttggccttctagaaagtttgtctttttcttttctgagacaaccacctaagtgataatatgcttttttggaaatcaatatatattgccggactgcatcataacctttatcatgccaagcatcctgatgcagctcacatttccctaaacatgggt

SEQ ID NO: 21319 - DNA, 782 bp, Macaca Mulatta
  misc_feature (1)...(782): n = A,T,C or G
ctgaagaaatatatccacaaagaagaggaggaagtgaaaagattgccagattttagccgtatcccttcacatttgagcagcatggatgagaaggaagagtttgcaagtttggcctttatataaacatgtgttgcaggtgctgtttgatttttctaaggtatttttagcccttgatcccctttgcttgtgagaggtggggaactgcttattgacagcttctctgtaacctgcagtaccagtggatcattcttgattttgttttcattagtgtcatttctttgtcagtgaggacttttccccttacaacagtaacaccattttttgaagagcaaaacttacaatacctcctgggatcatgagctagtcattcagcctgtataaccatgtggaaataaaaattgatgaccagtgtattatatggacaacttttgctttgagtaataaacttgattgtaggnnnnnnnnnnnnnnnnnnnnnnnnnnnnnnnnnnnnnnnnnnnnnnnnnnnnnnnnnnnnnnnnnnnnnnnnnnnnnnnnnnnnnnnnnnnnnnnnnnnnnnnnnnnnnnnnnnnnnnnnnnnnnnnnnnnnnnnnnnnnnnnnnnnnnnnnnnnnnnnnnnnnnnnnnnnnnnnnnnnnnnnnnnnnnnnnnnnnnnnnnnnnnnnnnnnnnnnnnnnnnnnnnnnnnnnnnnnnnnnnnnnnnnnnnnnnnnnnnnnnnnnnnnnnnnnnnnnnnnnnnnnnnnnnnnnnnnnnntgggcgaatcggaaatcctataatcaag

SEQ ID NO: 21320 - DNA, 604 bp, Macaca Mulatta
  misc_feature (1)...(604): n = A,T,C or G
ncagcctcaagctagaatgtgagaagctggccagtgagaagacggaaatgcagcgacattatgtcatnnnnnnnnnnnnnnnnnnnnnnnnnnnnnnnnnnnnnnnnnnnnnnnnnnnnnnnnnnnnnnnnnnnnnnnnnnnnnnnnnnnnnnnnnnnnnnnnnnnnnnnnnnnnnnnnnnnnnnnnnnnnnnnnnnnnnnnnnnnnnnnnnnnnnnnnnnnnnnnnnnnnnnnnnnnnnnnnnnnnnnnnnnnnnnnnnnnnnnnnnnnnnnnnnnnnnnnnnnnnnnnnnnnnnnnnnnnnnnnnnnnnnnnnnnnnnnnnnnnnnnnnnnnnnnnnnnnnnnnnnnnnnnnnnnnnnnnnnnnnnnnnnnnnnnnnnnnnnnnnnnnnnnnnnnnnnnnnnnnnnnnnnnnnnnnnnnnnnnnnnnnnnnnnnnnnnnnnnnnnnnnnnnnnnnnnnnnnnnnnnnnnnnnnnnnnnnnnnnnnnnnnnnnnnnnnnnnnnnnnnnnnnnnnnnnnnnnnnnnnnnnnnnnnnnnnnnnnnnnnnnnnnnnnnnnnaaagcgactaagacgagagtgactacaatctggtggtggatgagg

SEQ ID NO: 21321 - DNA, 474 bp, Macaca Mulatta
  misc_feature (1)...(474): n = A,T,C or G
gggaagggtacctgaagcgaatttgcaccaaagcagcagctccattgtcgcagttctagcttcaccttcacgatgtttcccttggtcaaaaacgcactaaatcgtctccaagttcgaagcattcagcaaacaatggcaaggcagagccaccagaaacgtacacctgattttcatgacaaatacggtaatgctgtattagctggtggagccactttctgtattgctacatggacatatgtagcaacacaaatcggaatagaatggaacctgtcccctgttggcagagttaccccaaaggagtggagaaatcagtaatcatcccagctggtgtaataatgaattgtttaaaaaacagctcataattgatgccaaattatagcactgtgtacccattaagatatggcattactgaagaaataaagtacatttgaaaccttcnnnnnnnnnnnnnnnnnnnnnnnnnnnnnnnnnnnn

SEQ ID NO: 21322 - DNA, 220 bp, Macaca Mulatta
atagccttagctatcaagatatttcagaggttaagcaaaagtaataggatttcagtaaaggtacattatgtgataacagtaaagagccctgtatgtactttggaattgggtatatagagttcactcaatattagcagagtcatttttattcttgtaatatagttgagtataggatgggactattcacggttactaaaaaatgccataaccctttatgacc

SEQ ID NO: 21323 - DNA, 1290 bp, Macaca Mulatta
  misc_feature (1)...(1290): n = A,T,C or G
gtgtggcgtccagaacttcaaacgccgagagaagtgcttcaaatgtggcgtgcccaagtcagncagaggcagagcagaagctgcccctcggcacgagactggatcagcagacactgccactgggtggccgggagctgagccagggcctgcttcccctgccgcagccctaccaggcccagggagtcctggcctcccaagccctgtcacaaggctcagagccaagctcagagaacgccaatgacannnnnnnnnnnnnnnnnnnnnnnnnnnnnnnnnnnnnnnnnnnnnnnnnnnnnnnnnnnnnnnnnnnnnnnnnnnnnnnnnnnnnnnnnnnnnnnnnnnnnnnnnnnnnnnnnnnnnnnnnnnnnnnnnnnnnnnnnnnnnnnnnnnnnnnnnnnnnnnnnnnnnnnnnnnnnnnnnnnnnnnnnnnnnnnnnnnnnnnnnnnnnnnnnnnnnnnnnnnnnnnnnnnnnnnnnnnnnnnnnnnnnnnnnnnnnnnnnagggacatggcctccaatgaaggcagtcgcatcagtgctgcctctgtggccagcactgccattgctgcggcccagtgggccatctcacagnnnnnnnnnnnnnnnnnnnnnnnnnnnnnnnnnnnnnnnnnnnnnnnnnnnnnnnnnnnnnnnnnnnnnnnnnnnnnnnnnnnnnnnnnnnnnnnnnnnnnnnnnnnnnnnnnnnnnnnnnnnnnnnnnnnnnnnnnnnnnnnnnnnnnnnnnnnnnnnnnnnnnnnnnnnnnnnnnnnnnnnnnnnnnnnnnnnnnnnnnnnnnnnnnnnnnnnnnnnnnnnnnnnnnnnnnnnnnnnnnnnnnnnnnnnnnnnnnnnnnnnnnnnnnnnnnnnnnnnnnnnnnnnnnnnnnnnnnnnnnnnnnnnnnnnnnnnnnnnnnnnnnnnnnnnnnnnnnnnnnnnnnnnnnnnnnnnnnnnnnnnnnnnnnnnnnnnnnnnnnnnnnnnnnnnnnnnnnnnnnnnnnnnnnnnnnnnnnnnnnnnnnnnnnnnnnnnnnnnnnnnnnnnnnnnnnnnnnnnnnnnnnnnnnnnnnnnnnnnnnnnnnnnnnnnnnnnnnnnnnnnnnnnnnnnnnnnnnnnnnnnnnnnnnnnnncagtattactacaatgctcaaagccagcagtacctgtactgggatggggagaggcggacctatgttcccgccctggagcagtcggctgatgggcataaggagacgggggcaccctcgaaggagggcaaagagaagaaggagaagcacaagaccaagacagctcaaca

SEQ ID NO: 21324 - DNA, 596 bp, Macaca Mulatta
tacatattcaactttccccaccggcgttcctgtctcagaaaggagtcttgctcgtgctggtttttattatactggtgtgaatgacaaggtcaaatgcttctgttgtggcctgatgctggataactggaaactaggagacagtcctattgaaaagcataaacaactatatcctagctgtagctttattcagaatctggtttcagctactctgggatccacctctaagaatacttctccaatgagaaacagttttgcacattcattatctcccaccttggaacatagtagcttgttcagtggttcttactatagcctttcaccaaaccctcttaattctagagcagttgaagacttgtctccatcgaggactaacccctacagttatgcaatgagtactgaagaagcccgatttcttacctaccatatgtggccattaacttttttgtcaccatcagaattggcaagagctggtttttattatataggacctggagatagggtagcctgctttgcctgtggtgggaagctcagtaactgggaaccaaaggatgatgctatgtcagaacaccggaggcattttcccaactgtccatttt

SEQ ID NO: 21325 - DNA, 665 bp, Macaca Mulatta
gctgcaaagaggccatatataaaggaactgaagacacctgtatttgggagaagtcacgtcagattcagaaatttgccaatatgtatttttatgtatttataccttgtgactaggagaggagattttcatgcgtcacaaaattcttggaggtcccttagtagatttggtagttccttaagagatccacatgataaaataaatggaattggcctttcttgtttttttgcaaaagtgataaaaggtgtttagcacttggtctcctcccttctttgtctctagtgtctttcagaaagttggcaataccttaacaaatgcactctgaactggagggagcccaccatttgcacccacctacccaccctcacccctgttcagatgcatttccagaaagagctaaggctcataaggttcccttttaagtattatttaatagttgaggccagatacttacatgcaagtctgggttatggttgttttgcctttctcagctggtgaagtcattctaaagccagaggaagtatgtgatatacacatggactaaggcccagatgacactctggctagattagcatctgggattaggactggaaacacatgtcatatggaactaaggggaactctttgtcgtcctaatttggaagttggtccctggatggccagggatg

SEQ ID NO: 21326 - DNA, 380 bp, Macaca Mulatta
gttctcagcaaggagcccagatgaaaatgcagttagggcttcaaatccagctctccaattagggtcctatccatatccaagagctctcagtcaaatccgatcagtccaacgcatccacagtcaagcacacccagcctaaacccttccattctgtgccctctcaacctacactttctcagaaaaaatcctgtcaggtcccaccccctcccaaataaaccttctccatgcaagcccactcaacctaagccaagccagccccagcctcccaagtctaagccttctcagcccagacccactcaacctaagtcatcttcaaccaatccttcacaagctaaggcacaccactcaaaagcagggccaaagaggggagggaagcatta

SEQ ID NO: 21327 - DNA, 777 bp, Macaca Mulatta
ggggagcagaggaagcaggcagcagggaactacagcctgtccaacgtgctgcccagtgcccctgacatggcgcaattcaagcagggagtgaggtccgttgctggaaaactctccgtctttgctaatggagtcgtgacttcaattcaggatcgctatggttcttaatactgaagtcgtgatatgtatttcctggagaaattcttctgtaaatgaaccagtgaccacgcaacaggcggcagtgaagaccagatagttttgcggattgttttgctactttttcgtatggtatatgtttctgatttttaatatttcttttgagaaattctgagttctgatgtagtaggagctttactgtgatttctgtttcgtgttccttcctgccacaccctcctttggcgtctccacgtatatccttgctttattttcttggaacctttggtttcaacactgagggcctggagacatcggctcctcctgctcctgaaccaggaggcttcacgtagggggaggagaggtctccatgtgacacgtgggctcagggctgccagaatcaaaagatgccagatggacctgcagaaacaacgctcaccacacacatgtccttcaaaagaccaaagtgacgggtgtctcctgtgacaggttgcttcatttatgtttctacatagtaaggtgactgccaaataatatttgaagtcatctgtctctttgtaaatattttctatgacctataaatttaaaaatattttcagtgagtgcttttaacaaatgttagctgct

SEQ ID NO: 21328 - DNA, 660 bp, Macaca Mulatta
agggcagcaggcaccagtgcccggcccgtgtggataccgtggcgcggctgccgcccccgggaccctcctcctctcagccagcgtcccggtggctcccgtcccagcctgtgtgactccatcccttatggctttgccactggaacaatcaaccctgagctggcttctgtgtcctgcctcagcgtgggggatgccacatctgaggggtgggaggatcagccagcaggacccccagcatgacaccggcagctcaaggaggagcctgtgggtctggctggggtgaggggtgcacctgcctttgaggtctgtgcaggcagctggtctggcacttgatatggggcagggaaggtggccaggaggggaggctctggcagcgtgggctgaggggtggagcagggggaaggcactgcccagcagaggcctgaggcttcaggtgcagaacgcaagaggccagggtcactggccgcacctacaggccccctggcctctcatccacatctcgctccggtctgatcaggaacggaatccaggtcccgcctcacagtacccttggcagtctctgccccactcacccctcgctgcctcctggacagacttcctgcccctgctctcagcttggccaaccatcctctctctggtgactgcccctctccagtccccagt

SEQ ID NO: 21329 - DNA, 182 bp, Macaca Mulatta
  misc_feature (1)...(182): n = A,T,C or G
ngggttacatgagttctttttcctcctagtcctagtgtactttgtgattgcttgcatttatgctcaatcattgtggcaggctattaagaaaggaggacccatgcacatgattttaaaggttctgacaactgccttgctgttacaagctggttcagctttagctaattacattcatttctcca

SEQ ID NO: 21330 - DNA, 2712 bp, Macaca Mulatta
  misc_feature (1)...(2712): n = A,T,C or G
ggtctacgtcgggtgatgctgcgggcccaccgccaggcctggtgctggcaggatgagtggacagaactgagcatggctgacattcgggcactggaagaggagactgctcgcatgctggcccagcgcatggccaagtgcaacacaggcagtgaggggtctgaggcccagccccccgggaaacaagcaccgaggcccggtctgnnnnnnnnnnnnnnnnnnnnnnnnnnnnnnnnnnnnnnnnnnnnnnnnnnnnnnnnnnnnnnnnnnnnnnnnnnnnnnnnnnnnnnnnnnnnnnnnnnnnnnnnnnnnnnnnnnnnnnnnnnnnnnnnnnnnnnnnnnnnnnnnnnnnnnnnnnnnnnnnnnnnnnnnnnnnnnnnnnnnnnnnnnnnnnnnnnnnnnnnnnnnnnnnnnnnnnnnnnnnnnnnnnnnnnnnnnnnnnnnnnnnnnnnnnnnnnnnnnnnnnnnnnnnnnnnnnnnnnnnnnnnnnnnnnnnnnnnnnnnnnnnnnnnnnnnnnnnnnnnnnnnnnnnnnnnnnnnnnnnnnnnnnnnnnnnnnnnnnnnnnnnnnnnnnnnnnnnnnnnnnnnnnnnnnnnnnnnnnnnnnnnnnnnnnnnnnnnnnnnnnnnnnnnnnnnnnnnnnnnnnnnnnnnnnnnnnnnnnnnnnnnnnnnnnnnnnnnnnnnnnnnnnnnnnnnnnnnnnnnnnnnnnnnnnnnnnnnnnnnnnnnnnnnnnnnnnnnnnnnnnnnnnnnnnnnnnnnnnnnnnnnnnnnnnnnnnnnnnnnnnnnnnnnnnnnnnnnnnnnnnnnnnnnnnnnnnnnnnnnnnnnnnnnnnnnnnnnnnnnnnnnnnnnnnnnnnnnnnnnnnnnnnnnnnnnnnnnnnnnnnnnnnnnnnnnnnnnnnnnnnnnnnnnnnnnnnnnnnnnnnnnnnnnnnnnnnnnnnnnnnnnnnnnnnnnnnnnnnnnnnnnnnnnnnnnnnnnnnnnnnnnnnnnnnnnnnnnnnnnnnnnnnnnnnnnnnnnnnnnnnnnnnnnnnnnnnnnnnnnnnnnnnnnnnnnnnnnnnnnnnnnnnnnnnnnnnnnnnnnnnnnnnnnnnnnnnnnnnnnnnnnnnnnnnnnnnnnnnnnnnnnnnnnnnnnnnnnnnnnnnnnnnnnnnnnnnnnnnnnnnnnnnnnnnnnnnnnnnnnnnnnnnnnnnnnnnnnnnnnnnnnnnnnnnnnnnnnnnnnnnnnnnnnnnnnnnnnnnnnnnnnnnnnnnnnnnnnnnnnnnnnnnnnnnnnnnnnnnnnnnnnnnnnnnnnnnnnnnnnnnnnnnnnnnnnnnnnnnnnnnnnnnnnnnnnnnnnnnnnnnnnnnnnnnnnnnnnnnnnnnnnnnnnnnnnnnnnnnnnnnnnnnnnnnnnnnnnnnnnnnnnnnnnnnnnnnnnnnnnnnnnnnnnnnnnnnnnnnnnnnnnnnnnnnnnnnnnnnnnnnnnnnnnnnnnnnnnnnnnnnnnnnnnnnnnnnnnnnnnnnnnnnnnnnnnnnnnnnnnnnnnnnnnnnnnnnnnnnnnnnnnnnnnnnnnnnnnnnnnnnnnnnnnnnnnnnnnnnnnnnnnnnnnnnnnnnnnnnnnnnnnnnnnnnnnnnnnnnnnnnnnnnnnnnnnnnnnnnnnnnnnnnnnnnnnnnnnnnnnnnnnnnnnnnnnnnnnnnnnnnnnnnnnnnnnnnnnnnnnnnnnnnnnnnnnnnnnnnnnnnnnnnnnnnnnnnnnnnnnnnnnnnnnnnnnnnnnnnnnnnnnnnnnnnnnnnnnnnnnnnnnnnnnnnnnnnnnnnnnnnnnnnnnnnnnnnnnnnnnnnnnnnnnnnnnnnnnnnnnnnnnnnnnnnnnnnnnnnnnnnnnnnnnnnnnnnnnnnnnnnnnnnnnnnnnnnnnnnnnnnnnnnnnnnnnnnnnnnnnnnnnnnnnnnnnnnnnnnnnnnnnnnnnnnnnnnnnnnnnnnnnnnnnnnnnnnnnnnnnnnnnnnnnnnnnnnnnnnnnnnnnnnnnnnnnnnnnnnnnnnnnnnnnnnnnnnnnnnnnnnnnnnnnnnnnnnnnnnnnnnnnnnnnnnnnnnnnnnnnnnnnnnnnnnnnnnnnnnnnnnnnnnnnnaacgtcacttccaaccaccgggcgagcgacacggtagtgtgcgagggccgcccccaggtgctgagcgggcgcttcatgtatgggcccctggacgtcgtcacgctcaccggagagannnnnnnnnnnnnnnnnnnnnnnnnnnnnnnnnnnnnnnnnnnnnnnnnnnnnnnnnnnnnnnnnnnnnnnnnnnnnnnnnnnnnnnnnnnnnnnnnnnnnnnnnnnnnnnnnnnnnnnnnnnnnnnnnnnnnnnnnnnnnnnnnnnnncaggggcgaccacacctacgccgaatgctgcctgactgtggtggcccgcggcacggaggccgtggtcttcagcatagacggctccttcaccgccagcgtctccatcatgggcagcgaccccaaggtgcgcgctggcgccgtggatgtggtcagnctggcaggactccggctacctgatcgtgtatgtcacaggccggccggatatgcagaagcaccgcgtggtggcctggctgtcgcagcacaacttcccccatggcgtcgtctccttctgcgatggcctcacccacgacccgctgcgccagaaggcagtgtttctgcagagcctggtgcaggaggtn

SEQ ID NO: 21331 - DNA, 268 bp, Macaca Mulatta
taacacaagctgacagcatgtaagcctgtgaacatagctggctctggcccttcccagcctctaggaaaacatggacagtaccacaaaggcaaaggcagctgacttggtttctttaaaaagccagagtcattggggaaaaacagctagttgcaatgtgtgaaacgtgagtgtgcacttgcatgaaataccgagctgatgagggacctatcagatctccataggaatgttatttatgtagagatgaagtgtcatgaggtgtacaacataa

SEQ ID NO: 21332 - DNA, 1062 bp, Macaca Mulatta
  misc_feature (1)...(1062): n = A,T,C or G
ggacaggcttgatagactgatttaactgagatcttcaataggaattctactcagtctccaatactggactggtttttcttaccctctgttgtgttaccagagggttttccagataccgatgatagtagcagaaatagccaagtaacttatgttctgaagtacgttatcccaccacagtaaagccatcccacatgtattcggttcttaactattaactaatctaagtgataaaacatcttttcccacaaggcnnnnnnnnnnnnnnnnnnnnnnnnnnnggacatgnnnnnnnnnnnnnnnannnnnnnnnnnnnnnnnnnnncaatcttggctcattgcgccctccacctgccgaggnnnnnnnnnnnnncannnnnnnnnnnnnnnntacctgggaccacaggcgtgtgccaccacgcccagctaattttggtatactcaagtagagatggcgtttcaccatgtggaccaggatggtctcgatctcgtgatgcacccnnnnnnnnnnnnnnnnnnnngggtactcacaggtgtgagtcactgtgcctggacaaggcagtttacaatcgtgtaaattttcagatagataattggttctgactctccaaactggacaaccggtccttcaatcttagacgggttaaaacaagaactcgtttaacaaccgggaaaaacaagtaaatgtacggtcctaagatcagcagtgtcgaagccacgtgacagatcggcagggtggacaaaggtcaaaataaagacagacaccaatgccgaacaggacgtagcaagcgtcatcgactcgacttagatgcaagacgagaagagatggtgtgacaccacgcgaaatatctgccccctctggtctccgcccctcacatcactcataacaannnnnnnnnnnnnnnnnnnnnnnnnnnnnnnnnnnnnnnnnnnnnnnnnnnnnnnnnntaacaaagaaaaacacaagaaaagcaaacagaaacacaaaaagaaataaacaacaaaagaaacaaaccataacaaaaaaagaaatcaaaacacagaaagcgagagaacaaaaacagc

SEQ ID NO: 21333 - DNA, 803 bp, Macaca Mulatta
gggctttctaactccgctgcggccatggctccagtgaaaaaacttgtggcgaaggggggcaaaaaaaagaagcaggttctgaagttcactcttgattgcacccaccctgtagaagatggaatcatggatgctgccaattttgagcagtttttgcaagaaaggatcaaagtgaacggaaaagctgggaaccttggtggaggggtggtgaccatcgaaaggagcaagagcaagatcaccgtgacatctgaggtgcctttctccaaaaggtatttgaaatatctcaccaaaaaatatttgaagaagaataatctacgtgactggttgcgcgtagttgctaacagcaaagagagttacgaattacgttacttccagattaaccaggacgaagaagaggaggaagatgaggattaaatttcatttatccggaatattttgtatgagttcttgaataaaacttgggaaccaaaatggtggtttatccttgtatctctgcagtgtggattgaacagaaaattggaaatcatagtcaaagggcttctcttggttcgccactcacttatttgtaacttgacttctttttttctgcttaaaagtttcaattctcgtggtaataccagagtagaaggagagggtgactttacagaactgacagccattggggaggcagatgccggtgtggaggtgtgggctgaaggtagtgactgtttgattttaaaaagtgtgactgtcagtgatatgttgctttctcacatataatgattcatgggatcctcataagactgactcaatccgtgaagagcaag

SEQ ID NO: 21334 - DNA, 768 bp, Macaca Mulatta
ggggcccagctcaaatgctactactttgattacaaggagcagctccccgagtcagcctatatgcaccagctcttgggcctcaacctcctcttcctgctgtcccagaaccgggtggctgagttccacacggagttggagcggctgcctgccaaggacatccagaccaacgtctacatcaagcaccctgtgtccctggagcaatacctgatggagggcagctacaacaaagtgttcctggccaagggtaacatccccgctgagagctacaccttcttcattgacatcctgctggacaccatcagggatgagatcgctgggtgcatcgagaaggcctacgagaaaatccttttcactgaggccacccggatcctcttcttcaacacacccaaaaagatgaccgactacgccaagaagcgagggtgggtcctgggccccagcaactactacagttttgccagccagcagcagaagccggaagacaccaccattccctccacagaactggccaaacaggtcatcgagtatgcccggcagctggagatgatcgtctgagcccactgggcactgggtggggcagggcatgcgttatttaaaacagttacactgcagggtttcgtccaataaaagtgggattgacatttccctcttccaggcccctttgtctcccccagtttgggatggcaagaaaaaaacaagtttctttatcttcttgaagaaacttgggaaggtttttgggggcggcttccagggggggttgggaagaataat

SEQ ID NO: 21335 - DNA, 732 bp, Macaca Mulatta
gaaaggaaagagggaggtaaggaatatctgtccccctaacatcactcattgacctgaggcccttctctgcagcccctggatgcagcctcacagtccttatgagcagagcaccttagacagtccttgccaatggactagcttgtctttggaccctgaggcccagagggcctgcgagggagtgagttgatagcacagatcctgccctgtgggccctcaaatggaggtgggcagaacagagtccatccctgaaggccccgcccaggctcagtcactgagacaccccgagctctgcctcccctcaccccctaagagggaggagggagtgctccagacacctgtctaagaagcccaggaaaggctctgggagcagccacacacctgatgcttcttcagagactcctgcaggcagccaggccacaagacccttgtggtcccactccccacacgccggattctttcatgaggcctgggttcccctcccacctctctcactccttgaaaacactgttctctgccctccaagaccttctccttcatctttgtccccgtcgcagacaggaccaggcatttccatgaggcccctgtttgtttctgaaagggacgctacccgggaagggggctgggacatgggacaggggacgttgcaggcatacagtcaggggttcccttttttggctgctgaaggctcgagcatgcctggatgagggcacacaagcgtcctggccctcaggt

SEQ ID NO: 21336 - DNA, 513 bp, Macaca Mulatta
tatccgggagtcgagcagcacaacagggatggtcgtcggcattgtggctgctgccgccctctgcatcttgatcctcctgtacgccatgtacaagtacaggaacagggacgaggggtcctatcaagtggacgagacgcggaactacatcagcaactccgcccagagcaacggcacgctcatgaaggagaagcagcagagctcgaagagcggccacaagaaacagaaaaacaaggacagggagtactacgtgtaaacatgcgaacactgctcacacgcgagttttacagttatttctatccacgcctatgaatctttggatggtgagatctcacagatgtcagaactgctggaactatgaaatggggtatataaccacgactctggtggggaaaaccgttttttaaaggacacacacacacagcgatgcatctctctctgaagctcagccatggctgcggcaaggtcccagcggtcgctgggaggcagaaggttttgtgccctgctgtatcataa

SEQ ID NO: 21337 - DNA, 422 bp, Macaca Mulatta
  misc_feature (1)...(422): n = A,T,C or G
actcccataccgtgggctgggcctgagttgggagctgaagaaagaagtcggctnnngcctccctggccaggaggaccctggggaggcgccacctgagcctgtggaggggagtcctgcagtgctttcagatctggggcacccaccctgccctcgggaaggccaccccttctgtccctctggccactccctggctggcccctccctctggcctctcaggaacaacagtaaacagtggggagctggtgccctcccaagccgagcaggaggctttgcagccagtctctggggaggcccttgtaccactcagcgtctgaaggcatcctgggggagaacttggaatcctgagtgatctgggagtggcctgcgtgcccggcaaggcacctcatgttcctcgtgaggtgagggccttctgccggggctgt

SEQ ID NO: 21338 - DNA, 571 bp, Macaca Mulatta
  misc_feature (1)...(571): n = A,T,C or G
atgtcccagcaacacacactgccagtgaccctctcccctgccctcagtcaggagctcctcaagactgttcctcctccagtcaatacccagcaggagcaaatgaagcagccaactccactgcctcccccgtgccagaaggtgtctgtcgagctcccagtggaggtcccattaaagcaagaggaaaagcacatgactattgtaaagggagtgcctgagcaagaatgtgnnnnnnnnnnnnnnnnnnnnnnnnnnnnnnnnnnnnnnnnnnnnnnntgggaacagcatgaggaacatcagaaagcagaaaacccagagcagcagcttaagcaggagaaagcacaaaaagatcagcagctaaaggaacagctggaagaagagaagaagctcttagacaagcaactggatcaagagctagtcaagagagatgagcaactgggaatgaagaaagagcaactgttggagctcccagagcagcagcaggggcacctgaaacacctggagcagcaggaggggcaactggagctcccagagcagcaggagggacagctgaagcacctggagcagcaggagg

SEQ ID NO: 21339 - DNA, 733 bp, Macaca Mulatta
acttttccttcatgaaccccgggatggagcggctgatatcctgaatcttgcccctccagagacaggaacgaatttgccttctccctggggactggttcgagacactgcttgggttcctttttcaacttggaaaaggaaagaaacactcaacaataaaggctcagacctgttcgcccccgacgtgacttttatctgtagcagaaaccaagtccacttcactaacgacgatgccctgtgtctcgtctcctgacatgtctcacagacgctcctgaagttaggtcattactaaccgtagttatttacttgaaagatgggtctccgcactcggaaaggtttcaaaacttgatgctgaaataaattatgactcttcacctgggctccaactgctgatcaatgaaatgcttgttgaatcgggggcaaacggagtacagaaatctcaagactgaaacggccccattgcctggtctagtagcggatctcactcagccgcagacgagtaatcactaacccgttttattctattcctatctgtggatgtgtacacggctgggggaccaaccctggagaggtttttatgggaattctttacaataaacagagcttgtaacttgagatctacaaatccattcatcctgattaaccatgaaatccatggtcaagaggacagtggaacgtgagagggaaggtctgctagacaccttcgctggttatcttgtcaagatagaaatgatat

SEQ ID NO: 21340 - DNA, 845 bp, Macaca Mulatta
tacataaaatggtaagtgttaagcttatggccatacagaacggaagagatccaaatagagatgcaggtaatctgagaaatattgttttcatgatcttccaaagacaaatttcaggtgttttttgaaaatgttttgctataagtagttggactttaatttcaaccaaatttaaaacattctcctcagagtaattcagactaagcaacttgacaagggttagaaagtcagcggtgcttaccatcttcagtgcatattacaaaatggggaagaaaaacataaagacaagaatattgcttgattttttttggttaaatatgaggaattgagtcattaactgaactttttacttttaaactttaaggatatatttattgccagagaattgatcaacgtgactattccaacaatacgcagaagacaaccaaagatgagctgttgaatttactaaaaactattgatgaggattcaaaactttctgccaaagagaagaaaaaattgctaggtcaattctataagtgtcacccagacatctttattgagcattttggagactgagtttttaatgtctgtatataagttgtgtattttaagaataaattatgtatcctaaatatccaatcacatttgtaagcttggaagctctaaatatgaaactgtacttaataaaaatttttttgtataactttgtgtgtcagaagctgagtattaatcatatggtgtatcgctgttaagtacttaagtgagttgatttataattactgtgctcaatgctttatagaacgtaatatttagatgttatgacattgcagtgttgtataagaaggcattaaacagtaagaaaacga

SEQ ID NO: 21341 - DNA, 1180 bp, Macaca Mulatta
  misc_feature (1)...(1180): n = A,T,C or G
gctacaatgggtgtctggcaagtggggacaagggccgccggcgaagccgcctggcactgagccgccgtccgcatgccaacggagtgaagccagatgtcatgcaccacatctccacgccgctcgngcactgagtaaccgtggtcagcacagcatctcatacacgctgtcccggagccactcggtcatagtggagtatacacatgatagcgacacagacatgttccagnnnnnnnnnnnnnnnnnnnnnnnnnnnnnnnnnnnnnnnnnnnnnnnnnnnnnnnnnnnnnnnnnnnnnnnnnnnnnnnnnnnnnnnnnnnnnnnnnnnnnnnnnnnnnnnnnnnnnnnnnnnnnnnnnnnnnnnnnnnnnnnnnnnnnnnnnnnnnnnnnnnnnnnnnnnnnnnnnnnnnnnnnnnnnnnnnnnnnnnnnnnnnnnnnnnnnnnnnnnnnnnnnnnnnnnnnnnnnnnnnnnnnnnnnnnnnnnnnnnnnnnnnnnnnnnnnnnnnnnnnnnnnnnnnnnnnnnnnnnnnnnnnnnnnnnnnnnnnnnnnnnnnnnnnnnnnnnnnnnnnnnnnnnnnnnnnnnnnnnnnnnnnnnnnnnnnnnnnnnnnnnggtgaaaaacgagtccaacgtgctgcaggacggctctctcatcgacctgtgtggggccacactgctgtggcgcacaccggcggggctgctgcgggctccaacactgaagcaactggaggcccagcggcaggaggcaaatgcagcgcggccccagtgccccgtgggcctcagcactctggccttccccagcccagcccgtggccgcacagcacccgacaaacagcagccatgggtctacgtccgctgcgggcacgtccacggctaccacggctggggctgccggcgggagcggggcccccaggagcgcgaatgtcctctctgccgtctcgtggggccttatgtgcctctatggcttggccaggaggccggcctctgcctggaccctgggccgcctagccatgcctttgcaccttgtggccacgtctgctctgagaagactgcccgctactgggcccagacaccactgccccacggcacccacgctttccatgccgcctgccccttttgcggggcctggcttactggcgagcatggctgcgtccgccttattttccagggcccgctggattag

SEQ ID NO: 21342 - DNA, 2225 bp, Macaca Mulatta
  misc_feature (1)...(2225): n = A,T,C or G
nagaaccctggagcccctggagacggaaggagccgcccgctccatgctcagcagctttttgcctcctgttcccagcctgcccagtgaccccccagagcacttccctctgcgcaagacannnnnnnnnnnnnnnnnnnnnnnnnnnnnnnnnnnnnnnnnnnnnnnnnnnnnnnnnnnnnnnnnnnnnnnnnnnnnnnnnnnnnnnnnnnnnnnnnnnnnnnnnnnnnnnnnnnnnnnnnnnnnnnnnnnnnnnnnnnnnnnnnnnnnnnnnnnnnnnnnnnnnnnnnnnnnnnnnnnnnnnnnnnnnnnnnnnnnnnnnnnnnnnnnnnnnnnnnnnnnnnnnnnnnnnnnnnnnnnnnnnnnnnnnnnnnnnnnnnnnnnnnnnnnnnnnnnnnnnnnnnnnnnnnnnnnnnnnnnnnnnnnnnnnnnnnnnnnnnnnnnnnnnnnnnnnnnnnnnnnnnnnnnnnnnnnnnnnnnnnnnnnnnnnnnnnnnnnnnnnnnnnnnnnnnnnnnnnnnnnnnnnnnnnnnnnnnnnnnnnnnnnnnnnnnnnnnnnnnnnnnnnnnnnnnnnnnnnnnnnnnnnnnnnnnnnnnnnnnnnnnnnnnnnnnnnnnnnnnnnnnnnnnnnnnnnnnnnnnnnnnnnnnnnnnnnnnnnnnnnnnnnnnnnnnnnnnnnnnnnnnnnnnnnnnnnnnnnnnnnnnnnnnnnnnnnnnnnnnnnnnnnnnnnnnnnnnnnnnnnnnnnnnnnnnnnnnnnnnnnnnnnnnnnnnnnnnnnnnnnnnnnnnnnnnnnnnnnnnnnnnnnnnnnnnnnnnnnnnnnnnnnnnnnnnnnnnnnnnnnnnnnnnnnnnnnnnnnnnnnnnnnnnnnnnnnnnnnnnnnnnnnnnnnnnnnnnnnnnnnnnnnnnnnnnnnnnnnnnnnnnnnnnnnnnnnnnnnnnnnnnnnnnnnnnnnnnnnnnnnnnnnnnnnnnnnnnnnnnnnnnnnnnnnnnnnnnnnnnnnnnnnnnnnnnnnnnnnnnnnnnnnnnnnnnnnnnnnnnnnnnnnnnnnnnnnnnnnnnnnnnnnnnnnnnnnnnnnnnnnnnnnnnnnnnnnnnnnnnnnnnnnnnnnnnnnnnnnnnnnnnnnnnnnnnnnnnnnnnnnnnnnnnnnnnnnnnnnnnnnnnnnnnnnnnnnnnnnnnnnnnnnnnnnnnnnnnnnnnnnnnnnnnnnnnnnnnnnnnnnnnnnnnnnnnnnnnnnnnnnnnnnnnnnnnnnnnnnnnnnnnnnnnnnnnnnnnnnnnnnnnnnnnnnnnnnnnnnnnnnnnnnnnnnnnnnnnnnnnnnnnnnnnnnnnnnnnnnnnnnnnnnnnnnnnnnnnnnnnnnnnnnnnnnnnnnnnnnnnnnnnnnnnnnnnnnnnnnnnnnnnnnnnnnnnnnnnnnnnnnnnnnnnnnnnnnnnnnnnnnnnnnnnnnnnnnnnnnnnnnnnnnnnnnnnnnnnnnnnnnnnnnnnnnnnnnnnnnnnnnnnnnnnnnnnnnnnnnnnnnnnnnnnnnnnnnnnnnnnnnnnnnnnnnnnnnnnnnnnnnnnnnnnnnnnnnnnnnnnnnnnnnnnnnnnnnnnnnnnnnnnnnnnnnnnnnnnnnnnnnnnnnnnnnnnnnnnnnnnnnnnnnnnnnnnnnnnnnnnnnnnnnnnnnnnnnnnnnnnnnnnnnnnnnnnnnnnnnnnnnnnnnnnnnnnnnnnnnnnnnnnnnnnnnnnnnnnnnnnnnnnnnnnnnnnnnnnnnnnnnnnnnnnnnnnnnnnnnnnnnnnnnnnnnnnnnnnnnnnnnnnnnnnnnnnnnnnnnnnnnnnnnnnnnnnnnnnnnnnnnnnnnnnnnnnnnnnnnnnnnnnnnnnnnnnnnnnnnnnnnnnnnnnnnnnnnnnnnnnnnnnnnnnnnnnnnnnnnnnnnnnnnnnnnnnnnnnnnnnnnnnnnnnnnnnnnnnnnnnnnnnnnnnnnnnnnnnnnnnnnnnnnnnnnnnnnnnnnnnnnnnnnnnnnnnnnnnnnnnnnnnnnnnnnnnnnnnnnnnnnnnnnnnnnnnnnnnnnnnnnnnnnnnnnnnnnnnnnnnnnnnnnnnnnnnnnnnnnnnnnnnnnnnnnnnnnnngttttgggtacatgacgcagcaactgatgaacctggcaggaggtgcagtggtgctggccttggagggtggccaagagctcacagccatctgtgacgcctctgaggcctgtgt

SEQ ID NO: 21343 - DNA, 767 bp, Macaca Mulatta
ttgctaagtcttagataaatatttaataagacatggcccttgatattaaacaaaacagaaatttctatttattgtaaaattgagtaaagaacagatagcaaaaaacattgaggaataggtgctataatatgatggaggaagaacagagaggacagttaggacagacctctgatgagaaggggatcttaagggtagagaagagagtgctggaaatcactacataacaacttttattaatgcctccaaataattgtttgtactataaaatattctacatgttgtttttctaaactattgtaatcaaatttaaagaatgacttcattttatgtatcttttcagatccccaaaggaaaaacatgccaacctattttccaactctccaaagctgaaaaatttgtcttttctggatgctcaagtactcagagttacaaacccactttttgtggaatatgcttggataagagatgctgtatccctaataagtctaaaatgattactattcaattcgattgcccaaatgaggggtcatttaaatggaagatgctgtggattacatcttgtgtatgtcagagaaactgcagagaacctggagatatattttctgagctcaagattctgtaaaacaaagcaaatgggggaaaagttagtcaaccctatcatataataaaaaaattagtgagtataaaatggtggcaaatctgttttgtttaaaacagtatgaatgcctgttcttagatcactacatttaaggcattagaagctttta

SEQ ID NO: 21344 - DNA, 2821 bp, Macaca Mulatta
  misc_feature (1)...(2821): n = A,T,C or G
cctcagagtttaggaggccagagggtttagcaggggcttgtccttttaagctttctctgcttggctttttccacaggactggtagcttccatgagcatggctaccactttttccaggctatgcggcttggggttgaggagataaacaactccacgacactgttgcccaacgtcaccctggggtaccagctgtatgatgtgtgctctgactctgccaatgtgtacgccacgctgagcgtgctctccgtaccagggccacgccacatagagctccaaggagaccttctccgctattctcctaaggtgttggcggtgattgggcctgacaccaccaaccgtgctgccaccacagccgccctgctgagccctttcctgatgcccnnnnnnagctatggggccagcagcgagacgctcagcgtgaagcggcagtatccctctttcctgcgcaccatccccaacgacaagtaccaggtggagaccatggtgctgctgctgcagaggttcgggtggacctggatctctctggttggcagcagtggcgactatgggcagctaggggtgcaggcactggagaagcaggccactgatcaggggatctgcattgctttcaaggacatcgtgcccttctctgcccaggtaggcgatcagaggatgcagcgcctgatgcgccacctggcccaggccacggccaccgttgtggtcgttttttccaaccggctgttggccagggtgtttttcgagtccgtggtgctagccaacctgactggcaaggtgtgggtcgcctcagaggcctgggtcctctccaggcacatcactggggtgcccgggatccagcgcattgggacggtgctgggcgtggccatccagaagaggactgtccctggcctgaaggcatttgaagaagcctatgcccgggcagacaagggagcccctaggccttgccacaagagctcctgctgcagcagcaatcaggtctgcagagaatgtgaagctttcacggcacacacgatgcccaagctcaaaggcttctccatgagttctgcctacaacgcgtaccgggctgtgtatgcagtggcccatggcctccaccagctcctgggctgtgcctctggagtttgttccaggggccgagtctacccctggcagnnnnnnnnnnnnnnnnnnnnnnnnnnnnnnnnnnnnnnnnnnnnnnnnnnnnnnnnnnnnnnnnnnnnnnnnnnnnnnnnnnnnnnnnnnnnnnnnnnnnnnnnnnnnnnnnnnnnnnnnnnnnnnnnnnnnnnnnnnnnnnnnnnnnnnnnnnnnnnnnnnnnnnnnnnnnnnnnnnnnnnnnnnnnnnnnnnnnnnnnnnnnnnnnnnnnnnnnnnnnnnnnnnnnnnnnnnnnnnnnnnnnnnnnnnnnnnnnnnnnnnnnnnnnnnnnnnnnnnnnnnnnnnnnnnnnnnnnnnnnnnnnnnnnnnnnnnnnnnnnnnnnnnnnnnnnnnnnnnnnnnnnnnnnnnnnnnnnnnnnnnnnnnnnnnnnnnnnnnnnnnnnnnnnnnnnnnnnnnnnnnnnnnnncaggtgcgtaagtctgtgtgttccagtgactgtcttgaagggcaccagcgagtggttacaggtttccatccctgttgctttgagtgtgtgccctgtggggctgggaccttccttaacaagagtgnnnnnnnnnnnnnnnnnnnnnnnnnnnnnnnnnnnnnnnnnnnnnnnnnnnnnnnnnnnnnnnnnnnnnnnnnnnnnnnnnnnnnnnnnnnnnnnnnnnnnnnnnnnnnnnnnnnnnnnnnnnnnnnnnnnnnnnnnnnnnnnnnnnnnnnnnnnnnnnnnnnnnnnnnnnnnnnnnnnnnnnnnnnnnnnnnnnnnnnnnnnnnnnnnnnnnnnnnnnnnnnnnnnnnnnnnnnnnnnnnnnnnnnnnnnnnnnnnnnnnnnnnnnnnnnnnnnnnnnnnnnnnnnnnnnnnnnnnnnnnnnnnnnnnnnnnnnnnnnnnnnnnnnnnnnnnnnnnnnnnnnnnnnnnnnnnnnnnnnnnnnnnnnnnnnnnnnnnnnnnnnnnnnnnnnnnnnnnnnnnnnnnnnnnnnnnnnnnnnnnnnnnnnnnnnnnnnnnnnnnnnnnnnnnnnnnnnnnnnnnnnnnnnnnnnnnnnnnnnnnnnnnnnnnnnnnnnnnnnnnnnnnnnnnnnnnnnnnnnnnnnnnnnnnnnnncagcgcttcccccatctggtgatgcttgagtgcacagaggccaactccctgggcttcatactggcctttctctacaatggccttctctccatcagtgcctttgcctgcagctacctgggcaaggacttgccagagaactacaacgaggccaaatgtgtcaccttcagcctgctcttcaacttcatgtcctggatcgccttcttcaccacggctagtgtctacgacggcaagtatctgcccgcggtcaacatgctggctgggctgagcagcctgagcagcggcttcggcgggtattttctgcccaagtgctacgtgatcctctgccgcccagacctcaacagcacagagcacttccaggcctccattcaggactacacgaggcnnttgacgttgctaggcaaccccggaggcgggcccagcgccaaaagaacagggcgtggcctcatcccctcatcccattggccgttctctgcggggccccgccttcgggtgccggagctagaagatctacgcttccgaggcgcccctcctggccggcacgctctgacgtcacgtccggcgcggagtcggcgtcatctccgcacggtcggcggggcacgcatagcccggca

SEQ ID NO: 21345 - DNA, 437 bp, Macaca Mulatta
  misc_feature (1)...(437): n = A,T,C or G
gccctaacagctgcagccggaaggggcaaactggaggtgtgccgtctgctctnnnnnnnnnnnnnnnnnnnnnnnnnnnnnnnnnnnnnnnnnnnnnnnnnnnnnnnnnnnnnnnnnnnnnnnnnnnnnnnnnnnnnnnnnnnnnnnnnnnnnnnnnnnnnnnnnnnnnnnnnnnnnnnnnnnnnnnnnnnnnnnnnnnnnnnnnnnnnnnnnnnnnnnnnnnnnnnnnnnnnnnnnnnnnnnnnnnnnnnnnnnnnnaggtgcctccattgctctcatggacaaagaaggattgacagccctcagctgggcttgtttgaagggccatctctcagtagtacgttctctggtggataacggagctgccacagaccatgctgacaagaatggccgtaccccactggacctggcagctttctatggtgatgctgaggtgg

SEQ ID NO: 21346 - DNA, 1717 bp, Macaca Mulatta
  misc_feature (1)...(1717): n = A,T,C or G
aaagaaacctttcaaatgtaaaaattgtgtcaaatcattttgcatgctttcacacaaaacccaccataaaagcatttatactacagagaagccatacaaatgtaaagaatgtggaaaaacctttaattggtcctcaacccttactaatcataagaagcctcatactgaagaaaagccctacaaatgtgaagaatatggcagagcttttaatcgatcctcaaattatgctacacataagataactcatactgcaaagaaaccttacaagtgtgaagaatgtggcaaagcatttagccaatcctccacactaaccatacataaaaggatacacactggagagaaaccctgcaaatgtgaagaatgtggtaaagcatttagccaaccctcagccctaaccatacataagaggatgcacattggagagaaaccctacaaatgtgaagaatgtggcaaagcatttgtatggtcctcaaccctaactagacataagaggctgcacacgggagagaaaccctacaaatgtgaagaatgtgccaaagcttttagacagttcggacaccttactacacataggataattcatactggagagaaaccctacaaatgtgaagaatgtggtaaggcatttatatggccctcaaccctaagtaaacataaaaggattcacactggagagaaacccttcaaatgtgaagaatgtggcaaagcttttcatcgatcctcaaatcttactaaacataagataaatcatactggagagaagccttacaagtgtgaagaatgtggccaagcatttatatggtccctcaaccttactgaacataagaaaatcatactagagagaaacccctacaatgtgaagaatgtggtaaagcatttagccgatcctcagccctacctacacattagaagatgcacactggagagaaaccctacacatgtgaaggattgtggcaaaannnnnnnnnnnnnnnnnnnnnnnnnnnnnnatactacagagaagccatacaaatgtaaagaatgtggaaaaacctttaattggtcctcaacccttactaatcataagaagcctcatactgaagaaaagccctacaaatgtgaagaatatggcagagcttttaatcgatcctcaaattatgctacacataagataactcatactgcaaagaaaccttacaagtgtgaagaatgtggcaaagcatttagccaatcctccacactaaccatacataaaaggatacacactggagagaaaccctgcaaatgtgaagaatgtggtaaagcatttagccaaccctcagccctaaccatacataagaggatgcacattggagagaaaccctacaaatgtgaagaatgtggcaaagcatttgtatggtcctcaaccctaactagacataagaggctgcacacgggagagaaaccctacaaatgtgaagaatgtgccaaagcttttagacagttcggacaccttactacacataggataattcatactggagagaaaccctacaaatgtgaagaatgtggtaaggcatttatatggccctcaaccctaagtaaacataaaaggattcacactggagagaaacccttcaaatgtgaagaatgtggcaaagcttttcatcgatcctcaaatcttactaaacataagataaatcatactggagagaagccttacaagtgtgaagaatgtggccaagcatttatatggtcc

SEQ ID NO: 21347 - DNA, 2062 bp, Macaca Mulatta
  misc_feature (1)...(2062): n = A,T,C or G
aggataccgtgctttcctagaccccagcatctccctggaatttgtggtggcctctgagcagttcttctctaccatggtgccccctggcgtctacatgannnnnnnnnnnnnnnnnnnnnnnnnnnnnnnnnnnnnnnnnnnnnnnnnnnnnnnnnnnnnnnnnnnnnnnnnnnnnnnnnnnnnnnnnnagaaccccaatctgaacagtacccaggaggtgaatgagctgctgctgggaatggcctcccagatttcggagctggaggacagtatagtggttgaagatctgaggnnnnnnnnnnnnnnnnnnnnnnnnnnnnnnnnnnnnnnnnnnnnnnnnnnnnnnnnnnnnnnnnnnnnnnnnnnnnnnnnnnnnnnnnnnnnnnnnnnnnnnnnnnnnnnnnnnnnnnnnnnnnnnnnnnnnnnnnnnnnnnnnnnnnnnnnnnnnnnnnnnnnnnnnnnnnnnnnnnnnnnnnnnnnnnnnnnnnnnnnnnnnnnnnnnnnnnnnnnnnnnnnnnnnnnnnnnnnnnnnnnnnnnnnnnnnnnnnnnnnnnnnnnnnnnnnnnnnnnnnnnnnnnnnnnnnnnnnnnnnnnnnnnnnnnnnnnnnnnnnnnnnnnnnnnnnnnnnnnnnnnnnnnnnnnnnnnnnnnnnnnnnnnnnnnnnnnnnnnnnnnnnnnnnnnnnnnnnnnnnnnnnnnnnnnnnnnnnnnnnnnnnnnnnnnnnnnnnnnnnnnnnnnnnnnnnnnnnnnnnnnnnnnnnnnnnnnnnnnnnnnnnnnnnnnnnnnnnnnnnnnnnnnnnnnnnnnnnnnnnnnnnnnnnnnnnnnnnnnnnnnnnnnnnnnnnnnnnnnnnnnnnnnnnnnnnnnnnnnnnnnnnnnnnnnnnnnnnnnnnnnnnnnnnnnnnnnnnnnnnnnnnnnnnnnnnnnnnnnnnnnnnnnnnnnnnnnnnnnnnnnnnnnnnnnnnnnnnnnnnnnnnnnnnnnnnnnnnnnnnnnnnnnnnnnnnnnnnnnnnnnnnnnnnnnnnnnnnnnnnnnnnnnnnnnnnnnnnnnnnnnnnnnnnnnnnnnnnnnnnnnnnnnnnnnnnnnnnnnnnnnnnnnnnnnnnnnnnnnnnnnnnnnnnnnnnnnnnnnnnnnnnnnnnnnnnnnnnnnnnnnnnnnnnnnnnnnnnnnnnnnnnnnnnnnnnnnnnnnnnnnnnnnnnnnnnnnnnnnnnnnnnnnnnnnnnnnnnnnnnnnnnnnnnnnnnnnnnnnnnnnnnnnnnnnnnnnnnnnnnnnnnnnnnnnnnnnnnnnnnnnnnnnnnnnnnnnnnnnnnnnnnnnnnnnnnnnnnnnnnnnnnnnnnnnnnnnnnnnnnnnnnnnnnnnnnnnnnnnnnnnnnnnnnnnnnnnnnnnnnnnnnnnnnnnnnnnnnnnnnnnnnnnnnnnnnnnnnnnnnnnnnnnnnnnnnnnnnnnnnnnnnnnnnnnnnnnnnnnnnnnnnnnnnnnnnnnnnnnnnnnnnnnnnnnnnnnnnnnnnnnnnnnnnnnnnnnnnnnnnnnnnnnnnnnnnnnnnnnnnnnnnnnnnnnnnnnnnnnnnnnnnnnnnnnnnnnnnnnnnnnnnnnnnnnnnnnnnnnnnnnnnnnnnnnnnnnnnnnnnnnnnnnnnnnnnnnnnnnnnnnnnnnnnnnnnnnnnnnnnnnnnnnnnnnnnnnnnnnnnnnnnnnnnnnnnnnnnnnnnnnnnttcatcgagatctccaacaactgcctgtccaaggcccagctggccgaggtggtggagtccatgttccgggagtcgggattccaggacaaggaggagctgacatgggaggattttcacttcatgctgcgggaccatgacagcgagctccgcttcacgcagctctgtgtcaaaggtggaggtggaggtgnnnnnnnnnnnnnnnnnnnnnnnnnnnnnnnnnnnnnnnnnnnnnnnnnnnnnnnnnnnnnnnnnnnnnnnnnnnnnnnnnnnnnnnnnnnnnnnnnnnnnnnnnnnnnnngccccagagctgggaggccctggactgaagaagaggtttggcaaaaag

SEQ ID NO: 21348 - DNA, 4406 bp, Macaca Mulatta
  misc_feature (1)...(4406): n = A,T,C or G
ggcctccggtaccagggagggaggacgctggttgtcctggagcccgggaagctcaagggctgagagggagccgctgcgcgagtcttccccactccttcccgatcccggattagcgaaccccggaccaccatgtccctccggggataaagtggggtcgtgggaaagcaggctgtgcttctcatgcattgggttttgcggtgtttgtctcgagcgtccaacaccctaggatccgggagtccgtcgtcacgctcctcggcctcgcggtcgtttgtttgctcggcctgctgggagctatccggcgctgacagccccgctcagactccgggagccgcttgtgggtctttcggaagataactgannnnnnnnnnnnnnnnnnnnnnnnnnnnnnnnnnnnnnnnnnnnnnnnnnnnnnnnnnnnnnnnnnnnnnnnnnnnnnnnnnnnnnnnnnnnnnnnnnnnnnnnnnnnnnnnnnnnnnnnnnnnnnnnnnnnnnnnnnnnnnnnnnnnnnnnnnnnnnnnnnnnnnnnnnnnnnnnnnnnnnnnnnnnnnnnnnnnnnnnnnnnnnnnnnnnnnnnnnnnnnnnnnnnnnnnnnnnnnnnnnnnnnnnnnnnnnnnnnnnnnnnnnnnnnnnnnnnnnnnnnnnnnnnnnnnnnnnnnnnnnnnnnnnnnnnnnnnnnnnnnnnnnnnnnnnnnnnnnnnnnnnnnnnnnnnnnnnnnnnnnnnnnnnnnnnnnnnnnnnnnnnnnnnnnnnnnnnnnnnnnnnnnnnnnnnnnnnnnnnnnnnnnnnnnnnnnnnnnnnnnnnnnnnnnnnnnnnnnnnnnnnnnnnnnnnnnnnnnnnnnnnnnnnnnnnnnnnnnnnnnnnnnnnnnnnnnnnnnnnnnnnnnnnnnnnnnnnnnnnnnnnnnnnnnnnnnnnnnnnnnnnnnnnnnnnnnnnnnnnnnnnnnnnnnnnnnnnnnnnnnnnnnnnnnnnnnnnnnnnnnnnnnnnnnnnnnnnnnnnnnnnnnnnnnnnnnnnnnnnnnnnnnnnnnnnnnnnnnnnnnnnnnnnnnnnnnnnnnnnnnnnnnnnnnnnnnnnnnnnnnnnnnnnnnnnnnnnnnnnnnnnnnnnnnnnnnnnnnnnnnnnnnnnnnnnnnnnnnnnnnnnnnnnnnnnagatgtgttggaagaggatgaagatgaccctgagaatgagccagagggacaagacattgacgagctgtcttattttgtgaaacaaacacatcagcaagaaacacggtccatccaagtggatgtccagcatcctgcactgatccctgtgttgagaccctaccaaagagaggctgtcaattggatgctacaacaagagtgtttcagaagcagtcctgctactgnnnnnnnnnnnnnnnnnnnnnnnnnnnnnnnnnnnnnnnnnnnnnnnnnnnnnnnnnnnnnnnnnnnnnnnnnnnnnnnnnnnnnnnnnnnnnnnnnnnnnnnnnnnnnnnnnnnnnnnnnnnnnnnnnnnnnnnnnnnnnnnnnnnnnnnnnnnnnnnnnnnnnnnnnnnnnnnnnnnnnnnnnnnnnnnnnnnnnnnnnnnnnnnnnnnnnnnnnnnnnnnnnnnnnnnnnnnnnnnnnnnnnnnnnnnnnnnnnnnnnnnnnnnnnnnnnnnnnnnnnnnnnnnnnnnnnnnnnnnnnnnnnnnnnnnnnnnnnnnnnnnnnnnnnnnnnnnnnnnnnnnnnnnnnnnnnnnnnnnnnnnnnnnnnnnnnnnnnnnnnnnnnnnnnnnnnnnnnnnnnnnnnnnnnnnnnnnnnnnnnnnnnnnnnnnnnnnnnnnnnnnnnnnnnnnnnnnnnnnnnnnnnnnnnnnnnnnnnnnnnnnnnnnnnnnnnnnnnnnnnnnnnnnnnnnnnnnnnnnnnnnnnnnnnnnnnnnnnnnnnnnnnnnnnnnnnnnnnnnnnnnnnnnnnnnnnnnnnnnnnnnnnnnnnnnnnnnnnnnnnnnnnnnnnnnnnnnnnnnnnnnnnnnnnnnnnnnnnnnnnnnnnnnnnnnnnnnnnnnnnnnnnnnnnnnnnnnnnnnnnnnnnnnnnnnnnnnnnnnnnnnnnnnnnnnnnnnnnnnnnnnnnnnnnnnnnnnnnnnnnnnnnnnnnnnnnnnnnnnnnnnnnnnnnnnnnnnnnnnnnnnnnnnnnnnnnnnnnnnnnnnnnnnnnnnnnnnnnnnnnnnnnnnnnnnnnnnnnnnnnnnnnnnnnnnnnnnnnnnnnnnnnnnnnnnnnnnnnnnnnnnnnnnnnnnnnnnnnnnnnnnnnnnnnnnnnnnnnnnnnnnnnnnnnnnnnnnnnnnnnnnnnnnnnnnnnnnnnnnnnnnnnnnnnnnnnnnnnnnnnnnnnattatcgctttgtgtgcagatgtggtgaacttgatcagatagatcgtaagcctcgtgttcagtgcctgaagtgtcacctgtggcagcatgcagagtgcgtgaattatgatgagaaaaatctgaagatcaannnnnnnnnnnnnnnnnnnnnnnnnnnnnnnnnnnnnnnnnnnnnnnnnnnnnnnnnnnnnnnnnnnnnnnnnnnnnnnnnnnnnnnnnnnnnnnnnnnnnnnnnnnnnnnnnnnnnnnnnnnnnnnnnnnnnnnnnnnnnnnnnnnnnnnnnnnnnnnnnnnnnnnnnnnnnnnnnnnnnnnnnnnnnnnnnnnnnnnnnnnnnnnnnnnnnnnnnnnnnnnnnnnnnnnnnnnnnnnnnnnnnnnnnnnnnnnnnnnnnnnnnnnnnnnnnnnnnnnnnnnnnnnnnnnnnnnnnnnnnnnnnnnnnnnnnnnnnnnnnnnnnnnnnnnnnnnnnnnnnnnnnnnnnnnnnnnnnnnnnnnnnnnnnnnnnnnnnnnnnnnnnnnnnnnnnnnnnnnnnnnnnnnnnnnnnnnnnnnnnnnnnnnnnnnnnnnnnnnnnnnnnnnnnnnnnnnnnnnnnnnnnnnnnnnatctttttgggttagtggtctttcttggtattgaaccttactgtgtcaaacactggtgggttcgacttctctatcggccttactgcaagaagaatcctcannnnnnnnnnnnnnnnnnnnnnnnnnnnnnnnnnnnnnnnnnnnnnnnnnnnnnnnnnnnnnnnnnnnnnnnnnnnnnnnnnnnnnnnnnnnnnnnnnnnnnnnnnnnnnnnnnnnnnnnnnnnnnnnnnnnnnnnnnnnnnnnnnnnnnnnnnnnnnnnnnnnnnnnnnnnnnnnnnnnnnnnnnnnnnnnnnnnnnnnnnnnnnnnnnnnnnnnnnnnnnnnnnnnnnnnnnnnnnnnnnnnnnnnnnnnnnnnnnnnnnnnnnnnnnnnnnnnnnnnnnnnnnnnnnnnnnnnnnnnnnnnnnnnnnnnnnnnnnnnnnnnnnnnnnnnnnnnnnnnnnnnnnnnnnnnnnnnnnnnnnnnnnnnnnnnnnnnnnnnnnnnnnnnnnnnnnnnnnnnnnnnnnnnnnnnnnnnnnnnnnnnnnnnnnnnnnnnnnnnnnnnnnnnnnnnnnnnnnnnnnnnnnnnnnnnnnnnnnnnnnnnnnnnnnnnnnnnnnnnnnnnnnnnnnnnnnnnnnnnnnnnnnnnnnnnnnnnnnnnnnnnnnnnnnnnnnnnnnnnnnnnnnnnnnnnnnnnnnnnnnnnnnnnnnnnnnnnnnnnnnnnnnnnnnnnnnnnnnnnnnnnnnnnnnnnnnnnnnnnnnnnnnnnnnggccaaacagctgcgagagcactatatgagcaagtgtaatacagaagttgctgaagcccagcaagctttatatcctgtgcagcagactatccatgagcttcaaagaaagnnnnnnnnnnnnnnnnnnnnnnnnnnnnnnnnnnnnnnnnnnnnnnnnnnnnnnnnnnnnnnnnnnnnnnnnnnnnnnnnnnnnnnnnnnnnnnnnnnnnnnnnnnnnnnnnnnnnnnnnnnnnnnnnnnnnnnnnnnnnnnnnnnnnnnnnnnnnnnnnnnnnnnnnnnnnnnnnnnnnnnnnnnnnnnnnnnnnnnnnnnnnnnnnnnnnnnnnnnnnnnnnnnnnnnnnnnnnnnnnnnnnnnnnnnnnnnnnnnnnnnnnnnnnnnnnnnnnnnnnnnnnnnnnnnnnnnnnnnnnnnnnnnnnnnnnnnnnnnnnnnnnnnnnnnnnnnnnnnnnnnnnnnnnnnnnnnnnnnnnnnnnnagtcaaaggccagactgcaatatttgaggagatgatagaagatgaagaaggactcgtggatgatcgagcacctaccaccacccggggtctctgggcaataagtgagacagagcgatctatgaaagcaatactatcatttgcaaaatcacataggtttgatgttgaattcgttgatgaaggaagcacttcaatggatctctttgaagcatggaagaaggaatataa

SEQ ID NO: 21349 - DNA, 818 bp, Macaca Mulatta
  misc_feature (1)...(818): n = A,T,C or G
gggggctaactggcttcggaagcggcggcggcgcgatgaccacgctacgggccttcacctgcgacgacctgttccgcttcaacaacattaacttggatccgcttacagaaacttatgggattcctttctacttacagtacctcgcccactggccagagtatttcatagttgcagaggcacctggtggagaattaatgggttatattatgggtaaagcagaaggctcagtagccagggaagaatggcacgggcacgtcacagctctgtctgttgccccagaatttcgacgccttggtttggctgctaaacttatggagttactagaggagatttcagaaagaaagggtggattttttgtcgatctctttgtaagagtatctnaccaggttgcagttaacatgtacaagcagttgggctacagtgtatataggacggtcatagagtactattcggccagcaacggggagcctgatgaggacgcttatgatatgaagaaagcactttcccgggacactgagaagaaatccatcataccatttacctcatccttgtaaggccttgaagacattggaataaccctggggcagtggattccttaagccaaaaactctaaaaaaactttaagagacaaaaattaagtttccattggaatgaattcccggaaacctctaattagggagaaaaaagcaaaaccaactattaaaatccctaaaagaaacttccaaaaagatgacctcccctttcgagccagccaccatgtttccctcaaaaatttggcgacacccaatcaccgcnaaggacaaaatttacgnccaaac

SEQ ID NO: 21350 - DNA, 559 bp, Macaca Mulatta
  misc_feature (1)...(559): n = A,T,C or G
gcccccagtcctcctccattacaacctctgtgaccttgaggcgcatcccaggaggtgagnaggcaggggctccaggaaaggaatcatacccaattcacagagccttcctccctgggctccttgcccgctccctcttcccttantaggctctacgtcccctgctctgtcagccccactccctgggcttcccagagagtgacagctgctcaggcctgaaccctttgctccaggagacacagggcccagcacccaggttgctggcagcaggctgaagacactagaatcctgacctgtacattctgcccttgcctcttgccccttgcctcccagtggtatttgaataaagtatgtagctatatctgccccccattttcctgttctgcagccccccaaatccacatgtaaatcattactgtctcctgttatttatctcagtagtcccctctcctagccactctagcccctattaactctgcgttaagcattccacataataaaattaaaggttccggttacctgnnnnnnnnnnnnnnnnnnnnnnnnncggccgatcccggga

SEQ ID NO: 21351 - DNA, 148 bp, Macaca Mulatta
agcagcacctgctgaacagtatcttcaggagaaactgccagatgaagtggttctaaaaatcttctcttacttgctggaacaggatctttgtagagcagcttgtgtatgtaaacgcttcagtgaacttgctaatgatccaattttgtgg

SEQ ID NO: 21352 - DNA, 743 bp, Macaca Mulatta
  misc_feature (1)...(743): n = A,T,C or G
agttgctgccccctttgacgatgatgacaagatcgttgggggctacacctgtgaagagaattctgtcccctaccaggtgtctctgaattctggctaccacttctgtggtggctccctcataaacgaacagtgggtggtgtcagcagctcactgctacaagacccgcatccaggtgagactgggagaacacaacatcaaagtcctggaggggactgagcagttcataaacgcggccaagatcatcagccaccccaaatacaacaacaagactctgaacaatgacatcatgctgatcaagctcttctcacctgccgtcatcaatgaccgcgtttccaccatctctctgcccactgcccctccagctgctggcaccatgtgcctcatctctggctggggaaacactctgagctttggtnnnnnnnnnnnnnnnnnnnnnnnnnnnnnnnnnnnnnnnnnnnnnnnnnnnnnnnnnnnnnnnnnnnnnnnnnnnnnnnnnnnnnnnnnnnnnnnnnnnnnnnnnnnnnnnnnnnnnnnnnnnnnnnnnnnnnnnnnnnngactctggtggtcctgcagtctgcgacggagagctccaaggaattgtctcctggggcgatggctgtgcccagaagaacaagcctggagtctacaccaaggtctacaactatttggcctggattaaggacaccatagctgccaacagctaaagcccccgatccctctgcagtctctataccaataaagt

SEQ ID NO: 21353 - DNA, 4686 bp, Macaca Mulatta
  misc_feature (1)...(4686): n = A,T,C or G
agggagccctcatgtttgtcacgaggagggagagaatggatcagatcacagcccaaaaagaagaggacaaggtaggtggaacgccaagcagagaacaaggtgctgcccagacggatggcctgagaactatgacttcttaccaaagaagggaggaagagtcggtgagaacgcagagctctgtgagcaaaagctacatcgaggtgagtcatggtcttggccatgttcctcaacagaatggcttcagtggggcatctgagacagcaaacatccagaggatggcccccatgaatagaacggccaaacccttcccagggtctgtgaatcagccagccacccctttctcgccaacccgaaacatgacgagtcctattgctgactttcctgcacctccaccttactctgcagtcactccaccccctgacgccttctccagaggggtatcaagtccaattgctggcccagcacagccccctccatggccccaggctgccccctggtcccagccagccttttacgattcatctgagcgaatagcttcccgagatgagaggatctcagtgccagcaaaaagaacaggaatattgcaggaggccaaaaggagaagcacgacaaaacccatgtttacttttaaagagcccaaagtaagcccaaatcctgaactcttgtcactgcttcaaattcagaaggcaaacnnnnnnnnnnnnnnnnnnnnnnnnnnnnnnnnnnnnnnnnnnnnnnnnnnnnnnnnnnnnnnnnnnnnnnnnnnnnnnnnnnnnnnnnnnnnnnnnnnnnnnnnnnnnnnnnnnnnnnnnnnnnnnnnnnnnnnnnnnnnnnnnnnnnnnnnnnnnnnnnnnnnnnnnnnnnnnnnnnnnnnnnnnnnnnnnnnnnnnnnnnnnnnnnnnnnnnnnnnnnnnnnnnnnnnnnnnnnnnnnnnnnnnnnnnnnnnnnnnnnnnnnnnnnnnnnnnnnnnnnnnnnnnnnnnnnnnnnnnnnnnnnnnnnnnnnnnnnnnnnnnnnnnnnnnnnnnnnnnnnnnnnnnnnnnnnnnnnnnnnnnnnnnnnnnnnnnnnnnnnnnnnnnnnnnnnnnnnnnnnnnnnnnnnnnnnnnnnnnnnnnnnnnnnnnnnnnnnnnnnnnnnnnnnnnnnnnnnnnnnnnnnnnnnnnnnnnnnnnnnnnnnnnnnnnnnnnnnnnnnnnnnnnnnnnnnnnnnnnnnnnnnnnnnnnnnnnnnnnnnnnnnnnnnnnnnnnnnnnnnnnnnnnnnnnnnnnnnnnnnnnnnnnnnnnnnnnnnnnnnnnnnnnnnnnnnnnnnnnnnnnnnnnnnnnnnnnnnnnnnnnnnnnnnnnnnnnnnnnnnnnnnnnnnnnnnnnnnnnnnnnnnnnnnnnnnnnnnnnnnnnnnnnnnnnnnnnnnnnnnnnnnnnnnnnnnnnnnnnnnnnnnnnnnnnnnnnnnnnnnnnnnnnnnnnnnnnnnnnnnnnnnnnnnnnnnnnnnnnnnnnnnnnnnnnnnnnnnnnnnnnnnnnnnnnnnnnnnnnnnnnnnnnnnnnnnnnnnnnnnnnnnnnnnnnnnnnnnnnnnnnnnnnnnnnnnnnnnnnnnnnnnnnnnnnnnnnnnnnnnnnnnnnnnnnnnnntcctccttccttctttgcagaggcctcctcgccagtcagtgcatccccagtgcctgtgggcgttcccacctcgccaaagcaagaatcagcctcatcatcttattttgtggcaccaaggccaaagttctcagccaagaaaagtggtgtcacaattcaggtgtggaaaccatctgttgtggaagagtaatcttgtagctgaagctgagtgtccactttgcttgaaatgaattgtttgcagtgtttcttgagtccctgagaatgcctagcaaagtcctcaacttacttaatttcagatatgtcacctcctattctgggtccaaggagtataatatttttaaggagtcaaaaatccaactcagattgacctaaaatatatttatcttctttgcacacttaaaaaatccaggagcacccaaaaatagacatgtaccattatattaagtaagcaggatacttaggatttgtgctgtagccacaagaaagacagtgatcagtgatatcaaacatcaggaatcagcctttacgtaacataacagctgtgctcccatgctgaaaggttcaaatgtagtgaaagtataacctatattgagtgagatttcccttttaggtagtgccttatctctattactagtgttaaaggaataaagaatctatcgaggacagggagcagctctggtctgtcaatctcagccacccgtttgatatcacagagaaggtactcggagggctgttggaatgtatatagtttagtaagaagtgngtgagaaagagggtcttaataattactgagcacttattatgtattaggttttttgccagatgttttcacatatataaactcatttcagaannnnnnnnnnnnnnnnnnnnnnnngggtacggtggttcatgtctataatcctagcactttgggaggctgtggtgggaggactgcttaagcctaggagttggagaccaccctagacaacatagtaagaccctgtctcannnnnnnnnnnnnnnnnnnnnnnnnnnnnnnnnnnnnnnnnnnnnnnnnnnnnnnnnnnnnnnnnnnnnnnnnnnnnnnnnnnnnnnnnnnnnnnnnnnnnnnnnnnnnnnnnnnnnnnnnnnnnnnnnnnnnnnnnnnnnnnnnnnnnnnnnnnnnngaggcaagtgttacagtacacaggataatgaagtaacgtgtaaaaagcaggatgcacataaagtgcatggctgttgttttacctnggagaaaccacatgattgggacctgaaggtttactgactgaggacaggggctgattgtgaagcacgaggaaccccgtgtgtgtggagactgtaggggtgagaacacacaattattagcatcatttctgagtgatctcacagattttttttcttgtgttcgttttgctttttgacaactgcttctcccatgttccttgtaattctattctctcaccttcactttattatttgtattcaatggaccaggataattcaggcaaggttaccttgtaaacttgaattggccacacaccatgtcgtcacccagctggctatgaagtgaataatggtactgaaagtaaacctgaagacctttctcagatctattttaagtctgagtctgaccaaccatggaaaatattcgacgtgaattaatgtagagaactataaagcatttatgacagctccaaggaaaatcatctgctctatgcaggagatatgtttagagacctctcagaaaaacttgcctgatttgagggtacacagtaccattttaatcctctganaatatctgtattcctgttctttttctgctgtcactgtcaatctgctatatttttcactatcctattaaaatattactgtcttctttatctgttcaatnnnnnnnnnnnnnnnnnntcttccttgtatgagctattctgatctaagtaatttctctgacatttctctgtatggctcccacaaccatttcattgttgttagcatatctatttctccatacattgtaaaactgtaatctttaggtctttctaaaacataaaaaggagaattaagtcagctgcagaacaatggggctgattcttctgctttttctctggaaaatctttcattgcttttggcggaaatttacctagaggttacaaccacaggctgtagcttggtctcttatttgcctttttgggaaaccaattaagattaatacaggataaaggaaaaaagcaatctattcattatataacacagttgtttgtattacttgttccctgcaaaggaaatctgttgaatgcttgcattttgaattcttttgtaatagaacaaccaaaaaaggcttcttatggtgcagcaggaaaaaagatcatttttatagctttgcattcttaacatagcatttaaagaatggcatgaattagaggaaagacatggaacacacaggtagtcagtttgagatcatcggcttaaaagtctcctaggatggtaatgacccagaagtatttccagttgtctagtggtgtggtatgcaggaatgagaagtgttttctttccatttcctgttggacaggtggcaatcttagcagagccattatttggagttgataactaaagacgcaaataacatgactatgtcttctggtcatcctgggactatttggagttccccaaaaccttataagaggcatgtcaggcatgcagtaaaagcatctacaacttcagctgggcactggcagcataggtctcatcttggaccatacagtcccactttatagaagagggtggaagttctccaaaaccagatccacaacaaggtctgacctcactctgagggagatgggaagtgggagggagaaggactaacccgctccctggagtaagaggaatttgctttccctgtttccccaccagggggctgtatgtgccacctttcaggttggggccaaggaagtgatgtcagtgtgacagaagggagttagacctccagacatcagcctccctcccagggggtacattttcaatctgagtgttattggcttagctgtgttggtattactttgattggatggtccgctggtt

SEQ ID NO: 21354 - DNA, 1971 bp, Macaca Mulatta
  misc_feature (1)...(1971): n = A,T,C or G
tggttcctatgtagctctcactgttcagggacgcccacctgggtcgccccagattccacttgccgactctgaagtagagccatcagtcattggacatatgtctcccatcatgacatctcctcattcacctggagcatctgggaatatggagagaatcactagtcctgtgctcatgggggnnnnnnnnnnnnnnnnnnnnnnnnnnnnnnnnnnnnnnnnnnnnnnnnnnnnnnnnnnnnnnnnnnnnnnnnnnnnnnnnnnnnnnnnnnnnnnnnnnnnnnnnnnnnnnnnnnnnnnnnnnnnnnnnnnnnnnnnnnnnnnnnnnnnnnnnnnnnnnnnnnnnnnnnnnnnnnnnnnnnnnnnnnnnnnnnnnnnnnnnnnnnnnnnnnnnnnnnnnnnnnnnnnnnnnnnnnnnnnnnnnnnnnnnnnnnnnnnnnnnnnnnnnnnnnnnnnnnnnnnnnnnnnnnnnnnnnnnnnnnnnnnnnnnnnnnnnnnnnnnnnnnnnnnnnnnnnnnnnagtcccaagagtggccccaaagagaggatttatctagaggaaaacccagagaaaagtgaaacaattcaggacactnnnnnnnnnnnnnnnnnnnnnnnnnnnnnnnnnnnnnnnnnnnnnnnnnnnnnnnnnnnnnnnnnnnnnnnnnnnnnnnnnnnnnnnnnnnnnnnnnnnnnnnnnnnnnnnnnnnnnnnnnnnnnnnnnnnnnnnnnnnnnnnnnnnnnnnnnnnnnnnnnnnnnnnnnnnnnnnnnnnnnnnnnnnnnnnnnnnnnnnnnnnnnnnnnnnnnnnnnnnnnnnnnnnnnnnnnnnnnnnnnnnnnnnnnnnnnnnnnnnnnnnnnnnnnnnnnnnnnnnnnnnnnnnnnnnnnnnnnnnnnnnnnnnnnnnnnnnnnnnnnnnnnnnnnnnnnnnnnnnnnnnnnnnnnnnnnnnnnnnnnnnnnnnnnnnnnnnnnnnnnnnnnnnnnnnnnnnnnnnnnnnnnnnnnnnnnnnnnnnnnnnnnnnnnnnnnnnnnnnnnnnnnnnnnnnnnnnnnnnnnnnnnnnnnnnnnnnnnnnnnnnnnnnnnnnnnnnnnnnnnnnnnnnnnnnnnnnnnnnnnnnnnnnnnnnnnnnnnnnnnnnnnnnnnnnnnnnnnnnnnnnnnnnnnnnnnnnnnnnnnnnnnnnnnnnnnnnnnnnnnnnnnnnnnnnnnnnnnnnnnnnnnnnnnnnnnnnnnnnnnnnnnnnnnnnnnnnnnnnnnnnnnnnnnnnnnnnnnnnnnnnnnnnnnnnnnnnnnnnnnnnnnnnnnnnnnnnnnnnnnnnnnnnnnnnnnnnnnnnnnnnnnnnnnnnnnnnnnnnnnnnnnnnnnnnnnnnnnnnnnnnnnnnnnnnnnnnnnnnnnnnnnnnnnnnnnnnnnnnnnnnnnnnnnnnnnnnnnnnnnnnnnnnnnnnnnnnnnnnnnnnnnnnnnnnnnnnnnnnnnnnnnnnnnnnnnnnnnnnnnnnnnnnnnnnnnnnnnnnnnnnnnnnnnnnnnnnnnnnnnnnnnnnnnnnnnnnnnnnnnnnnnnnnnnnnnnnnnnnnnnnnnnnnnnnnnnnnnnnnnnnnnnnnnnnnnnnnnnnnnnnnnnnnnnnnnnnnnnnnnnnnnnnnnnnnnnnnnnnnnnnnnnnnnnnnnnnnnnnnnnnnnnnnnnnnnnnnnnnnnnnnnnnnnnnnnnnnnnnnnnnnnnnnnnnnnnnnnnnnnnnnnnnnnnnnnnnnnnnnnnnnnnnnnnnnnnnnnnnnnnnnnnnnnnnnnnnnnnnnnnnnnnnnnnnnnnnnnnnnnnnnntttgacagtgtagcttttggagaaagtcaaagtgaggatgaacaatttgaaaacgacttagagacagatccacccaactggcagcagcttgttagtcgagaagtgttattgggactaaaaccttgtgagatcaaaagacaggaagtgattaatg

SEQ ID NO: 21355 - DNA, 3070 bp, Macaca Mulatta
  misc_feature (1)...(3070): n = A,T,C or G
gttaactttgaggaatttaaagaaggttttgtggctgtgttgtcatcaaatgctggtgttcgcccctcagatgaagacagtagttctttggaatcagncagctgcctccagtgccatccctccaaagtatgtgaatggttctaagtggtacggccgtcggagccggcccgagctatgtgacactgccacagaagccagacacgtgcccgagcagcaaacccaggccagcctgnnnnnnnnnnnnnnnnnnnnnnnnnnnnnnnnnnnnnnnnnnnnnnnnnnnnnnnnnnnnnnnnnnnnnnnnnnnnnnnnnnnnnnnnnnnnnnnnnnnnnnnnnnnnnnnnnnnnnnnnnnnnnnnnnnnnnnnnnnnnnnnnnnnnnnnnnnnnnnnnnnnnnnnnnnnnnnnnnnnnnnnnnnnnnnnnnnnnnnnnnnnnnnnnnnnnnnnnnnnnnnnnnnnnnnnnnnnnnnnnnnnnnnnnnnnnnnnnnnnnnnnnnnnnnnnnnnnnnnnnnnnnnnnnnnnnnnnnnnnnnnnnnnnnnnnnnnnnnnnnnnnnnnnnnnnnnnnnnnnnnnnnnnnnnnnnnnnnnnnnnnnnnnnnnnnnnnnnnnnnnnnnnnnnnnnnnnnnnnnnnnnnnnnnnnnnnnnnnnnnnnnnnnnnnnnnnnnnnnnnnnnnnnnnnnaggtcccagaggagagcggctgccacaccaccacgacctcatccctcgtgtccctgtgctccagcctgcgcctcttctccagcattgacgatggttctggcttcgcttttcctgatcaggtcctggccatgtggacccaagaggggattcagaatggcagggagatcttgcagnnnnnnnnnnnnnnnnnnnnnnnnnnnnnnnnnnnnnnnnnnnnnnnnnnnnnnnnnnnnnnnnnnnnnnnnnnnnnnnnnnnnnnnnnnnnnnnnnnnnnnnnnnnnnnnnnnnnnnnnnnnnnnnnnnnnnnnnnnnnnnnnnnnnnnnnnnnnnnnnnnnnnnnnnnnnnnnnnnnnnnnnnnnnnnnnnnnnnnnnnnnnnnnnnnnnnnnnnnnnnnnnnnnnnnnnnnnnnnnnnnnnnnnnnnnnnnnnnnnnnnnnnnnnnnnnnnnnnnnnnnnnnnnnnnnnnnnnnnnnnnnnnnnnnnnnnnnnnnnnnnnnnnnnnnnnnnnnnnnnnnnnnnnnnnnnnnnnnnnnnnnnnnnnnnnnnnnnnnnnnnnnnnnnnnnnnnnnnnnnnnnnnnnnnnnnnnnnnnnnnnnnnnnnnnnnnnnnnnnnnnnnnnnnnnnnnnnnnnnnnnnnnnnnnnnnnnnnnnnnnnnnnnnnnnnnnnnnnnnnnnnnnnnnnnnnnnnnnnnnnnnnnnnnnnnnnnnnnnnnnnnnnnnnnnnnnnnnnnnnnnnnnnnnnnnnnnnnnnnnnnnnnnnnnnnnnnnnnnnnnnnnnnnnnnnnnnnnnnnnnnnnnnnnnnnnnnnnnnnnnnnnnnnnnnnnnnnnnnnnnnnnnnnnnnnnnnnnnnnnnnnnnnnnnnnnnnnnnnnnnnnnnnnnnnnnnnnnnnnnnnnnnnnnnnnnnnnnnnnnnnnnnnnnnnnnnnnnnnnnnnnnnnnnnnnnnnnnnnnnnnnnnnnnnnnnnnnnnnnnnnnnnnnnnnnnnnnnnnnnnnnnnnnnnnnnnnnnnnnnnnnnnnnnnnnnnnnnnnnnnnnnnnnnnnnnnnnnnnnnnnnnnnnnnnnnnnnnnnnnnnnnnnnnnnnnnnnnnnnnnnnnnnnnnnnnnnnnnnnnnnnnnnnnnnnnnnnnnnnnnnnnnnnnnnnnnnnnnnnnnnnnnnnnnnnnnnnnnnnnnnnnnnnnnnnnnnnnnnnnnnnnnnnnnnnnnnnnnnnnnnnnnnnnnnnnnnnnnnnnnnnnnnnnnnnnnnnnnnnnnnnnnnnnnnnnnnnnnnnnnnnnnnnnnnnnnnnnnnnnnnnnnnnnnnnnnnnnnnnnnnnnnnnnnnnnnnnnnnnnnnnnnnnnnnnnnnnnnnnnnnnnnnnnnnnnnnnnnnnnnnnnnnnnnnnnnnnnnnnnnnnnnnnnnnnnnnnnnnnnnnnnnnnnnnnnnnnnnnnnnnnnnnnnnnnnnnnnnnnnnnnnnnnnnnnnnnnnnnnnnnnnnnnnnnnnnnnnnnnnnnnnnnnnnnnnnnnnnnnnnnnnnnnnnnnnnnnnnnnnnnnnnnnnnnnnnnnnnnnnnnnnnnnnnnnnnnnnnnnnnnnnnnnnnnnnnnnnnnnnnnnnnnnnnnnnnnnnnnnnnnnnnnnnnnnnnnnnnnnnnnnnnnnnnnnnnnnnnnnnnnnnnnnnnnnnnnnnnnnnnnnnnnnnnnnnnnnnnnnnnnnnnnnnnnnnnnnnnnnnnnnnnnnnnnnnnnnnnnnnnnnnnnnnnnnnnnnnnnnnnnnnnnnnnnnnnnnnnnnnnnnnnnnnnnnnnnnnnnnnnnnnnnnnnnnnnnnnnnnnnnnnnnnnnnnnnnnnnnnnnnnnnnnnnnnnnnnnnnnnnnnnnnnnnnnnnnnnnnnnnnnnnnnnnnnnnnnnnnnnnnnnnnnnnnnnnnnnnnnnnnnnnnnnnnnnnnnnnnnnnnnnnnnnnnnnnnnnnnnnnnnnnnnnnnnnnnnnnnnnnnnnnnnnnnnnnnnnnnnnnnnnnnnnnnnnnnnnnnnnnnnnnnnnnnnnnnnnnnnnnnnnnnnnnnnnnnnnnnnnnnnnnnnnnnnnnnnnnnnnnnnnnnnnnnnnnnnnnnnnnnnnnnnnnnnnnnnnnnnnnnnnnnnnnnnnnnnnnnnnnnnnnnnnnnnnnnnnnnnnnnnnnnnnnnnnnnnnnnnnnnnnnnnnnnnnnnnnnnnnnnnnnnnnnnnnnnnnnnnnnnnntccagctcgcggacccaggggcttccaggcaggagcagcttgccgccccggaagagggagagaccaaaacagcgctggagagagagaaggatgacatggaaaccaaacttctacatctggaagacgtcgtccgggctctggagaaacatgtagatttgagagagaatgaca

SEQ ID NO: 21356 - DNA, 1888 bp, Macaca Mulatta
  misc_feature (1)...(1888): n = A,T,C or G
tgttgaaattgggaagattaaaagaagccagtgaagtgttcaaaaacttgattgatcggaatgcagaaaattggtgttattatgaaggcttggannnnnnnnnnnnnnnnnnnnnnnnnnnnnnnnnnnnnnnnnnnnnnnnnnnnnnnnnnnnnnnnnnnnnnnnnnnnnnnnnnnnnnnnnnnnnnnnnnnnnnnnnnnnnnnggtgaaagatttagagaactaatggataagttcctgagggttaacttcagtaaaggatgcccacccttgtttactactttgaaatctttatattacaatnnnnnnnaggtttctataatccaggaacttgttactaattatgaagcctctcttaaaacgtgtgacttttttagcccatatnnntggggagaaggaacccccgacaacactactttgggttcagtatttcctggcacagcactttgataaacttggacagtattctctggctttggattatattaatgctgcaattgctagtactccaactctaatagaattattctatatgaaggcaaaaatttacaagnnnnnnnnnnnnnnnnnnnnnnnnnnnnnnnnnnnnnnnnnnnnnnnnnnnnnnnnnnnnnnnnnnnnnnnnnnnnnnnnnnnnnnnnnnnnnnnnnnnnnnnnnnnnnnnnnnnnnnnnnnnnnnnnnnnnnnnnnnnnnnnnnnnnnnnngaagggacatctgccatggaaaatctaaatgaaatgcagtgtatgtggtttcagacagaatgcatttcagcttatcagcgtctggggagatacggggatgccttgaaaaaatgtcatgaagtagaaaggnnnnnnnnnnnnnnnnnnnnnnnnnnnnnnnnnnnnnnnnnnnnnnnnnnnnnnnnnnnnnnnnnnnnnnnnnnnnnnnnnnnnnnnnnnnnnnnnnnnnnnnnnnnnnnnnnnnnnnnnnnnnnnnnnnnnnnnnnnnnnnnnnnnnnnnnnnnnnnnnnnnnnnnnnnnnnnnnnnnnnnnnnnnnnnnnnnnnnnnnnnnnnnnnnnnngaaaacctgtcagccaaagaattgaagaaaatgcttagcaagnnnnnnnnnnnnnnnnnnnnnnnnnnnnnnnnnnnnnnnnnnnnnnnnnnnnnnnnnnnnnnnnnnnnnnnnnnnnnnnnnnnnnnnnnnnnnnnnnnnnnnnnnnnnncagtggccttaaggaagaacttatacctgaaaaattagaaagggtnnnnnnnnnnnnnnnnnnnnnnnnnnnnnnnnnnnnnnnnnnnnnnnnnnnnnnnnnnnnnnnnnnnnnnnnnnnnnnnnnnnnnnnnnnnnnnnnnnnnnnnnnnnnnnnnnnnnnnnnnnnnnnnnnnnnnnnnnnnnnnnnnnnnnnnnnnnnnnnnnnnnnnnnnnnnnnnnnnnnnnnnnnnnnnnnnnnnnnnnnnnnnnnnnnnnnnnnnnnnnnnnnnnnnnnnnnnnnnnnnnnnnnnnnnnnnnnnnnnnnnnnnnnnnnnnnnnnnnnnnnnnnnnnnnnnnnnnnnnnnnnnnnnnnnnnnnnnnnnnnnnnnnnnnnnnnnnnnnnnnnnnnnnnnnnnnnnnnnnnnnnnnnnnnnnnnnnnnnnnnnnnnnnnnnnnnnnnnnnnnnnnnnnnnnnnnnnnnnnnnnnnnnnnnnnnnnnnnnnnnnnnnnagacattaataaaggtttctgaagcactgcttgatggcagctttgggaactgtagttcccaatatgaagaatataggatggcctgtcataacctgcttccttttacatctgccttcttgcctgctgtgaatgaagttgacaatcctaatgtggcactgaaccatacagctaattatgatgtcttggcaaatgaaatttg

SEQ ID NO: 21357 - DNA, 1580 bp, Macaca Mulatta
cctggcgcccccctgttcccctgagccagcaggaatggccgcagaggtggccctgattgagtcagccaaggatcagaaagcggcgaacccatacgtcacgcccaataaccgctacggctaccagaacggtgccagctacacctggcagttcgaggcccgcaaggcgcagatcctcaagtgcatggagtgcggcagctcccacgacaccctgcagcagctcaccgcccacatgatggtcaccgggcacttcctgaaagtgaccacctcagcctcaaagaagggcaagcagctggtgctggaccccgtggtggaagagaagatccagtccatccccctgccgcccaccacccacacgcggctgccggcctccagcatcaaaaagcagcccgagtctcccgcagggtccacagcttcggaagacaagaaagagccggagaaggagaagccgcccgtggctggtgatgcggagaagatcaaggaggagagtgaggacagctcggagaaatttgagcccagcaccctgtacccctacctgcgcgaggaggacctggacgacagccccaagggagggctggacattctcaagtccctggagaataccgtctccacggccattagcaaagcccagaatggcgcaccctcgtggggtggttaccccagcatccacgcggcctaccagctgccgggcaccgtgaagccactcccggcggccgtgcagagtgtgcaggtgcagccgtcctatgctggcggcgtgaagtcgctgtcttccaccgagcacaacgccctcctgcactcgccggggagcctcacgcccccaccgcacaagagcaatgtgtctgccatggaggagctggtggagaaggtcacgggcaaggtcagcatcaagaaggaggagaggccccctgagaaggagaagagctccccggccaaagctgcgtcccccgtagcaaaagagaataaagatttccctaaaacggaggaagtcagcggcaaacagcagaagaagggccctgaggccgagactgggaaggccaaaaaggagggaccgctggacgttcacaccccaaacggcacagagcctctcaaagcaaaggtcaccaacggctgtaacaacctggggatcatcaccgaccactcgccagagccttccttcatcaaccctctgagcgctttgcagtccatcatgaacacccacctgggcaaggtgtccaagcccgtgggcgcctcgctggacccgctggccatgctctacaagatcagcaacagcatgctggacaggccggcgcgccccgctgccccggtgaagcaggccgacgccatcgaccgctactactacgaaaacagcgaccagcccattgacttaaccaagtccaagaacaagccgctggggtccggcatggccgatccagtggcgtcacctctgcgggagagcgcgcttatggacatctctgacatggtaaaaaatctcacaggccgcctgacgcccaagtcctccacgccctctacagtgtcggagaagtctgatgctgatggcagcagctttgaggaggcactggatgagctgtcaccggtccacaaga

SEQ ID NO: 21358 - DNA, 798 bp, Macaca Mulatta
  misc_feature (1)...(798): n = A,T,C or G
gctacagacactgccaggagattaacctcattctttaaaagaatagnnnnnnnnnnnnnnnnnnnnnnnnnnnnnnnnnnnnnnnnnnnnnnnnnnnnnnnnnnnnnnnnnnnnnnnnnnnnnnnnnnnnnnnnnnnnnnnnnnnnnnnnnnnnnnnnnnnnnnnnnnnnnnnnnnnnnnnnnnnnnnnnnnnnnnnnnnnnnnnnnnnnnnnnnnnnnnnnnnnnnnnnnnnnnnnnnnnnnnnnnnnnnnnnnnnnnnnnnnnnnnnnnnnnnnnnnnnnnnnnnnnnnnnnnnnnnnnnnnnnnnnnnnnnnnnnnnnnnnnnnnnnnnnnnnnnnnnnnnnnnnnnnnnnnnnnnnnnnnnnnnnnnnnnnnnnnnnnnnnnnnnnnnnnnnnnnnnnnnnnnnnnnnnnnnnnnnnnnnnnnnnnnnnnnnnnnnnnnnnnnnnnnnnnnnnnnnnnnnnnnnnnnnnnnnnnnnnnnnnnnnnnnnnnnnnnnnnnnnnnnnnnnnnnnnnnnnnnnnnnnnnnnnnnnnnnnnnnnnnnnnnnnnnnnnnnnnnnnnnnnnnnnnnnnnnnnnnnnnnnnnnnnnnnnnnnnnnnnnnnnnnnnnnnnnnnnnnnnnnnnnnnnnnnnnnnggaacaaggacttccaggaggtgaccctggagaaggagggccaggtgctgctgcacttcgcgatggcgtacggcttccgcaacatccagaacctggtgcagaggctcaaacgcgggcactgcccctaccactacgtggaggtcatggcctgcccctcagg

SEQ ID NO: 21359 - DNA, 2281 bp, Macaca Mulatta
  misc_feature (1)...(2281): n = A,T,C or G
gtctgcggacggccagtcacccccattgcccagaatcagacgaccctccgttcttccagagcgaagctgggcaacttcccctggcaagccttcaccagtatccatggccgtgggggcggggccctgctgggtgacagatggatcctcactgctgcccacaccatctaccccaaggacagtgtttctctcaggaagaaccggagcgtgaatgtgttcctgggccacacagccatagatgagatgctgaaactggggaaccaccctgtccgccgtgtcattgtgcaccccgactaccgtcagaatgagtcccacaacttcagcggggacatcgccctcctggagctgcagcacagcatcccgctgggccccaacatcctcccggtctgtctgcccgataatgagaccctctaccgcagcggcttgctgggctacgtcagtgggtttggcgtggagatgggctggctaactactgagttgaaatactccaggctgcctgtagctcccagggaggcctgtgaggcctggctccaaaagagacagaggcccgaggtgttttctgacgatatgttctgtgttggggacgagacgcagcggcacagtgtctgccagggggacagtggcagcgtctatgtggtatgggacgatcgtgcccatcactgggtggccacgggcattgtgtcctggggcatagggtgtggcgaagggtatgacttctacaccaaagtgctcagctacgtggactgaatcaagggagtgatgaacggcaagaactgaccctggggtgcttggacagtgactgaccagcacagnnnnnnnnnnnnnnnnnnnnnnnnnnnnnnnnnnnnnnnnnnnnnnnnnnnnnnnnnnnnnnnnnnnnnnnnnnnnnnnnnnnnnnnnnnnnnnnnnnnnnnnnnnnnnnnnnnnnnnnnnnnnnnnnnnnnnnnnnnnnnnnnnnnnnnnnnnnnnnnnnnnnnnnnnnnnnnnnnnnnnnnnnnnnnnnnnnnnnnnnnnnnnnnnnnnnnnnnnnnnnnnnnnnnnnnnnnnnnnnnnnnnnnnnnnnnnnnnnnnnnnnnnnnnnnnnnnnnnnnnnnnnnnnnnnnnnnnnnnnnnnnnnnnnnnnnnnnnnnnnnnnnnnnnnnnnnnnnnnnnnnnnnnnnnnnnnnnnnnnnnnnnnnnnnnnnnnnnnnnnnnnnnnnnnnnnnnnnnnnnnnnnnnnnnnnnnnnnnnnnnnnnnnnnnnnnnnnnnnnnnnnnnnnnnnnnnnnnnnnnnnnnnnnnnnnnnnnnnnnnnnnnnnnnnnnnnnntgccaggtgcctcacctgttatttcactgaatcctcatagcatatttgcaaaggatgtgttattcatgtatgacagatgaagaaactgaagctcacgggatagaggactgccccaaatccctcagctggtatgtgactgtagagactgtgctcttccccagtgtgccaccatacttctcaactctcctctgacctgctatgtcacnnnnnnnnnnnnnnnnnccccacatcctgaccattgtccctccctgggaattcctgcttctgtgaaaatggcgtcttctggctcacactttcctgatggccccatctcctgcagaagccaggtgagcccagcactggactgaagttcccgcggacaccccacctgtgcctccatcatcaagggaactgctccacctgagaggaccaacgctttaatttttagtaaagactggaggtgatgggccgggcgcggtggctcacgcctgtaatcccagcactttcagaggccgaggtgggcagatcacaaggtgaggagctccagaccatcctggccaacacagtgaaaccccatctctactaaaaatgcaaaaattagctgggtgtggtggtgggcgcctgtagtcccagctacttgggaggctgaggcaggagaatggcgtgaattcagaaggtggaggttgaagtgagccgagatcgtgcgactgcactccagcctggcgacagagcaagactnnnnnnnnnnnnnnnnnnnnnnattggaggtgatttacagtgaaagacacaaaatacaactattcaatggaaatagaaaataaacacaataaaagacagataatttgttagcatcaagagtcacgttgctactatgatcaaaggttaaatgtatctctaaaaaaaatggcaggattcgaagttgtacatacatgtggttacttctgtttttaacacccaccaccacagtacaagagattatttgaaatattcccaaaagg

SEQ ID NO: 21360 - DNA, 815 bp, Macaca Mulatta
  misc_feature (1)...(815): n = A,T,C or G
ggctcttttccgtggcgcctcggaggcgttcagctgcttcaagatgaagctgaacatctccttcccagccactggctgccagaaactcattgaagtggacgatgaacgcaaacttcgtactttttatgagaagcgtatggccacagaagttgctgctgacgctctgggtgaagaatggaagggttatgtggtccgaatcagtggtgggaacgacaaacaaggttccccatgaagcagggtgtcttgacccatgggccgtgtccgcctgctactgagtaaaggggcatttcctgtttacgaaccaggggaaaccggggggaaagaaggagaaaatccgtttccggggttggcctttggtggaagcccaacctgaaccgttttcccaactttgggttnnnnnnnnnnnnnnnnnnnnnnnnngggatttttccccgggaactggactgaaatactaccgggttttctttggccccccttgggggnnnnnnnnnnnnnnnnnnnnnncccaaaaaaccccgcnnnnnnnnnnnnnnnnnnnnnnnnnnnnnnnnnnnnnnnnnnnnnnnnnnnnnnnnnnncatannnnnnnnnnnnnnnnnnnnnnnnnnnnnnnnnnnnnnnnnnnnnnnnnnnnnnnnnnnnnnnnnnnttggggaaccacaaaaacccccccccaaagaaatattccccccgcccccccttggtttaccccccccccccggtgttttccccgggnnnnnnnnnnnnnnnnnnnnnnnnnnnnnnttatatttgcgccccnnnnnnnnnnnnnnnnnnnnnncgctttattattt

SEQ ID NO: 21361 - DNA, 1006 bp, Macaca Mulatta
ggggtggggcaggcgtgatgctgaggcgtgagtatggcgtctcgcggccggcgtccggagcacggtggaccaccggagctgttttatgatgagaaagaagcccggaaatacgttcgcaactcacggatgattgatatccagaccaggatggctgggcgagcactggagcttctttatctgccagagaataagccctgttacctgctggatattggctgtggcactgggctgagtggaagttatctctcagatgaagggcactattgggtgggcctggatatcagccctgccatgctggatgaagccgtggaccgagagatagagggagacctactcctgggggatatgggccagggcatcccattcaagccgggcacatttgacggttgcatcagcatttctgctgtgcagtggctgtgtaatgctaacaagaagtctgaaaaccctgccaagcgcctgtactgcttttttgcttctcttttttctgttctcgtcccggggatcccgagctgtcctgcagctatacccctgagaactcagagcagttggagctgattcacaacccaggccacaaaggcgggctttctccggtggcatggtggtggactacccttaacagtgccaaagcaaagaaattctacctctgcttgttttctgggccttcgaactttataccagaggggctgagtgaaaatcacgatgaagatgaacccaggagtctgtgtttccccaattgaaagagggtcccttcagatgtccggcgggatgtaagaaaaccggctggtgctgagaaaagacggcaggccaggcggatcgacgaaccataacggcgaagaaccgtttatacacgttggaggtgttctcttcttgccccaccttaagtatccattggtaaaaaggcgcgccttatgttgtactctctccttcttcttctcctcttcccctcccttttcttctctttcactaccacaagaaaaccaaaatagacagaaaaaagaacaaaaga

SEQ ID NO: 21362 - DNA, 158 bp, Macaca Mulatta
  misc_feature (1)...(158): n = A,T,C or G
aggtgagtgtgaatggacagcactttctccacttccgctaccggctcccactgtctcatgtggacacgctgggcatatttggtgannnnnnnnnnnnnnnnnnnnnnnnnnnnnnnnnnnnccattcgtggagggcagcagagagtacccagctggac

SEQ ID NO: 21363 - DNA, 768 bp, Macaca Mulatta
gaaaggtcagcctgaggcacctgcacaactcctggatgcagagggcgctgtcaaaataggctctgaaaaatctctgcaccttgaagtggggatcacttcaatagtctctgacaatactgggcaggaggagtctggggaaaactctgtaccccaggagatggaaggcaaacctgtgctctctggggaagctgcagaagcagtgcactcaggtacatctgtaaagtcatctagtggccccttccctcctgctccagaaggccttactgcaccagaaattgaaccagaaggggaagcaacagctgaataaggtttgatgaagccaggtaagaaaatcaggtatttccattacaaattgcgtttcaggtgacatctgtatttcaggttgccatctatgtaggctccctgcagattggtcagtctttattttcaatagattattttaaaatgccaaagctatttaaaggctttgttgtatttgagattctactactatgacaggagtgattttaaagtgacgtccccagagcctggcctcagtttggtcatccagcacttttgtgttattcttttggacatattatgtagtcagcaacaatatagcctgttgtcaggtacaaaatatattcatgtgatccgaataggttgattgcaaaactgcaattagagggtgttggtttgaaattttcctcttgtgaatctaaaattaaactacagcaatgcatttacataggctgtggcattttaaaaagtgaaaaaatggtggcgtgt

SEQ ID NO: 21364 - DNA, 3255 bp, Macaca Mulatta
  misc_feature (1)...(3255): n = A,T,C or G
tgatcctgctccgcctggagggggccatagaagccgttgagctgcctggagacgaccgcggtgtcaccaagccagggannnnnnnnnnnnnnnnnnnnnnnnnnnnnnnnnnnnnnnnnnnnnnnnnnnnnnnnnnnnnnnnnnnnnnnnnnnnnnnnnnnnnnnnnnnnnnnnnnnnnnnnnnnnnnnnnnnnnnnnnnnnnnnnnnnnnnnnnnnnnnnnnnnnnnnnnnnnnnnnnnnnnnnnnnnnnnnnnnnnnnnnnnnnnnnnnnnnnnnnnnnnnnnnnnnnnnnnnnnnnnnnnnnnnnnnnnnnnnnnnnnnnnnnnnnnnnnnnnnnnnnnnnnnnnnnnnnnnnnnnnnnnnnnnnnnnnnnnnnnnnnnnnnnnnnnnnnnnnnnnnnnnnnnnnnnnnnnnnnnnnnnnnnnnnnnnnnnnnnnnnnnnnnnnnnnnnnnnnnnnnnnnnnnnnnnnnnnnnnnnnnnnnnnnnnnnnnnnnnnnnnnnnnnnnnnnnnnnnnnnnnnnnnnnnnnnnnnnnnnnnnnnnnnnnnnnnnnnnnnnnnnnnnnnnnnnnnnnnnnnnnnnnnnnnnnnnnnnnnnnnnnnnnnnnnnnnnnnnnnnnnnnnnnnnnnnnnnnnnnnnnnnnnnnnnnnnnnnnnnnnnnnnnnnnnnnnnnnnnnnnnnnnnnnnnnnnnnnnnnnnnnnnnnnnnnnnnnnnnnnnnnnnnnnnnnnnnnnnnnnnnnnnnnnnnnnnnnnnnnnnnnnnnnnnnnnnnnnnnnnnnnnnnnnnnnnnnnnnnnnnnnnnnnnnnnnnnnnnnnnnnnnnnnnnnnnnnnnnnnnnnnnnnnnnnnnnnnnnnnnnnnnnnnnnnnnnnnnnnnnnnnnnnnnnnnnnnnnnnnnnnnnnnnnnnnnnnnnnnnnnnnnnnnnnnnnnnnnnnnnnnnnnnnnnnnnnnnnnnnnnnnnnnnnnnnnnnnnnnnnnnnnnnnnnnnnnnnnnnnnnnnnnnnnnnnnnnnnnnnnnnnnnnnnnnnnnnnnnnnnnnnnnnnnnnnnnnnnnnnnnnnnnnnnnnnnnnnnnnnnnnnnnnnnnnnnnnnnnnnnnnnnnnnnnnnnnnnnnnnnnnnnnnnnnnnnnnnnnnnnnnnnnnnnnnnnnnnnnnnnnnnnnnnnnnnnnnnnnnnnnnnnnnnnnnnnnnnnnnnnnnnnnnnnnnnnnnnnnnnnnnnnnnnnnnnnnnnnnnnnnnnnnnnnnnnnnnnnnnnnnnnnnnnnnnnnnnnnnnnnnnnnnnnnnnnnnnnnnnnnnnnnnnnnnnnnnnnnnnnnnnnnnnnnnnnnnnnnnnnnnnnnnnnnnnnnnnnnnnnnnnnnnnnnnnnnnnnnnnnnnnnnnnnnnnnnnnnnnnnnnnnnnnnnnnnnnnnnnnnnnnnnnnnnnnnnnnnnnnnnnnnnnnnnnnnnnnnnnnnnnnnnnnnnnnnnnnnnnnnnnnnnnnnnnnnnnnnnnnnnnnnnnnnnnnnnnnnnnnnnnnnnnnnnnnnnnnnnnnnnnnnnnnnnnnnnnnnnnnnnnnnnnnnnnnnnnnnnnnnnnnnnnnnnnnnnnnnnnnnnnnnnnnnnnnnnnnnnnnnnnnnnnnnnnnnnnnnnnnnnnnnnnnnnnnnnnnnnnnnnnnnnnnnnnnnnnnnnnnnnnnnnnnnnnnnnnnnnnnnnnnnnnnnnnnnnnnnnnnnnnnnnnnnnnnnnnnnnnnnnnnnnnnnnnnnnnnnnnnnnnnnnnnnnnnnnnnnnnnnnnnnnnnnnnnnnnnnnnnnnnnnnnnnnnnnnnnnnnnnnnnnnnnnnnnnnnnnnnnnnnnnnnnnnnnnnnnnnnnnnnnnnnnnnnnnnnnnnnnnnnnnnnnnnnnnnnnnnnnnnnnnnnnnnnnnnnnnnnnnnnnnnnnnnnnnnnnnnnnnnnnnnnnnnnnnnnnnnnnnnnnnnnnnnnnnnnnnnnnnnnnnnnnnnnnnnnnnnnnnnnnnnnnnnnnnnnnnnnnnnnnnnnnnnnnnnnnnnnnnnnnnnnnnnnnnnnnnnnnnnnnnnnnnnnnnnnnnnnnnnnnnnnnnnnnnnnnnnnnnnnnnnnnnnnnnnnnnnnnnnnnnnnnnnnnnnnnnnnnnnnnnnnnnnnnnnnnnnnnnnnnnnnnnnnnnnnnnnnnnnnnnnnnnnnnnnnnnnnnnnnnnnnnnnnnnnnnnnnnnnnnnnnnnnnnnnnnnnnnnnnnnnnnnnnnnnnnnnnnnnnnnnnnnnnnnnnnnnnnnnnnnnnnnnnnnnnnnnnnnnnnnnnnnnnnnnnnnnnnnnnnnnnnnnnnnnnnnnnnnnnnnnnnnnnnnnnnnnnnnnnnnnnnnnnnnnnnnnnnnnnnnnnnnnnnnnnnnnnnnnnnnnnnnnnnnnnnnnnnnnnnnnnnnnnnnnnnnnnnnnnnnnnnnnnnnnnnnnnnnnnnnnnnnnnnnnnnnnnnnnnnnnnnnnnnnnnnnnnnnnnnnnnnnnnnnnnnnnnnnnnnnnnnnnnnnnnnnnnnnnnnnnnnnnnnnnnnnnnnnnnnnnnnnnnnnnnnnnnnnnnnnnnnnnnnnnnnnnnnnnnnnnnnnnnnnnnnnnnnnnnnnnnnnnnnnnnnnnnnnnnnnnnnnnnnnnnnnnnnnnnnnnnnnnnnnnnnnnnnnnnnnnnnnnnnnnnnnnnnnnnnnnnnnnnnnnnnnnnnnnnnnnnnnnnnnnnnnnnnnnnnnnnnnnnnnnnnnnnnnnnnnnnnnnnnnnnnnnnnnnnnnnnnnnnnnnnnnnnnnnnnnnnnnnnnnnnnnnnnnnnnnnnnnnnnnnnnnnnnnnnnnnnnnnnnnnnnnnnnnnnnnnnnnnnnnnnnnnnnnnnnnnnnnnnnnnnnnnnnnnnnnnnnnnnnnnnnnnnnnnnnnnnnnnnnnnnnnnnnnnnnnnnnnnnnnnnnnnnnnnnnnnnnnnnnnnnnnnnnnnnnnnnnnnnnnnnnnnnnnnnnnnnnnnnnnnnnnnnnnnnnnnnnnnnnnnnnnnnnnnnnnnnnnnnnnnnnnnnnnnncacccacttacccctggcgggacacagacacgggggagtggctggtgtgtgcccagtgccccccaggcacctttgtgcagcagccctgccgccgagacagccccacgacgtgtggcccgtgtcctccacgccactacacgcagttctggaactacctggaaaggtgccgctactgcaacgtcctctgcggggagc

SEQ ID NO: 21365 - DNA, 960 bp, Macaca Mulatta
  misc_feature (1)...(960): n = A,T,C or G
cagcgtggacagaacggccggacgcccagtcctgggctggcggctgagggcacagcctcacagggcaagagggcatgcaacacctgcatctttctggcataagaacctcaagaaaaccaaaggaatatacggctgtgttctttggagccacagaaagctctgttcacatggcagtcactgaaagattaagggagccnnnnnnnnnnnnnnnnnnnngtttctttctcccctgtttttaaagattatttaaaatgcctagagacaccctgggatccagtgctggacaaatgatgcaggnnnnnnnnnnnnnnnnnnnnnnnnnnnnnnnnnnnnnnnnnnnnnnnnnnnnnnnnnnnnnnnnnnnnnnnnnnnnnnnnnnnnnnnnnnnnnnnnnnnnnnnnnnnnnnnnnnnnnnnnnnnnnnnnnnnnnnnnnnnnnnnnnnnnnacatgtaggtgtgtgtgcatgcataaatacgcctgggtgtgcatgcctgtgctgcacgcaaacaagtgtacatgtgggcatnnnnnnnnnnnnnnnnnnnnnnnnnnnnnnnnnnnntgtgtgtgcacatgtgcctgtgtctctctacatgtgatgcatttgtgcatgtgtgtgcctgtgtgcccgagtctgtgtctatgtatatgcatgtgtgaatatgcatacgtatgtgcatttctgcacatgtgtgcgtgtgcctgtatgtgcctggccatgaacacacacgtgaatgtctgagcagctccagagggagggccaccaccctgcacggtggacgttggtttgagcctgtgaggactttagtgtcccccaaagcccttcaactacagcccagcccaacccaacccggagcggatcacaggccccggagatacctccaaccctcacacgcagctcccagacccaggctgtccttcgctctgcaagggcgggccaaccctgcccactgccaggg

SEQ ID NO: 21366 - DNA, 694 bp, Macaca Mulatta
gggtctttgatcatgcattaatgaaacatccacaatttttaaagaatcaagtccgtcgagagattaagtttactgtccaggcattgccattgataagtatttttactgttccactgttcctgttggagttaagaggttacagcaaattacatgatgacctaggagagtttccatatggattgtttgaactcatcattagtatcatatctttcctctttttcactgacatgttcatctactggattcacagaggccttcatcatagactggtatataagcgcctacataaacctcaccatacttggaagattcctactccatttgcaagtcatgcttttcaccctgttgatggctttcttcagagtctaccttaccatatatacccttttatctttccattacacaaggcggtttatttaagtctgtacatcttggttaatatctggacaatttccattcatgatggtgattttcgtgtcccccaaatcttacagccatttattaatggctcagctcatcatacagaccatcatatgttctttgactataattatggacaatatttcactctgtgggataggattggaggctcattcaaaaatccttcctcctttgagggaaagggaccgctcagttatgtgaaaggagatgacagaagggaaagtacagcaagccatgcaaggaaatggtttgt

SEQ ID NO: 21367 - DNA, 2809 bp, Macaca Mulatta
  misc_feature (1)...(2809): n = A,T,C or G
atgggtccaataggtacagaggctgatgagaaccagacagtggaagaaatgaaggtggaacaatatgggccacaaaccactcctagaggtgaactggtccctgatcctgagccagagcttatagatagtaccaagctgattgaggtacaagttgtcctcatattggcctattgctccatcatcttgcttggggtaattggcaactccttggtgatccacgtggtgatcaaattcaagagcatgcgcacagtaaccaactttttcatcgccaatctggctgtggcagatcttttggtgaatactctgtgtctaccattcactcttacctacaccttaatgggggagtggaaaatgggtcctgtcctgtgccacctggtgccctatgcacagggcctggcagtacaagtatccacaatcaccttgacagtaattgccctggaccggcacaggtgcatcgtctaccacctggagagcaagatctccaagcgtatcagcttcctgattattggcttggcctggggcatcagtgccctgctagcaagtcccctggccatcttccgggagtattcactgattgagatcattccggattttgagattgtggcctgtactgaaaaatggcctggcgaggaaaagagcatctatggcactgtctacagtctttcttccttgttgatcctgtacgttttgcctctgggcatcatatcattttcctacactcgcatttggagtaaattgaagagccatgtcagtcctggagctgcaaatgaccactaccatcagcgaaggcaaaaaaccgacaaaatnnnnnnnnnnnnnnnnnnnnnnnnnnnnnnnnnnnnnnnnnnnnnnnnnnnnnnnnnnnnnnnnnnnnnnnnnnnnnnnnnnnnnnnnnnnnnnnnnnnnnnnnnnnnnnnnnnnnnnnnnnnnnnnnnnnnnnnnnnnnnnnnnnnnnnnnnnnnnnnnnnnnnnnnnnnnnnnnnnnnnnnnnnnnnnnnnnnnnnnnnnnnnnnnnnnnnnnnnnnnnnnnnnnnnnnnnnnnnnnnnnnnnnnnnnnnnnnnnnnnnnnnnnnnnnnnnnnnnnnnnnnnnnnnnnnnnnnnnnnnnnnnnnnnnnnnnnnnnnnnnnnnnnnnnnnnnnnnnnnnnnnnnnnnnnnnnnnnnnnnnnnnnnnnnnnnnnnnnnnnnnnnnnnnnnnnnnnnnnnnnnnnnnnnnnnnnnnnnnnnnnnnnnnnnnnnnnnnnnnnnnnnnnnnnnnnnnnnnnnnnnnnnnnnnnnnnnnnnnnnnnnnnnnnnnnnnnnnnnnnnnnnnnnnnnnnnnnnnnnnnnnnnnnnnnnnnnnnnnnnnnnnnnnnnnnnnnnnnnnnnnnnnnnnnnnnnnnnnnnnnnnnnnnnnnnnnnnnnnnnnnnnnnnnnnnnnnnnnnnnnnnnnnnnnnnnnnnnnnnnnnnnnnnnnnnnnnnnnnnnnnnnnnnnnnnnnnnnnnnnnnnnnnnnnnnnnnnnnnnnnnnnnnnnnnnnnnnnnnnnnnnnnnnnnnnnnnnnnnnnnnnnnnnnnnnnnnnnnnnnnnnnnnnnnnnnnnnnnnnnnnnnnnnnnnnnnnnnnnnnnnnnnnnnnnnnnnnnnnnnnnnnnnnnnnnnnnnnnnnnnnnnnnnnnnnnnnnnnnnnnnnnnnnnnnnnnnnnnnnnnnnnnnnnnnnnnnnnnnnnnnnnnnnnnnnnnnnnnnnnnnnnnnnnnnnnnnnnnnnnnnnnnnnnnnnnnnnnnnnnnnnnnnnnnnnnnnnnnnnnnnnnnnnnnnnnnnnnnnnnnnnnnnnnnnnnnnnnnnnnnnnnnnnnnnnnnnnnnnnnnnnnnnnnnnnnnnnnnnnnnnnnnnnnnnnnnnnnnnnnnnnnnnnnnnnnnnnnnnnnnnnnnnnnnnnnnnnnnnnnnnnnnnnnnnnnnnnnnnnnntattgttatacctttttgaacatgtatgatttatgttattattcctattggagctaagtttgtctacactaaaatttaaatcagaataaagaataatttttgtggcatgctgtaacatttcccagtatttataagcaattttcgcacaggtacatagctctcatgtatttaaagaacattgcagtgttattttctttgaaattcatcctccttggacccattcatactaaataaaacaatgtaattacattaaaatggacacgtctggtaagaggtaaacattggattcccttcatcttgcaaatgttgtatttcaatcaatttcacataagttatttatcttcttttcaaaataattagctatatttttatataacatgaatatacacataataaaattgttcctgtaaattgtagaacatagatgctacagtatttttatttaattattttatgaataaaattgttatttcaatagtacccaaccaaagatgcttaaaagccttctatgttcataaaaaataacaactgagatgttaaagtagtcatatgtctttagatggttttaagtttcattacagtcatatttttgtaaatatgacagaatttgtgaatatattttttaaagcaaaatcctcaacttgcatattatatatagttacgacattaattttatgaactggagagcttcactttatggatatatttaaaattcatactatagctcgtattaaattccttccatgatagatataaaagactggtttttaagtgcactgcacttctggaattctaaagaagaatgaaaacaatatgtagattaggtagaattctataaggagtgaacaaaaggtaatgtata

SEQ ID NO: 21368 - DNA, 795 bp, Macaca Mulatta
  misc_feature (1)...(795): n = A,T,C or G
ggttctagactgtttatgaatttgagtttgggcaatcctctttgacattttagattaaagaattgcagactttttnnnnnnnnnnnnnnnnnnnnnnntaggcgcccgccacctcgcccggctagnnnnnnnnnnnnnnnnnnnnnnnncggnnnnnnnnnnnnnagnnnnnnnnnnnnnnnnnnnnnnnnnnnnnnnnnnnnnngtnnnnnnnnnnnnnnnnnnnnnnnnnnnnnnnnnnnnnnnnnnnnnnnggcctgtttaaaatattaatacagatggggcctctgtttatgtttagatacaattggagtacttaattgaaactttttaaaaattgtaaagtaaatgaaagctactgagatctttttgtctcctataataccagggaatttgagcttgtgttctagtcattttacttgctgtagctattggtctgcccttttgacatacagctaaaaaggacnnnnnnnnnnnnnnnnnnnnnnnagtctgtcatagttgaagattaatttttcctaatgttgtgattattgaagttcatgaatcttgctgtcaaggaagaaaggtaagaaatctgatagctcctccatgttggtaaaatcctctccagaatcctgggaacacctggcatgtggacccctagtgaacgtcacaagacctgggggtgtaagattccattgttttaggccagatggtttttcccagcccttggttacccccccccttacagaaatcctgggttttaatttcctggggttttcacacccctaactttcccttccccgatgggac

SEQ ID NO: 21369 - DNA, 459 bp, Macaca Mulatta
ggaagagagccagagggactaggagatatgtgtatgtaggtttatatgatgggatatcaccctgaagagttgtgtcttttgtagccaatgacaaatccaggaaataatgttgctgatagggataaatcttgaggctgagggagggcaggacagatggttatgggaaaccccaacccctatatattgtaaatagatgggctgggctaaacattgttgctgtttcagacttacaccaactcagcttttacacaataaagctctactctcctgtctctagtttgctttgggctgtttaccgtgaataccattagcgggggtgggctgagtgatgttcttttcatataagcaattgggtggtgctgtggggagatgagtggtcaggcttaagccagccttgccagtgacgcctgggactagaagctggggatgggcagcgtgccactctgtcaagatgccttt

SEQ ID NO: 21370 - DNA, 1268 bp, Macaca Mulatta
  misc_feature (1)...(1268): n = A,T,C or G
gttttagatgttgagactgtacatgagtatggaaatttaaagcaagaagtttctgaagaaatgaaaccacatgggaatacatccagtaaatttgaaaatgatatgtcccagtctgctaggtgtggagaaactcatgaacctgaagaaataacagaagagccctctgcatgctccagagaagataaacaacctacctgtgatgaaaatggagtaagcctgactgagaactctgaccatactgagcatcagagaatctgtccaggagaaaaatcttatggatgtgatgactgtggaaaagcttttagtcagcactcacacctcacagaacatcagaggatccatactggagacagaccctacaaatgcgaagaatgtggaaaagctttccgtgggagaactgtgcttattcgacacaaaataatacacactggagagaaaccatataagtgtaatgagtgtggcaaagcctttggccggtggtcagctcttaaccaacatcagagacttcacacaggagaaaaacactatcactgtaatgactgtggcaaagcctttagtcagaaagcaggcctctttcaccacatcaagatccacacaagagacaaaccttatcagtgtactcagtgtaataaaagttttagtcggcgttccatacttactcagcatcaaggagttcataccggcgcgaagccctatgagtgcaatgagtgtggaaaagcctttgtttataactcatnnnnnnnnnnnnnnnnnnnnnnnnnnnnnnnnnnnnnnnnnnnnnnnnnnnnnnnnnnnnnnnnnnnnnnnnnnnnnnnnnnnnnnnnnnnnnnnnnnnnnnnnnnnnnnnnnnnnnnnnnnnnnnnnnnnnnnnnnnnnnnnnnnnnnnnnnnnnnnnnnnnnnnnnnnnnnnnnnnnnnnnnnnnnnnnnnnnnnnnnnnnnnnnnnnnnnnnnnnnnnnnnnnnnnnnnnnnnnnnnnnnnnnnnnnnnnnnnnnnnnnnnnnnnnnnnnnnnnnnnnnnnnnnnnnnnnnnnnnnnnnnnnnnnnnnnnnnnnnnnnnnnnnnnnnnnnnnnnnnnnnnnnnnnnnnnnnnnnnnnnnnnnnnnnnnnnnnnnnnnnnnnnnnnnnnnnnnnnnnnnnnnnnnnnnggaggaagaccagctacaaggaaatacttctgaaaaatcattctgaaccccaagctggagtgaatcttctcctgagctctctcattccagaatggcaatcttgttgcaggaaagatctctaa

SEQ ID NO: 21371 - DNA, 651 bp, Macaca Mulatta
ggggaaggctgggagcaccaggaatcgtattgcagagcggagggcaccagagtaccaaagtagtagaaaattgtagaaatatttcatttgcactgactaactcatcatgttatgccaacaagtatagttgacatcacttgttagaagagcaactctgaaagaaaacgagcaaattccaaaatatgaaaagattcacaatttcaaggtccatacattcagagggccacactggtgtgaatactgtgccaactttatgtggggtctcattgctcagggagtgaaatgtgcagattgtggtttgaatgttcataagcagtgttccaagatggtccccaatgactgtaaaccagacttgaagcatgtcaaaaaggtgtacagctgtgaccttacaacgctcgtgaaagcaccccccacttaagcccccaaatggtataagacatgtggctccaaaaaattgagtccaaaaggtcttaatttccgaagggacttcccccgggtatcaggatttatgggccctatttgaaaatgtcaagatggctttccaacaaatggggaaaaggcaaatttttcgggaacttttggaaaattccacttttcccgggggccttaaacggcttccgggtttcccctcccccctttaaaaagaggccc

SEQ ID NO: 21372 - DNA, 746 bp, Macaca Mulatta
  misc_feature (1)...(746): n = A,T,C or G
taggcatcttggactggctcagagtggcctgtaagctgctggttgtgtgatgttttatagttcacaggcattttgctgtgctttcactctcatgatgacnctggtcggggaagtggcatgttgcaatgaagagaccgaggagatgactggttagagacaaggctaggaccagaccggggcttttggaaccctctagctcttttcagttttccctatggaaatagtgttggaaaatgttgcatagcataagctcaggctcagccaggaaatagactgatatacaaggttacttgtgcatcagatcctccagaaacagtacagaattagcgattctgattccattggtgagagctgcagtctggcggaaggagtctgtggaggactagattcagtggcttccatctggaccccctgggtgtaggtgtgcaccttcctgttggagcaggcagcctgctgctgagcatggcccggaaattctgcttcccacatgaggtaggtgtggagagttggccctgtgctggaatgaggttaatctttgcagtaacacctcaacccttctgtgaaagatgttaaaagcatgaaaagagtacatgaataatctcagaagaataagctttaaaatactttttaagcacttgtttatatagaaaacatgtcatcattatgactaagtagtttttagtaaagcagctcttggatccttttgagtaaatgtttggctgaggatgatgtaagattctaaaaat

SEQ ID NO: 21373 - DNA, 471 bp, Macaca Mulatta
aaaaccacatctactccaatttgttaagtctaaaagaaagaattgaggggggattcctctttggggaaagtttatttcctgcattgaaaatagtttattgttagtaaacatataaaaagtattttaaattcaagttattctttattttttacgttacataaggtaatgaagttagccaaggttgctttttagtgttataatgatgcagctgctgccaaccagaagtacatttacggtctgtcagtaaagaaaacaaaaactgcctgttggtaaaaatctgttagaaaatatttgtcagtaaatctgtcacaatattccagcagaagttctgttcgtttttccgtccttctgcccctgttcatatttctcaaaggtaaacttaataaaggtagaagagacatttctaatttttctatatatctcttgctccctaatttctaaaaggcatgactaaaatcccttattcgagca

SEQ ID NO: 21374 - DNA, 771 bp, Macaca Mulatta
ggaacaagagagagaacacatgcaatttattaccagtaagcataagtcatatttaacattggataagcattttatgcaaagatttttctttgatccagtttgcatttgtacattttatttttttagttccgtagctgctctatcacataatactttgtaaatactagtgtgaaaaacagataggatgacttttccagtggtaggaacatctgtacgtgcatttaaatcattacaagcttttttccaaaactagaaacccttattaaaaaataagtatttttgttttctgaagattattagttaaaaataacttaaaaaggtccttagagtaataatttcaaccaaatgaatttcaggcaacaatttactatttatcaaaaaggaatttaattatttttaatgtaattacaaattaaatttcaaatatttaaaaatactattttatataattccttatgacattttaaactttatattttaaaatatttgaatacaaaaagatcagtctacctctactccattctagacaaagtattaatccttagtgaaagtaattaacttgctgacttggcattattattaaagttgataggaatgcaacataaatttaaaaatgtttcccgtgggtaaattttctattatatattttcataagggaaaaggaaaaatgataaaaccctctgtaatcaccaacccccaattttcgttttggttaattcagcttccaaaaaaattggaacgcccaaaactttttaattccaccctttaaga

SEQ ID NO: 21375 - DNA, 304 bp, Macaca Mulatta
gtttaagtgattgtaaattctaaattctaattacttttttaagtagggtcgttttaaatgattaccattttgtcaaatcaaacccagaaatgtagaatatattttaatatgatgtgaaaagagttggaaattaagctatataattagcaaaaattactgtgtagttatcaagataatttgagtttgatgttatttacttcatctttgtggagtgtatagtgagctgcattggtgttagaaaggtagctttataattgatttatgcctagtgattgttttcattttatgattttctgtgaacttg

SEQ ID NO: 21376 - DNA, 623 bp, Macaca Mulatta
gtgtgccgttcttcctgtgttacaattaccctgtttctgattactacagcccaacccgggcggacaccaccaccatttctggctgctggggctggagtgaccataggattctggatcaaccactccttccagcttgtatcccagccggctgaacctctccctgtcattcagaacatcccaccgctcaccaccgacatgttcattttgggtctgaccaaatttgcagtgggaattgtgttgatcctcttggttcgtcagctcgtacaaaacctctcgctgcaagtgctatactcatggttcaaggtggtcaccaggaacaaggaggccagacggagactggagattgaagtgccttacaagtttgttacctacacatctgttggcatctgcgctacaacctttgtgccaatgctgcacaggtttctgggattaccctgagtctcaaacagttggaaactagcccactggacatgagagccaagacataggaaagttattggtaggcaaatcttgaccacttatttttctttaacaacaacaacaaaaaagtcatacggctgtcttgctactactagataaatgatgctgctgtgtgaaaggaaaaactatctcatagcggtcat

SEQ ID NO: 21377 - DNA, 725 bp, Macaca Mulatta
taatgcaatagataccagtgaaacaacctctcgacaacaacaacaaaatccagaacattcacagtctctttggcattcctgcttcttctcactgagtcacccaccaaggtacacacagcccacagtccggaaacacacacgaatggcggatgcagagcagagacacagtgaatgttaagtttactcccagatccttctggggctcacgtcctagacatactgggggcagatctgagatgagggcccacattccccaggccccctgggcagggcaagcaccccccgttctgcccctctggaccatggtgaatgaccatccccatgagaaacctgtttcaagaccccagaatacatagagacacacacatggtacatagtctcctggtgggaaacgacggacatggagttcatttttaaataggtggctttgtctgtggcaatataaaaatattttggcctttcaaggcaaatacaaaagaaactacccattaccatggctgagtgtctcagtcccaaacaataaagaacttgaagaggtttagccggaaactttgaagacagaaaatctgcccattatgttttccagacatttcgagggggtgagcggaggtcattggagctcgaagcccatttggaaggctggtccctcggcctgcgttttctccttggccctttgaaggcccctcagctcacagggcacttccatcctagtctgccctgcggca

SEQ ID NO: 21378 - DNA, 1346 bp, Macaca Mulatta
  misc_feature (1)...(1346): n = A,T,C or G
caagcatgtactccagtggagaatatgtctaaactcacaaaggaagaaacccagaccatcaaattagaagactcatatgactacaatgatagattacagaggcgagcaacaggtggcttctggaaatttcacactaatgaaagaggtttcagtttgaagtcagtcctttcacaagaagatgatcctacagaagaatgtcttagtaaatatgatatatatagaaataattttgaaaagcattcaaacctaattgtacagtttgatacccaattagataataaaacttctgtgtataatgaaggcagggcaaccttcaatcatgtctcatatggtattgtacataggaaaatacttcctggagagaagccttacaagtgtaatgtgtgtgggaaaaaatttaggaaatacccttccctcctgaaacaccaaagtacccatgccaaagagaaatcgtatgaatgtgaagaatgtgggaaggagtttaggcatatttcatccctcattgcacatcagagaatgcacactggagaaaaaccatatgaatgccaccagtgtggtaaagccttcagccagcgtgcacaccttactatacatcagagaattcatactggagagaaaccctataagtgtgatgactgtgggaaagactttagtcagcgtgcacaccttaccatccatcaaaggacacatactggagagaaaccatataaatgcttggaatgtggtaaaaccttcagtcacagttcatcactgattaatcatcagagagttcatactggagaaaaaccttatatatgcaatgaatgtgggaagactttcagtcagagtacacaccttcttcagcatcaaaaaatacatactggaagaaaccnnnnnnnnnnnnnnnnnnnnnnnnnnnnnnnnnnnnnnnnnnnnnnnnnnnnnnnnnnnnnnnnnnnnnnnnnnnnnnnnnnnnnnnnnnnnnnnnnnnnnnnnnnnnnnnnnnnnnnnnnnnnnnnnnnnnnnnnnnnnnnnnnnnnnnnnnnactggagagaaaccctataagtgtgatgactgtgggaaagactttagtcagcgtgcacaccttaccatccatcaaaggacacatactggagagaaaccatataaatgcnnnnnnnnnnnnnnnnnnnnnnnnnnnnnnnnnnnnnnnnnnnnnnnnnnnnnnnnnnnnnnnnnnnnnnnnnnnnnnnnnnnnnnnnnnnnnnnnnnnnnnnnnnnnnnnnnnnnnnnnnnnnnnnnnnnnnnnnnnnnnnnnnnnnnnnnnnnnnnnnnnnacatcagagaattcatactggagagaaaccctataagtgtgatgactgtg

SEQ ID NO: 21379 - DNA, 628 bp, Macaca Mulatta
gggggttgtgttgctgcctgagagcctgagacggtcctgctgctgccggagccctgccagctgtccgacgatgtcgtcccacctagtcgagccgccgccgcccctgcacaacaacaacaacaactgcgaggaaagtggccagtctctgccgcagccggccggcctcaatagttcctagggtggagctccccatgagcaacagcaatggcaatgataatggcaatgggaaaaatggggggctggaacacgtaccgtcctcatcctccatccacaatggagacatggagaagattctattggatgcacaacatgaatcaggacagagtagttcaagaggcagttctcactgtgacagccctttcccacaagaagatgggcagatcatgtttgatgtggaaatgccacaagccgggaccatagcttctcgtcagagaaaaagttttaaaaagaaagaaggaatttaagttttaaaaaaatgcggacggggtgcaaactgttccgtaaacccaaaactttcccccaggaattccctttaaaccccaaagtttgttgttttacctgagaaaaggacccttaaaaggggttttcccccaatttcaagggctctccccccctccttccggttgcg

SEQ ID NO: 21380 - DNA, 613 bp, Macaca Mulatta
cactttacaaacaaataaacattgtttgtactcacaaggcgatgatagcttgattcatttggtttcaacaccaaataccaagcattctcctgaccactaatgggagccaattcacaattcactaagtgactaaagtaagttaaacttgtgtagactaagcatgtaatttctaagttttattttagtgaattaaaatacttgttaaccaactttaaagtcagtcctgtgtatagatagatattagtctattggtgccagatagaagacaggtcgtgtttttaacctgtggcttgggtagtgtcctgggattctcttctctgagtaaagtgttgtgggataaagaaatctctcagggcaaggagcttcttaagttaaatcactagaaatttaggcatgattcaggccttcatatgtgtgagaagccatttcattttatttcttactgtattttccccaacttctagttgataagaaaaaaatcttgaagagttttcatatgtgggagctaaggcagtattgtcaaatttcaagtcatccttaaacaaaatgacccacctaagatcttgctcctgttaagtggtgaaatcaactagaggtggttcctacaagttgt

SEQ ID NO: 21381 - DNA, 688 bp, Macaca Mulatta
gagtacagtccctgacatcacacactgcagagatggataaccaaggagtaatctactcagacttgaatctgcccccaaacccaaagaggcagcagcaaaaacctaagggtaatacaagctccattttagtaactgaacaggaaataacctatgcggaattaaaccttcaaaaaacttcgcaggattttcaagggaatgacaaaaccaatcactgcaaagatttactctcagctccagagaagctcattgctgggatactgggaatcatctgtcttgtcttaatggcctctgtggtaacaatagttgttattccctcacgtcactgtggccattgtcctgaggagtggattacatattccaacagttgttattatattggtaaggagaaaagaacttgggcagagagtttgctggcctgtacttcgaagaactccagtctgctttctatagataatgaagaagaaatgaaatttctgaccgccattttaacttcctcatggattgatgtgtttcgtgacagcagtcatcatccatgggtgacaatcaacggtttgactttcaaacatgagataaaagagtcagatcatgctgaacataactgtgcaatgctacatgtacgtggacttttttcagacgagtgtggatcttcaaaaatatatcattgtaagcataagctttagaagtaaag

SEQ ID NO: 21382 - DNA, 3070 bp, Macaca Mulatta
  misc_feature (1)...(3070): n = A,T,C or G
ggcaaagaagaaagagcttgccaggagagacgatattgaggacggagacagcatgatctcttcagccacctctgataccggtagtgccaaaagaaaaagnnnnnnnnnnnnnnnnnnnnnnnnnnnnnnnnnnnnnnnnnnnnnnnnnnnnnnnnnnnnnnnnnnnnnnnnnnnnnnnnnnnnnnnnnnnnnnnnnnnnnnnnnnnnnnnnnnnnnnnnnnnnnnnnnnnnnnnnnnnnnnnnnnnnnnnnnnnnnnnnnnnnnnnnattgagcataacatccgcaatgacaaatatgcaggtgaagagggaatgatagaagacatgaagctgatgttccggaatgccaggcactataacgaggagggctcccaggtnnnnnnngatgcacatatcctggagaagttactcaaggagaaaaggaaagagctgggcccattgcctgatgatgatgacatggcttctcccaaactcaagctgagtnnnnnnnnnnnnnnnnnnnnnnnnnnnnnnnnnacatgactccaatgcagcagaaactaaatgaggtctatgaagctgtaaagaactatactgataagagaggtcgccgcctcagtgccatatttctgaggcttccctctagatctgagttgcctgactactatctgactattaaaaagcccatggatatggaaaaaattcgaagtcacatgatggccaacaagtaccaagatattgactctatggttgaggactttgttatgatgtttaataatgcatgtacatacaatgagcctgagtctttgatctacaaagatgctcttgtactacacaaagtcctgcttgaaacgcgcagagacctggagggagatgaggactctcatgtcccaaatgtgactttgctgattcaagagcttatccacaatctttttgtgtcagtcatgagtcatcaggatgatgagggaagatgctacagtgattctttagcggaaattcctgctgtggatcccaactttcctaacaaaccaccccttacatttgacatcattaggaagaatgttgaaaataatcgctaccggcggcttgatttatttcaagagcatatgtttgaagtattggaacgggcaagaaggatgaatcgctgaaaagagtgaagattcctctggtgctgcaggcctttcaggcttacatcgcacatacagccaggattgtagctttaaaaacagcatgtaccatgttggagattatgtctatgtggaacctgcagaggccaacctacaaccacatatagtctgtattgaaagactgtgggaggattcagctggnnnnnnnnnnnnnnnnnnnnnnnnnnnnnnnnnnnnnnnnnnnnnnnnnnnnnnnnnnnnnnnnnnnnnnnnnnnnnnnnnnnnnnnnnnnnnnnnnnnnnnnnnnnnnnnnnnnnnnnnnnnnnnnnnnnnnnnnnnnnnnnnnnnnnnnnnnnnnnnnnnnnnnnnnnnnnnnnnnnnnnnnnnnnnnnnnnnnnnnnnnnnnnnnnnnnnnnnnnnnnnnnnnnnnnnnnnnnnnnnnnnnnnnnnnnnnnnnnnnnnnnnnnnnnnnnnnnnnnnnnnnnnnnnnnnnnnnnnnnnnnnnnnnnnnnnnnnnnnnnnnnnnnnnnnnnnnnnnnnnnnnnnnnnnnnnnnnnnnnnnnnnnnnnnnnnnnnnnnnnnnnnnnnnnnnnnnnnnnnnnnnnnnnnnnnnnnnnnnnnnnnnnnnnnnnnnnnnnnnnnnnnnnnnnnnnnnnnnnnnnnnnnnnnnnnnnnnnnnnnnnnnnnnnnnnnnnnnnnnnnnnnnnnnnnnnnnnnnnnnnnnnnnnnnnnnnnnnnnnnnnnnnnnnnnnnnnnnnnnnnnnnnnnnnnnnnnnnnnnnnnnnnnnnnnnnnnnnnnnnnnnnnnnnnnnnnnnnnnnnnnnnnnnnnnnnnnnnnnnnnnnnnnnnnnnnnnnnnnnnnnnnnnnnnnnnnnnnnnnnnnnnnnnnnnnnnnnnnnnnnnnnnnnnnnnnnnnnnnnnnnnggaaagtgtgctgtgttgtcattcaaggacttcctctcctgcaggccaactgaaataccagaaaatgacattctgctttgtgagagccgctacaatgagagtgacaagcagatgaagaaattcaaaggattgaagaggttttcactctctgctaaagtggtagatgatgaaatttactacttcannnnnnnnnnnnnnnnnnnnnnnnnnnnnnnnnnnnnnnnnnnnnnnnnnnnnnnnnnnnnnnnnnnnnnnnnnnnnnnnnnnnnnnnnnnnnnnnnnnnnnnnnnnnnnnnnnnnnnnnnnnnnnnnnnnnnnnnnnnnnnnnnnnnnnnnnnnnnnnnnnnnnnnnnnnnnnnnnnnnnnnnnnnnnnnnnnnnnnnnnnnnnnnnnnnnnnnnnnnnnnnnnnnnnnnnnnnnnnnnnnnnnnnnnnnnnnnnnnnnnnnnnnnnnnnnnnnnnnnnnnnnnnnnnnnnnnnnnnnnnnnnnnnnnnnnnnnnnnnnnnnnnnnnnnnnnnnnnnnnnnnnnnnnnnnnnnnnnnnnnnnnnnnnnnnnnnnnnnnnnnnnnnnnnnnnnnnnnnnnnnnnnnnnnnnnnnnnnnnnnnnnnnnnnnnnnnnnnnnnnnnnnnnnnnnnnnnnnnnnnnnnnnnnnnnnnnnnnnnnnnnnnnnnnnnnnnnnnnnnnnnnnnnnnnnnnnnnnnnnnnnnnnnnnnnnnnnnnnnnnnnnnnnnnnnnnnnnnnnnnnnnnnnnnnnnnnnnnnnnnnnnnnnnnnnnnnnnnnnnnnnnnnnnnnnnnnnnnnnnnnnnnnnnnnnnnnnnncaggtgggagttttggggcctccagggcagcaagcaccacctccatatcccggcccacatccagctggaccccctgtcatacagcagccaacaacacccatgtttgtagctcccccaccaaagacccagcggcttcttcactcagaggcctacctgaaatatattgaaggactcagtgctgagtccaacagcattagcaagtgggatcagacactggca

SEQ ID NO: 21383 - DNA, 345 bp, Macaca Mulatta
gaagaggcaggaaatggagatgtttgggtgccctataactgcagagactgcttattgcatttccttaacctttggcctgacccctacccacccagcaccctgtccaggagagagaaactgcccttgtgtgctgggacaatgctgtcactgttgtcctgagcacattgtaggtggtgtggtcctggctgtggccagaaggaatgcgccaaaggcctgatgtctctgtgcacctgagggagttctatcttttttgggtgacctcaaccaatcagcatggtagcaggcagggtgtgagttgtgtagcaagcaccatcgcttcattctattgtcggtagctacaatttg

SEQ ID NO: 21384 - DNA, 271 bp, Macaca Mulatta
tagaggcaaattcatcctcttaccagatccttttccagaaatacctgtctaggaaggtgtaatgcagaaacaatgacatccagaaagctgaggaagaggttcctgtggagacactgagtcagaattcttcatcctaaattatattgttagtggaaaatggaattgcttctgtgtagtcaataaaatgaatctgatcattgttcaacaagatgcgctgctgttctgtgagcaagtggaaggcaggaggaagttccctgctccttcaggcagg

SEQ ID NO: 21385 - DNA, 512 bp, Macaca Mulatta
  misc_feature (1)...(512): n = A,T,C or G
accctaatcagcgccgtccatcggcgtggagctccgactggaggcaagagccgcgcgccgggagacacgcttcgtgcgcggcagcgccgccggcctccctcttcaccgccccggagggcgaagccgcagctccccggccccctgactgcgcggcgacagcgccggaacacgccccgcctctccgccgccttcgctgtgccgcctgcggagggggccgcgagccccgcgccccggccgaaggatgtgcgcccccgcgggccgccccgcctgagccatgcgccccaacggcggcggcgcgccggccggcatggagtcccgcgcggccgcgctctgactcgctgtgcgccccgcnnnnnnnnnnnnnnnnnnnnnnnnnnnnnnnnnnnnnnnnnnnnnnnnnnnnnnnnnnagcgagcgggcgcgggcgccgcgcagatggcccgggcgagccaggtctgaggccccgctccccgaaacgtgaccatgtggattcaacagcttttaggactcag

SEQ ID NO: 21386 - DNA, 892 bp, Macaca Mulatta
  misc_feature (1)...(892): n = A,T,C or G
cgcgctgggcagggccgcacccggctggagcgtgccaacgcgctgcgcatcgcgcggggcaccgcgtgcaaccctgcacggcagctggtcccgggccgtggccaccgcttccagcctgcggggcccgccacgcacacgtggtgcgacctctgtggcgacttcatctggggcgtcgtgcgcaagggcctgcagtgcgcgnnnnnnnnnnnnnnnnnnnnnnnnnnnnnnnnnnnnnnnnnnnnnnnnnnnnnnnnnnnnnnnnnnnnnnnnnnnnnnnnnnnnnnnnnnnnnnnnnnnnnnnnnnnnnnnnnnnnnnnnnnnnnnnnnnnnnnnnnnnnnnnnnnnnnnnnnnnnnnnnnnnnnnnnnnnnnnnnnnnnnnnnnnnnnnnnnnnnnnnnnnnnnnnnnnnnnnnnnnnnnnnnnnnnnnnnnnnnnnnnnnnnnnnnnnnnnnnnnnnnnnnnnnnnnnnnnnnnnnnnnnnnnnnnnnnnnnnnnnnnnnnnnnnnnngttcagctgaagcttgcgcgccctgtctctgtgccctccagcaagaagccaccctccttgcaggatgcccggcggggcccaggacggggcacaagtgtcaggcgccgcacttccttttacctgcccaaggatgctgtcaagcacctgcatgtgctgtcacgcacaaaggcacgtgaagtcattgaggccctgctgcgaaagttcttggtggtggatgacccccgcaagtttgcactctttgagcgggctgagcgtcatggccaagnagtgtacttgcggaagctgttggatgatgagcagcccctgcggctgcggctcctggcagggcccagtgacaaggccctgagcttcgtcctgaaggaaaatgactctggggaggtgaac

SEQ ID NO: 21387 - DNA, 752 bp, Macaca Mulatta
cttcctcatcgctggcgtatgaatcgtcaccaacacactttcttttgccacctacctactggccaccaaccctgactgccaagaaaagcttcgtgagagaggtggacctttttaaggagaaacacatggtccctgagttctgcagcctcgaggaaggcctgccctatctggacatggtgattgcagagacgctgaggatgtacccaccggctttcaggttcacacgcgaggcggctcaggactgcgaggtgctggggcagcgcatccccgcaggtgctgtgctagagatggccgtgggtgccctgcaccatgaccctgagcactggccaagcccagagaccttcgaccctgaaaggttcaccgctgaggctcagcagcagcaccggcccttcacgtacctgcccttcggggccggcccacgaagctgccttggggtgcggctagggctgctggaggtcaagttgacactgctccatgtgctgcacaagttccagttccaagcctgccctgagacccaggtaccgctgcagctagaatccaaatctgccctaggtccaaaaaacggtgtctatatcaagattgtatcccgctgacacagaaggccgccgggtggagggagggcacccccaaattcaaagaaaaccctgagtgtggatattcagaattttgggaaaatgtcacagaagggattgaaagagtggctggcatgcaaggataagagggtctttacacgacattttctaaatgcttaa

SEQ ID NO: 21388 - DNA, 265 bp, Macaca Mulatta
tgtagccatattgtattctgtgtcaaataaagtccagttggattctagaacggatgctctctcttgtgtatgtgaacaaagtgaacataaatgaagagtctccccttccaaggctgaaaactcaactttcgaaagtgaaatgttcgttcatccgggccagagcagggttgtcctctgagcgcatcacttagtcatgaggcatccgacagaggcagagtatggatcgctggcacccgaagacagcagtcagcccttctttctcctc

SEQ ID NO: 21389 - DNA, 358 bp, Macaca Mulatta
tgaaccacagaggcccagaggctcacaaagcaaagctgtgccgcctggtctgggcaggagacctaagaactgcccaggtctaagcagagcgtccgtgagctgttcacagagagaagcacctcccgagtccagcaggcacgaggtggggcctggaacagggcgggggactcaggctgcacccgctcatggaccaaggctggtcccggggtcagcagggcctgcgtgcgtggagatccctcgtcacctgcacacagcaggtgggacagccccgtagttgcaagcagagaggttccagggtacaggaaagagaggagagacaggccctatcccggaaaagctcgacatagtgtgacagaag

SEQ ID NO: 21390 - DNA, 540 bp, Macaca Mulatta
cccccaaacatttcaatgcacagaagggactggaaagctactgttcaaaggctgaagctatttttaaacattattttcactactaagtggggacagaaagatccatcctgagttgtggaaacattggtccatgccgtgagcctgtctgcctgtggacacgtgagcttcccgggctcagctgggctttatcacacatcccgtgaacactcattgaagtcagcctgtttgtgccatgtgggcatcagccactgttgtcttgggaggacacttaccctgttctcttatttctccttcatcctatttttaacttaaactgctcagatgtttgaaacttctgtcctctttggatgagatcagtgtccacaagtggccgacatggaacatgccgaacagtggctcctctgaatgttcactttattagtcatgtatattttaaatgctaacatttgatgaatgtaaggtttacgcattgttgctgtttctgcatttaaacataattgggaacaagggacattctctagtcgactgccagggccttag

SEQ ID NO: 21391 - DNA, 515 bp, Macaca Mulatta
agagccggggaaccctttctgaacaacttctccccaccgctccccctcactgctgcgcccccacagggatgtacctactgagctgctgaacccgtaaatgctgccgccccagctctacactgcgccctggtgctggctgaccgctccctaccctcctgctggaccctggggcctcccgccccagtctccctgaggcccagactccacggagaggagccccatgcccagccggctgagcccaagattcgctcctccccctcatgccaaccccacacaggtcctggccttttaatgttctttgaataaacactttattttctaataaaataaaaaaggaaaccttttcctgctccaggaagtatcctttgcattgccagagaggggaggaagagaaggcggatgaatgtgagagaactaacgcacctccctccctgcactgcgttcaacctgtacagggccattctgggagagaaggaaccagacaccgcagccccatgggctcagaggggggctag

SEQ ID NO: 21392 - DNA, 1598 bp, Macaca Mulatta
  misc_feature (1)...(1598): n = A,T,C or G
gctgggcctgctggttgacctctccccagatggcctgatgatccctgaggacagagttaacgatgaagaactggaggccgagttcttggctttggtcgggggccagcccccagctctggagaagctcanaggcaaaggtnnnggtcccctgccgatggaggccattgagaagatggccagcctgtgcatgagagacccagatgaggatgaggaggagggcacggatgaggatgacttggaggccgatgatgacctgctggncctgcaggcggagctaaatgaggtccttggagaggagcagaaggcttnnnnnnnnnnnnnnnnnnnnnnnnnnnnnnnnnnnnnnnnnnnnnnnnnnnnnnnnnnnnnnnnnnnnnnnnnnnnnnnnnnnnnnnnnnnnnnnnnnnnnnnnnnnnnnnnnnnnnnnnnnnnnnnnnnnnnnnnnnnnnnnnnnnnnnnnnnnnnnnnnnnnnnnnnnnnnnnnnnnnnnnnnnnnnnnnnnnnnnnnnnnnnnnnnnnnnnnnnnnnnnnnnnnnnnnnnnnnnnnnnnnnnnnnnnnnnnnnnnnnnnnnnnnnnnnnnnnnnnnnnnnnnnnnnnnnnnnnnnnnnnnnnnnnnnnnnnnnnnnnnnnnnnnnnnnnnnnnnnnnnnnnnnnnnnnnnnnnnnnnnnnnnnnnnnnnnnnnnnnnnnnnnnnnnnnncaggtccctgcagccctggccctctggcccagttgcagagccgccagcgtgagtacaagctggctgccctccacgccaagcagcagggagataccgctgctgccgccagacacttccgcgtggcnnagagctttgatgctgtcttggaggccctgagccggggggagcccgtggacctctcctgcctgccgccgccacccgnnnnnnnnnnnnnnnnnnnnnnnnnnnnnnnnnnnnnnnnnnnnnnnnnnnnnnnnnnnnnnnnnnnnnnnnnnnnnnnnnnnnnnnnnnnnnnnnnnnnnnnnnnnnnnnnnnnnnnnnnnnnnnnnnnnnnnnnnnnnnnnnnnnnnnnnnnnnnnnnnnnnnnnnnnnnnnnnnnnnnnnnnnnnnnnnnnnnnnnnnnnnnnnnnnnnnnnnnnnnnnnnnnnnnnnnnnnnnnnnnnnnnnnnnnnnnnnnnnnnnnnnnnnnnnnnnnnnnnnnnnnnnnnnnnnnnnnnnnnnnnnnnnnnnnnnnnnnnnnnnnnnnnnnnnnnnnnnnnnnnnnnnnnnnnnnnnnnnnnnnnnnnnnnnnnnnnnnnnnnnnnnnnnnnnnnnnnnnnnnnnnnnnnnnnnnnnnnnnnnnnnnnnnnnnnnnnnnnnnnnnnnnnnnnnnnnnnnnnnnnnnnnnnnnnnnnnnnnnnnnnnnnnnnnnnnnnnnnnnnnnnnnnnnnnnnnnnnnnnnnnnnnnnnnnnnnnnnnnnnnnnnnnnnnnnnnnnnnnnnnnnnnnnnnnnnnnnnnnnnnnnnnnnnnnnnnnnnnngacgtggagggcgccaagatgcatctgcgccaggccaagggactggagcctatgctggaggcctcgcgcaatgggctgcctgtggacatcaccaaggtg

SEQ ID NO: 21393 - DNA, 2751 bp, Macaca Mulatta
gaattctggtagtggggccactccctcttgagggcccctttctttcatggtctcctcccaggcctgtcccccagaactcctctgacctctgccccccatccttgccaggtcctcctctgctcacttcatgccatttctcacctcttccaagctctttgggttttccaagtacccccttcagaacccttgcccagccaaagcctctgcctccccagcctgtgggggcccaatctcacctcataggggctacgattggtaccaccagcgggcacatagcgcccatgggtgtggtaggtggggtactcgctcataggatggtaggcatcccgggcgggaaagatgtccagctgcctgtagttcttttggcggcactgacagacagcctggggaaataggaggttatggcagaccatggagtgctttctgtcggcgggggggtgggcactgatcagggccagggactgcactcaccaaggcaatgaaatagacgatggccagcacaaccagaacacagaccagcaccaggagcgcaatgccccagcctggcaccccagccccggtttgggcagagaaaggaaatggcacatcacgcactaaaaggaaaagcagtggttagggcagtctcccagaggaggtgcccctctaactgccagcactaaggaaaaagtggggaactagacactggtaggagaggggccccagcatggtgctgggctgcagccggggaagtagcgtcaccgctgatgtctgagatcgtcaggttatatcgagaggctgcttccgttttacgttgattgaactgtgtctccacatcgtggacattggtggtaccttctcggaagaccagagtcgattgtaccaccacagatcctggcctggtcacagggaaatgggcacttcagccacaggtcccagctctggctcaggactctcccccaaccttgagtgcaccagtccctccttacggtcatgaccaacacccaccctccaaccaccacactgagtccacacccagaactatacctgaacataatattggagaggcccagaaaatccccttgtttataaatctgcaaaaactggggtgagagggaaaggactcaggcttgatgcaaagggtgtggacagttctgatggctgcttcaggggaacatgggaaaggaaaggtcgatactcaccaattcagaaatgtctctctgcagctgttggtagtagttggtgctgggatcttccagagaggaattaaactgaaggtttgaaatgtgaaaagacaagaaaaagaaagagaccccaagagacaactggggagaagtgctgtgattggaggtgaaaggaggtactgtgctatggtgagtgctactggcatcagtcttggtgctgtggctggcaagggtggtaggagtatcagagtggtggctgggaattgagaatggagtgctcttgctggctggggtggtggtagccctggcagaggtggtgctgtgcaccagagtggaagctgagcctgatgcagagtctgaggccgaggtgacatcgtgggctgggggtgcggtggagcccgggggtgcggtggagcccggggctgcactagtgcccggggccgaggtgacaacgcgggctggggggccggtggagcccggggctgcactggtgtccggggccgaggtgacaacgcgggctggggggccggtggagcccggggctgcactggtgtccggggccgaggtgacaacgcgggctggggggccggtggagcccggggctgcactggtgtccggggccgaggtgacaacgcgggctggggggccggtggagcccggggctgcactggtgtccggggccgaggtgacaacgcgggctggggggccggtggagcccggggctgcactggtgtccggggccgaggtgacaacgcgggctggggggccggtggagcccggggctgcactggtgtccggggccgaggtgactacgcgggctggggggccggtggagcccggggctgcactggtgtccggggccgaggtgactacgcgggctggggggccggtggagcccggggctgcactggtgtccggggccgaggtgactacgccggctggggggccggtggagcccggggctgcactggtgtccggggccgaggtgacattgtgtcccaaggtggtagccgaacctgtggctggttccgtggccagggctagggtgacgtcctgtccctgagtggtggaggagcctgaaacggggctgtggctggagagtctgctggtcatactcacagcattcttagtagagatgggcattgaacttctttgggtagccgaagtctccttttctccgcctggggtagagtttgtatgaccagaacctgtaacaactgttgtgggttcaggggctgtggcagctgtgataagttaaactaatagggttgggttgaaggaaaaataagagcaagaagaaaatacaagctctggccaccagagaaataataccaggagactggggagtgggcagcctccagccccctgggttggctgcctccttccctgcagcagcctccttctgtctgcccacaggcctcagctcctggccccgcatttctcccctcttaagccttccctctccctacaactcccttccccctagacttctcttcaggacatttgcttgccctggcacccactctttggggggggcatctcttctcagcctgtccttagcctctccctccttctggcacagacagaattc

SEQ ID NO: 21394 - DNA, 4685 bp, Macaca Mulatta
  misc_feature (1)...(4685): n = A,T,C or G
aacaactctctggaaagcttctaaaatgattaagtagtttaaaccaaataaaacaatttctgagtcagtcatccccagtaggtctattttagtctcaagataaattcatttctggtgacaactgaagttcttagttatttgttagtatatattggagacatttacaataaagcttagagcacagtgggaaatgaaagtatcatgttattttttttaagaccaaatgtattgcagaaatgtaagtaatttaatccaatgctacaatctgatcattctgatctaatctgatcatttaataacaccaaataaaaccttcatctcacattctttggctgtttcttttaaaatatgagtttagggataaatcaaataaattcaaaacaaagtaataagcagatggtatttttttctcagtaatctagtagagtattacatttagaagtcatctgtatctcagtgcagtaactatttaggactctaagcgccgctgttcacctactgggagagaaatgcaaccgaaaacactcagatctcacacctcgcaaagacccgcagatgccacaaactaactgcgggactgcagcgaaaccccacccctgtttggaggcactgcaggtttccggaggattatcatctccatagctgcggcaagaaactaaatacccacttatgcacagtgaagattctgaggggattctgcagcaaaataacaatggccgctccacagagtcgccccagacgcggcgagctgatcctgctgtgcgcgctgctggggacgctgtgggaaaccgggaggggacagattcgctactcggtgccagaagagacggacaaaggctccttcgtgggtaatgtctccaaggacctggggctggacccccgggagctggcgaagcacggagtccgtatcgtctccagaggtaggacgcagctctttgctctgaacccgcgcagcggcagcttggtcaccgcgggcaggatagaccgggaggagctctgcgctcagagcccgcggtgtctgataaatattaacatcctggttgaggataaaggaaaactctttgggatagaaatagaagtaattgatattaacgataataacccgaaattccaggtcgaagatctagaagtaaaaattaacgaaatcgcggttcctggagcacgttatccactcccagaagctggtgacccggatgtgggcgtgaactccctcagagctacagctcannccaatcacacttctccctggagtgcagactgggnnnnnnnnnnnnnnnnnnnnnnagctggtgctggagcgcgccctggacnnnnnnnnnnnnnnnnnnnnnnnnnnnnnnnnnnnnnnnnnnnnnnnnnnnnnnnnnnnnnnnnnnnnnnnnnnnnnnnnnnnnnnnnnnnnnnnnnnnnnnnnnnnnnnnnnnnnnnnnnnnnnnnnnnnnnnnnnnnnnnnnnnnnnnnnnnnnnnnnnnnnnnnnnnnnnnnnnnnnnnnnnnnnnnnnnnnnnnnnnnnnnnnnnnnnnnnnnnnnnnnnnnnnnnnnnnnnnnnnnnnnnnnnnnnnnnnnnnnnnnnnnnnnnnnnnnnnnnnnnnnnnnaatccgttatttccagctaatgaaaatactggggaaatatcatagcaaaaaagtctagattatgagaaatgtcattttatgaaatggaatacaagccgaagatgtgggggcacttctggggaggaccaaattgttcatttcggtggaagatgtaaatgacaatagaccagaagtgatcattacgtctttgtttagcccagtgttagaaaatcttcttcccgggacagtaattgcgttcttgagtgtgcatgaccaagactctggaaagaatggtcaagttgtctgttacacacgtgataatttaccttttaaattagaagagtcaatagataattattatagattagtgacaaggaaatatttggaccgagaaaatgtctctatctacaatatcacagtgatggcctcagatctaggaacaccgcctctgtccactgaaactcacatcgccctgcacgtggcagacattaacgacaaccctcctacattccctcgtgcctcctactcagcttatatcctagagaacaacctgagaggagcctccatcttctccttgactgcacacgaccccgacagccaggagaatgcccaggtcacttactctgtgaccgaggacacgctgcaaggggcgcccctatcctcgtacatctccatcaactcagacactggcgtcctgtatgcactcagatcctttgactatgagcaattccatgagctacagatgcaggtgacagccagcgacagcggggatcctccactcagcagcaatgtgtcgttgagcctgtttgtgctggaccagaacgacaatgcgcccgagatcctgtaccccgccctccccacagacggttccactggcgtggagctggcgccccgctccgcagagcccggctacctggtgaccaaggtggtggcggtggacagagactcgggccagaacgcctggctgtcctaccgcctgctcaaggccagcgagccgggactcttcgcggtggggctgcacacgggcgaggtgcgcacggcgcgggccctgctggacagagacgcgctcaagcaaagcctcgtggtggccgtccaggaccacggccagccccctctctcggccaccgtcacgctcacggtggccgtggccgacagcatccccaaagtcctnnnnnnnnnnnnnnnnnnnnnnnnnnnnnnnnnnnnnnnnnnnnnnnnnnnnnnnnnnnnnnnnnnnnnnnnnnnnnnnnnnnnnnnnnnnnnnnnnnnnnnnnnnnnnnnnnnnnnnnnnnnnnnnnnnnnnnnnnnnnnnnnnnnnnnnnnnnnnnnnnnnnnnnnnnnnnnnnnnnnnnnnnnnnnnnnnnnnnnnnnnnnnnnnnnnnnnnnnnnnnnnnnnnnnnnnnnnnnnnnnnnnnnnnnnnnnnnnnnnnnnnnnnnnnnnnnnnnnnnnnnnnnnnnnnnnnnnnnnnnnnnnnnnnnnnnnnnnnnnnnnnnnnnnnnnnnnnnnnnnnnnnnnnnnnnnnnnnnnnnnnnnnnnnnnnnnnnnnnnnnnnnnnnnnnnnnnnnnnnnnnnnnnnnnnnnnnnnnnnnnnnnnnnnnnnnnnnnnnnnnnnnnnnnnnnnnnnnnnnnnnnnnnnnnnnnnnnnnnnnnnnnnnnnnnnnnnnnnnnnnnnnnnnnnnnnnnnnnnnnnnnnnnnnnnnnnnnnnnnnnnnnnnnnnnnnnnnnnnnnnnnnnnnnnnnnnnnnnnnnnnnnnnnnnnnnnnnnnnnnnnnnnnnnnnnnnnnnnnnnnnnnnnnnnnnnnnnnnnnnnnnnnnnnncccgactaccgccagcacttatacatcccaggcagcaatgccacactgaccaatgccccttgcaagcgggatggcaaggccccagcaggtggcaatggcaacaagaagaagtcgggcaagaaggagaagaagtctcatggaggccaggccaagagccacagggcagcctccccccaaccagcccagcttctccttacctgtacccaggcctcagagtttcagggctcacccccagaatactggtaggggccaaggccatgctccccttgggaaacagaaacaagtgcccagtcaacacccatccccttaccccccgggggttgaatatgcaaagggagttctgctgggaacccccatccaatcaattgctgtacccatgggggtagtggggttagtgtagacaccaagaaccatttgccacacccatttagttatagctgaactcctccatcttccaaatcaatcaggcccatccatcccatgcctccctcctccccacccaactccaacagttcctctctcctgagtaagttggttggggtgttgaagtaccaggtaacctacaagactcctagttctgaagagctggaagggtatcatgacctcttggcctctcctttgattctcaatcttcccccaaagcatggtttggtgccagccccttcacctccttccagagcctgagatcaatgctcaagttttggaggacatggtcaccatccccatggtactgatgcttgctggatttaaggagggcattttgctaccaaggctcttcccaacgccctggggaccagtcttctgttttgtttttcattgttcgacgttcccactgcatgctgtgacttcccccgcctcctcctcaaacaagagactccactgcatgttccaagacagtatggggtgtaagataaagaagggaagtgtgtggatgtggatggtgggggcatggacaaagcttgacacatcaagttatcaaggccttggaggaggctctgtatgtcctcaggggactgacaacatcctccaaattccagccataaaccaagaactaggctggatccttcccactacataatagggctcagcccaggcagccacctttgggctgagctaccaggaccaatgggttaaactggcatttcagtccaaggaagctcaaagcaggtttaggaccaggccccctggagaggtcagaggggcctctgtgggtgctgggtactccagaggtgccactggtggaagggtcagtggagccccagcaggaagggcgggccagccaggccattct

SEQ ID NO: 21395 - DNA, 318 bp, Macaca Mulatta
cacgatcttctagttggagcgataagtgcacgagtgagatcaagatccagaggaagaggagatggtcaggaggctcccgatgtgttgcattcgtgactcccggtgaatctcagcaagaggaaccaccaactgacaatcaggatattgaacctggacgagagagagaaagaacacctccgattgaagaacgtaaagtggaaggtgattgccaggaaatggatctggaaaacactgggaatgagcgtggagacggctctgatgtaaaagagaagactccacctaatccagagcgtgctaagactaaagaagcaggagatg

SEQ ID NO: 21396 - DNA, 653 bp, Macaca Mulatta
ggggcaggcctctgagagggtcttgttctagatttcatattgcacttggggggcaacagctgcttttccacgcatggtactcttgatgcttttcactctgtcaaggattttgttggctgtcaataaatgtgtctaaaacttagtgcttccaggtagttatagttctccaaatcaaggaccaacttaaacattaatttatgtgcaaaaacaaacctgaaaaatatgcttcggaaactgtgcatagttctaattgtaagtcagattgtatattcaaattgtaattaagagatttaaatattagaacagtatgtaaggtagtataattaccactattttaaaacaattcatttaaacactgctacaatatttcagtgttgtgcttgaaaatatgtacagtttttttccaatattaataccttatgttgtccttaaatatttctaaaagcgcctttatttcagcattacctttttttcatcattatcttttgtaaaacattgatacaagttgttacttttagaaactctaaaggaaataatagctggaaaaccctttgtagcttaaatcagtcattaactcacatagggtagtaatatagccactgtgacatgtgaaataccatatgtgtcaaagatggatatgaaactagtcatgc

SEQ ID NO: 21397 - DNA, 607 bp, Macaca Mulatta
gacccccacctctcactttgctgttgcctgagaaccccagagaccactcctgtggagagctgagggggcggctaccgtcccctctgcaggctcattcctccctggtcgcctgcttcccctcaggcgaagttctttcaaagacatctgtttgcatccttgtgttttgctgaggtctttaaaggagcgcccacgaagtgtagtgagctgacgatttctacctcacacagcagtttgtaaccacaagcattctctttgaattctcacagaattcagcaagaagtataaacctgctatttactacattgtggtttaactttggaagtgaatttagtcacccatagcccttcagataagcctagccagtacatatttcagcacaggcagtttttttggtatttaagtacattgaggcaactgaggacttgataatattttagggtcgaggtgtaattattcataatgaatttactctgttgatattaaaaagacgttcagtcctattactgatgagtttacatcttcaaataactcctgggttctatttagttttggagagcaaaagttgtttgtgtgggcctcccattcgctggttaaaaggatcagagtc

SEQ ID NO: 21398 - DNA, 1690 bp, Macaca Mulatta
  misc_feature (1)...(1690): n = A,T,C or G
gttaaaagatgggttacctgcgaccgagaaatctgctcgctatttgactcggggctattcattaattatcaaggatgtaactgaagaggatgcagggaattatacaatcttgctgagcataaaacagtcaaatgtgttcaaaaacctcactgccactctaattgtcaatgnnnnnnnnnnnnnnnnnnnnnnnnnnnnnnnnnnnnnnnnnnnnnnnnnnnnnnnnnnnnnnnnnnnnnnnnnnnnnnnnnnnnnnnnnnnnnnnnnnnnnnnnnnnnnnnnnnnnnnnnnnnnnnnnnnnnnnnnnnnnnnnnnnnnnnnnnnnnnnnnnnnnnnnnnnnnnnnnnnnnnnnnnnnnnnnnnnnnnnnnnnnnnnnnnnnnnnnnnnnnnnnnnnnnnnnnnnnnnnnnnnnnnnnnnnnnnnnnnnnnnnnnnnnnnnnnnnnnnnnnnnnnnnnnnnnnnnnnnnnnnnnnnnnnnnnnnnnnnnnnnnnnnnnnnnnnnnnnnnnnnnnnnnnnnnnnnnnnnnnnnnnnnnnnnnnnnnnnnnnnnnnnnnnnnnnnnnnnnnnnnnnnnnnnnnnnnnnnnnnnnnnnnnnnnnnnnnnnnnnnnnnnnnnnnnnnnnnnnnnnnnnnnnnnnnnnnnnnnnnnnnnnnnnnnnnnnnnnnnnnnnnnnnnnnnnnnnnnnnnnnnnnnnnnnnnnnnnnnnnnnnnnnnnnnnnnnnnnnnnnnnnnnnnnnnnnnnnnnnnnnnnnnnnnnnnnnnnnnnnnnnnnnnnnnnnnnnnnnnnnnnnnnnnnnnnnnnnnnnnnnnnnnnnnnnnnnnnnnnnnnnnnnnnnnnnnnnnnnnnnnnnnnnnnnnnnnnnnnnnnnnnnnnnnnnnnnnnnnnnnnnnnnnnnnnnnnnnnnnnnnnnnnnnnnnnnnnnnnnnnnnnnnnnnnnnnnnnnnnnnnnnnnnnnnnnnnnnnnnnnnnnnnnnnnnnnnnnnnnnnnnnnnnnnnnnnnnnnnnnnnnnnnnnnnnnnnnnnnnnnnnnnnnnnnnnnnnnnnnnnnnnnnnnnnnnnnnnnnnnnnnnnnnnnnnnnnnnnnnnnnnnnnnnnnnnnnnnnnnnnnnnnnnnnnnnnnnnnnnnnnnnnnnnnnnnnnnnnnnnnnnnnnnnnnnnnnnnnnnnnnnnnnnnnnnnnnnnnnnnnnnnnnnnnnnnnnnnnnnnnnnnnnnnnnnnnnnnnnnnnnnnnnnnnnnnnnnnnnnnnnnnnnnnnnnnnnnnnnnnnnnnnnnnnnnnnnnnnnnnnnnnnnnnnnnnnnnnnnnnnnnnnnnnnnnnnnnnnnnnnnnnnnnnnnnnnnnnnnnnnnnnnnnnnnnnnnnnnnnnnnnnnnnnnnnnnnnnnnnnnnnnnnnnnnnnnnnnnnnnnnnnnnnnnnnnnnnnnnnnnnnnnnnnnnnnnnnnnnnnnnnnnnnnnnnnnnnnnnnnnnnnnnnnnnnnnnnnnnnnnnnnnnnnnnnnnnnnnnnnnnnnnnnnnnnnnnnnnnnnnnnnnnnnnnnnnnnnnnnnnnnnnnnnnnnnnnnnnnnnnnnnnnnnnnnnnnnnnnnnnnnnnnnnnngggcctctgatggtgattgttgaatactgcaaatatggaaatctatccaactacctcaagagcaaacgtgacttattttttctcaacaagg

SEQ ID NO: 21399 - DNA, 492 bp, Macaca Mulatta
tcatatttgctctccttcacgggagggcagggaggttcaacggaccttaaaacatgaaggtcttttttctatttgctgttctcttctgtttggtccgaagaaactcagtgcacatctctcaccaggaggctcgaggaccctgatttaagagctgcatgggctttttagggcctagatgggccaggggatgttccaccgggaattagaaataccatctgccttatgcagcaagggacctgcagactttttttctgccattctggtgagaaaaagcgtgacatttgctctgatccctggaataggtgttgcgtatcaaatagagatgaagaaggaaaagagaagccaaagaccgatggcagatctggaatctaaaatgtaagctcctggaaggcagggatcttgaagtatcccaagggcttaaaggaatgtgtggcttgtagtaggtgttcaataaatatttgttgaatgaatttagcaccaaaaaaaaaaaaa

SEQ ID NO: 21400 - DNA, 667 bp, Macaca Mulatta
atccagactgtgcatagagccaacatttgcccagccctcattagtattttacaaactgctgaatttcggacaagaaaagaagcagcttgggccatcacaaatgcaacttctggaggatcagctgaacagatcaagtacctagtagaactaggttgtatcaagccgctctgtgatctcctcacggtcatggactctaagattgtacaggttgccctaaatggcttggaaaatatcctgaggcttggagaacaggaagccaaaaggaatggcactggcattaacccttactgtgctttgattgaagaagcttatggtctggataaaattgagttcttacagagtcatgaaaaccaggagatctaccaaaaggcctttgatcttattgagcattacttcgggaccgaagatgaagacagcagcattgcaccccaggttgaccttaaccagcagcagtacatcttccaacagtgtgaggctcctatggaaggtttccagctttgaagcaatactctgctttcacgttcctgtgtcagaccaggctacccagtcgagtcctcttgtggagcccacagtcctcatggagctaacttctcaaatgttttccataatactgtttgcgctcatttgcttgccttgcgcacctgctctcttacacacatctggaaaa

SEQ ID NO: 21401 - DNA, 530 bp, Macaca Mulatta
  misc_feature (1)...(530): n = A,T,C or G
tatctgcatacatattccagtgggaattgcatgactacataaagaattcaaagaaagtgatgtgctgtcatctactgcttgcagacntgagctaaagtcgtttactgtagcactgtgactacatagcctattcctttcaggtaaaaatagtacagctggcttgtcctttttagttcttgattaaatacacttcctcgttttctaaaatggaaatacctggaataaatgcactggcagttttctgtcttttactatgaatataaaacataaagcaaataagaaatcatctaaatctactttggtcagtgtgttgcgatattacctgatagacacattgggtctcctccaattctaaaatctatcccagctaagcctcccatatacactttcactgtagcagggctaaggtgggagtacatgtcaaatttggaaaactttttaagaagcttaatgaggtgcagtgatcaaatgacagaatatattatccgaagaacttccttggagaatattactcattaaattaacagttg

SEQ ID NO: 21402 - DNA, 161 bp, Macaca Mulatta
aagatgggcatcgtcctgagtggacgttttacccgaggtttagcagcaacatccacacttaccatgtcggaaagcagtgcttctttaatggagtcttcctcggcaacatgaggtctctatcagagaggacggtggacaagtgctttgggaaaaagaaatac

SEQ ID NO: 21403 - DNA, 552 bp, Macaca Mulatta
  misc_feature (1)...(552): n = A,T,C or G
caggctcttcgactaccggggccctttgacgccggtgccagtgcccagggcagtccctgtgaagcgaccccgggtcacagtccctttggtccggcgtgtcaaaactaacatacctgtcaagctctttgcccgctccacagccgtcaccaccagctcagccaagatcaagtnnnnnnnnnnnnnnnnnnnnnnnnnnnnnnnnnnnnnnnnnnnnnnnnnnnnnnnnnnnnnnnnnnnnnnnnnnnnnnnnnnnnnnnnnnnnnnnnnnnnnnnnnnnnnnnnnnnnnnnnnnnnnnnnnnnnnnnnnnnnnnnnnnnnnnnnnnnnnnnnnnnnnnnnnnnnnnnnnnnnnnnnnnnnnnnnnnnnnnnnnnnnnnnnnngcagccggccaccagccccccaagagaacacgacttctgaggcaggcctgccccagggagaagcacggacccgaggtgacggcgatgaggaggggctgctgacacacagcgaggaagagctgngaacacagccaggacacagacgcggatgatggggccttgcagtaagcag

SEQ ID NO: 21404 - DNA, 279 bp, Macaca Mulatta
aggctgggcgtggtggctcatgcctgtaatcccagcactgtgggaggccgaggcaggtgaatcactttaggtcaggagttcgagactagccaggccataatggagaaaccccatctctactaaaaatacaaaaaattagccggtgtagtggtgggtgcctataatccccgctgcttgggagtctgaggcagcaggagaactgcttggactcgggaggtggaggctgcagtgagctgagactgcgccactgcacaccatcctgggtgacagagcgagact

SEQ ID NO: 21405 - DNA, 587 bp, Macaca Mulatta
caggtcagtcgatttcctcctggactccagcctgcgcaagctctacccgtcattcaggaagcccagctcctcctgatcacacgctggtacctggcctgtgcatcagcctcctgcttcatgtcaacctcccactcctgccaggggatgtggacacctggttccctggggtccaaagaccctggcacctgagtgggtttgagccggacagaagcttagagacaaaggcttcaagaagcagtggctgcagagtcacagacgggcgggccctgaaccctgtctgcttccccttaatccatgaggctgagtggaagtggaccctgggtgggcccagccctgtctttttcaggaaaattacatcctcccatggaggatgagagactgaggctcagggagggcaaggaataggcccaagatcacttggcaagctgggaacccaggactcccaggtgcttgacaaagtcaccccacggtggcacggctgaacaaggagcggcagacaactcagggagaaactcaggagtgcagtaccagggacacctcaggacagattctctggccaggcccttccctgacccaataaatcctga

SEQ ID NO: 21406 - DNA, 285 bp, Macaca Mulatta
ttattatactaattcctactttgtacataaatatctctatagactggatctcagctgcagtattttgaaagttataggacttaattacccagtaatgttctccactcattccagaagaaaacaaaacctctgctgtaatatgtgcggttagcagccacctttccatacttttccaaaggtaaacgtgaaacccaagaacaagcgctggggtttaaactgattttggtttgcgttctggctttttgagttgaccgaaaagcagacattgttaggcagcctggaaat

SEQ ID NO: 21407 - DNA, 707 bp, Macaca Mulatta
actttcctcctcaccccaggcatgaggctctgttgtcccgaggtggggtgtatgctgacatgtggcagctgcagcagcagggacaggaagaaacctctgaagacactatgcctcagaccatggaacgatgacaaaagtttggccacttccctctcaaagactaacccagaagggaataagatgtacgccccttccctagcttatttcatcctggtcttggggtgcggtgctagctatagtaagggaaagggacctttcagaaaaacaccttttggggaaataaaaatgtggcctgtgtgaggatcactgtggctttgtggggtggggtactgcagtgggcctctacccgtatgtcaggtgagcattgttgatgcggcttttctgtttgaggttagagaggagagagaaacacaccacttgtatatcctatcaactgccaagatcctttattttctccaggacccttcctgcccactccatgtcagggcagctccagcaaaagggagatgacatgatgataggactgagagcagggcctggccagcatccaccgagggcccaaccaggcaacagttgctagctgctctctcccatgcagctggaacactagcaaggccttccagaggctcccagggcgacctccacatcactctcgcttgtctctgccctccaggctactccgggccgcctctccctgtgtaccctag

SEQ ID NO: 21408 - DNA, 748 bp, Macaca Mulatta
  misc_feature (1)...(748): n = A,T,C or G
tgtaatttttattttctgatacagatttgagctatcagactcacaacctttccccctgaaaagtgagcagcaatgtaaaaatgtatgtgaagcccctcatgaatttctagtcagcagtcttaaggctctttaaggttttctccaatatttatcaccaaagaagtcctgctatgttaaaaaacaacaacaacagcaaaaacaaacaaccatnnnnnnnnnnnnnnnnnnnnngaaatagagctctaagttatgtgaaacttgatttgagaaacttggcatttcctctttaaaaaagcctgtttctaactatgaataacagaacttctaggaaacatccaggaggtatcatataacttcatagaacttaaatacttgaatattcaaatttaaaagacactgtatcccctgaagtatttctgatggtgcattactctgaggcctgtatggcccctttcatcaatatctattcaaatatacaggtgcatatatactttttaaagctcttacataaaaaagccccacaatattgtattgaagttcatctgaattgcaaggtgctttcatcaatgaatctttacaaacttttctatgattgcagagaagctttttatatacccagcataacttggaaacaggtatctgacctattcttatttatttaacacaagtgtgattaatttgatttctttaattccttattgaattttatgtgatacgattttctggatttacagaacattagcacatg

SEQ ID NO: 21409 - DNA, 645 bp, Macaca Mulatta
gtgctcagtgcttgctggtttctctttcttgaataggaaggtcctgttggcaaattctctcaaggctggggatgaccgggtacaagaaccagggcagcaatatgttggtgtcactccccttcccagaactcttcaaagactccctaggagagaccagcccctcagcctgacacttggttcacgatgtgggatcttacatccttgccagggtcatatctttgcccacttttacctgcaatccttgcatcatattccatcggctccagtccttcatttttgagacccacaggaatccttccaacagccaaagagttgaatctaactctttcctgcccaaacccattcatggctccctggccttagacaatacatcacaagcacctcccctgtcacttaaagtccttcatgacctccctgctatctatttatttatgctttcctcttggcgaacccttccttaagcctttcatgctggttcatacaacactttctttgcaatttgagatttctccttctggaagtcatgcctccttgctttcatctggcttacactatcttttcctccaaacatgagttcatgggtggtcttgggttggaagagtgcactgaagaaagaaattatactctccctcctctaaaattgac

SEQ ID NO: 21410 - DNA, 815 bp, Macaca Mulatta
  misc_feature (1)...(815): n = A,T,C or G
ggggtattcttttgtaactcaagtcttgaaatgttctgtagtgttaagcaaagtctcctcttgcttgatactaaataaacttttgaaagaaattttgtgtgtgtgagctaacaatttcatgggttttttttatttaaaaaggccttcataaatagttgtaaacagggaaagaattcatttaacaatgcttgtcataaaagggtcacactaaacattgtacaacttattttaaaaatggtataaaattaaatgtaccattatatactcaccatagacttaaatgctgtttnaagagtccaaatggtatcgagctgcttgagtggcacgttaaactacgcaaaaccaaatcttgttttaaaaactggttttaaaataactactggattttctgaaaaagaatgtgatcaggttttcatcctggtgagcggttttttccctaaggcaacttttggattttttatgagaatttttggtaactttaaagaaacaccctccctccttgctggaaacccctaagccccaaaccttttaaaaaaatttctggggtttaaataattggaggggcccccctcccccaagggcttaaggaatagtgaaacccctttaaaaggggcctttccttttttcaaaagggaaaattgcccccccacccttttggaaaatttgcccacgggaaaactggggttgaaacacccgtgaaggccaaccccagggggggaccctttcccctcccgggtttaaggggaaacggcctcttaaaaaaaaatctctacctctccccccacaagggggccctatatataagcaaaaaaaga

SEQ ID NO: 21411 - DNA, 693 bp, Macaca Mulatta
  misc_feature (1)...(693): n = A,T,C or G
tatgttcctgatcctgaatatgtctccagtgtgaggagctctccatctctaagccccataagtcctctgtcaccaacatcatctgaggctgaattggataagaccactnnnnnnnnnnnnnnnnnnnnnnnnnnnnnnnnnnnnnnnnnnnnnnnnnnnnnnnnnnnnnnnnnnnnnnnnnnnnnnnnnnnnnnnnnnnnnnnnnnnnnnnnnnnnnnnnnnnnnnnnnnnnnnnnnnnnnnnnnnnnnnnnnnnnnnnnnnnnnnnnnnnnnnnnnnnnnnnnnnnnnnnnnnnnnnnnnnnnnnnnnnnnnnnnnnnnnnnnnnnnnnnnnnnnnnnnnnnnnnnnnnnnnnnnnnnnnnnnnnnnnnnnnnnnnnnnnnnnnnnnnnnnnnnnnnnnnnnnnnnnnnnnnnnnnnnnnnnnnnnnnnnnnnnnnnnnnnnnnnnatagatcagctatcaggaagggacttctgccattcaaagaaaatgacaggaagtaacactgaggaaatagactcaagaatccgagatgcaggtaatgatagtgccagcactgctcctaggagcactgaggggtctctttctgaagatgtgttcacagaatcagaactttcccctatacgagaggagcttgtatcttcaaatgactgacacaagataatcttctggtgcgtcatcagatctgtgcaa

SEQ ID NO: 21412 - DNA, 215 bp, Macaca Mulatta
tctgccgtgctcctcttctatattcctatgatcctcctggcactgattagccatcttgagctgccaatcactcagcatacccatactcttctctcctatgtccatttccttcttcctccattgataaaccctattctctatagtgtcaagatgaaggagattagagaaagaatactcaataggttgcagcccaggaagatgggttgtgctcagtg

SEQ ID NO: 21413 - DNA, 330 bp, Macaca Mulatta
  misc_feature (1)...(330): n = A,T,C or G
aggcaaatcactgaagatgagctgtaacagcagncagcctcggcagtgccacccactgcacaggggccagctgggaagccaggccctgcctctgctacctccccttcttccctgggctgtagacctttgtccccgtcactgccagcgcttgagcagaaggaagctccagactcaatgtgacccccaggtggtatcgccacctcctgccccttgccacctcatgctcataataaagttagcgtcacagaccgctgcttctctcgcctgcctgcctatctgcctcctctgtcaccaccagcctctccaagttcaagtacaaatacagccggg

SEQ ID NO: 21414 - DNA, 805 bp, Macaca Mulatta
  misc_feature (1)...(805): n = A,T,C or G
ggggcagttcggcggtcccgcgggtctgtctcttgcttcaacagtgtttggacggaacagatccggggactctttcttccagcctccgagcgccctccgatttcctctccacttgcaacctccgggaccatcttctcggccatctcctgcttctgggacctgccagcaccgtttttgtggttagctccgtcttgccgaccaaccatgagctcccagattcgtcagaattattccaccgacgtggaggcagccgtcaacagcctggtcaatatgtacctgcaggcctcctacacctacctctctctgggcttctatttcgaccgcgatgatgtggctctggaaggcgtgagccacttcttccgcgaattggccgaggagaagcgcgagggctacgagcgtctcctgaagatgcaaaaccagcgtggcggccgcgctctttttcaggacgtcaagaagccagctgaagatgagtggggtaaaaccccggatgccatgaaagccgccatggccctggaaaaaaactgaatcaggcccttttggatcttcatgcccctgngttctgcccacacggatccccatgtacgtacccccctgcatccatggctacccaacccatacccctcaagcctttgctctctttgggcaaattcccttcagagcctcattttacaccctgtcatattttaatcttgcaactggccagctctttctccctcttttccaggggatccgggnnnnnnnnnnnnnnnnnnnnnnnnnacggagtcttcactcctgtcgcccaaggctgggagtgcaatgggct

SEQ ID NO: 21415 - DNA, 1901 bp, Macaca Mulatta
  misc_feature (1)...(1901): n = A,T,C or G
aaggctgtcttcgactgcgtggtgacctccttgaagaatgtcttcaacatacttattgtctacaagctcttcatgttcatctttgctgtcatcgcagttcagctcttcaagggaaagttcttttattgcacggacagttccaaggacacagagaaggagtgcatnnnnnnnnnnnnnnnnnnnnnnnnnnnnnnnnnnnnnnnnnnnnnnnnnnnnnnnnnnnnnnnnnnnnnnnnnnnnnnnnnnnnnnnnnnnnnnnnnnnnnnnnnnnnnnnnnnnnnnnnnnnnnnnnnnnnnnnnnnagttctgcagcactctgtagatgtgacagaggaagaccgaggcccaagccgcagcaaccgcatggagatgtctatcttttatgtggtctactttgtggtcttccctttcttctttgtcaatatctttgtggctctcatcatcatcaccttccaggagcaaggggataagatgatggaggagtgcagcctggagaagaatgannnnnnnnnnnnnnnnnnnnnnnnnnnnnnnnnnnnnnnnnnnnnnnnnnnnnnnnnnnnnnnnnnnnnnnnnnnnnnnnnnnnnnnnnnnnnnnnnnnnnnnnnnnnnnnnnnnnnnnnnnnnnnnnnnnnnnnnnnnnnnnnnnnnnnnnnnnnnnnnnnnnnnnnnnnnnnnnnnnnnnnnnnnnnnnnnnnnnnnnnnnnnnnnnnnnnnnnnnnnnnnnnnnnnnnnnnnnnnnnnnnnnnnnnnnnnnnnnnnnnnnnnnnnnnnnnnnnnnnnnnnnnnnnnnnnnnnnnnnnnnnnnnnnnnnnnnnnnnnnnnnnnnnnnnnnnnnnnnnnnnnnnnnnnnnnnnnnnnnnnnnnnnnnnnnnnnnnnnnnnnnnnnnnnnnnnnnnnnnnnnnnnnnnnnnnnnnnnnnnnnnnnnnnnnnnnnnnnnnnnnnnnnnnnnnnnnnnnnnnnnnnnnnnnnnnnnnnnnnnnnnnnnnnnnnnnnnnnnnnnnnnnnnnnnnnnnnnnnnnnnnnnnnnnnnnnnnnnnnnnnnnnnnnnnnnnnnnnnnnnnnnnnnnnnnnnnnnnnnnnnnnnnnnnnnnnnnnnnnnnnnnnnnnnnnnnnnnnnnnnnnnnnnnnnnnnnnnnnnnnnnnnnnnnnnnnnnnnnnnnnnnnnnnnnnnnnnnnnnnnnnnnnnnnnnnnnnnnnnnnnnnnnnnnnnnnnnnnnnnnnnnnnnnnnnnnnnnnnnnnnnnnnnnnnnnnnnnnnnnnnnnnnnnnnnnnnnnnnnnnnnnnnnnnnnnnnnnnnnnnnnnnnnnnatgctcaacctgttcgtggccgtcatcatggacaactttgagtacctgactcgggactcctccatcctnnnnnnnnnnnnnnnnnnnnnnnnnnnnnnnnnnnnnnnnnnnnnnnnnnnnnnnnnnnnnnnnnnnnnnnnnnnnnnnnnnnnnnnnnnnnnnnnnnnnnnnnnnnnnnnnnnnnnnnnnnnnnnnnnnnnnnnnnnnnnnnnnnnnnnnnnnnnnnnnnnnnnnnnnnnnnnnnnnnnnnnnnnnnnnnnnnnnnnnnnnnnnnnnnnnnnnnnnnnnnnnnnnnnnnnnnnnnnnnnnnnnnnnnnnnnnnnnnnnnnnnnnnnnnnnnnnnnnnnnnnnnnnnnnnnnnnnnnnnnnnnnnnnnnnnnnnnnnnnnnnnnnnnnnnnnnnnnnnnnnnnnnnnnnnnnnnnnnnnnnnnnnnnnngcctctgacctgactgtgggcaaaatctatgcagcaatgatgatcatggactactataagcagagtaaggtgaagaagcagaggcagcagctggaggaacagncagaaaaatgcccccatgttccaacgcatggagccctcatctctgcctc

SEQ ID NO: 21416 - DNA, 492 bp, Macaca Mulatta
  misc_feature (1)...(492): n = A,T,C or G
ctcattcattgaagttgcattaaataaagtataattaggtcactatggaaactgagttttcagtaatgagtggacagtaagtggtggctctgcagattgctagcccctttctaatagtttaataaacccaaaattattggttatcttgtctccaatcagttctttcaaatgttttatttttccagtaattacatttggatcataggcccctctgacatctgtcaggtaattttcagtcactttcagatgataagacttagtcctgagtccacctctctgcttaaaactcctatttcatatttgactcagtccttccctgctgtctccaatactagttgggaataggacacagggcagggtggtaaggtgcaggtaaagtctggtcacaggcctcccttccaccctcccactttgatgaagtgcattggcccttccccttgttgaanactcgttactttgccaacaaacaccccactagaaaaattaactctt

SEQ ID NO: 21417 - DNA, 198 bp, Macaca Mulatta
aggcaggaggcaaggatgggagcctgagtagatagtgtggccaaaaggccagcacaacctttgcaagctgacttggtaagtctgacagtgtcaaacttgtgagcttactgcagtcagtcacagatactgttctttttaacacactccttcatgcccagctttccccatatccacatgcagaggacatgctcataaaaa

SEQ ID NO: 21418 - DNA, 831 bp, Macaca Mulatta
  misc_feature (1)...(831): n = A,T,C or G
gacaagctggtgtctaagaactacccggatctgtccttgggagactactctctgctctggaaagcccacaagaagctcacccgctcagccctgctgctgggcatgcgtgactccatggagcccgtggtggagcagctgacccaggagttctgnnagcgcatgagagcccaggccggcacccctgtggccattgaggaggaattctctctcctcacctgcagcatcatctgtcacctcaccttcggagacaagatcaaggnaggaggacaacttagtgcctgcctattacaaatgtatccaggagnnnnnnnnnnnnnnnnnnnnnnnnnnnnnnnnnnnnnnnnnnnnnnnnnnnnnnnnnnnnnnnnnnnnnnnnnnnnnnnnnnnnnnnnnnnnnnnnnnnnnnnnnnnnnnnnnnnnnnnnnnnnnnnnnnnnnnnnnnnnnnnnnnnnnnnnnnnnnnnnnnnnnnnnnnnnnnnnnnnnnnnnnnnnnnnnnnnnnnnnnnnnnnnnnnnnnnnnnnnnnnnnnnnnnnnnnnnnnnnnnnnnnnnnnnnnnnnnnnnnnnnnnnnnnnnnnnnnnnnnnnnnnnnnnnnnnnnnnnnnnnnnnnnnnnnnnnnnnnnnnnnnnnnnnnnnnnnnnnnnnnnnnnnagattcagcagcgactgcaggaggagctagaccacgaactaggccccagtacctccagctcccgggtcccctacaaggaccgtgcacggctgcccttgctcaaaaacaccatcgctgaggtgctgcgcctgcggcccgttgtgcccctggccctgccccaccgcaccacacggcccagca

SEQ ID NO: 21419 - DNA, 828 bp, Macaca Mulatta
tcagacccacttcattgtgttcattgtctttgaactcactttaaaactatgcattgcagatatatggtctgtagttggcttaatctgtcccagtctatatataaagtatattttcagaaacagaccgtttcatggaataacgatggggcattaggttcttttacattgattgtattacttgcactcatcattgaataatgatgaattactacagttggacccaaacctacattttatggctccaattccaggactctttcttacctgcaacacagaaatgtagtatgttttaatagtgtgacttaggctagtacagtagtgcatgattgcattagatgtctagtgttgtgcaatttccagatgtctgcctgccccagcagcttctgtaaataagtctcgggtattataggtttgactaaagtaacaacttttttctgcttttctgaagttgctgttgcattaaccataatattttgtacatacttggcaatataactcacatgccttcgcaattttgtttttccttgtcccttcttaggtagttaacctgcagtacagtgaagttcaagatcgggtcatgctcactggccgccacatggttcgagatgtgagctgcaaaaactgcaatagcaaactgggatggatctatgagtttgccactgaagacagccagcgatataaggaaggccgcgtgatcctggaacgtgctctagttcgagagagtgagggctttgaggagcatgtaccatctgataactctagaagatacagagagaaatccatcttttcccaggtctcctacagtgaaaacaaaaatctacttacata

SEQ ID NO: 21420 - DNA, 1068 bp, Macaca Mulatta
atgacaacctcactagatacggttgagacctttggtcccacatcgtacgatgatgacatgggcctgctctgtgaaaaagccgatgtcggagcactgatagcccagttcgtgcccccgctgtattccctggtgttcatggtgggcctcttgggcaacgtggtggtggtgatgatcctcataaaatacaggaggctccgaattatgaccaacatctacctgctcaacctggccatttcggacctgctcttcctcttcacccttccgttctggatccactatgtcagggagcgtaactgggtcttcagccatggcatgtgtaaggtcctctcggggttttatcacacaggcttgtacagcgagatctttttcataatcctcctgacgattgacaggtacctggccattgtccatgctgtgtttgcccttcgagccaggactgtcacttttggtgtcatcactagcatcgtcacctggggcctggcagtgctagcagctcttcctgaatttattttctatgggactgaagagttgtttccagagactctttgcagtgctatttacccacaggatacagtatatagctggaggcatttccacactctgagaatgaccatcttgtgtctcgctctccctctgctcgttatggccatctgctacacaggaatcatcaaaacgctgctgaggtgccccagtaaaaaaaagtacaaggccatccggctcatttttgtcatcatggctgtgtttttcattttctggacaccctacaatgtggctatccttatctctacctatcaatccgtcttatttggacttgactgtgaacggagcaagcatctggacctgttcgtgctggcgacggaggtgatcgcctactcccactgctgcgtgaacccagtgatctacgcctttgttggagagaggttccggaagtacctgcgccacttcttccacaggcacgtgctcatgcacctgggcaaatacatcccattccttcctagtgagaagctggaaagaaccagctctgtctctccgtccacagcagagccggaactctctattgtgttttag

SEQ ID NO: 21421 - DNA, 108 bp, Macaca Mulatta
ggcactctgtgggccacacaaagatccccttctgcctgcagtcctgtgtgaagcccctcacctatgccatctccataagcaccctaggcactgactacgtgcacaagt

SEQ ID NO: 21422 - DNA, 851 bp, Macaca Mulatta
  misc_feature (1)...(851): n = A,T,C or G
tggagcgctgcatgtcacctcctattagcatggcagaaacctctgctgtgtgcacggcagcttctgttattaagaatgccaaacagccccttcttatcatcgggaaaggnnnnnnnnnnnnnnnnnnnnnnnnnnnnnnnnnnnnnnnnnnnnnnnnnnnnnnnnnnnnnnnnnnnnnnnnnnnnnnnnnnnnnnnnnnnnnnnnnnnnnnnnnnnnnnnnnnnnnnnnnnnnnnnnnnnnnnnnnnnnnnnnnnnnnnnnnnnnnnnnnnnnnnnnnnnnnnnnnnnnnnnnnnnnnnnnnnnnnnnnnnnnnnnnnnnnnnnnnnnnnnnnnnnnnnnnnnnnnnnnnnnnnnnnnnnnnnnnnnnnnnnnnnnnnnnnnnnnnnnnnnnnnnnnnnnnnnnnnnnnnnnnnnnnnnnnnnnnnnnnnnnnnnnnnnnnnnnnnnnnnnnnnnnnnnnnnnnnnnnnnnnnnnnnnnnnnnnnnnnnnnnnnnnnnnnnnnnnnnnnnnnnnnnnnnnnnnnnnnnnnnnnnnnnnnnnnnnnnnnnnnnnnnnnnnnnnnnnnnnnnnnnnnnnnnnnnnnnnnnnnnnnnnnnnnnnnnnnnnnnnnnnnnnnnnnnnnnnnnnnnnnnnnnnnnnnnnnnnnnnnnnnnnnnnnnnnnnnnnnnnnnnnnnnnnnnnnnnnacaggcttgatgctggtactttcggaacaatgggagttggtttaggatttgctattgcagctgccatggtggctaaagatagaagccctgggcaacgggtcatctgtgtggaaggagacagtgcatttgggttttctggcatggaggtggaaaccatctgcaggt

SEQ ID NO: 21423 - DNA, 337 bp, Macaca Mulatta
  misc_feature (1)...(337): n = A,T,C or G
gcacacactgacagagtgaacctgcggacactgcgcagttactacaaccagagccaggccnnntctcacaccctccagtggatgattggttgcgacctggggcccgacgggcgcctcctctgcaggtgtgaacagttcgcctacgatggcaaggattacctcgccctgaacgaggacctgtgctcctgaaccgcagcggacactgtggctcagatctccaagcgcaagtgtgaggcggccaaagcgactgaacgaaggagagcctacctggagggcacgtgagtggagtggctccacagatacctggagaatgggaaggagatgctgcagcgtgcgg

SEQ ID NO: 21424 - DNA, 523 bp, Macaca Mulatta
aatctcccccactccactactctcttcctccacttcatgtttctcttggccttcttctgtattcaatgttttggaggcctgacttgaggacaacatattattgatactattgtctgttttcctccttcccaaatagaagaataagtcatggagcctgaagggtgcctagttgatttactgaccaaaggctctagttgggctgaacatgtgtgtggtggtgactcagttccatgtcattgtggaattgagcagagaacctgctctcggaggatgcctaggagatattgggaacagaaggaatgaactgagtttaagggggacttaaactgctgaattcacctgtggatgtttttgagtaaataaaagataatagctaactgtcatgtagctctttgctggggtaacttggagcttaaatacccagctggctgtctttggcactcaacctgcttgctacctggagccatgtggtggcatacacaccttattactcttagccccagaacaccctgatccttattcc

SEQ ID NO: 21425 - DNA, 2197 bp, Macaca Mulatta
  misc_feature (1)...(2197): n = A,T,C or G
agtttcaggtttcttctatagggatcactgattgaataatnnnnnnnnnnnnnnnnnnnnnnnnnnnnnnnnnnnnnnnnnnnnnnnnnnnnnnnnnnnnnnnnnnnnnnnnnnnnnnnnnnnnnnnnnnnnnnnnnnnnnnnnnnnnnnnnnnnnnnnnnnnnnnnnnnnnnnnnnnnnnnnnnnnnnnnnnnnnnnnnnnnnnnnnnnnnnnnnnnnnnnnnnnnnnnnnnnnnnnnnnnnnnnnnnnnnnnnnnnnnnnnnnnnnnnnnnnnnnnnnnnnnnnnnnnnnnnnnnnnnnnnnnnnnnnnnnnnnnnnnnnnnnnnnnnnnnnnnnnnnnnnnnnnnnnnnnnnnnnnnnnnnnnnnnnnnnnnnnnnnnnnnnnnnnnnnnnnnnnnnnnnnnnnnnnnnnnnnnnnnnnnnnnnnnnnnnnnnnnnnnnnnnnnnnnnnnnnnnnnnnnnnnnnnnnnnnnnnnnnnnnnnnnnnnnnnnnnnnnnnnnnnnnnnnnnnnnnnnnnnnnnnnnnnnnnnnnnnnnnnnnnnnnnnnnnnnnnnnnnnnnnnnnnnnnnnnnnnnnnnnnnnnnnnnnnnnnnnnnnnnnnnnnnnnnnnnnnnnnnnnnnnnnnnnnnnnnnnnnnnnnnnnnnnnnnnnnnnnnnnnnnnnnnnnnnnnnnnnnnnnnnnnnnnnnnnnnnnnnnnnnnnnnnnnnnnnnnnnnnnnnnnnnnnnnnnnnnnnnnnnnnnnnnnnnnnnnnnnnnnnnnnnnnnnnnnnnnnnnnnnnnnnnnnnnnnnnnnnnnnnnnnnnnnnnnnnnnnnnnnnnnnnnnnnnnnnnnnnnnnnnnnnnnnnnnnnnnnnnnnnnnnnnnnnnnnnnnnnnnnnnnnnnnnnnnnnnnnnnnnnnnnnnnnnnnnnnnnnnnnnnnnnnnnnnnnnnnnnnnnnnnnnnnnnnnnnnnnnnnnnnnnnnnnnnnnnnnnnnnnnnnnnnnnnnnnnnnnnnnnnnnnnnnnnnnnnnnnnnnnnnnnnnnnnnnnnnnnnnnnnnnnnnnnnnnnnnnnnnnnnnnnnnnnnnnnnnnnnnnnnnnnnnnnnnnnnnnnnnnnnnnnnnnnnnnnnnnnnnnnnnnnnnnnnnnnnnnnnnnnnnnnnnnnnnnnnnnnnnnnnnnnnnnnnnnnnnnnnnnnnnnnnnnnnnnnnnnnnnnnnnnnnnnnnnnnnnnnnnnnnnnnnnnnnnnnnnnnnnnnnnnnnnnnnnnnnnnnnnnnnnnnnnnnnnnnnnnnnnnnnnnnnnnnnnnnnnnnnnnnnnnnnnnnnnnnnnnnnnnnnnnnnnnnnnnnnnnnnnnnnnnnnnnnnnnnnnnnnnnnnnnnnnnnnnnnnnnnnnnnnnnnnnnnnnnnnnnnnnnnnnnnnnnnnnnnnnnnnnnnnnnnnnnnnnnnnnnnnnnnnnnnnnnnnnnnnnnnnnnnnnnnnnnnnnnnnnnnnnnnnnnnnnnnnnnnnnnnnnnnnnnnnnnnnnnnnnnnnnnnnnnnnnnnnnnnnnnnnnnnnnnnnnnnnnnnnnnnnnnnnnnnnnnnnnnnnnnnnnnnnnnnnnnnnnnnnnnnnnnnnnnnnnnnnnnnnnnnnnnnnnnnnnnnnnnnnnnagattgtatatgttgctccaatgaaagccttggcagctgaaatgacaaattacttcagcagacgtctagagccactaggcatcgttgtgaaagaattgactggtgacatgcagttgtcaaaaagtgaaattttacgtactcannnnnnnnnnnnnnnnnnnnnnnnnnnnnnnnnnnnnnnnnnnnnnnnnnnnnnnnnnnnnnnnnnnnnnnnnnnnnnnnnnnnnnnnnnnnnnnnnnnnnnnnnnnnnnnnnnnnnnnnnnnnnnnnnnnnnnnnnnnnnnnnnnnnnnnnnnnnnnnnnnnaggttgaatccacacagagtatgataaggattcttggactgtctgcaactttacctaactacctcgacgttgccacatttttacatgttaatccatacattggacttttcttctttgatgggcgttttcgacnnnnnnnnnnnnnnnnnnnnnnnnnnnnnnnnnnnnnnnnnntaagatgcagcagttgaataacatggatgaagtatgttatgaaaatgttttgaagcaagtaaaggctggacaccaggtacact

SEQ ID NO: 21426 - DNA, 101 bp, Macaca Mulatta
agatcgcgcccgatttcaaaaccgacctgaggtttcccagcgcagccatccgtgcgcggcaggaagctaggaagctacccggtgagtctgtttgaagatac

SEQ ID NO: 21427 - DNA, 744 bp, Macaca Mulatta
  misc_feature (1)...(744): n = A,T,C or G
gatcttcaacttactttcttttactttaaatccattggaaggaaaacttcaacagctaactaaagaagacactatttgtaaaatattgacaacagattctgatagagaaaaagatcacatttttagnagttcatatacagcatttggagatctggaagtatttttacatggtattggacttgaacatatgacagatttactaaaggnnnnnnnnnnnnnnnnnnnnnnnnnnnnnnnnnnnnnnnnnnnnnnnnnnnnnnnnnnnnnnnnnnnnnnnnnnnnnnnnnnnnnnnnnnnnnnnnnnnnnnnnnnnnnnnnnnnnnnnnnnnnnnnnnnnnnnnnnnnnnnnnnnnnnnnnnnnnnnnnnnnnnnnnnnnnnnnnnnnnnnnnnnnnnnnnnnnnnnnnnnnnnnnnnnnnnnnnnnnnnnnnnnnnnnnnnnnnnnnnnnnnnnnnnnnnnnnnnnnnnnnnnnnnnnngataacgctggaatgggcttctccccggaattttacttcagtttgtgaagaattggttaataatgttgaagatttgagtaaagaagtctgcaaattaaaagacttaattcaaaagnnnnnnnnnnnnnnnnnnnnnnnnnnnnnnnnnnnnnnnnnnnnnnnnnnnnnnnnnnnnnnnnnnnnnnnnnnnnnnaagaggacagctattacagtatgcggtctccgttttcttcttttcatttgcaagctaactttccagagaaaata

SEQ ID NO: 21428 - DNA, 2057 bp, Macaca Mulatta
  misc_feature (1)...(2057): n = A,T,C or G
gccatggaggagataaggtagcccccgtcgatcggatggggaagcccagttcaatggatacaaaattcaaggatgacttatttcggaagtatgtgcagttccatgagggcaaagtggataccaccactagcaggcagcggcctggcggcgatgagtgtctgcgggtggcagcatcgaccctgctcagcctgcacaaggtggatcccttttatcgattccggctgatccagttctatgaggtggtggagagctccctgcgctcgctcagctcctccagcatgcgggctctgcacggtgccttcagcatgctggagacagtgggcatcaacctcttcctctacccgtggaagaaggaattcaggagcatcaannnnnnnnnnnnnnnnnnnnnnnnnnnnnnnnnnnnnnnnnnnnnnnnnnnnnnnnnnnnnnnnnnnnnnnnnnnnnnnnnnnnnnnnnnnnnnnnnnnnnnnnnnnnnnnnnnnnnnnnnnnnnnnnnnnnnnnnnnnnnnnnnnnnnnnnnnnnnnnnnnnnnnnnnnnnnnnnnnnnnnnnnnnnnnnnnnnnnnnnnnnnnnnnnnnnnnnnnnnnnnnnnnnnnnnnnnnnnnnnnnnnnnnnnnnnnnnnnnnnnnnnnnnnnnnnnnnnnnnnnnnnnnnnnnnnnnnnnnnnnnnnnnnnnnnnnnnnnnnnnnnnnnnnnnnnnnnnnnnnnnnnnnnnnnnnnnnnnnnnnnnnnnnnnnnnnnnnnnnnnnnnnnnnnnnnnnnnnnnnnnnnnnnnnnnnnnnnnnnnnnnnnnnnnnnnnnnnnnnnnnnnnnnnnnnnnnnnnnnnnnnnnnnnnnnnnnnnnnnnnnnnnnnnnnnnnnnnnnnnnnnnnnnnnnnnnnnnnnnnnnnnnnnnnnnnnnnnnnnnnnnnnnnnnnnnnnnnnnnnnnnnnnnnnnnnnnnnnnnnnnnnnnnnnnnnnnnnnnnnnnnnnnnnnnnnnnnnnnnnnnnnnnnnnnnnnnnnnnnnnnnnnnnnnnnnnnnnnnnnnnnnnnnnnnnnnnnnnnnnnnnnnnnnnnnnnnnnnnnnnnnnnnnnnnnnnnnnnnnnnnnnnnnnnnnnnnnnnnnnnnnnnnnnnnnnnnnnnnnnnnnnnnnnnnnnnnnnnnnnnnnnnnnnnnnnnnnnnnnnnnnnnnnnnnnnnnnnnnnnnnnnnnnnnnnnnnnnnnnnnnnnnnnnnnnnnnnnnnnnnnnnnnnnnnnnnnnnnnnnnnnnnnnnnnnnnnnnnnnnnnnnnnnnnnnnnnnnnnnnnnnnnnnnnnnnnnnnnnnnnnnnnnnnnnncgggagaagtacccaggccagactcagggcctcgaccgcctcccgcaccttcactccaaatcgaagcccacctccacgcccacttcccgctgtggcttctgcaaccgcccaggtgccaccaacacctgcacccagtgttcaaaagtctcatgtgacgcctgcctcagcgcttaccattacgacccctgctacaaaaagagtgagctgcacaagttcatgcccaacaagcagctgaactacaagtccacccagctctcccatctcgtgtacagatagaccggcctcgccccttccagctccaagggctacatcaccaacctttcgggtttcacggtgaagaagtactcatgcattgatctcagaggcggaggcctgcacttgaccatgtaggtggcagagatcgtgggctgactgtgtccacgtgggagttcacttagcgactcagatgtttcaaccaatggctgctttgttgtctgacaagggagaaggtggcacttccgttcagattcattttgctgatctctccactccctgttcagttnnnnnnnnnnnnnnnnnnnnnnnnnnnnnnnnnnnnnnnnnnnnnnnnncctttaaagaggatttctatctctgggaccctcaccgcacctacccctcccattacaaagccgacttggactgggaagggccctacaggccaccagacatccacctggagcggcgagctagaggaatgttggcttgtgaaatgagc

SEQ ID NO: 21429 - DNA, 563 bp, Macaca Mulatta
tgatcagcaccaaacacagaagactcaccatggagtttgtgctgagctgggttttccttgttgctatgttaaaaggtgatttagggagaactagagatgttcagtgtgagtggatatgagtgagagaaacagtggatatgtgtggcagtttctgaccagggtgtctctgtgtttgcaggtgtccagtgtgaggtgcagctggtggagtctgggggcggcttggcacagcctggggggtccctgagactctcctgtgcagcctctggattcaccttcagtgaccactacatggactgggtccgccaggctccagggaagggcctggagtgggttagccgtattagaaacaaagctaacagttacacaacagaatacgccgcgtctgtgaaaggcagattcaccatctcaagggatgattcaaagaacacactgtatctgcaaatgagcagcctgaaaaccgaggacacggctgtgtattactgtgctagagacacagccaggggaggtcagtgtgagcccagacacaaacctccctgcaggggtgcgcgtggccaacagggggc

SEQ ID NO: 21430 - DNA, 806 bp, Macaca Mulatta
  misc_feature (1)...(806): n = A,T,C or G
gggggaccaggaccgcttcgagaagatttccgtgtggatgtagtacacatggatgaaaactcactggagttcgacatggtgggaattgacgcagccattgccaatgcttttcgacgaattctgttagctgaggtgccaactatggctgtggagaaggtcctggtgtacaataatacatccattgttcaggatgagatccttgctcaccgtctggggctcattcccattcatgctgatccccgtctttttgagtatcggaatcaaggagatgaagacggcacagagatagataccctacggtttcgtctccaagtcagatgcactcggaacccccatgctgctaaagattcctctgaccccaacgaactgtatgtgaaccacaaagtgtataccaggcatatgacatgggctccccctggggaatcaggctgatcttttcccagagggcactatccgacccgtgcacgatgacatcctcattgctcaactgcggcctggccaagaaattgacctgcttatgcactgtgttcaagggcattggccaaagatcatgccaagttttcaccaatggcaaccgccagttataagcttcctgccaaacttcacctggcttgaccccgtggaaaggggaggccaccttaggaatttgaaccaggggcttccccacctggggttattggaggtgcacggaaattccaaggtaaaaaagggggcccaaaatttgccaacccccgggttgggataccttnnnnnnnnnnnnnnnnnnnnggcctgagaaaacctaaagaaaggtgtataaagccttt

SEQ ID NO: 21431 - DNA, 799 bp, Macaca Mulatta
ggggctcccctcccactccccgcgcttccggccgggcccgcgccccccagacgccgagagcctgcagccccggcccggcggcgatggcgcggcgcctgcgtgtgctggtggacatggacggcgtcctggccgacttcgaggccggccttctgcggggcttccgccgccgcttccctgaggagccgcacgtgccgctggagcagcgccgcggcttcctggcccgcgagcagtaccgcgccctgcggcccgacctggcggataaagtggccagtgtgtacgaagccccgggctttttcctggacctggagcccatcccgggggccttggacgctgtgcgggagatgaacgacctaccggacacggaggtcttcatctgcaccagccccctgctgaagtacgaccactgtgtgggtgagaaggtgtggctgccccgcccctactccgcacgtggagctgcctaaatcctgattttaataagaaaccaccagaaacccagaaataccgctgggtggagcaacacctggggccccagttcgtagaacgaattatcctgacaagggacaagacggtggtcttgggggatctgctcattgatgacaagggacccattcgaggaaactctttaataaaagatcttgggtttaaaagagttcgcccctcatatataaactgagtagagaatgcctttgttgggccaaccctcggccccctttaaaaagcttttcataaaaccaattccgtttttgggccgccggagggcccccgaataggttataacgtaaaaaatgcgcgttctttc

SEQ ID NO: 21432 - DNA, 158 bp, Macaca Mulatta
gaagaaagataaagctttaactataggaaatagaatttatgaaagatctattaaagtgaagtggtacttacctcactttaacttaccaaatatataacttaccatatttagaaactgaggataaataagttttgattagaaagagaaagagattgaaa

SEQ ID NO: 21433 - DNA, 156 bp, Macaca Mulatta
aggaatttgttgagctgaaaaaacaatatgctgtgctccagcataagacaagcactacaggactaacaaaggaaacattaggaaaagttaaacagctaaaagatgctgcagaaaaattggctggagatacagaggacaagataagaagaataacag

SEQ ID NO: 21434 - DNA, 69 bp, Macaca Mulatta
cttctgtggctgtggctatagatgcagatctggctctggctccggctccagctttggccactactattg

SEQ ID NO: 21435 - DNA, 5173 bp, Macaca Mulatta
  misc_feature (1)...(5173): n = A,T,C or G
ggtcttcactgggattttcacagcagaaatggttctcaagatcattgccatggatccttattactacttccaagagggctggaatatctttgatggaattattgtcagcctgagtttaatggagcttggtctatcaaatgtggaaggattgtctgtactgcgatcattcagactgnnnnnnnnnnnnnnnnnnnnnnnnnnnnnnnnnnnnnnnnnnnnnnnnnnnnnnnnnnnnnnnnnnnnnnnnnnnnnnnnnnnnnnnnnnnnnnnnnnnnnnnnnnnnnnnnnnnnnnnnnnnnnnnnnnnnnnnnnnnnnnnnnnnnnnnnnnnnnnnnnnnnnnnnnnnnnnnnnnnnnnnnnnnnnnnnnnnnnnnnnnnnnnnnnnnnnnnnnnnnnnnnnnnnnnnnnnnnnnnnnnnnnnnnnnnnnnnnnnnnnnnnnnnnnnnnnnnnnnnnnnnnnnnnnnnnnnnnnnnnnnnnnnnnnnnnnnnnnnnnnnnnnnnnnnnnnnnnnnnnnnnnnnnnnnnnnnnnnnnnnnnnnnnnnnnnnnnnnnnnnnnnnnnnnnnnnnnnnnnnnnnnnnnnnnnnnnnnnnnnnnnnnnnnnnnnnnnnnnnnnnnnnnnnnnnnnnnnnnnnnnnnnnnnnnnnnnnnnnnnnnnnnnnnnnnnnnnnnnnnnnnnnnnnnnnnnnnnnnnnnnnnnnnnnnnnnnnnnnnnnnnnnnnnnnnnnnnnnnnnnnnnnnnnnnnnnnnnnnnnnnnnnnnnnnnnnnnnnnnnnnnnnnnnnnnnnnnnnnnnnnnnnnnnnnnnnnnnnnnnnnnnnnnnnnnnnnnnnnnnnnnnnnnnnnnnnnnnnnnnnnnnnnnnnnnnnnnnnnnnnnnnnnnnnnnnnnnnnnnnnnnnnnnnnnnnnnnnnnnnnnnnnnnnnnnnnnnnnnnnnnnnnnnnnnnnnnnnnnnnnnnnnnnnnnnnnnnnnnnnnnnnnnnnnnnnnnnnnnnnnnnnnnnnnnnnnnnnnnnnnnnnnnnnnnnnnnnnnnnnnnnnnnnnnnnnnnnnnnnnnnnnnnnnnnnnnnnnnnnnnnnnnnnnnnnnnnnnnnnnnnnnnnnnnnnnnnnnnnnnnnnnnnnaggatgtattaaaaagtttccattctgtcaagtaagtacagaagaaggcaaaggaaagatctggtggaatcttcggaaaacctgctacagcattgttgagcacaactggtttgagactttcatnnnnnnnnnnnnnnnnnnnnnnnnnnnnnnnnnggcctttgaagatatatacattgaacagcgaaagactatcaaaaccatgctagaatatgctgacaaagtctttacctatatattcattctggaaatgcttctcaaatgggttgcttatggatttcaaacgtatttcactaatgcctggtgctggctagatttcttgatcgttgatgtnnnnnnnnnnnnnnnnnnnnnnnnnnnnnnnnnnnnnnnnnnnnnnnnnnnnnnnnnnnnnnnnnnnnnnnnnnnnnnnnnnnnnnnnnnnnnnnnnnnnnnnnnnnnnnnnnnnnnnnnnnnnnnnnnnnnnnnnnnnnnnnnnnnnnnnnnnnnnnnnnnnnnnnnnnnnnnnnnnnnnnnnnnnnnnnnnnnnnnnnnnnnnnnnnnnnnnnnnnnnnnnnnnnnnnnnnnnnnnnnnnnnnnnnnnnnnnnnnnnnnnnnnnnnnnnnnnnnnnnnnnnnnnnnnnnnnnnnnnnnnnnnnnnnnnnnnnnnnnnnnnnnnnnnnnnnnnnnnnnnnnnnnnnnnnnnnnnnnnnnnnnnnnnnnnnnnnnnnnnnnnnnnnnnnnnnnggccacatttaaaggctggatggatattatgtatgcagctgttgattcacgagatgtnnnnnnnnnnnnnnnnnnnnnnnnnnnnnnnnnnnnnnnnnnnnnnnnnnnnnnnnnnnnnnnnnnnnnnnnnnnnnnnnnnnnnnnnnnnnnnnnnnnnnnnnnnnnnnnnnnnnnnnnnnnnnnnnnnnnnnnnnnnnnnnnnnnnnnnnnnnnnnnnnnnnnnnnnnnnnnnnnnnnnnnnnnnnnnnnnnnnnnnnnnnnnnnnnnnnnnnnnnnnnnnnnnnnnnnnnnnnnnnnnnnnnnnnnnnnnnnnnnnnnnnnnnnnnnnnnnnnnnnnnnnnnnnnnnnnnnnnnnnnnnnnnnnnnnnnnnnnnnnnnnnnnnnnnnnnnnnnnnnnnnnnnnnnnnnnnnnnnnnnnnnnnnnnnnnnnnnnnnnnnnnnnnnnnnnnnnnnnnnnnnnnnnnnnnnnnnnnnnnnnnnnnnnnnnnnnnnnnnnnnnnnnnnnnnnnnnnnnnnnnnnnnnnnnnnnnnnnnnnnnnnnnnnnnnnnnnnnnnnnnnnnnnnnnnnnnnnnnnnnnnnnnnnnnnnnnnnnnnnnnnnnnnnnnnnnnnnnnnnnnnnnnnnnnnnnnnnnnnnnnnnnnnnnnnnnnnnnnnnnnnnnnnnnnnnnnnnnnnnnnnnnnnnnnnnnnnnnnnnnnnnnnnnnnnnnnnnnnnnnnnnnnnnnnnnnnnnnnnnnnnnnnnnnnnnnnnnnnnnnnnnnnnnnnnnnnnnnnnnnnnnnnnnnnnnnnnnnnnnnnnnnnnnnnnnnnnnnnnnnnnnnnnnnnnnnnnnnnnnnnnnnnnnnnnnnnnnnnnnnnnnnnnnnnnnnnnnnnnnnnnnnnnnnnnnnnnnnnnnnnnnnnnnnnnnnnnnnnnnnnnnnnnnnnnnnnnnnnnnnnnnnnnnnnnnnnnnnnnnnnnnnnnnnnnnnnnnnnnnnnnnnnnnnnnnnnnnnnnnnnnnnnnnnnnnnnnnnnnnnnnnnnnnnnnnnnnnnnnnnnnnnnnnnnnnnnnnnnnnnnnnnnnnnnnnnnnnnnnnnnnnnnnnnnnnnnnnnnnnnnnnnnnnnnnnnnnnnnnnnnnnnnnnnnnnnnnnnnnnnnnnnnnnnnnnnnnnnnnnnnnnnnnnnnnnnnnnnnnnnnnnnnnnnnnnnnnnnnnnnnnnnnnnnnnnnnnnnnnnnnnnnnnnnnnnnnnnnnnnnnnnnnnnnnnnnnnnnnnnnnnnnnnnnnnnnnnnnnnnnnnnnnnnnnnnnnnnnnnnnnnnnnnnnnnnnnnnnnnnnnnnnnnnnnnnnnnnnnnnnnnnnnnnnnnnnnnnnnnnnnnnnnnnnnnnnnnnnnnnnnnnnnnnnnnnnnnnnnnnnnnnnnnnnnnnnnnnnnnnnnnnnnnnnnnnnnnnnnnnnnnnnnnnnnnnnnnnnnnnnnnnnnnnnnnnnnnnnnnnnnnnnnnnnnnnnnnnnnnnnnnnnnnnnnnnnnnnnnnnnnnnnnnnnnnnnnnnnnnnnnnnnnnnnnnnnnnnnnnnnnnnnnnnnnnnnnnnnnnnnnnnnnnnnnnnnnnnnnnnnnnnnnnnnnnnnnnnnnnnnnnnnnnnnnnnnnnnnnnnnnnnnnnnnnnnnnnnnnnnnnnnnnnnnnnnnnnnnnnnnnnnnnnnnnnnnnnnnnnnnnnnnnnnnnnnnnnnnnnnnnnnnnnnnnnnnnnnnnnnnnnnnnnnnnnnnnnnnnnnnnnnnnnnnnnnnnnnnnnnnnnnnnnnnnnnnnnnnnnnnnnnnnnnnnnnnnnnnnnnnnnnnnnnnnnnnnnnnnnnnnnnnnnnnnnnnnnnnnnnnnnnnnnnnnnnnnnnnnnnnnnnnnnnnnnnnnnnnnnnnnnnnnnnnnnnnnnnnnnnnnnnnnnnnnnnnnnnnnnnnnnnnnnnnnnnnnnnnnnnnnnnnnnnnnnnnnnnnnnnnnnnnnnnnnnnnnnnnnnnnnnnnnnnnnnnnnnnnnnnnnnnnnnnnnnnnnnnnnnnnnnnnnnnnnnnnnnnnnnnnnnnnnnnnnnnnnnnnnnnnnnnnnnnnnnnnnnnnnnnnnnnnnnnnnnnnnnnnnnnnnnnnnnnnnnnnnnnnnnnnnnnnnnnnnnnnnnnnnnnnnnnnnnnnnnnnnnnnnnnnnnnnnnnnnnnnnnnnnnnnnnnnnnnnnnnnnnnnnnnnnnnnnnnnnnnnnnnnnnnnnnnnnnnnnnnnnnnnnnnaaaggtgttttgcccaggagagataaaatttttgcttcaaaacccagaaaaaagaaattgtaatgggttacagtttcagttacttccattttcctagatggcttttaattttgaaagtattttagtcttgttatgtttgtttctgtctgaacagttatgtgcctgtaaagtttcctctaatattacaggattattttatgcaaagtgttctgtttcagcaagtgcaaattttattctaagtttcagagctctatatttaattttggtcaaatgctttccaaaaaggtaatctaataaatccattctagaaaaatatatctaaagtattgctttagaatagttgttccactttctgctgcagtattgctttgccatcttctgctctcagcaaagctgatagtctatgtcaattaaataccctatgttatgtaaatagttattttatcctgtggtgcatgtttgggcaaatatatatatagcctgataaacaacttctattaaatcaaatatgtaccacagtgtatgtgtcttttgcgagcttccaacagggatgtatcctgtaccattcattaaacatagtttaaaggctatcactagtgcatgttaatattgcctatgctgctctattttactcaatccattcttcacaagtcttggttaaagattgtcacatattggtgaaagaatgaattcaacctgctatctgtccattatgtcaagcagaataatttgaagctatttacaaacacctttacttttgcacttttaattcaacatgagtatcatatggtatctctctagatttcaaggaaacacactggatactgcctactgacaaaacctattcttcatannnnnnnnnnnnnnnnnnnnnnnnnnnnnnnnnnnnnnnnnnnnnnnnnnnnnnnnnnnntttatttgtcagcattttgtacataagaaaattattttcaggttgatgacatcacannnnnnnnnnnnnnnnnnnnnnnnnnnnnnnnnnnaatcacaattccaaacttttgaatccaataagatttttcaatggataatttcctaaaataaaagt

SEQ ID NO: 21436 - DNA, 612 bp, Macaca Mulatta
  misc_feature (1)...(612): n = A,T,C or G
tacaacaacaaaacctacagagtggatgatattgattggaagcagaatcctgaagacacatttaacagatcagatggtagcaaaatcacctatatagactactacaggcagngcagcaacataaagaaattgtcactgtgaagaaacagccacttttggtcagccagggcagatggaaaaagggcctaacgggtacacagcgtgaacctatcctgctgattcctcagctatgctccatgacaggtnaggtctaacagatganatacgtaaagattatagcactatgaaagaattggctaaacatacaagactgagtccgagaagnnnnnnnnnnnnnnnnnnnnnnnnnnnnnnnnnnnnnnnnnnnnnnnnnnnnnnnnnnnnnnnnnnnnaaagttttatgctaggtcttataattcttttccaggttaaagccaattcacaaggagactggtcaagagaaataagagaattgccgttacttaatgcaatgccgctacatagttggctcatactccatagtaggagcagtcacagggaagccatgtccttaaagagtcatctacagagtgtcacagcccccatgggcataactatgaaaccagcagaaat

SEQ ID NO: 21437 - DNA, 4323 bp, Macaca Mulatta
  misc_feature (1)...(4323): n = A,T,C or G
ggcggcaaccggcggcacccatggaaccactgggcaactggaggagcctgcgggcgccaccgccttcgatgctgttgctgctgctcctgcaggtggcggggcccgtgggcgccctggcggagaccttgctgaacgcgccgagggccatgggcaccagctccagcccgcccagccctgcgagcgtggtggctcccggaacgacgctgttcgaggagagccggctgcctgtgtttaccctggattacccccacgtgcagatccccttcgagatcactctgtggatcctgctggcctccctggccaagattgnnnnnnnnnnnnnnnnnnnnnnnnnnnnnnnnnnnnnnnnnnnnnnnnnnnnnnnnnnnnnnnnnnnnnnnnnnnnnnnnnnnnnnnnnnnnnnnnnnnnnnnnnnnnnnnnnnnnnnnnnnnnnnnnnnnnnnnnnnnnnnnnnnnnnnnnnnnnnnnnnnnnnnnnnnnnnnnnnnnnnnnnnnnnnnnnnnnnnnnnnnnnnnnnnnnnnnnnnnnnnnnnnnnnnnnnnnnnnnnnnnnnnnnnnnnnnnnnnnnnnnnnnnnnnnnnnnnnnnnnnnnnnnnnnnnnnnnnnnnnnnnnnnnnnnnnnnnnnnnnnnnnnnnnnnnnnnnnnnnnnnnnnnnnnnnnnnnnnnnnnnnnnnnnnnnnnnnnnnnnnnnnnnnnnnnnnnnnnnnnnnnnnnnnnnnnnnnnnnnnnnnnnnnnnnnnnnnnnnnnnnnnnnnnnnnnnnnnnnnnnnnnnnnnnnnnnnnnnnnnnnnnnnnnnnnnnnnnnnnnnnnnnnnnnnnnnnnnnnnnnnnnnnnnnnnnnnnnnnnnnnnnnnnnnnnnnnnnnnnnnnnnnnnnnnnnnnnnnnnnnnnnnnnnnnnnnnnnnnnnnnnnnnnnnnnnnnnnnnnnnnnnnnnnnnnnnnnnnnnnnnnnnnnnnnnnnnnnnnnnnnnnnnnnnnnnnnnnnnnnnnnnnnnnnnnnnnnnnnnnnnnnnnnnnnnnnnnnnnnnnnnnnnnnnnnnnnnnnnnnnnnnnnnnnnnnnnnnnnnnnnnnnnnnnnnnnnnnnnnnnnnnnnnnnnnnnnnnnnnnnnnnnnnnnnnnnnnnnnnnnnnnnnnnnnnnnnnnnnnnnnnnnnnnnnnnnnnnnnnnnnnnnnnnnnnnnnnnnnnnnnnnnnnnnnnnnnnnnnnnnnnnnnnnnnnnnnnnnnnnnnnnnnnnnnnnnnnnnnnnnnnnnnnnnnnnnnnnnnnnnnnnnnnnnnnnnnnnnnnnnnnnnnnnnnnnnnnnnnnnnnnnnnnnnnnnnnnnnnnnnnnnnnnnnnnnnnnnnnnnnnnnnnnnnnnnnnnnnnnnnnnnnnnnnnnnnnnnnnnnnnnnnnnnnnnnnnnnnnnnnnnnnnnnnnnnnnnnnnnnnnnnnnnnnnnnnnggaataactattcgaccactggtggagtttcttgatgtcaagaggtccaatacgaaacaacaagctgtcagtgaagaaatctactgtcggnnnnnnnnnnnnnnnnnnnnnnnnnnnnnnnnnnnnnnnnnnnnnnnnnnnnnnnnnnnnnnnnnnnnnnngtttaaaaagtttgatgataaatatctgcggaagcttttgattcgggaaaaccaaccaaagtcaagcattgtatctttatataagaagcttgaaataaaacatgccattgagatggcagagactgggatgataagtactgtccctacatatccatctctaannnnnnnnnnnnnnnnnnnnnnnnnnnnnnnnnnnnnnnnnnnnnnnnnnnnnnnnnnnnnnnnnnnnnnnnnnnnnnnnnnnnnnnnnnnnnnnnnnnnnnnnnnnnnnnnnnnnnnnnnnnnnnnnnnnnnnnnnnnnnnnnnnnnnnnnnnnnnnnnnnnnnnnnnnnnnnnnnnnnnnnnnnnnnnnnnnnnnnnnnnnnnnnnnnnnnnnnnnnnnnnnnnnnnnnnnnnnnnnnnnnnnnnnnnnnnnnnnnnnnnnnnnnnnnnnnnnnnnnnnnnnnnnnnnnnnnnnnnnnnnnnnnnnnnnnnnnnnngatggcaatagcagtgactcagacacagatgccgggaccaccgtgctcaatttgcagcccagagccaggcgcttcttgccagaacagttctccaagaaatcctcccaggcctataaaatggaatggaagaacgaggtagatgttgaatctggccgagagaagcccagcacccccccaacaccccacagcagagaaaagggcacccagacgtcaggcttactacagcagccccttctctctaaagaccagtttgacccagagagggaagacagtttgactgaatgcatcccgcccaagccaccaccacggttggtctggagggcatcggaacctggaagccggaaagccagattcgggagtgagaagccttaatagaagcagccaaagcagatgtgagtgtctgacccagcacagctgtgctttgttactctgaaacccgacaaaacagtggaatccatgaaaactctctgtgcatctaaatacttccggggggcgatagattcatgccacggataaatgaggcaaatccgaagaaaaggaaaatccaataaaaaatagtcccacaaaatgccttttgtgacttacaggtggcaattgtattatttgcaggcctgnnnnnnnnnnnnnnnnnnnnnnnnnnnnnnnnnnnnnnnnnnnnnnnnnnnnnnnnnnnnnnnnnnnnnnnnnnnnnnnnnnnnnnnnnnnnnnnnnnnnnnnnnnnnnnnnnnnnnnnnnnnnnnnnnnnnnnnnnnnnnnnnnnnnnnnnnnnnnnnnnnnnnnnnnnnnnnnnnnnnnnnnnnnnnnnnnnnnnnnnnnnnnnnnnnnnnnnnnnnnnnnnnnnnnnnnnnnnnnnnnnnnnnnnnnnnnnnnnnnnnnnnnnnnnnnnnnnnnnnnnnnnnnnnnnnnnnnnnnnnnnnnnnnnnnnnnnnnnnnnnnnnnnnnnnnnnnnnnnnnnnnnnnnnnnnnnnnnnnnnnnnnnnnnnnnnnnnnnnnnnnnnnnnnnnnnnnnnnnnnnnnnnnnnnnnnnnnnnnnnnnnnnnnnnnnnnnnnnnnnnnnnnnnnnnnnnnnnnnnnnnnnnnnnnnnnnnnnnnnnnnnnnnnnnnnnnnnnnnnnnnnnnnnnnnnnnnnnnnnnnnnnnnnnnnnnnnnnnnnnnnnnnnnnnnnnnnnnnnnnnnnnnnnnnnnnnnnnnnnnnnnnnnnnnnnnnnnnnnnnnnnnnnnnnnnnnnnnnnnnnnnnnnnnnnnnnnnnnnnnnnnnnnnnnnnnnnnnnnnnnnnnnnnnnnnnnnnnnnnnnnnnnnnnnnnnnnnnnnnnnnnnnnnnnnnnnnnnnnnnnnnnnnnnnnnnnnnnnnnnnnnnnnnnnnnnnnnnnnnnnnnnnnnnnnnnnnnnnnnnnnnnnnnnnnnnnnnnnnnnnnnnnnnnnnnnnnnnnnnnnnnnnnnnnnnnnnnnnnnnnnnnnnnnnnnnnnnnnnnnnnnnnnnnnnnnnnnnnnnnnnnnnnnnnnnnnnnnnnnnnnnnnnnnnnnnnnnnnnnnnnnnnnnnnnnnnnnnnnnnnnnnnnnnnnnnnnnnnnnnnnnnnnnnnnnnnnnnnnnnnnnnnnnnnnnnnnnnnnnnnnnnnnnnnnnnnnnnnnnnnnnnnnnnnnnnnnnnnnnnnnnnnnnnnnnnnnnnnnnnnnnnnnnnnnnnnnnnnnnnnnnnnnnnnnnnnnnnnnnnnnnnnnnnnnnnnnnnnnnnnnnnnnnnnnnnnnnnnnnnnnnnnnnnnnnnnnnnnnnnnnnnnnnnnnnnnnnnnnnnnnnnnnnnnnnnnnnnnnnnnnnnnnnntcaggagggaaacatgaaaatcttaagacaaaaatcctcagaagtggttttccaccccttcaccacctccaccaacaaggagaagtaaatctacacctttttctcatgttctaaagtcttagaatactgctggattgtcaagcatgagacacagcaaaggttacatacacaaggtacaagttcataggaacacaattccttgatccagggaaagtagcatagaatgcaatttgaaaactacaggcttaggactttgtgccaaaatctctattttaaatgaaaatatttatatatataaatacatttattctgcttaacataaatgaaaactgacataaaattttataacatgattcatcaagatatgtgatgtagatttttgagaatgccaaaaatcaattttgagaatagctacagt

SEQ ID NO: 21438 - DNA, 988 bp, Macaca Mulatta
  misc_feature (1)...(988): n = A,T,C or G
ggttccagaatatcttaaccatgtaagtaaacgtttagaggaagaaggagacagagtgatcacttacttggaccacggcacacagnnnnnnnnnnnnnnnnnnnnnnnnnnnnnnnnnnnnnnnnnnnnnnnnnnnnnnnnnnnnnnnnnnnnnnnnnnnnnnnnnnnnnnnnnnnnnnnnnnnnnnnnnnnnnnnnnnnnnnnnnnnnnnnnnnnnnnnnnnnnnnnnnnnnnnnnnnnnnnnnnnnnnnnnnnnnnnnnnnnnnnnnnnnnnnnnnnnnnnnnnnnnnnnnnnnnnnnnnnnnnnnnnnnnnnnnnnnnnnnnnnnnnnnnnnnnnnnnnnnnnnnnnnnnnnnnnnnnnnnnnnnnnnnnnnnnnnnnnnnnnnnnnnnnnnnnnnnnnnnnnnnnnnnnnnnnnnnnnnnnnnnnnnnnnnnnnnnnnnnnnnnnnnnnnnnnnnnnnnnnnnnnnnnnnnnnnnnnnnnnnnnnnnnnnnnnnnnnnnnnnnnnnnnnnnnnnnnnnnnnnnnnnnnnnnnnnnnnnnnnnnnnnnnnnnnnnnnnnnnnnnnnnnnnnnnnnnnnnnnnnnnnnnnnnnnnnnnnnnnnnnnnnnnnnnnnnnnnnnnnnnnnnnnnnnnnnnnnnnnnnnnnnnnnnnnnnnnnnnnnnnnnnnnnnnnnnnnnnnnnnnnnnnnnnnnnnnnnnnnnnnnnnnnnnnnnnnnnnnnnnnnnnnnnnnnnnnnnnnnnnnnnnnnnnnnnnnnnnnnnnnnnnnnnnnnnnnnnnnnnnnnnnnnnnnnnnnnnnnnnnnnnnnnnnnnnnnnnnnnnnnnnnnnnnnnnnnnnnnnnnnnnnnnnnnnnnnnnnnnnnnnnnnnnnnnnnntaaacttcaggaagtatttaaggcattttatcttggattttcagtggtcgaaaacttcagtggcaaactactttgggacatgctgttttaaaagcggagtttaaagaag

SEQ ID NO: 21439 - DNA, 1278 bp, Macaca Mulatta
  misc_feature (1)...(1278): n = A,T,C or G
atgaaaatgggaaatttcctggccttccttcttctcagctttcatgtctgcgtccttttgcttcagctgctcnnnnnnnnnagctcagttttctgtgcttggaccctctgggcccatcctggccatggtgggtgaagacgctgatctgccctgtcacctgttcccaaccatgagtgcagagaccatggagctgagatgggtgagttccagcctaaggcaggtggtgaatgtgtatgcagatggaaaggaagtggaagacaggcagagtgcaccatatcgagggagaacttcgattctacgggatgacatcgctgcagggaaggctgctctccgaatacacaacgtcacagcctctgacagtggaaagtacttgtgttatttccaagatggtgacttctatgaaaaagccctggtggagctgaaggttgcagnncagcactgggttctaatcttcatgttgaagtgaagggttatgaggatggagggatccatctggagtgcaggtccactggctggtatccccaacccaaaatacagtggagcaatgccaagggacagaacatcccagctgtggaagcacctgtggttgcagatggagtgggcctatatgcagtagcagcatctgtgatcatgagaggcggctctggggagagtgtgtcctgcatcatcagaaattctgttcttggcctggaaaagacagccagcatttctatcgcannnncgcagaccccttcttcaggagtgcccagccctggatcgcagccctggcagggaccctgcctatcttgctgctgcttctcggtggagccagttacttcttgtggagacaacataaggaaataactgctttatccagtgagatagaaagtgagcaagagatgaaagaacggggatatgctgcaacaaagcaggaaataagcctaagagnnnnnnnnnnnnnnnnnnnnnnnnnnnnnnnnnnnnnnnnnnnnnnnnntggaaaggagtcttcgtctgaaactgataagtcagcctgatgctctgnnnnnnaaatggccctcttcaagcctggnnntggctctgaaatccaggaaaaatggctgaccccatggacacctcctcaaactctctgcagcggatgtgattctggatccagacaccgcaaatgccatcctccttgtttctgaggaccagaggagtgtgcagcgtgccgaagagccgcgggatcttccagacaaccctgagagatttgaatggcgttactgtgtgcttggccgtgaaaacttcacatcagggaga

SEQ ID NO: 21440 - DNA, 672 bp, Macaca Mulatta
tttctgctcctgtggcttcttctgacccctggggctgggacagaggagatcatcgggggccatgaggccaagccccactcccgcccctacatggcctttgttcagtttctggatgagaagagtaagaagaggtgtggtggcatcctagtgagaaaggactttgtgctgacagctgctcactgcctgggaagctccataaatgtcaccttgggggcccataatatcaaggaacaggagcggacccagcagattatccctgtgaaaagagccatcccccacccagcctataatcctaagaacttttccaacgacatcatgctactgcagctggagagaaaggccaagcggaccacagctgtacagcccctcaggttacctagcagcaaggtccaggtgaagccagggcaagtgtgcagtgtggccggctggggtcgtgtctcaacgggcactttagcaaccacactgcaggaagtgttgctgacagtgcagaaggactgggagtgtgaacgtctcttccatgccaattacagcaaagccactgagatttgtgtgggggatccaaagacgacaaagaccggtttcaagggggactccggggggcccctcgtgtgtaagcgtgtggcccaaagtattttctcccatggacgcataaacgggacacctccaggagtc

SEQ ID NO: 21441 - DNA, 1332 bp, Macaca Mulatta
  misc_feature (1)...(1332): n = A,T,C or G
gacttggcatccagagatgagccccagaagttacctccaaaaagtgatatttatgaaacagaattattccagtgggttaacatggaggaatttaaaagccatagtcctgagagatcaattttcagagatatctgggaaggcaactgtcattttgagcaacatcagggacaagaggagggttattttagacgacttatgattaaccatgaaaacatgcccatttttagccaacatactttactcactcaagaattttatgatagagagaaaatctctgaatgtaaaaagtgtagaaaaatcttcagttaccatttatattttannnnnnnnnnnnnnnnnnnnnnnnnnnnnnnnnnnnnnnnnnnnnnnnnnnnnnnnnnnnnnnnnnnnnnnnnnntcacactggtgagaaaccttatgaatnnnnnnnnnnnnnnnnnnnnnnnnnnnnnnnnnnnnnnnnnnnnnnnnnnnnnnnnnnnnnnnnnnnnnnnnnnnnnnnnnnnnnnnnnnnnnnnnnnnnnnnnnnnnnnnnnnnnnnnnnnnnnnnnnnnnnnnnnnnnnnnnnnnnnnnnnnnnnnnnnnnnnnnnnnnnnnnnnnnnnnnnnnnnnnnnnnnnnnnnnnnnnnnnnnnnnnnnnnnnnnnnnnnnnnnnnnnnnnnnnnnnnnnnnnnnnnnnnnnnnnnnnnnnnnnnnnnnnnnnnnnnnnnnnnnnnnnnnnnnnnnnnnnnnnnnnnnnnnnnnnnnnnnnnnnnnnnnnnnnnnnnnnnnnnnnnnnnnnnnnnnnnnnnnnnnnnnnnnnnnnnnnnnnnnnnnnnnnnnnnnnnnnnnnnnnnnnnnnnnnnnnnnnnnnnnnnnnnnnnnnnnnnnnnnnnnnnnnnnnnnnnnnnnnnnnnnnnnnnnnnnnnnnnnnnnnnnnnnnnnnnnnnnnnnnnnnnnnnnnnnnnnnnnnnnnnnnnnnnnnnnnnnnnnnnnnnnnnnnnnnnnnnnnnnnnnnnnnnnnnnnnnnnnnnnnnnnnnnnnnnnnnnnnnnnnnnnnnnnnnnnnnnnnnnnnnnnnnnnnnnnnnnnnnnnnnnnnnnnnnnnnnnnnnnnnnnnnnnnnnnnnnnnnnnnnnnnnnnnnnnnnnnnnnnnnnnnnnnnnnnnnnnntggtgagaaaccttatgaatgcaaagaatgtggaaaggcctttagacagcgatcacagcttactcaacatcagagacttcatactggtgaaaaaccctatgaatgtaagcaatgtgggaaagcttttattcgtggctttcaacttactgaacatctgcgactccatactggtgagaaacctt

SEQ ID NO: 21442 - DNA, 4357 bp, Macaca Mulatta
  misc_feature (1)...(4357): n = A,T,C or G
ggataatgctcccggagaaggattctgcagcagttctcaaaggctagaattcagtggggtttgctgcatatgcgctgnnnnnnnnnnnnnnnnnnnnnnnnnnnnnnnnnnnnnnnnnnnnnnnnnnnnnnnnnnnnnnnnnnnnnnnnnnnnnnnnnnnnnnnnnnnnnnnnnnnnnnnnnnnnnnnnnnnnnnnnnnnnnnnnnnnnnnnnnnnnnnnnnnnnnnnnnnnnnnnnnnnnnnnnnnnnnnnnnnnnnnnnnnnnnnnnnnnnnnnnnnnnnnnnnnnnnnnnnnnnnnnnnnnnnnnnnnnnnnnnnnnnnnnnnnnnnnnnnnnnnnnnnnnnnnnnnnnnnnnnnnnnnnnnnnnnnnnnnnnnnnnnnnnnnnnnnnnnnnnnnnnnnnnnnnnnnnnnnnnnnnnnnnnnnnnnnnnnnnnnnnnnnnnnnnnnnnnnnnnnnnnnnnnnnnnnnnnnnnnnnnnnnnnnnnnnnnnnnnnnnnnnnnnnnnnnnnnnnnnnnnnnnnnnnnnnnnnnnnnnnnnnnnnnnnnnnnnnnnnnnnnnnnnnnnnnnnnnnnnnnnnnnnnnnnnnnnnnnnnnnnnnnnnnnnnnnnnnnnnnnnnnnnnnnnnnnnnnnnnnnnnnnnnnnnnnnnnnnnnnnnnnnnnnnnnnnnnnnnnnnnnnnnnnnnnnnnnnnnnnnnnnnnnnnnnnnnnnnnnnnnnnnnnnnnnnnnnnnnnnnnnnnnnnnnnnnnnnnnnnnnnnnnnnnnnnnnnnnnnnnnnnnnnnnnnnnnnnnnnnnnnnnnnnnnnnnnnnnnnnnnnnnnnnnnnnnnnnnnnnnnnnnnnnnnnnnnnnnnnnnnnnnnnnnnnnnnnnnnnnnnnnnnnnnnnnnnnnnnnnnnnnnnnnnnnnnnnnnnnnnnnnnnnnnnnnnnnnnnnnnnnnnnnnnnnnnnnnnnnnnnnnnnnnnnnnnnnnnnnnnnnnnnnnnnnnnnnnnnnnnnnnnnnnnnnnnnnnnnnnnnnnnnnnnnnnnnnnnnnnnnnnnnnnnnnnnnnnnnnnnnnnnnnnnnnnnnnnnnnnnnnnnnnnnnnnnnnnnnnnnnnnnnnnnnnnnnnnnnnnnnnnnnnnnnnnnnnnnnnnnnnnnnnnnnnnnnnnnnnnnnnnnnnnnnnnnnnnnnnnnnnnnnnnnnnnnnnnnnnnnnnnnnnnnnnnnnnnnnnnnnnnnnnnnnnnnnnnnnnnnnnnnnnnnnnnnnnnnnnnnnnnnnnnnnnnnnnnnnnnnnnnnnnnnnnnnnnnnnnnnnnnnnnnnnnnnnnnnnnnnnnnnnnnnnnnnnnnnnnnnnnnnnnnnnnnnnnnnnnnnnnnnnnnnnnnnnnnnnnnnnnnnnnnnnnnnnnnnnnnnnnnnnnnnnnnnnnnnnnnnnnnnnnnnnnnnnnnnnnnnnnnnnnnnnnnnnnnnnnnnnnnnnnnnnnnnnnnnnnnnnnnnnnnnnnnnnnnnnnnnnnnnnnnnnnnnnnnnnnnnnnnnnnnnnnnnnnnnnnnnnnnnnnnnnnnnnnnnnnnnnnnnnnnnnnnnnnnnnnnnnnnnnnnnnnnnnnnnnnnnnnnnnnnnnnnnnnnnnnnnnnnnnnnnnnnnnnnnnnnnnnnnnnnnnnnnnnnnnnnnnnnnnnnnnnnnnnnnnnnnnnnnnnnnnnnnnnnnnnnnnnnnnnnnnnnnnnnnnnnnnnnnnnnnnnnnnnnnnnnnnnnnnnnnnnnnnnnnnnnnnnnnnnnnnnnnnnnnnnnnnnnnnnnnnnnnnnnnnnnnnnnnnnnnnnnnnnnnnnnnnnnnnnnnnnnnnnnnnnnnnnnnnnnnnnnnnnnnnnnnnnnnnnnnnnnnnnnnnnnnnnnnnnnnnnnnnnnnnnnnnnnnnnnnnnnnnnnnnnnnnnnnnnnnnnnnnnnnnnnnnnnnnnnnnnnnnnnnnnnnnnnnnnnnnnnnnnnnnnnnnnnnnnnnnnnnnnnnnnnnnnnnnnnnnnnnnnnnnnnnnnnnnnnnnnnnnnnnnnnnnnnnnnnnnnnnnnnnnnnnnnnnnnnnnnnnnnnnnnnnnnnnnnnnnnnnnnnnnnnnnnnnnnnnnnnnnnnnnnnnnnnnnnnnnnnnnnnnnnnnnnnnnnnnnnnnnnnnnnnnnnnnnnnnnnnnnnnnnnnnnnnnnnnnnnnnnnnnnnnnnnnnnnnnnnnnnnnnnnnnnnnnnnnnnnnnnnnnnnnnnnnnnnnnnnnnnnnnnnnnnnnnnnnnnnnnnnnnnnnnnnnnnnnnnnnnnnnnnnnnnnnnnnnnnnnnnnnnnnnnnnnnnnnnnnnnnnnnnnnnnnnnnnnnnnnnnnnnnnnnnnnnnnnnnnnnnnnnnnnnnnnnnnnnnnnnnnnnnnnnnnnnnnnnnnnnnnnnnnnnnnnnnnnnnnnnnnnnnnnnnnnnnnnnnnnnnnnnnnnnnnnnnnnnnnnnnnnnnnnnnnnnnnnnnnnnnnnnnnnnnnnnnnnnnnnnnnnnnnnnnnnnnnnnnnnnnnnnnnnnnnnnnnnnnnnnnnnnnnnnnnnnnnnnnnnnnnnnnnnnnnnnnnnnnnnnnnnnnnnnnnnnnnnnnnnnnnnnnnnnnnnnnnnnnnnnnnnnnnnnnnnnnnnnnnnnnnnnnnnnnnnnnnnnnnnnnnnnnnnnnnnnnnnnnnnnnnnnnnnnnnnnnnnnnnnnnnnnnnnnnnnnnnnnnnnnnnnnnnnnnnnnnnnnnnnnnnnnnnnnnnnnnnnnnnnnnnnnnnnnnnnnnnnnnnnnnnnnnnnnnnnnnnnnnnnnnnnnnnnnnnnnnnnnnnnnnnnnnnnnnnnnnnnnnnnnnnnnnnnnnnnnnnnnnnnnnnnnnnnnnnnnnnnnnnnnnnnnnnnnnnnnnnnnnnnnnnnnnnnnnnnnnnnnnnnnnnnnnnnnnnnnnnnnnnnnnnnnnnnnnnnnnnnnnnnnnnnnnnnnnnnnnnnnnnnnnnnnnnnnnnnnnnnnnnnnnnnnnnnnnnnnnnnnnnnnnnnnnnnnnnnnnnnnnnnnnnnnnnnnnnnnnnnnnnnnnnnnnnnnnnnnnnnnnnnnnnnnnnnnnnnnnnnnnnnnnnnnnnnnnnnnnnnnnnnnnnnnnnnnnnnnnnnnnnnnnnnnnnnnnnnnnnnnnnnnnnnnnnnnnnnnnnnnnnnnnnnnnnnnnnnnnnnnnnnnnnnnnnnnnnnnnnnnnnnnnnnnnnnnnnnnnnnnnnnnnnnnnnnnnnnnnnnnnnnnnnnnnnnnnnnnnnnnnnnnnnnnnnnnnnnnnnnnnnnnnnnnnnnnnnnnnnnnnnnnnnnnnnnnnnnnnnnnnnnnnnnnnnnnnnnnnnnnnnnnnnnnnnnnnnnnnnnnnnnnnnnnnnnnnnnnnnnnnnnnnnnnnnnnnnnnnnnnnnnnnnnnnnnnnnnnnnnnnnnnnnnnnnnnnaaacttgaggctacacaggacatgaccccctcatccaaagcaccgcaggaggtagatgcatttatgggtgtcgagtctggccacatgaaagaaggcatcaaagttagtgagacagaagtcaaagagaaggtggccaagcctgacttggtgcaccaggaggctgtagacaaggaggagtcctatgagtctagtggtgagcatgaaagtcttaccatggagtccttgaaagctgatgagggcaagaaggaaacatctccagaatcatctctaattcaagatgagattgctgtcaaactgtcggtggaaataccttgcccacctgctgtttcagaggctgatttagccacagatgagagagctgatgtccagatggaatttattcaggggccaaaagaagaaagcaaagagaccccagatatatccatcacgccttctgatgttgcagagccattgcatgaagcaatcatatctgaaccagcagagattcagagtgaggaagaagagatagaagcccagggagaatatgataaactgctcttccgctcagacacccttcagattactgacctgggtgtctcaggtgccagggaggaatttgtggagacctgcccaggtgaacacaaaggagtgattgagtctgttgtgaccatcgaggatgatttcatcactgtagtgcaaaccacaactgatgaaggggagtcagggtcccacagcgtgcgttttgcagcactagagcagcctgaggtggaaaggagaccatctcctcatgacgaagaagagtttgaagtagaagaggcagctgaagcccaggcagaacccaaagatggttccccagaggctccagcttcccctgagagagaagaggttgcattttctgaatataagacagaaacctatg

SEQ ID NO: 21443 - DNA, 80 bp, Macaca Mulatta
aaacggaaagggactctgcaaattcatcctgtggtaatcacgtcatttgaaatagccatgagagaccgaaatgcgttaca

SEQ ID NO: 21444 - DNA, 799 bp, Macaca Mulatta
gggccttttccccccctctagcgccgctgggcctgcaggtctctgtcgacccgcggacgctggtctctgttccgcaggatggggtttgttaaagttgttaagaataaggcctactttaagagataccaagtgaaatttagaagacgacgagagggtaaaactgattactatgctcggaaacgcttggtgatacaggataaaaataaatacaacacacccaaatacaggatgatagttcgtgtaacaaacagagatatcatttgtcagattgcttatgcccgtatagagggggatatgatagtctgcgcagcatatgcacacgaactgccaaaatacggtgtgaaagttggcctgacaaactgatgtgcagcatattgtactggcctgctgctggcccgcaggcttctcagtaggtttggcatggagcagatctatgaagggccggtggagggtactggcgagtgaatacaatgtggaaagcattggtgggcgaccgaggggcctttacctgctatgtggaatgcgggccttgccagaactaccgctggggaataaagtggtgtgggccccccgaaagggaactgcgggaggggaggcttggtcaggcgctccgggggaggaaaagaaatcccgcgggatagggaatgcggaaaaccgaggggagttggagtgggagaaagcaccccgcggggaaggcatgtcactgggggcgaagaatgtttgccggaaatgtacggcggcggctgcgattgaagacgcagaagaaagagaggagagaagggctgtagcggaaaacggg

SEQ ID NO: 21445 - DNA, 413 bp, Macaca Mulatta
  misc_feature (1)...(413): n = A,T,C or G
gggagcagaacagcctttccttcaggatgtctgacatctgtagctccaaacaggcagaatggagctctaaaacctcctaccagcggagnnnnnnnnnnnnnnnnnnnnnnnnnnnnnnnnnnnnnnnnnnnnnnnnnnnnnnnnnnnnnnnnnnnnnnnnnnnnnnnnnnnnnnnnnnnnnnnnnnnnnnnnnnnnnnnnnnnnnnnnnnnnnnnnnnnnnnnnnnnnnnnnnnnnnnnnnnnnnnnnnnnnnnnnnnnnnnnnnnnnnnnnnnnnnnnnnnnnnnnnnnnnnnnnnnnnnnnnnnnnnnnnnnnnnnnnnnnnnnnnnnnnnnnnnnnnnnnnnnnnnnnnnnnnntggagctggaccttcaccagaagcatgtggtaaactcttgggaaacgcagaaagaa

SEQ ID NO: 21446 - DNA, 185 bp, Macaca Mulatta
aagtgacacagccctagaggaggcagtagcagaggtgctagaccatcgacccatcgagcagaaacactgccctccctgccatgtttcagttgagctggtggggtcctgcgctaccctggtgactgagagaatcctgcagggggcaccagagatcttggacaggcaaactgcagcccttctgcatg

SEQ ID NO: 21447 - DNA, 339 bp, Macaca Mulatta
  misc_feature (1)...(339): n = A,T,C or G
cccagaacaaccagctggatcagttctcacaggagctgcagctcagagactgggnggaaacatggttccaaaattgttcacttcccaaatttgtctgcttcttctgttggggcttatgggtgtggagggctcactccatgccagacccccagagtttacaagggctcagtggtttgccatccagcacatcaatatgaaccccccttcatgcaacattgcaatgcgggtaattaacaagtatcaacggtgttgcgaaaagcaaaatacttttcttcgtacaacttttgcaaatgtagttaatgtttgtcgtaacccaagtataccctgcgttcataacag

SEQ ID NO: 21448 - DNA, 1691 bp, Macaca Mulatta
  misc_feature (1)...(1691): n = A,T,C or G
ncagaatggcggagagtgcttgcgggcctatgtgtcagtgaccctggaacaagtagcccagtggcatgatgagcagggccacaatggactgtggtatgtgatgcaagtggtgagccagctcctggacccccgcacctcagagttcactgcggcctttgtgggccgccttgtttccaccctcatctccaaggcagggcgggagctgggggagaatctagaccagattcttcgtgccatcctcagtaagatgcagcaggcagagacgctcagtgtcatgcannnnnnnnnnnnnnnnnnnnnnnnnnnnnnnnnnnnnnnnnnnnnnnnnnnnnnnnnnnnnnnnnnnnnnnnnnnnnnnnnnnnnnnnnnnnnnnnnnnnnnnnnnnnnnnnnnnnnnnnnnnnnnnnnnnnnnnnnnnnnnnnnnnnnnnnnnnnnnnnnnnnnnnnnnnnnnnnnnnnnnnnnnnnnnnnnnnnnnnnnnnnnnnnnnnnnnnnnnnnnnnnnnnnnnnnnnnnnnnnnnnnnnnnnnnnnnnnnnnnnnnnnnnnnnnnnnnnnnnnnnnnnnnnnnnnnnnnnnnnnnnnnnnnnnnnnnnnnnnnnnnnnnnnnnnnnnnnnnnnnnnnnnnnnnnnnnnnnnnnnnnnnnnnnnnnnnnnnnnnnnnnnnnnnnnnnnnnnnnnnnnnnnnnnnnnnnnnnnnnnnnnnnnnnnnnnnnnnnnnnnnnnnnnnnnnnnnnnnnnnnnnnnnnnnnnnnnnnnntggtttagctggccaacttttatctgacattcttgctacaagtaaatatgnnnnattactacgaggatgatgaggaagatgaccctgatgccctgaaggatcctctctatcagattgatctgcaggnnnnnnnnnnnnnnnnnnnnnnnnnnnnnnnnnnnnnnnnnnnnnnnnnnnnnnnnnnnnnnnnnnnnnnnnnnnnnnnnnnnnnnnnnnnnnnnnnnnnnnnnnnnnnnnnnnnnnnnnnnnnnnnnnnnnnnnnnnnnnnnnnnnnnnnnnnnnnnnnnnnnnnnnnnnnnnnnnnnnnnnnnnnnnnnnnnnnnnnnnnnnnnnnnnnnnnnnnnnnnnnnnnnnnnnnnnnnnnnnnnnnnnnnnnnnnnnnnnnnnnnnnnnnnnnnnnnnnnnnnnnnnnnnnnnnnnnnnnnnnnnnnnnnnnnnnnnnnnnnnnnnnnnnnnnnnnnnnnnnnnnnnnnnnnnnnnnnnnnnnnnnnnnnnnnnnnnnnnnnncctagagccctctgctggccagtccagaaacattattgcccagaaggattatgtgtttatggattattttgccccgcctcaggagcacaggaagtcactaccatttatattctgaaacagacctatctgtgttcataggacttgattttttcagataggaatcctcgtgagagatcattatgctttgtgccctggaccactgctgctctgggttctcaggaggaacaggcaggagcagcttcattctaagcctttccagtgacctcagccttgcttcccttctacaacactaaggctcctctgtcagaggaggtcgtcttgtttttgcctcattgcatgacataacccttcccctcaagctgttcctatatatacatgcacacacaaaataagccagacagatggcaatttgatcttcctttttta

SEQ ID NO: 21449 - DNA, 672 bp, Macaca Mulatta
ggggttttactgctcggattacagaattaatgcaagtactgaaagatttaaatcatggcaaatatgagcgcacaatggtctcacaacaagaaaagggtattgaaggagtacaagtcattcccttgatacctggtgctggagaaatcattattgcagataacattataaagtttgatcatgttcctttagcaacgccaaatggagatattttgatccgtgaccttaattttgaagttcaatctggggctaatgttctaatttgtggtcctaatggctgcggaaagagttctcttttccgtgttcttggtgaattatggcctctttttggaggacgtctaactaaacccgagaaaggaaagttattttatgttcctcaaagaccttacatgacccttggaacacttcgagaccaagtgatatatccagatggacgagaagatcagaaaaggaagggaatatctgacttagtactgaaggaatacttagacaatgtccagttgggtcatatccttgaacgctgaaagatgctgggacagccttcacgattggatggatgtactgagtggtggagaaaagcaaagaatggcaatggcaagattattttatcataaacccccagtttgccattttggacgaatgcacaaagtgcattttagtgtcccaggtggtaag

SEQ ID NO: 21450 - DNA, 122 bp, Macaca Mulatta
gaacgtcatcgccccgctgatgacccggcatgggaggctgtggtcgaacttctggggggctctcagtgcagatggctactatgcccgttccgaggactacgtggacattgtgcaggggcggc

SEQ ID NO: 21451 - DNA, 3436 bp, Macaca Mulatta
  misc_feature (1)...(3436): n = A,T,C or G
atgtgattgatctcactggagatgataaagatgatcttcagagagcaattgccttgagtttggccgaatcaaacagggcattcagggagactggaataactgatgaggaacaagccattagcagnnnnnnnnnnnnnnnnnnnnnnnnnnnnnnnnnnnnnnnnnnnnnnnnnnnnnnnnnnnnnnnnnnnnnnnnnnnnnnnnnnnnnnnnnnnnnnnnnnnnnnnnnnnnnnnnnnnnnnnnnnnnnnnnnnnnnnnnnnnnnnnnnnnnnnnnnnnnnnnnnnnnnnnnnnnnnnnnnnnnnnnnnnnnnnnnnnnnnnnnnnnnnnnnnnnnnnnnnnnnnnnnnnnnnnnnnnnnnnnnnnnnnnnnnnnnnnnnnnnnnnnnnnnnnnnnnnnnnnnnnnnnnnnnnnnnnnnnnnnnnnnnnnnnnnnnnnnnnnnnnnnnnnnnnnnnnnnnnnnnnnnnnnnnnnnnnnnnnnnnnnnnnnnnnnnnnnnnnnnnnnnnnnnnnnnnnnnnnnnnnnnnnnnnnnnnnnnnnnnnnnnnnnnnnnnnnnnnnnnnnnnnnnnnnnnnnnnnnnnnnnnnnnnnnnnnnnnnnnnnnnnnnnnnnnnnnnnnnnnnnnnnnnnnnnnnnnnnnnnnnnnnnnnnnnnnnnnnnnnnnnnnnnnnnnnnnnnnnnnnnnnnnnnnnnnnnnnnnnnnnnnnnnnnnnnnnnnnnnnnnnnnnnnnnnnnnnnnnnnnnnnnnnnnnnnnnnnnnnnnnnnnnnnnnnnnnnnnnnnnnnnnnnnnnnnnnnnnnnnnnnnnnnnnnnnnnnnnnnnnnnnnnnnnnnnnnnnnnnnnnnnnnnnnnnnnnnnnnnnnnnnnnnnnnnnnnnnnnnnnnnnnnnnnnnnnnnnnnnnnnnnnnnnnnnnnnnnnnnnnnnnnnnnnnnnnnnagatacatgcacagaaacagagaaataacgagaattaagagggaagagatcaagagactgaaagattacctcacagtattacaacaaaggcttgaaaggtatttnagatacttaagctatggttcgggtcccaaacgattccccttggtagatgttcttcagtatgcattggaatttgcctcaagtaaacctgtttgcacttctcctgttgacgatattgatgctagttccccacctagtggttctataccatcacagacgttaccaagnnnnnnnnnnnnnnnnnnnnnnnnnnnnnnnnnnnnnnnnnnnnnnnnnnnnnnnnnnnnnnnnnnnnnnnnnnnnnnnnnnnnnnnnnnnnnnnnnnnnnnnnnnnnnnnnnnnnnnnnnnnnnnnnnnnnnnnnnnnnnnnnnnnnnnnnnnnnnnnnnnnnnnnnnnnnnnnnnnnnnnnnnnnnnnnnnnnnnnnnnnnnnnnnnnnnnnnnnnnnnnnnnnnnnnnnnnnnnnnnnnnnnnnnnnnnnnnnnnnnnnnnnnnnnnnnnnnnnnnnnnnnnnnnnnnnnnnnnngttccttaccgattacatgccgttttagttcatgaaggccaagctaatgctgggcactactgggcatatatttttgatcatcgtgaaagcagatggatgaagtacaatgatattgctgtgacaaaatcatcatgggaagagctagtgagggactcttttggtggttatagaaatgccagtgcatactgtttaatgtacataaatgataaggcacagttcttaatacaagnnnnnnnnnnnnnnnnnnnnnnnnnnnnnnnnnnnnnnnnnnnnnnnnnnnnnnnnnnnnnnnnnnnnnnnnnnnnnnnnnnnnnnnnnnnnnnnnnnnnnnnnnnnnnnnnnnnnnnnnnnnnnnnnnnnnnnnnnnnnnnnnnnnnnnnnnnnnnnnnnnnnnnnnnnnnnnnnnnnnnnnnnnnnnnnnnnnnnnnnnnnnnnnnnnnnnnnnnnnnnnnnnnnnnnnnnnnnnnnnnnnnnnnnnnnnnnnnnnnnnnnnnnnnnnnnnnnnnnnnnnnnnnnnnnnnnnnnnnnnnnnnnnnnnnnnnnnnnnnnnnnnnnnnnnnnnnnnnnnnnnnnnnnnnnnnnnnnnnnnnnnnnnnnnnnnnnnnnnnnnnnnnnnnnnnnnnnnnnnnnnnnnnnnnnnnnnnnnnnnnnnnnnnnnnnnnnnnnnnnnnnnnnnnnnnnnnnnnnnnnnnnnnnnnnnnnnnnnnnnnnnnnnnnnnnnnnnnnnnnnnnnnnnnnnnnnnnnnnnnnnnnnnnnnnnnnnnnnnnnnnnnnnnnnnnnnnnnnnnnnnnnnnnnnnnnnnnnnnnnnnnnnnnnnnnnnnnnnnnnnnnnnnnnnnnnnnnnnnnnnnnnnnnnnnnnnnnnnnnnnnnnnnnnnnnnnnnnnnnnnnnnnnnnnnnnnnnnnnnnnnnnnnnnnnnnnnnnaggagtggcatcaggattataggaaattcagggaaacaactatgtatctcataattggactagaaaattttcaaagagaaagnnnnnnnnnnnnnnnnnnnnnnnnnnnnnnnnnnnnnnnnnnnnnnnnnnnnnnnnnnnnnnnnnnnnnnnnnnnnnnnnnnnnnnnnnnnnnnnnnnnnnnnnnnnnnnnnnnnnnnnnnnnnnnnnnnnnnnnnnnnnnnnnnnnnnnnnnnnnnnnnnnnnnnnnnnnnnnnnnnnnnnnnnnnnnnnnnnnnnnnnnnnnnnnnnnnnnnnnnnnnnnnnnnnnnnnnnnnnnnnnnnnnnnnnnnnnnnnnnnnnnnnnnnnnnnnnnnnnnnnnnnnnnnnnnnnnnnnnnnnnnnnnnnnnnnnnnnnnnnnnnnnnnnnnnnnnnnnnnnnnnnnnnnnnnnnnnnnnnnnnnnnnnnnnnnnnnnnnnnnnnnnnnnnnnnnnnnnnnnnnnnnnnnnnnnnnnnnnnnnnnnnnnnnnnnnnnnnnnnnnnnnnnnnnnnnnnnnnnnnnnnnnnnnnnnnnnnnnnnnnnnnnnnnnnnnnnnnnnnnnnnnnnnnnnnnnnnnnnnnnnnnnnnnnnnnnnnnnnnnnnnnnnnnnnnnnnnnnnnnnnnnnnnnnnnnnnnnnnnnnnnnnnnnnnnnnnnnnnnnnnnnnnnnnnnnnnnnnnnnnnnnnnnnnnnnnnnnnnnnnnnnnnnnnnnnnnnnnnnnnnnnnnnnnnnnnnnnnnnnnnnnnnnnnnnnnnnnnnnnnnnnnnnnnnnnnnnnnnnnnnnnnnnnnnnnnnnnnnnnnnnnnnnnnnnnnnnnnnnnnnnnnnnnnnnnnnnnnnnnnnnnnnnnnnnnnnnnnnnnnnnnnnnnnnnnnnnnnnnnnnnnnncttccatgactacagccatttaatgttcagcactgggtacgatacataatatttggtagcttgtaaatgaaataaagaataaaagttttatttatggct

SEQ ID NO: 21452 - DNA, 874 bp, Macaca Mulatta
gggggaaaagaaacacaaatactcctcctccaaggggcgggggcggtgcctaggtgatgcaccaatcacagcgcgccctaccctatataagggcccgcggccgcgcgctttacgcttttcgctggttattacattttgtgtttctctgctgttatgtctgaaaccgtacctgcagcttctgccggtgctgttccagccgtcatggagaaacctctaaccaagaaaagagggaagaagccggctggcttgacaagtgcaagtcgcaaagcaccgaacctctctgtgtccaagttgatcaccgaggccctttcagtgtcacaggaacgagtaggtatgtctctggctgcgctcaagaaggcactggctgctgctggctacgacgtggagaagaataacagccgcattaaactgtccctcaagagcttagtgaacaagggaatcctggtgcaaaccaggggtactggtgcctccggctcctttaagcttagtaagaaggtccttcctaaatctaccagaaggaaggctaacaagtcagcttctgccaagaccaagaagctggttttatccagggactccaagtcaccaaagactgctaaaaccaataagagagccaagaaaccgagagcgacagctcctaaaaaagctgttaggagcgggagaaaggctaaaggagccaagggtaagcaacagcagaagagcccagtgaaggcaagggccacgaagccaaaattgactcaacatcataaagctaatattagaaaggccacatctaggaagtaaagagctttccaggaggccgatttcgaaagaacccaaaggctcttttaagagccacccacattattttaaaatggcgtaacactggaaacaagtt

SEQ ID NO: 21453 - DNA, 278 bp, Macaca Mulatta
ggtcgcttcctttaacgaccctgacttcctcaagcagctagagatgtccataaagtacgggacccctttcctgttccgcgatgttgatgaatacatcgatcctgtgattgataacgtcttagaaaaaaatataaaagtctcccaaggacggcagtttattatcctgggagacaaggaagttgactatgattcaaatttcagactgtacctaaacaccaagctggccaatcccagatacaccccatccgtgtttgggaaagctatggtcatcaattaca

SEQ ID NO: 21454 - DNA, 242 bp, Macaca Mulatta
tcctatgctgctctgttttgtcttaaaggtcttgagggttgaccatgttgcgtcgtcatcaacattttgggggttgtgttggatgggatgcagagggagaggcagggaaccccgctccttggggccccaggttgatcctgtgactgaggctccacctcctgtagcctccccaggcccagggccccgtggctgaggcctgctagaatcactgccgctgtgctttgtggaaacgacagttcctt

SEQ ID NO: 21455 - DNA, 3243 bp, Macaca Mulatta
  misc_feature (1)...(3243): n = A,T,C or G
ttctgcagcggtggaggaatgtagccagaaaggctgcctcgctctgtctctccttgaactcctgggttttaacctcacctttgtcttcctggcaagcctccttgttctcattgagnnnnnnnnnnnnnnnnnnnnnnnnnnnnnnnnnnnnnnnnnnnnnnnnnnnnnnnnnnnnnnnnnnnnnnnnnnnnnnnnnnnnnnnnnnnnnnnnnnnnnnnnnnnnnnnnnnnnnnnnnnnnnnnnnnnnnnnnnnnnnnnnnnnnnnnnnnnnnnnnnnnnnnnnnnnnnnnnnnnnnnnnnnnnnnnnnnnnnnnnnnnnnnnnnnnnnnnnnnnnnnnnnnnnnnnnnnnnnnnnnnnnnnnnnnnnnnnnnnnnnnagagacaagagagactttgtatcagcaggagcagctgctggagttgctgcagctttcggggccccaatcgggggtaccttgttcagtctagaggagggttcgtccttctggaaccaagggctcacatggaaagtnnnnnnnnnnnnnnnnnnnnnnnnnnnnnnnnnnnnnnnnnnnnnnnnnnnnnnnnnnnnnnnnnnnnnnnnnnnnnnnnnnnnnnnnnnnnnnnnnnnnnnnnnnnnnnnnnnnnnnnnnnnnnnnnnnnnnnnnnnnnnnnnnnnnnnnnnnnnnnnnnnnnnnnnnnnnnnnnnnnnnnnnnnnnnnnnnnnnnnnnnnnnnnnnnnnnnnnnnnnnnnnnnnnnnnnnnnnnnnnnnnnnnnnnnnnnnnnnnnnnnnnnnnnnnnnnnnnnnnnnnnnnnnnnnnnnnnnnnnnnnnnnnnnnnnnnnnnnnnnnnnnnnnnnnnnnnnnnnnnnnnnnnnnnnnnnnnnnnnnnnnnnnnnnnnnnnnnnnnnnnnnnnnnnnnnnnnnnnnnnnnnnnnnnnnnnnnnnnnnnnnnnnnnnnnnnnnnnnnnnnnnnnnnnnnnnnnnnnnnnnnnnnnnnnnnnnnnnnnnnnnnnnnnnnnnnnnnnnnnnnnnnnnnnnnnnnnnnnnnnnnnnnnnnnnnnnnnnnnnnnnnnnnnnnnnnnnnnnnnnnnnnnnnnnnnnnnnnnnnnnnnnnnnnnnnnnnnnnnnnnnnnnnnnnnnnnnnnnnnnnnnnnnnnnnnnnnnnnnnnnnnnnnnnnnnnnnnnnnnnnnnnnnnnnnnnnnnnnnnnnnnnnnnnnnnnnnnnnnnnnnnnnnnnnnnnnnnnnnnnnnnnnnnnnnnnnnnnnnnnnnnnnnnnnnnnnnnnnnnnnnnnnnnnnnnnnnnnnnnnnnnnnnnnnnnnnnnnnnnnnnnnnnnnnnnnnnnnnnnnnnnnnnnnnnnnnnnnnnnnnnnnnnnnnnnnnnnnnnnnnnnnnnnnnnnnnnnnnnnnnnnnnnnnnnnnnnnnnnnnnnnnnnnnnnnnnnnnnnnnnnnnnnnnnnnnnnnnnnnnnnnnnnnnnnnnnnnnnnnnnnnnnnnnnnnnnnnnnnnnnnnnnnnnnnnnnnnnnnnnnnnnnnnnnnnnnnnnnnnnnnnnnnnnnnnnnnnnnnnnnnnnnnnnnnnnnnnnnnnnnnnnnnnnnnnnnnnnnnnnnnnnnnnnnnnnnnnnnnnnnnnnnnnnnnnnnnnnnnnnnnnnnnnnnnnnnnnnnnnnnnnnnnnnnnnnnnnnnnnnnnnnnnnnnnnnnnnnnnnnnnnnnnnnnnnnntacagaggcccttctggcgggcctccgcgccgcagggagggtgcgtggggaggatgcttcctgccagcacatgcctgaaggtttcgcgtgaagcgtgggaaccaccccatcattcagtgacgtcattcttctccaggctggctggccccctctgactaggcacccaaagtgagcatctgggcatcgagtatttgcacttatcttcccccaccttctccatggcatctccgttccagcaggcatccctggggcaggcgtgctttggctcaagatggccttcatttacgtttagcttttttcaaaaccgtggaggttgcccacgggcctcggcacccggccctggcagcacagctctctcaggcccagccctgggcgacctccttggccaaggctgcctttcgccctggggtgggcgtcagtcctggctctgccggtccagatcttgcactcagcacactctagggaataattccactccagagacagggctgcttcgaggtctttctccagctgactgtggcccctccatttcccccattttcttaccactccgaccaaaattgctttgacttctaaatgtttctgcttcccagaatgcacctggcttgtgaaacggggatgatactcccaggaaatagtgcaggacatcacaaggacccaaaaggcaattcttacttaaatgtgactgtttggccagctgctgttgtattttatggcagnnnnnnnnnnnnnnnnnnnnnnnnnnnnnnnnnnnnnnnnnnnnnnnnnnnnnnnnnnnnnnnnnnnnnnnnnnnnnnnnnnnnnnnnnnnnnnnnnnnnnnnnnnnnnnnnnnnnnnnnnnnnnnnnnnnnnnnnnnnnnnnnnnnnnnnnnnnnnnnnnnnnnnnnnnnnnnnnnnnnnnnnnnnnnnnnnnnnnnnnnnnnnnnnnnnnnnnnnnnnnnnnnnnnnnnnnnnnnnnnnnnnnnnnnnnnnnnnccagatattttgttcccatcagtttagcccagagatagacagtagaatgcgaatacctccctcccgtaaactgactggacggctgccaaggaggccccaaacccagccccatgcagaggcacgtggtttcctgttctcccctctctgcatctgccctttcctgataagcccaaagacaacaacttctccactcgtgacaaatcaactgtgagcctcgctccttccatttctgtccattagaaaccagccttttcagcacctcacccattagccgccccaccacccagcgatcaggcgcctcagtaaggcagatccgcggatggggagcctgccggtggccagaggtggtgtttgtgtttgtctccagctcggtgttccatggctcctaggcgaggtgatcagggagtggggccagtgggtccccggccctggctgtgggaccttgtgctgagggatgatttgctgctgaccttgattaacttaacagttcccagctggaagggacacttcctggacccagtccactgtatggcattggtgatgcagaattatgcactgtcatga

SEQ ID NO: 21456 - DNA, 669 bp, Macaca Mulatta
  misc_feature (1)...(669): n = A,T,C or G
ggcatccactatttccattattagctttgttgtttgaaaaatgtgaacaatctacacagggctccgaaggcacaacttctgccagttttgatgtagacatcgaaaattttgtaaggaagcaagagaaggaagggaaacctttcttttgtgaagatccagaaactgacaatttnnnnnnnnnnnnnnnnnnnnnnnnnnnnnnnnnnnnnnnnnnnnnnnnnnnnnnnnnnnnnnnnnnnnnnnnnnnnnnnnnnnnnnnnnnnnnnnnnnnnnnnnnnnnnnnnnnnnnnnnnnnnnnnnnnnnnnnnnnnnnnnnnnnnnnnnnnnnnnnnnnnnnnnnnnnnnnnnnnnnnnnnnnnnnnnnnnnnnnnnnnnnnnnnnnnnnnnngtggtgccggcgtctgcgctgcagcagggaaacgtagccatggcgactgtggcaggtnnnnnnnnnnnnnnnnnnnnnnnnnnnnnnnnnnnnnnnnnnnnnnnnnnnnnnnnnnnnnnnnnnnnnnnnnnnnnnnnnnnnnnnnnnnnnngcttcagttacagttaaaccaagatctcagccttatgcatcaagatgatggttcatctaagaacaagaggggcgtcctgccgaagcacgccacaaacgtgatgcgctcctggctcttccagcacatcggg

SEQ ID NO: 21457 - DNA, 980 bp, Macaca Mulatta
  misc_feature (1)...(980): n = A,T,C or G
cgaggcatgagcttactttaacatgatcctgccacaagaagctttcctcagctgagagctaccatggaggcttattccagaatggctaatcgagatttattaagcagtgtgagccgtgagttttccggatatgtggaaagtggtttgaagaccatcttgcagtgtgccctgaaccgccctgccttctttgctgagaggctctactatgctatgaaaggtgctggcacagatgactccaccctggtcaggattgtggtcactcgaagtgagattgaccttgtacaaataaaacagatgtttgctcagatgtatcagaagactctgggcacaatgattgcaggtgacacgagtggagattaccgaagacttcttctggctattgtgggccagtaggannnnnnnnnnnnnnnnnnnnnnnnnnnnnttctattcatagcttatccttcaaagcaatgacctgaatgcagcaatatcaaacatcagctaaccaaaagagctttctatcaaggaccgtatcagggtaatgtgcttggtttgcacaagttgttatcgccttaattctaatgttactttgtactctacatataatcaatgtaaagccatatcacaatgatacagtaatattgcaatgtttgtaaacctacattctcactacttcaattctcatcaagatgtccaattgaatcaaaatcacagaaatctctgattccgagttacaactttgcatactattcaaacggttgttaaagctctgctacagaaaccgtcaggctgcagacaacagcaatcagtccccccggcgcccacaaacagcgaccttactctaaacatggcctcatggccaacgcccgatctaacatccctgaacagcattagtganataaaggaagtttttaaatagatcgaggtttaaagctaaacgttaaaatgtatttagacaacagctcaatataaatatatattttcttctttgtttgttt

SEQ ID NO: 21458 - DNA, 1849 bp, Macaca Mulatta
  misc_feature (1)...(1849): n = A,T,C or G
gatggctgctccatgaggtcaagactgggtcttctccctcctccccctttaccgatgcctggtctcacggggctagttttgacccccacgctatggcatcatcgacctccctcccagctcctggctctcggcctaagaagcctctaggcaagatggctgactggttcaggcagaccctgctgaagaagcccaagaagaggcccgactccccagaaagcacctacagcaatccttcacagcctgcatcacagcacannnnnnnnnnnnnnnnnnnnnnnnnnnnnnnnnnnnnnnnnnnnnnnnnnnnnnnnnnnnnnnnnnnnnnnnnnnnnnnnnnnnnnnnnnnnnnnnnnnnnnnnnnnnnnnnnnnnnnnnnnnnnnnnnnnnnnnnnnnnnnnnnnnnnnnnnnnnnnnnnnnnnnnnnnnnnnnnnnnnnnnnnnnnnnnnnnnnnnnnnnnnnnnnnnnnnnnnnnnnnnnnnnnnnnnnnnnnnnnnnnnnnnnnnnnnnnnnnnnnnnnnnnnnnnnnnnnnnnnnnnnnnnnnnnnnnnnnnnnnnnnnnnnnnnnnnnnnnnnnnnnnnnnnnnnnnnnnnnnnnnnnnnnnnnnnnnnnnnnnnnnnnnnnnnnnnnnnnnnnnnnnnnnnnnnnnnnnnnnnnnnnnnnnnnnnnnnnnnnnnnnnnnnnnnnnnnnnnnnnnnnnnnnnnnnnnnnnnnnnnnnnnnnnnnnnnnnnnnnnnnnnnnnnnnnnnnnnnnnnnnnnnnnnnnnnnnnnnnnnnnnnnnnnnnnnnnnnnnnnnnnnnnnnnnnnnnnnnnnnnnnnnnnnnnnnnnnnnnnnnnnnnnnnnnnnnnnnnnnnnnnnnnnnnnnnnnnnnnnnnnnnnnnnnnnnnnnnnnnnnnnnnnnnnnnnnnnnnnnnnnnnnnnnnnnnnnnnnnnnnnnnnnnnnnnnnnnnnnnnnnnnnnnnnnnnnnnnnnnnnnnnnnnnnnnnnnnnnnnnnnnnnnnnnnnnnnnnnnnnnnnnnnnnnnnnnnnnnnnnnnnnnnnnnnnnnnnnnnnnnnnnnnnnnnnnnnnnnnnnnnnnnnnnnnnnnnnnnnnnnnnnnnnnnnnnnnnnnnnnnnnnnnnnnnnnnnnnnnnnnnnnnnnnnnnnnnnnnnnnnnnnnnnnnnnnnnnnnnnnnnnnnnnnnnnnnnnnnnnnnnnnnnnnnnnnnnnnnnnnnnnnnnnnnnnnnnnnnnnnnnnnnnntttaccttttactttgtgctttttgtgttttactcaggaagtcctccctacatctgnnnnnnnnnnnnnnnnnnnnnnnnnnnngtctttaatccacctggattttctgtttgggtttttgttggtctttagtcaaagatccaattcttttttctatttgaataaccatcatttactgactagtccatccttaccccacccctgctgattatgatgtcactgctgtgacatactatcatacgttgggggctattactgggttctccagtctcctccctttatctgtttgtgtaaccctgtgctggtgccacactggcttgtttactgatgtttttaataagcctggaccatttgtaggtcaattcttcctgctcttcttatacatcaaaaatcactttttcttgttcctttactcttccatataaattgtttactcaaccaccacgttccaggaaaaagcctgttagtatttttattggacttacgtggaatttatagatttattttgaaaaaacagatatgtttatgagtcttcctattcataaatatagtatgtctccatttacttatgtctttcagtgtatttcaataaagctttctatctttt

SEQ ID NO: 21459 - DNA, 160 bp, Macaca Mulatta
agagcagggttttctacagtgttgcagagtgtcttcccatggccagctactaagcaagctgggaatggaatgggtgctctgccatgcttgcttcccctccctttccgaagctggcagaatattagccactctgcagaggtgatcctggaagctctagagc

SEQ ID NO: 21460 - DNA, 2458 bp, Macaca Mulatta
  misc_feature (1)...(2458): n = A,T,C or G
ggaaagctcagtggcccccaagccaggatgtcccaagcttgggtcaccggcctcgcgcnnnnnnnnnnnnnnnnnnnnnnnnnnnnnnnnnnnnnnnnnnnnnnnnnnnnnnnnnnnnnnnnnnnnnnnnnnnnnnnnnnnnnnnnnnnnnnnnnnnnnnnnnnnnnnnnnnnnnnnnnnnnnnnnnnnnnnnnnnnnnnnnnnnnnnnnnnnnnnnnnnnnnnnnnnnnnnnnnnnnnnnnnnnnnnnnnnnnnnnnnnnnnnnnnnnnnnnnnnnnnnnnnnnnnnnnnnnnnnnnnnnnnnnnnnnnnnnnnnnnnnnnnnnnnnnnnnnnnnnnnnnnnnnnnnnnnnnnnnnnnnnnnnnnnnnnnnnnnnnnnnnnnnnnnnnnaggtgattctgaagcccagcctgggcccaactcccacagagccaccccctccgtacagcttcaggcctgaagaatataccggggatcggaggggcattgacaacccggccttctgagtcacctcctgcctggaagcttgcgatcagcagcctcctccccagtgcctcctggatcaagctagagactgctgccaccccaggaatgtccctgcccatcctgccatgactctgttctttcttggatttaacttattactttttctgcctctgtttccaccccagctacctctcttgtcctgagggttaggctggagtgacagtatctgccccccaaccaacccaagaaagaggatgccagaaggaaaataccgaccattggaggtgcccaacagcagaatgggctactctgaggggtagtgagagccccatttctggaggtatgcaaatcttgactggacagccagctctgagattttatcagggcacttctacacctgtgggacattggactggatgagctctgagccagcttccactcctacctgaatagagaactcactgtacccacccacaacacaggataaacacatgtcctcactgcatgttactgatcgcggctgagggcatgcctctggctgtnnnnnnnnnnnnnnnnnnnnnnnnnnnnnnnnnnnnnnnnnnnnnnnnnnnnnnnnnnnnnnnnnnnnnnnnnnnnnnnnnnnnnnnnnnnnnnnnnnnnnnnnnnnnnnnnnnnnnnnnnnnnnnnnnnnnnnnnnnnnnnnnnnnnnnnnnnnnnnnnnnnnnnnnnnnnnnnnnnnnnnnnnnnnnnnnnnnnnnnnnnnnnnnnnnnnnnnnnnnnnnnnnnnnnnnnnnnnnnnnnnnnnnnnnnnnnnnnnnnnnnnnnnnnnnnnnnnnnnnnnnnnnnnnnnnnnnnnnnnnnnnnnnnnnnnnnnnnnnnnnnnnnnnnnnnnnnnnnnnnnnnnnnnnnnnnnnnnnnnnnnnnnnnnnnnnnnnnnnnaccacctgctgggagatgacgggggtggggagaagcccaggagagcagtgggtggggctgggcatctgtggagtggggctttaggagaccttgaacggccccaccctggaatctcctacagggaggggaggaggtggcaggttccacccttctctaccagcccnnnnnnnnnnnnnnnnnnnnnnnnnnnnnnnnnnnnnnnnnnnnnnnnnnnnnnnncatgggggcctggcatagtcatgcagaatggggcaggacagtgccagtgccttgggactcagatgggactgggtgcctctaccctgatttttgcctttgcactgcgccgccacagtccacttaatgccagcctccttctccaggcagaggaccccgtgtcagtgctggccaaagctcccaggaggattggaggtagaactggccctcgtgtgccagcaggggtgcctcctttagtgctctcccaataatgcccatcctgggggcatcagtacgcaggcaggtggcagagttgggggcagtttgatggcacaggcagccccaaagatgtcaggaacagggactgtccgggtatgggttcccagtggagatagggccctagaaggagtgcagcagttactgacaagatagtgccagggttggctgtaggagaatgagcccaagcgtaagtggaagtttcccgttactttcagggattggtcaggggtggcagaaagcatgtgggttcttggtgtagatgtggctagttccaatgagagaagtcctggagctgatgttaccctcaccgtgatagcaggaggatgttgagaaatgggcttggcagacctggaggagaagttactcggcccagacgttgtcttcctttcatcacagggcctttaactcctaaggagcagcagagtggcccgagggaaagtggccgtcctgaaacctagtgttgctgtgacctggtgacagaaatggaaacctctgtggctctggtcatccttggtgggagtggaaatggtgtcacctttctagagggccatctggcaccatgcaatcatgccacaga

SEQ ID NO: 21461 - DNA, 654 bp, Macaca Mulatta
gggcaggaagagcccagcggctctgtctcagtctttggaattctgaaccaaaaaagcactaatttcagggaatgaattgagatattcccagagaacaaattggagttgcagaacaaactgccatgaaccatgcttcttatctcagaactgacctgtggaaaccactgccttaaaagaatgaaaggaaaaccaacatgaaacaccaaatagtgtgtgtgaatcttctggcggtgctgtgcttggaatagatcgtagctaatttgcatttcttttaactttgtaataattttagaggggggaattgccttttttagatatactttaaaaaggaaaaacgtgttcttgcggattccatcaggagctggttttgaaccgaggtgaagagacttagcagggattgtaccagcagcccacctgcaaagtttgttctccctctagtagtctgcagcctcactggctttctcacagcgagagtgtaggaatgagaagtgttagtcatgtgagttgttggggttgtttgagattggtggggggtgtttgtttggttttaatgaggggagaatttttaaacactaaacttcgaaagtagtattgtaggggaactttttcctgcggaggaccaagctgaggttcttgccaaccttttttaatagg

SEQ ID NO: 21462 - DNA, 183 bp, Macaca Mulatta
  misc_feature (1)...(183): n = A,T,C or G
ggacacagatggtggcaaatggggtgatgaatggtcacataccgatgcacttggagcctgngctcctaatttccgaatggaaccagtgacagccctgggtatcctctccctcattctcaacatcatgtgtgctgccctgaatctcattcgtggagttcaccttgcagaacattctttacaggt

SEQ ID NO: 21463 - DNA, 757 bp, Macaca Mulatta
  misc_feature (1)...(757): n = A,T,C or G
ntagttgtgtacctgcnccaccgtgnnccatgaggcatctggagaacagcgttactgggttttgttttccatctgaatggcagaattggtggtcatgagggcagagagccaggctgtcttnttagagctgagtaaaacgtgtcgggattctagttatccagcttttaagaacatgctctgttgttgacagtatgctaagctgggcctgagtttggtggttccaggagggggaatcaagaagaaatcacccgcaacaccacaggccaagcctgatggtgtcactgccacagctgctgatgaagaggaagacgaatactcaggaggactatgctagtattttgcttgctgaaaagaaaagggaaacaaaggtaaaaatcctgacatgccatttcaaggacttgggaatagattagggatatacgtacttcattacagtcatgttggatcctaataaagacttaggatctttagttaccatctccccaaatcactcattgtatccattacctgtgaagcatatctttttctttccataagagcttttctaagacaccagcaggaatttacagaaaatggactgtctatgttttaatatagctgatgaaaaaatttgcaagccaaattatacataaattatgttctaaacaaaaggggtaataagcataggtattcttctctcttagacgcttgtaagttactgttagtgaattgttttttacatttaatagttgatgctaaaagtaatgtttactgataa

SEQ ID NO: 21464 - DNA, 265 bp, Macaca Mulatta
acagagtcgggtgctggggcaggctcccacgcggcttcatccccactcgggacaggcagtggctccattgacccggatgagctgcgtactgtgctgcagtcgtgcctgcgcgagagcgccatctcgctgcccgacgagaagctggaccagctgacgctggcgctcttcgaatcggccgacacggacggcaatggggccatcaccttcgaggagctccgggacgagctgcagcgcttccccggagtcatggagaacctgaccatca

SEQ ID NO: 21465 - DNA, 135 bp, Macaca Mulatta
tggaagagtgttgaaagtgtcccaaagttggtgtctgaatatatgtccaaaaagataaaagttgatgaatttgtgactcacaatctgtcttttgatgaaattaacaaagcctttgaactgatgcattctggaaag

SEQ ID NO: 21466 - DNA, 172 bp, Macaca Mulatta
ctcagaaagaccagtgttgcccaaggaggggccggcctgctggcctggggcgtgcggaccctgctgagtggagacggggctgcagggtcctgtctggacactttcttgcccacctgccagtgtcttgggcatttccttggcaaggacattaaagtgatttcatcacagtgtc

SEQ ID NO: 21467 - DNA, 98 bp, Macaca Mulatta
taacactcccaaaccttttcagcgtcattgattattttgtgaaggagactcgaggaaatttaagaccatttatatgttcaactgatgaaaacactggt

SEQ ID NO: 21468 - DNA, 1696 bp, Macaca Mulatta
  misc_feature (1)...(1696): n = A,T,C or G
aaatnaggttcttctgctggtgatgcagtgtggtcagggcattccccacctccacctcaagaaaactgggtcagttttgcagatactccaccaaccagtactcttttaaccatgcatcctgcttctgtccagnnnnnnnnnnnnnnnnnnnnnnnnnnnnnnnnnnnnnnnnnnnnnnnnnnnnnnnnnnnnnnnnnnnnnnnnnnnnnnnnnnnnnnnnnnnnnnnnnnnnnnnnnnnnnnnnnnnnnnnnnnnnnnnnnnnnnnnnnnnnnnnnnnnnnnnnnnnnnnnnnnnnnnnnnnnnnnnnnnnnnnnnnnnnnnnnnnnnnnnnnnnnnnnnnnnnnnnnnnnnnnnnnnnnnnnnnnnnnnnnnnnnnnnnnnnnnnnnnnnnnnnnnnnnnnnnnnnnnnnnnnnnnnnnnnnnnnnnnnnnnnnnnnnnnnnnnnnnnnnnnnnnnnnnnnnnnnnnnnnnnnnnnnnnnnnnnnnnnnnnnnnnnnnnnnnnnnnnnnnnnnnnnnnnnnnnnnnnnnnnnnnnnnnnnnnnnnnnnnnnnnnnnnnnnnnnnnnnnnnnnnnnnnnnnnnnnnnnnnnnnnnnnnnnnnnnnnnnnnnnnnnnnnnnnnnnnnnnnnnnnnnnnnnnnnnnnnnnnnnnnnnnnnnnnnnnnnnnnnnnnnnnnnnnnnnnnnnnnnnnnnnnnnnnnnnnnnnnnnnnnnnnnnnnnnnnnnnnnnnnnnnnnnnnnnnnnnnnnnnnnnnnnnnnnnnnnnnnnnnnnnnnnnnnnnnnnnnnnnnnnnnnnnnnnnnnnnnnnnnnnnnnnnnnnnnnnnnnnnnnnnnnnnnnnnnnnnnnnnnnnnnnnnnnnnnnnnnnnnnnnnnnnnnnnnnnnnnnnnnnnnnnnnnnnnnnnnnnnnnnnnnnnnnnnnnnnnnnnnnnnnnnnnnnnnnnnnnnnnnnnnnnnnnnnnnnnnnnnnnnnnnnnnnnnnnnnnnnnnnnnnnnnnnnnnnnnnnnnnnnnnnnnnnnnnnnnnnnnnnnnnnnnnnnnnnnnnnnnnnnnnnnnnnnnnnnnnnnnnnnnnnnnnnnnnnnnnnnnnnnnnnnnnnnnnnnnnnnnnnnnnnnnnnnnnnnnnnnnnnnnnnnnnnnnnnnnnnnnnnnnnnnnnnnnnnnnnnnnnnnnnnnnnnnnnnnnnnnnnnnnnnnnnnnnnnnnnnnnnnnnnnnnnnnnnnnnnnnnnnnnnnnnnnnnnnnnnnnnnnnnnnnnnnnnnnnnnnnnnnnnnnnnnnnnnnnnnnnnnnnnnnnnnnnnnnnnnnnnnnnnnnnnnnnnnnnnnnnnnnnnnnnnnnnnnnnnnnnnnnnnnnnnnnnnnnnnnnnnnnnnnnnnnnnnnnnnnnnnnnnnnnnnnnnnnnnnnnnnnnnnnnnnnnnnnnnnnnnnnnnnnnnnnnnnagcaaaggcacaacacctcttgctccaccacctaaacctgttctaagaagattaaaatcagaagatgaattaaggccagaagtcgatgaacatacacaaaagacgggtgtcttagctgctgttcttgcatcacaaccttctattcccagnnnnnntgggaaagataagaaagctattcaggcatcgattagacgcaataaggaaccnaacacagttttggccagattgaatagcgaattgcagcaacaattaaag

SEQ ID NO: 21469 - DNA, 273 bp, Macaca Mulatta
atggtacatctgacattagggaagtgacttaacaacattaggcctcaatctgaactctcctgaaaatctctaccccaaatttgcatcaccctgggcatctgcaccttgtcgacctcaagacatagacttccatgttccatctgagtacttaacgaacattcacattagggataagctggctgcgataaaacttggccgatatggtgaagaccttctcttctatctctattacatgaatggaggcagacgtattacaacttttagcagcagtgg

SEQ ID NO: 21470 - DNA, 79 bp, Macaca Mulatta
cccaaatgcagtctcgagattatcgaccacattgtgggaaaccagcctgatcaggagatggtgtccgcctccgaatggt

SEQ ID NO: 21471 - DNA, 2133 bp, Macaca Mulatta
  misc_feature (1)...(2133): n = A,T,C or G
ctagtgagcaggcagttttgtcggactctaacaccaggtctgaaagacaaaagaaaatgatgtactttggtggccactctttggaagaggatttggaatggtctgaacctcagattaaggactctggggtagatacgtgtagtagcacaacccttaacgaggagcatagccatagtgataagnnnnnnnnnnnnnnnnnnnnnnnnnnnnnnnnnnnnnnnnnnnnnnnnnnnnnnnnnnnnnnnnnnnnnnnnnnnnnnnnnnnnnnnnnnnnnnnnnnnnnnnnnnnnnnnnnnnnnnnnnnnnnnnnnnnnnnnnnnnnnnnnnnnnnnnnnnnnnnnnnnnnnnnnnnnnnnnnnnnnnnnnnnnnnnnnnnnnnnnnnnnnnnnnnnnnnnnnnnnnnnnnnnnnnnnnnnnnnnnnnnnnnnnnnnnnnnnnnnnnnnnnnnnnnnnnnnnnnnnnnnnnnnnnnnnnnnnnnnnnnnnnnnnnnnnnnnnnnnnnnnnnnnnnnnnnnnnnnnnnnnngagatatacctagaatacctgatagcacacatgcacaactggagtccagtnnnnnnnnnnnnnnnnnnnnnnnnnnnnnnnnnnnnnnnnnnnnnnnnnnnnnnnnnnnnnnnnnnnnnnnnnnnnnnnnnnnnnnnnnnnnnnnnnnnnnnnnnnnnnnnataaaactatgggttgacaagggtgggcaccaattaatagttacaattttgggagcaaaggatctcccttccagggaagatgggagggcaaggaatccttatgttaaaatttactttcttccagacagaagnnnnnnnnnnnnnnnnnnnnnnnnnnnnnnnnnnnnnnnnnnnnnnnnnnnnnnnnnnnnnnnnnnnnnnnnnnnnnnnnnnnnnnnnnnnnnnnnnnnnnnnnnnnnnnnnnnnnnnnnnnnnnnnnnnnnnnnnnnnnnnnnnnnnnnnnnnnnnnnnnnnnnnnnnnnnnnnnnnnnnnnnnnnnnnnnnnnnnnnnnnnnnnnnnnnnnnnnnnnnnnnnnnnnnnnnnnnnnnnnnnnnnnnnnnnnnnnnnnnnnnnnnnnnnnnnnnnnnnnnnnnnnnnnnnnnnnnnnnnnnnnnnnnnnnnnnnnnnnnnnnnnnnnnnnnnnnnnnnnnnnnnnnnnnnnnnnnnnnnnnnnnnnnnnnnnnnnnnnnnnnnnnnnnnnnnnnnnnnnnnnnnnnnnnnnnnnnnnnnnnnnnnnnnnnnnnnnnnnnnnnnnnnnnnnnnnnnnnnnnnnnnnnnnnnnnnnnnnnnnnnnnnnnnnnnnnnnnnnnnnnnnnnnnnnnnnnnnnnnnnnnnnnnnnnnnnnnnnnnnnnnnnnnnnnnnnnnnnnnnnnnnnnnnnnnnnnnnnnnnnnnnnnnnnnnnnnnnnnnnnnnnnnnnnnnnnnnnnnnnnnnnnnnnnnnnnnnnnnnnnnnnnnnnnnnnnnnnnnnnnnnnnnnnnnnnnnnnnnnnnnnnnnnnnnnnnnnnnnnnnnnnnnnnnnnnnnnnnnnnnnnnnnnnnnnnnnnnnnnnnnnnnnnnnnnnnnnnnnnnnnnnnnnnnnnnnnnnnnnnnnnnnnnnnnnnnnnnnnnnnnnnnnnnnnnnnnnnnnnnnnnnnnnnnnnnnnnnnnnnnnnnnnnnnnnnnnnnnnnnnnnnnnnnnnnnnnnnnnnnnnnnnnnnnnnnnnnnnnnnnnnnnnnnnnnnnnnnnnnnnnnnnnnnnnnnnnnnnnnnnnnnnnnnnnnnnnnnnnnnnnnnnnnnnnnnnnnnnnnnnnnnnnnnnnnnnnnnnnnnnnnnnnnnnnnnnnnnnnnnnnnnnnnnnnnnnnnnnnnnnnnnnnnnnnnnnnnnnnnnnnnnnnnnnnnnnnnnnnnnnnnnnnnnnnnnnnnnnnnnnnnnnnnnnnnnnnnnnnnnnnnnnnnnnnnnnnnnnnnnnnnnnnnnnnnnnnnnnnnnnnnnnnnnnnnnnnnnnnnnnnnnnnnnnnnnnnnnnnnnnnnnnnnnnnnnnggtgacattcaggtaggaatgatggacaaaaagggacagttggaggtagaaatcatccgggcccgtggccttgttgtaaaaccaggttccaagacactgccag

SEQ ID NO: 21472 - DNA, 382 bp, Macaca Mulatta
ggggtctgtatgccttcgtcttgtcatttgcttttagggcagatgacactttttcccacccttttaaagccacaagtctgtcttctttcttgaaccatttcaggaggagccctctcctttaccccgatacaatatttaaaagacagaacaagaaagcatgtagccctaatgataggagattactgcatagagttcagagagtggaaactgaattttccctcgactttcactttgtgggtaaatcacccaattttaggctcttttctgcaaggatggccaaaattaatcatttttaaaaagtagattcatgcccactgcccttgggtgagggggaaggatgcaggggttcccagaagcccccatgtgattcaagggtttgtat

SEQ ID NO: 21473 - DNA, 1135 bp, Macaca Mulatta
  misc_feature (1)...(1135): n = A,T,C or G
tggcactgggactgctgagacagtatctttgaagggaatgactaccaagcctctttggtcaagaaactccagagcagagagaagccagaataaaggtgctagaagaacaaataaatgaaggagaacaacagctgaagtctaaaaatctggaaggcagagaatttgtgaaaaatgcatgggctgatgttgaacgcttcaaagaacaaaagaaccgagacttaaaggaggcccttataagctatgcagtcatgcagatcagtatgtgcaaaaagggaattcaagtttggaccaatgctaaggaatgctttagcaagatgtaatcctgtgaattgaatttctcttcaatcaaagtgccccaaaacagaagcacaagtaaataaaagaaatttaagtcgctacctagtatacataaacatatacgataagttgaatgaattcagctttctttaacttaattgtagtcatgttaatgtagcacaaaaaagatgtattttaatgaagcatgaaatattataatttgaggttttggggactggtgctgattccaaaaagttaattttaataatatataccaacagattgtcaggcttcggaaccaatgactgaatgtcaagatgtttgttaatttctagatgtttgtttcaaggccaactgtttcagatctattaatgtaggggatttttccctaagattgaattcctgtatttatttggtaaggtccactaatctgttatagggaagtattttctcttgccttatagttgagctgtttggtttgacaaagctcagcagaaacttgatgtgaaaaatctaagattttctcctacattcattgatgcccctcgtaacatttgcatacactagaaaatgcctttcaatttgtgtttttaccaaaattttgaaaacggatcagaaaattttatactgcccaacaaagaaggactcaactttctcaaaaatttatagggggaaaaacaattggtcccccctttaagctaattnnnnnnnnnnnnnnnnnnnnnaaactggaaattggttcccttttaaagaaatttaatttcctcccccaaaaaaatctctaaaaccccccgtaaaggggcccccaaaattttcccccgggccggggggcccttca

SEQ ID NO: 21474 - DNA, 1933 bp, Macaca Mulatta
  misc_feature (1)...(1933): n = A,T,C or G
aggtatgccttgcaatagctcattattcccagccaacagacctccagctactctttgcatttgaatatgttgggaaaaaataccacaagtcannncaaaattaatggaattccctcagaagatnnnnnnnnnnnnnnnnnnnnnnnnaatggagctggtggtggcagcagccagaaaactccgctctttgaaacttactcggattgggacagagaaatcaagaggacaggtgcttccgggtggagagtttgttctattaacgagggttacatgatatccacttgnnnnnnnnnnnnnnnnnnnnnnnnnnnnnnnnnnnnnnnnnnnnnnnnnnnnnnnnnnnnnnnnnnnnnnnnnnnnnnnnnnnnnnnnctctggtgctggagccactctaatggcagtgctcttgtgcgaatggccctcattaaagacgcgctgcagcagaggaagattgaccagagnnnnnnnnnnnnnnnnnnnnnnnnnnnnnnnnnnnnnnnnnnnnnnnnnnnnnnnnnnnnnnnnnnnnnnnnnnnnnnnnnnnnnnnnnnnnnnnnnnnnnnnnnnnnnnnnnnnnnnnnnnnnnnnnnnnnnnnnnnnnnnnnnnnnnnnnnnnnnnnnnnnnnnnnnnnnnnnnnnnnnnnnnnnnnnnnnnnnnngggcattccttaagcattcagcagaacttgtatacatgctagaaagcaaacatctctctgtagtcctacaagnnnnnnnnnnnnnnnnnnnnnnnnnnnnnnnnnnnnnnnnnnnnnngtgatgctggatccctattttaggacaattattggatttcagagtctgatacagaaggagtgggtcatggcaggatatcaatttctagacagatgcaaccatctaaagagatcagagaaagagnagtctcctttatttttgctattcttggacgccacctggcagctgttagaacaatatcctgcagctttcgagttctccgaaacctacctggccgtgttgtacgacagcacccggatctcactgtttggcaccttcctgttcaactcccctcaccagcgagtgaagcaaagcacgggaatttgctataagcaaaaatatccaattgggtgacgagaagggcttacagttcccctctgtttgggactggtctctccagtttacagccaaggaccgcacccttttccataaccccttctacgttggaaagagcacgccttgtgtacacaatggctccgtgaagtcttttaaacggacaaannnnnnnnnnnnnnnnnnnnnnnnnnnnnnnnnnnnnnnnnnnnngaatggaatcatcagtgaccaagaattacttccaaggagaaattcattgatattaaaaccaaagccagatccacctcagcaaaccancagccagaacagtgatatggagcaatattttagagaatggttttccaaacccgtcaacctgcacgctgttattctgccacgtgtctctggaacacacataaaactatggaaactgtgctacttccgctgggttcctgaggcccagatcagcctgggcggctccatcacggcctttcacaagctctccctcctggctgatgaagtggatgtgctgagcaggatgctgcggcagcagcgcagtgaccccctggaggcctgctacggggagctgggccagagcaggatgtacttcagagccagcggcccgcacgacaccgacacctcggggacgccggagttcctctcctcctcatttccattttctcctgtagggaatctatgcagacggagcattttaggaacaccattaagcaaatttttaagtggggccaaaatatggttgtctactgagacattagcaaatgaagactaaaaaagggtgttttctgaacattttgagggaagctgtcaactttatcgtctgaattaaaattgctaacctagg

SEQ ID NO: 21475 - DNA, 1019 bp, Macaca Mulatta
  misc_feature (1)...(1019): n = A,T,C or G
gtgagccagagcgaggaacgttaactccctcaccagacatcattgttttgtctgacaatgaggcttccagtccccgttccagttccagaatggtagaaagactcaaagcagccaacctagagatgtttaaggnnnnnnnnnnnnnnnnnnnnnnnnnnnnnnnnnnnnnnnnnnnnnnnnnnnnnnnnnnnnnnnnnnnnnnnnnnnnnnnnnnnnnnnnnnnnnnnnnnnnnnnnnnnnnnnnnnnnnnnnnnnnnnnnnnnnnnnnnnnnnnnnnnnnnnnnnnnnnnnnnnnnnnnnnnnnnnnnnnnnnnnnnnnnnnnnnnnnnnnnnnnnnnnnnnnnnnnnnnnnnnnnnnnnnnnnnnnnnnnnnnnnnnnnnnnnnnnnnnnnnnnnnnnnnnnnnnnnnnnnnnnnnnnnnnnnnnnnnnnnnnnnnnnnnnnnnnnnnnnnnnnnnnnnnnnnnnnnnnnnnnnnnnnnnnnnnnnnnnnnnnnnnnnnnnnnnnnnnnnnnnnnnnnnnnnnnnnnnnnnnnnnnnnnnnnnnnnnnnnnnnnnnnnnnnnnnnnnnnnnnnnnnnnnnnnnnnnnnnnnnnnnnnnnnnnnnnnnnnnnnnnnnnnnnnnnnnnnnnnnnnnnnnnnnnnnnnnnnntgaacagagtgtcctcgccacttcctagccccagcgccatgactgatgctgccaactcacaggctgcagccaaattggctcttcgcaaacagctggaaaagacactcctggagatcccaccccctaaacctccagctcccttacttcacttcttgcctagtgcagccaatagcgagttcatctacatggtaggcttggaagaagtcgtacaaagtgtcattgacagccaaggnnggcaaaagctgtgcctcacttctgcgggttgaaccctttgtatgtgcccagtgccgcacagatttcacccctcactggaagcaggaaaagaatggtaagattctatgtgagcagtgtatgacctccaaccagaan

SEQ ID NO: 21476 - DNA, 135 bp, Macaca Mulatta
acagaggatgcagcccccagccgcatggagggtggggacagaaaccctgtggatccccggatttcacactccttctgttttgttgccgtttatttttctactcaaatctctgcatggagataaatgatttaaacc

SEQ ID NO: 21477 - DNA, 834 bp, Macaca Mulatta
ggagctagattctccccagcctcatttctctcttcctacagatcctgatcccatcagaggttttgggtcttatcatccctctgtttcctctccttttcattttcaaccttccgcagcctctttgactgccaaccttagggtgccaatagcccctgccttacctaagactctttgcagtcagtcctggactaccccagtagatctctgtcttctagaagaatcagtagacagtctcgaaggaagtcagttgcctggctttggttttcaaagttttgaaacagaaagtcatgaactatcagaagtgcttctagacagctgctttttacaaataaaatgtgatacagcagatgacagtatcccatgctttccggaagtaatagaggaggatgaaatagtgtgcacacaacactggcaggatgctgtgccttggacagaactcttcagtctacagacagaggatggcttctggaaacttacaccagaactgggacttatattaaatcttgataacaatgctttgcacagctttcttaaacaaaaagggcattcaatctctgggtggtaaaggaaagagaacgtctccctggacctaattgccacaatgctgggtactaccagtttattcgcacccaggtgggaaaaagaagggaatagtggtccaattccctggatggagcgggatgaaccttcctactttccaggaatatttccctgggcttttggaaggctattaaaaaaaagcaaggggaaatgggggtaaaaaaaaaactggaagggaagttacccccatttaattttggcccccggggtttggaaactgggggaaagaactgg

SEQ ID NO: 21478 - DNA, 855 bp, Macaca Mulatta
gggagtttcatttccggcgtcaccggaagcagcttgaaaatggcgtctccctctttagagcggcgagaaaaaggggctggaaaaagtgaatttcgtaaccagaagacaaagccggagaaccaagatgaatcagaactccttactgttcccgatggctggaaggaaccagctttttccaaagaggacaatcccagaggacttttggaggagagcagtttctcaactttgttcccaaaatacagagaagcttacttgaaagagtgttggccattggtgcagaaagccttgaatgaacatcatgttaatgcaaccctggacctgatcgaaggcagcatgactgtctgtactacaaagaagacttttgatccatatatcatcattagggcaagagatctgataaaactgttagcaaggagtgtttcatttgaacaggcagtacgaattcttcaggatggatgttgcatgtgacatcattaaaataggttcttttggtaggaataaagagagatttgtaaaacgaaaaacaaccggcttattgggtcccaaaggatctacattgaagggcattgggaactctttaactaaattgtttaccttaaggggttcaggggaaaacacaggtttcaagcccattgggaacctttttagttggccttaaaaagaaggtttagaaaaagtaagtcccttagaattcctattggaagaaataatttcaatcccaaattttattaaccaattataaaaacgctttaaatggatttaatagaaaaagaagcctgggccaaaaaaagatttcttggaaattttcgcatatctcccagaggtttgggggaaagaaaaaattttcttgtgcca

SEQ ID NO: 21479 - DNA, 1100 bp, Macaca Mulatta
  misc_feature (1)...(1100): n = A,T,C or G
nttcctgtatgtcacacccacgcctctgcaggcagctcgcgctgggaatgccgtgcacgccctcctcctgtaccgccaccgcctgaaccgccaggagatacccccnnnnnnnnnnnnnnnnnnnnnnnnnnnnnnnnnnnnnnnnnnnnnnnnnnnnnnnnnnnnnnnnnnnnnnnnnnnnnnnnnnngactacatccgccacctccatgacagccaacacgtggctgtcttccaccggggccgattcttccgcgtggggacccactcccgaaacagcctgctttccccgagggccctggagcagcagtttcagcgaatcctggacgatccctcaccagcctgcccccacgaggaacatctggctgctctgaccgctgctcccaggnccaggggcacgtgggcccaggtgcgaaggtccctgaagacccaggcagcagaggccctggaggcagtggaaggggccgctttctttgtgtcactggacgctgagcccgcggggctcaccagggaggacccagcagcgtcgttggatgcctatgcccatgccctgctggctggccggggccatgannnnnnnnnnnnnnnnnnnnnnnnnnnnnnnnnnnnnnnnnnnnnnnnnnnnnnnnnnnnnnnnnnnnnnnnnnnnnnnnnnnnnnnnnnnnnnnnnnnnnnnnnnnnnnnnnnnnnnnnnnnnnnnnnnnnnnnnnnnnnnnnnnnnnnnnnnnnnnnnnnnnnnnnnnnnnnnnnnnnnnnnnnnnnnnnnnnnnnnnnnnnnnnnnnnnnnnnnnnnnnnagatccactcctccatctctctagccctgaggggagccaagatcttgtctgaaaatgtcgactgccatgtctttccattctccctatttggcaagagcttcatccgacgctgccacctgtcttcagacagcttcatccagatcgccttgcaactggcccacttccgggnggacaggggtcaattctgcctgacttatgagtcggccatgactcgcttattcctggaaggccggacggagacggtgcgatcttgcacgagggaggcctgcaactttgtgagggccatggaggacaaagagaagacgg

SEQ ID NO: 21480 - DNA, 495 bp, Macaca Mulatta
tagcttggaagtggagttgcttgctggcaggtaggtgtgaggatgaagtgggcattaaatgtattgacttgaaatgcttaaaaaaatggcaaggctcgagtcttgggaagtagattcttaagttgctaaaaacattggcaagggatgagatcgatgggtggagttctgttagccaggcacgaaaggcttactccccaggaaatcattgaggaactccagaaacattgcatccacctggagtaccctctgttggcagaatatgacttccagaagaattctgtcaaccctgatgtcaacactgacctaaagcccacagctgtcctcagaccctatcaggagaagagtttgtggaagattgaatcaaattcagatgagaataatccagaaaaagtggtgaaacaacaggttggaaactggattggggtataaggagatgcagtaaccctacctcctcatcctgtgcattggagagaggagcaaaggcagaaacttcct

SEQ ID NO: 21481 - DNA, 2006 bp, Macaca Mulatta
  misc_feature (1)...(2006): n = A,T,C or G
agatcagcctctgtgaactcggtgcttctcctggcaagtaaaccccaaggaggactgaccagttcttgaatttctataccatggcccttnnnnnnnnnnnnnnnnnnnnnnnnnnnnnnnnnnnnnnnnnnnnnnnnnnnnnnnnnnnnnnnnnnnnnnnnnnnnnnnnnnnnnnnnnnnnnnnnnnnnnnnnnnnnnnnnnnnnnnnnnnnnnnnnnnnnnnnnnnnnnnnnnnnnnnnnnnnnnnnnnnnnnnnnnnnnnnnnnnnnnnnnnnnnnnnnnnnnnnnnnnnnnnnnnnnnnnnnnnnnnnnnnnnnnnnnnnnnnnnnnnnnnnnnnnnnnnnnnnnnnnnnnnnnnnnnnnnnnnnnnnnnnnnnnnnnnnnnnnnnnnnnnnnnnnnnnnnnnnnnnnnnnnnnnnnnnnnnnnnnnnnnnnnnnnnnnnnnnnnnnnnnnnnnnnnnnnnnnnnnnnnnnnnnnnnnnnnnnnnnnnnnnnnnnnnnnnnnnnnnnnnnnnnnnnnnnnnnnnnnnnnnnnnnnnnnnnnnnnnnnnnnnncacatcagagtattcatattggtgttaagccctatgaatgtaaagaatgtgggaaggcttttagggtacgaggacaacttactctgcatcagagtattcatattggtgagaaaccctataaatgtaaggaatgtggcaaggcctttagattgcgccaaaaacttactctacatcagagcattcatactggtgaaaaaccctttgagtgtaaggagtgtaggaaggcctttaggcttaattcatcccttattcaacatcacaaacttcatactggtgagaaaccctatgaatgtaaggaatgtggaaaggcctttagagtgcggcaacagctaacactgcatcagagaattcacactggtgagaagccctatgaatgtaaggaatgtgggaagaccttcagnnnnnnnnnnnnnnnnnnnnnnnnnnnnnnnnnnnnnnnnnnnnnnnnnnnnnnnnnnnnnnnnnnnnnnnnnnnnnnnnnnnnnnnnnnnnnnnnnnnnnnnnnnnnnnnnnnnnnnnnatattggtgagaagcccctatgaatgtaaagaatgtgggaaggcttttagggtacgaggacaacttactctgcatcagaggattcatactggtgagaaaccctatgtgtgtaaagagtgtggaaaggcctttagacagtatgcacacctgactcggcatcagaagcttaatagtgctgacaggctctatgagtgcaaagaatgtgggaaggcgtttttgtgtggctctggtcttagagtacatcacaaacttcatactggtgagaaaccctatgaatgtaaggaatgtggaaaggcctttagagtgcggcaacagctaacactgcatcagagaattcacactggtgagaagccctatgaatgtaaggaatgtgggaagaccttcagccgtggttatcatcttattctccatcacagaattcatactggtgaaaaaccttatgaatgtaaggaatgctggaaagcctttagtcgctactcacaacttatttcacatcagagtattcatattggtgttaagccctatgactgtaaggaatgtgggaaggcctttagactactttcacagctcacacagcatcagagtattcatattggtgagaaaccctataaatgtaaggaatgtggcaaggcctttagattgcgccaaaaacttactctacatcagagcattcatactggtgaaaaaccctttgagtgtaaggagtgtaggaaggcctttaggcttaattcatcccttattcaacatctgagaattcattctggtgagaaaccctatgaatgcaaggaatgtaagaaggcctttaggcaacattcacaccttactcatcatctgaaaattcataatgtaaaaatctaagaaagtcttttcaacttctgtgtaatagaacattctatgaatgtagtaattaatctcttttgctccatacatg

SEQ ID NO: 21482 - DNA, 318 bp, Macaca Mulatta
  misc_feature (1)...(318): n = A,T,C or G
agtgacattgatatatcacgatcttgtaaactgaagcccattggtaagctggctcgagaaattggtctgctatctgaagaggtagaattatatggtgaaacaaaggccaaagttctgctgtcagcactagagcgcctgaggcaccggcctgatgggaaatacgtggtggtgactggngaataactccaacacctctgggagaagggaaaagcacaactacaattgggctagtgcaagcccttggtgcccatctctaccagaacgtctttgcatgtgtgcgacagccatctcagggtcccacctttggaataaaaggtn

SEQ ID NO: 21483 - DNA, 747 bp, Macaca Mulatta
cagtaaagtaaggtagtagagctcagcgagctgtctgaactggaattgctgtcacaaaataaaattttttacgagtctgaaaatgagagtagcccatcgatcttttcaattcatttaaagagagatggctgcagttttcctccccagtattctgctctgcagagaattataaagaaatttaaagtagatatagttctagaccctgaaacagcacaccccaacctgattgtatctgaagataaaaaatgtgtgagatttacaaagagaaaacaaaaggttcctagtttcccaaaaagatttacagtcaagccagttgttctgggttttccatattttcattctggcaggcatttctgggagattgaagtgggggataagtcggaatgggctattggcatttgcaaagattctcttcccacaaaggccaggagaccctcatcagccccgcaggaatgttggagaattgagctgcaagatgacggctatcatgcaccaggggcttttccaacccctctattgtcagaggtgaaagccagggccattggcattttcctggactatgagatgggtgagatctcattctataacatggctgagaaatctcacatctgtactttcactgacacttttactggacctcttcggccttatttctatgtaggaccagattcacaacctctcagaatctgtacagggacaaattgtgaatgaaaacccacccgttaggctgaactattttaatagttg

SEQ ID NO: 21484 - DNA, 199 bp, Macaca Mulatta
gtcggacgcctcagacgagcttgcggagtttgagatcggtgcctcgtccagcagcagcgcggaagctctcatctcggccgtgatggccgggaggagcatctccccatggctggcacggcgaacgagtcctgccaattcttccggagactcggccatcgccagctgtcacgacggagggagcagctacggcaaagaggat

SEQ ID NO: 21485 - DNA, 626 bp, Macaca Mulatta
  misc_feature (1)...(626): n = A,T,C or G
gggggccctgtttcttttcccttttgttaataccttgaatttagtccctccatcttatctccccatccctccccaccatgcaaccagtggtttaatccatgtaccactaggggctagtaccacagaggcctcctgtggtgccctcatatcataccacctgttcctgtggacagggaatgaccagcactgaaggtaccttacaactggctcatattatcagaggaccttggtcctttctgaatctctagtctctcttcatatcccttatcaggtgttttaagatgtctctgagaagccatcaaggcaaaagagaactttaagttccttgttccagcctagagttttggnnnnnnnnnnnnnnnnnnngaaaggtcacagtgacctaggattggaacctttttgctgttctggcttgcagactaccttctatcccaaaacagctgagaaatctgtgaagctgagattctgaaggacccagcttagtttcttccacttaagcctcaattcccttccttttccggggggagccttagttcccatggccctgaaaacacacatttcccccttcctttccagaaccactgacccccccagcacccatgatctgtttcagtggagaataggtg

SEQ ID NO: 21486 - DNA, 760 bp, Macaca Mulatta
gttaaaatcatttatttctcagggtgtacctttcagccatagttggacattcattgctgaattctgaaatgatagaattgtctttatttttctctgtgaggtcaattaaatgccttgttctgaaatttattttttacgagagagttgtgatatggttttggaatataagacaaatggcattgggtggggtttgtggctacagcttatgcatcattctgtgtttgtcatttactcacattgagctaactttaaattactcatgagtagaatcagaggtccagctgactgagatgacatgcatgtgagatccacaaaatgagacaatgcatgtcaatccatgctcatgttctaaacatggaaactaggagcctaataaacttcctaattcagtatggagaatgtcttggttgtgtgtttttatgttgagtaactacattttagtatgttcaggattggtttggaagaaaaatgttctttctggagtaccaagagccctcctttctttacattttgaattttgggtatgtaccaagcatatgctaactcttttttcagtagacttgatgggagttggcagatagaagaacatgtccatgactaaattgtgctgtccagcataaactgattaaacatgtaggtgtttgggacaccctccaaattggcatatatgaatgaagcgtgtgcccttacagatatttcttcagtatatattttgaattttataataatgtatactgctaagacaaaatctcattaccta

SEQ ID NO: 21487 - DNA, 2564 bp, Macaca Mulatta
  misc_feature (1)...(2564): n = A,T,C or G
tttcctgcttctgcagtttctgttttgaagagccagcacttacggcagaaactccttcagtctctgtttcttgataaagtgtattgggaaagtcaaggaggtagacaaggaattgaaaagcttattgatgtaatagaacacagagccaaaattcttatcacctatatcaatgcacacggggccaaagtattacctatgaatgaatgacaaaagaattttctggctaggatgttatatatannnnnnnnnnnnnnnnnnnnnnnnnaatcaagcacatcaacctcaagcgtgtttagcaatgaggcagtgtagatgaatacataaaataaatgactttaaccaagtagctataatggaactgagcactgtatgcatacttaaaaaagtttttaaaaacaagctacttaagaagtatttgtttatatttttctgtaacatcatgctatgtgtgaatctgaacatctgacaacagaagtttcagttattattctagctaagttttgaaaacatttgtcatgctgtttaatagaaaagtgtaagccagaggtactgactccattcataaagcatattttatgccattttgactgttctgaccaagtactaatgggaatgattcttgacattcttctgttgctgattgttaacatagagcagcctccacactaccccgaggcaactctacattggaacactgaggctcacagcctgcaagagcatcagaactgaccatacatttaaacagaaatgctgnnnnnnnnnnnnnnnnnnnnnnnnnnnnnnnnnnnnnnnnnnnnnnnnnnnnnnnnnnnnnnnnnnnnnnnnnnnnnnnnnnnnnnnnnnnnnnnnnnnnnnnnnnnnnnnnnnnnnnnnnnnnnnnnnnnnnnnnnnnnnnnnnnnnnnnnnnnnnnnnnnnnnnnnnnnnnnnnnnnnnnnnnnnnnnnnnnnnnnnnnnnnnnnnnnnnnnnnnnnnnnnnnnnnnnnnnnnnnnnnnnnnnnnnnnnnnnnnnnnnnnnnnnnnnnnnnnnnnnnnnnnnnnnnnnnnnnnnnnnnnnnnnnnnnnnnnnnnnnnnnnnnnnnnnnnnnnnnnnnnnnnnnnnnnnnnnnnnnnnnnnnnnnnnnnnnnnnnnnnnnnnnnnnnnnnnnnnnnnnnnnnnnnnnnnnnnnnnnnnnnnnnnnnnnnnnnnnnnnnnnnnnnnnnnnnnnnnnnnnnnnnnnnnnnnnnnnnnnnnnnnnnnnnnnnnnnnnnnnnnnnnnnnnnnnnnnnnnnnnnnnnnnnnnnnnnnnnnnnnnnnnnnnnnnnnnnnnnnnnnnnnnnnnnnnnnnnnnnnnnnnnnnnnnnnnnnnnnnnnnnnnnnnnnnnnnnnnnnnnnnnnnnnnnnnnnnnnnnnnnnnnnnnnnnnnnnnnnnnnnnnnnnnnnnnnnnnnnnnnnnnnnnnnnnnnnnnnnnnnnnnnnnnnnnnnnnnnnnnnnnnnnnnnnnnnnnnnnnnnnnnnnnnnnnnnnnnnnnnnnnnnnnnnnnnnnnnnnnnnnnnnnnnnnnnnnnnnnnnnnnnnnnnnnnnnnnnnnnnnnnnnnnnnnnnnnnnnnnnnnnnnnnnnnnnnnnnnnnnnnnnnnnnnnnnnnnnnnnnnnnnnnnnnnnnnnnnnnnnnnnnnnnnnnnnnnnnnnnnnnnnnnnnnnnnnnnnnnnnnnnnnnnnnnnnnnnnnnnnnnnnnnnntagatctaattgacacaagtgtagaacaaaatgtcaaaataatgttttaagtataagagaagatggaccaaggagagagagatcatttgaaaatctaattgtagctnttctaggctcacattcatgtactacttttagcacccttatgggctgtgctcgccccctgggcagttgagctttggactatcttcctcttcaatgttccctctattgacctgagtgcttccctcgcttctacagatttacagcactccttggctcttttgagtctccacttttactcactgtctctgggatttttaagatccttttcgtatcttataaatcatcctcttaatgaaaattagcctaacgaaagtttggagactggaattctactttgagccactgatttgaaataactcttttggcaagttgcctgacaccttgtcttaccaaggtggcatatttgcatttttactgcttaaaacnnnnnnnnnnnnnaccatctttatccaaatttatcatattgatggtaggactaacaggctttttagaagctggctttaacttttgagtctcaagctacaatgctgttgggtagcctggtcctctcccacgtgagggtttaacttcgtttatttgcctccagttattccaaaatgcttattaaatgaaaggcccaggaacatgtttattttagtcacctttgctttttaacaattttgttttgtaaccaatgagtaattcatgatgaattatttttgactaatagatagctgaaggccaggcttttaattctaataggtaatgctcttcttttgtcttatagaaagcaatgagaatactctgtgcatttcaaatgc

SEQ ID NO: 21488 - DNA, 2121 bp, Macaca Mulatta
  misc_feature (1)...(2121): n = A,T,C or G
gacaccacctcaaacaccaacgcccggggagagcatggaagatgttcatcacaatgaacccaaacaggacagcagtgctgatctgcttcagaacatcatcaacattaagaatgaatgcagccccgtttccctgaacacagttcannnnnnnnnnnnnnnnnnnnnnnnnnnnnnnnnnnnnnnnnnnnnnnnnnnnnnnnnnnnnnnnnnnnnnnnnnnnnnnnnnnnnnnnnnnnnnnnnnnnnnnnnnnnnnnnnnnnnnnnnnnnnnnnnnnnnnnnnnnnnnnnnnnnnnnnnnnnnnnnnnnnnnnnnnnnnnnnnnnnnnnnnnnnnnnnnnnnnnnnnnnnnnnnnnnnnnnnnnnnnnnnnnnnnnnnnnnnnnnnnnnnnnnnnnnnnnnnnnnnnnnnnnnnnnnnnnnnnnnnnnnnnnnnnnnnnnnnnnnnnnnnnnnnnnnnnnnnnnnnnnnnnnnnnnnnnnnnnnnnnnnnnnnnnnnnnnnnnnnnnnnnnnnnnnnnnnnnnnnnnnnnnnnnnnnnnnnnnnnnnnnnnnnnnnnnnnnnnnnnnnnnnnnnnnnnnnnnnnnnnnnnnnnnnnnnnnnnnnnnnnnnnnnnnnnnnnnnnnnnnnnnnnnnnnnnnnnnnnnnnnnnnnnnnnnnnnnnnnnnnnnnnnnnnnnnnnnnnnnnnnnnnnnnnnnnnnnnnnnnnnnnnnnnnnnnnnnnnnnnnnnnnnnnnnnnnnnnnnnnnnnnnnnnnnnnnnnnnnnnnnnnnnnnnnnnnnnnnnnnnnnnnnnnnnnnnnnnnnnnnnnnnnnnnnnnnnnnnnnnnnnnnnnnnnnnnnnnnnnnnnnnnnnnnnnnnnnnnnnnnnnnnnnnnnnnnnnnnnnnnnnnnnnnnnnnnnnnnnnnnnnnnnnnnnnnnnnnnnnnnnnnnnnnnnnnnnnnnnnnnnnnnnnnnnnnnnnnnnnnnnnnnnnnnnnnnnnnnnnnnnnnnnnnnnnnnnnnnnnaggcttacaatggcaacactgccctccatgttgctgccagcctgcagtaccggctgacacaattagatgccgtccgtctgttgatgaggaagggagccgacccaagtactcggaacttggagaacgaacagccagtgcatttggttcccgatggccctgtgggagaacannnnnnnnnnnnnnnnnnnnnnnnnnnnnnnnnnnnnnnnnnnnnnnnnnnnnnnnnnnnnnnnnnnnnnnnnnnnnnnnnnnnnnnnnnnnnnnnnnnnnnnnnnnnnnnnnnnnnnnntagaccatttgcctcatattggcaaatgtaagttgtctctatgaaacaaacatatttagttcactattatatagtgggttatattaaaagaaaagagaaatatctaatttctcttggcagattcgcatatttcatacccaggtatctgggatctagacatatgaatttgatctgagtggtaacattgccttcaattaacagtagcttgtgagtaggcaaggactttgatctgtggcacaaaacattgttaatatnnnnnnnnnnnnttcaaagcaggtacattgtaaatgtttctttaagaaaaatgaaagcatgtgaaaggaaaaaggtaaatacagcattgaggcttcatttggccttatgcagtccctgggagttactggcactggacaggcttcagtcattggactagaagaaaggtgtccatggttagaatttgatctttgcaaactgtatataattgttatttttgtccttaaaatattgtacatacttggtcattaacatggtcatatttgaaaatgtataagtcagtaaaatagaaaagaacaagtgaattgttgctatttaaaatttattttacaattccaaggagtttttattgtgtaatcactaagtctttgtagataaagcagatggggagttatggagttgttcctctgttggctgaaagatatatttgaattgtaaagatgctttttctcatgcgttgaaattagacattatttgtagggaattgcatgcttttttaccttcccgagacagggtcttgctctggcacccaggctggcgtgcagtggcatgatcttgactcacttcaggcttgacc

SEQ ID NO: 21489 - DNA, 1008 bp, Macaca Mulatta
  misc_feature (1)...(1008): n = A,T,C or G
tcttctttttgccctcgccgtggcgggcggctgtttcccgcgccgtggctggctccgccggccggggcaccgcgccgggctccatgcagccgggctgcgcggtcgcgcagagcgggcgccttcggggcttgggtctgggacccggcaggagcgggccggggatggcagcggcgggcggcgggtcggccgtggagccccggggaggctgccgccccggccgctgtccgcagtctgcgaggtgtccggnnnnnnnnnnnnnnnnnnnnnnnnnnnnnnnnnnnnnnnnnnnnnnnnnnnnnnnnnnnnnnnnnnnnnnnnnnnnnnnnnnnnnnnnnnnnnnggcccggctccagatccccgacccccgtgagctccggccctgcgtgcccgctattttggttccatctcttctgcatatttatgcttgcctgtcacattccctggcctctgagtgtcctttggcagtttccaaagcacttgggctagaaggagcttggggagcttcacaacaggtgggggcgcgcaggggaggggccgcggccggaccagcagagcgcttcaagggctggcgctgggacggactttccacactgtctttagggactggggttagcagacagcccttggccaccactgtgtccttactctgtcgctttacttggggttggacctcccctttccagctctggcgtgtgaccccgcaccgagcgtggtgtcaagaccaccaccagctggggccgtgggagcgaaggtgccccaggctcggggaagatgcggaccttttaccctctcggcaagtgattgttgcgcgctctggtgaggggacagtggtaccgcgatttcccatgtgccagcttcgggactcagatgtgcttttgtgtctctttgattagcaaaagcaaaaagaattcctccccgaacactaagcttcctggaaacttccctagacctaaacttgagaaccgcatataaacgaaccttgagggttctgttgtcggtagcgggtta

SEQ ID NO: 21490 - DNA, 674 bp, Macaca Mulatta
  misc_feature (1)...(674): n = A,T,C or G
gcagtttgaacaaaaagcctataataatgttctagagatacatatatatcacaagatcctctttatgtattttaaatgaaacagttttaataattaccaagttttggccaggcgcagtggctcacacctgtaatcctaggactttgggaggcagaggcaggcagatcacaaggtcaagagatcaagaccatcttggccaacatggtgaaaccccgtctctactaaaaatacaaaaattagctgggcatggtggcacacacctgtagtctcagctactcaggaggctgaggcaggaggatcacttgaacccgggaggcagcggttgcagtgagctgagatcacgccactgtactccagcctggcgacagagtgagactnnnnnnnnnnnnnnnnnnnnnnnnnnnnnnnnnnnaccaatttttcattactttgtaagaatgtagtgtattttaagataaaatgccaatgattataaaatcacctattttcaaaaatggttattatgtatacctttgtataacttctaacaatttagtggaagtatcaaaaggattgaagcaaatactgtaacagttatattcctttacataatagagaatataaaatattgtaatagtaataatatttatcataaaacagttttgtgtgagcatttgatggcgcttgatgagtta

SEQ ID NO: 21491 - DNA, 302 bp, Macaca Mulatta
gtaagctcagtgtgctcccccctcagtctttgggggattcaaatgcatgatattgcatgcacctgggaaatttaccaattccctatgctgttggaagggggtcacttaggagggggggacgtcttgagatgtactatgtaaagtaccaattgagcccaaaacaataaataaaacacagaactgtcttaaccttaagaaagctatatatgaataattatgtttacctcactggtgcatttaaaatggacttttgttcatgggagaaccttgttgacatggacagtttgcaatcttatgttgac

SEQ ID NO: 21492 - DNA, 167 bp, Macaca Mulatta
  misc_feature (1)...(167): n = A,T,C or G
cggaagagtcctgggcggaaggaggctctgtatgcttgtgaaaaagaacaantctggtgccaacggaaggttcttcaacaactttgctgcaaaacatgtacatttcaaggctgagcagccatcttagatttctttgttcctgtagacttatagattattccatatta

SEQ ID NO: 21493 - DNA, 226 bp, Macaca Mulatta
gtgagtgaccccggcccggggggcagatcacgacccccacctccatgccctacagacgacccggttactcctgagtctccaggtctgagatccaccccgaggccgcgggactcgcccagaccctctacctgggagaagcccaactcgcctttaccaaaatccctgcggcttggtccgggagggggcgaggttcggtgggcggggctgaccaagggggcggggccag

SEQ ID NO: 21494 - DNA, 2368 bp, Macaca Mulatta
  misc_feature (1)...(2368): n = A,T,C or G
gtcgtcgccgtccgaggtgtgtcctggctttgtctcgccgtcgctgctgccccgtccctgcctccgtgccccccccccgccttggcccctgcccagcggctctccctgtcctcctccccttaaccacccccacggtttttgccgtcggggctcgggagccgggcggatgatgccgtcggagagcggagctgagcgccgggaccgggcggctgctcaggtgggaacggctgcggccacggcggtggccacggcagccccggcaggcggcggccccgacccagaggccttgtcggcctcccccggacggcacctgagcgggctgagctggccacaggtgaagcgactggacgctctcctgagcgagccgattcccattcatgggcgcggcaacttccccacgctgagtgtgcagccccgtcagatcgtgcaggtgnnnnnnnnnnnnnnnnnnnnnnnnnnnnnnnnnnnnnnnnnnnnnnnnnnnnnnnnnnnnnnnnnnnnnnnnnnnnnnnnnnnnnnnnnnnnnnnnnnnnnnnnnnnnnnnnnnnnnnnnnnnnnnnnnnnnnnnnnnnnnnnnnnnnnnnnnnnnnnnnnnnnnnnnnnnnnnnnnnnnnnnnnnnnnnnnnnnnnnnnnnnnnnnnnnnnnnnnnnnnnnnnnnnnnnnnnnnnnnnnnnnnnnnnnnnnnnnnnnnnnnnnnnnnnnnnnnnnnnnnnnnnnnnnnnnnnnnnnnnnnnnnnnnnnnnnnnnnnnnnnnnnnnnnnnnnnnnnnnnnnnnnnnnnnnnnnnnnnnnnnnnnnnnnnnnnnnnnnnnnnnnnnnnnnnnnnnnnnnnnnnnnnnnnnnnnnnnnnnnnnnnnnnnnnnnnnnnnnnnnnnnnnnnnnnnnnnnnnnnnnnnnnnnnnnnnnnnnnnnnnnnnnnnnnnnnnnnnnnnnnnnnnnnnnnnnnnnnnnnnnnnnnnnnnnnnnnnnnnnnnnnnnnnnnnnnnnnnnnnnnnnnnnnnnnnnnnnnnnnnnnnnnnnnnnnnnnnnnnnnnnnnnnnnnnnnnnnnnnnnnnnnnnnnnnnnnnnnnnnnnnnnnnnnnnnnnnnnnnnnnnnnnnnnnnnnnnnnnnnnnnnnnnnnnnnnnnnnnnnnnnnnnnnnnnnnnnnnnnnnnnnnnnnnnnnnnnnnnnnnnnnnnnnnnnnnnnnnnnnnnnnnnnnnnnnnnnnnnnnnnnnnnnnnnnnnnnnnnnnnnnnnnnnnnnnnnnnnnnnnnnnnnnnnnnnnnnnnnnnnnnnnnnnnnnnnnnnnnnnnnnnnnnnnnnnnnnnnnnnnnnnnnnnnnnnnnnnnnnnnnnnnnnnnnnnnnnnnnnnnnnnnnnnnnnnnnnnnnnnnnnnnnnnnnnnnnnnnnnnnnnnnnnnnnnnnnnnnnnnnnnnnnnnnnnnnnnnnnnnnnnnnnnnnnnnnnnnnnnnnnnnnnnnnnnnnnnnnnnnnnnnnnnnnnnnnnnnnnnnnnnnnnnnnnnnnnnnnnnnnnnnnnnnnnnnnnnnnnnnnnnnnnnnnnnnnnnnnnnnnnnnnnnnnnnnnnnnnnnnnnnnnnnnnnnnnnnnnnnnnnnnnnnnnnnnnnnnnnnnnnnnnnnnnnnnnnnnnnnnnnnnnnnnnnnnnnnnnnnnnnnnnnnnnnnnnnnnnnnnnnnnnnnnnnnnnnnnnnnnnnnnnnnnnnnnnnnnnnnnnnnnnnnnnnnnnnnnnnnnnnnnnnnnnnnnnnnnnnnnnnnnnnnnnnnnnnnnnnnnnnnnnnnnnnnnnnnnnnnnnnnnnnnnnnnnnnnnnnnnnnnnnnnnnnnnnnnnnnnnnnnnnnnnnnnnnnnnnnnnnnnnnnnnnnnnnnnnnnnnnnnnnnnnnnnnnnnnnnnnnnnnnnnnnnnnnnnnnnnnnnnnnnnnnnnnnnnnnnnnnnnnnnnnnnnnnnnnnnnnnnnnnnnnnnnnnnnnnnnnnnnnnnnnnnnnnnnnnnnnnnnnnnnnnnnnnnnnnnnnnnnnnnnnnnnnnnnnnnnnnnnnnnnnnnnnnnnnnnnnnnnnnnnnnnnnnnnnnnnnnnnnnnnnnnnnnnnnnnnnnnnnnnnnnnnnnnnnnnnnnnnnnnnnnnnnnnnnnnnnnnnnnnnnnnctttcccccttgttgcaaggagccctcctgcctgggagcttgttctttggagggtgctaagcctgaatttgccacagtcaggtcaatgttcccaccccactggcttggttacagggctctcacatgggggaggggagccatactcccacccccttggcattcccctggatttgttgctattttgcactcttaacacctgccttataataaaaactgtctacactga

SEQ ID NO: 21495 - DNA, 627 bp, Macaca Mulatta
gggcctgggatttcatacgttgattgagttagtagtgtgggcagcttcacaagggctcctgggtccttagtgtgttttggggctggggtctaggcacctgtgactgggttcctcccaggagtcctcctgacgagggccttctcggctggttgctctgttctgttgcaggcgggacccttgcgtttgtcagcccaagcctggcggtgcacaagagctcctcggccgtggaccgccagcgagagtacctcctggacatgatcccaccccgctccatcccccagtcagccacgtggaaatagtgtgagccaggccccgtggaagacgggctccctccttccccacctggcccccagtctagaaggacccactgcaccaccctccgctggctcgggaagacaccgtgcccgtcccaagagcaagcaccggccgtgctgcagaggcgagacctcaattcttggctgcaaagtttcatcagggctggggggctggtgccgcctcataggcggacaaggatcatcgctggggaacctttcccgtgggctttcttcctttctctctttgcctttagtttgcccgacaccagcagaaaagtggaccttgggggttggttctgctcccgggcccctg

SEQ ID NO: 21496 - DNA, 733 bp, Macaca Mulatta
agcaaaatcaaacaatttcacctttatccacatatgaagagagcaaagtttcaaagtatgcttttgaacttgtggataaacagactttactggactcagaaggcaatgctgacattgatcaggttgataatttgcaggaggggcccagtaaacctgtgcatagtagtactaattatgatgatgccatgcagtttttgaagaagaagcggtatcttcaagcagcaagtaacaacagcagggaatatgcgctgaatgtgggtaccatagcttctcagccttctgtaacacaagcagctgtggcaagtgtcattgatgaaagtaccacggcatccatattagagtcacaggcactgaatgtggagattaagagtaatcatgacaaaaatgttattccagatgaggtactgcagactctgttggatcattattcccacaaagctaatggacagcatgagatatccttcagtgttgcagatactgaagtgacttctagcatatcaataaattcttcagaagtaccagaggtcaccccatcagagaatgttggatcaagctcccaagcatcctcatcagataaagccaacatgttgcaggaatactcgaagtttctgcagcaggctttggacagaactagccaaaatgatgcctatttgaatagcccgagccttaactttgtgactgataaccagaccctcccaaatcagccagcattctcttccatagacaagcaggt

SEQ ID NO: 21497 - DNA, 177 bp, Macaca Mulatta
gttttagggatactgaataattcttccctaaaaactctgcatttggtgactatcctgttcctgggcctgagtatgctcacgtcgctcctgagctccgggtttaccttctacgacagcatcagcaacccttaccagacgttcctggggccgatgggggtgtacacctggaacgggctc

SEQ ID NO: 21498 - DNA, 1978 bp, Macaca Mulatta
  misc_feature (1)...(1978): n = A,T,C or G
aggtgaaaagcttcaggtgctaaaagctaaactgcaagaggcaatgaaactccgaaggtttgaggagcgccagaagcgccaagcactgtttaaattagataatgaagatggatttgaggaagaggaggaggaagaggaagaaatgacagatgagtctgaggnnnnnnnnnnnnnnnnnnnnnnnnnnnnnnnnnnnnnnnnnnnnnnnnnnnnnnnnnnnnnnnnnnnnnnnnnnnnnnnnnnnnnnnnnnnnnnnnnagactgcagaattccttcttagtagtgaagaaatagaaaccaaagatgaaaaagaaatggataaagaaaataatgatggcagtagtgaaattggcaaggcagttggcttcctctctgttcccaagtctctctcatcagattctactttacttctatttaaggacagctcttccaagatggnnnnnnnnnnnnnnnnnnnnnnnnnnnnnnnnnnnnnnnnnnnnnnnnnnnnnnnnnnnnnnnnnnnnnnnnnnnnnnnnnnnnnnnnnnnnnnnnnnnnnnnnnnnnnnnnnnnnnnnnnnnnnnnnnnnnnnnnnnnnnnnnnnnnnnnnnnnnnnnnnnnnnnnnnnnnnnnnnnnnnnnnnnnnnnnnnnnnnnnnnnnnnnnnnnnnnnnnnnnnnnnnnnnnnnnnnnnnnnnnnnnnnnnnnnnnnnnnnnnnnnnnnnnnnnnnnnnnnnnnnnnnnnnnnnnnnnnnnnnnnnnnnnnnnnnnnnnnnnnnnnnnnnnnnnnnnnnnnnnnnnnnnnnnnnnnnnnnnnnnnnnnnnnnnnnnnnnnnnnnnnnnnnnnnnnnnnnnnnnnnnnnnnnnnnnnnnnnnnnnnnnnnnnnnnnnnnnnnnnnnnnnnnnnnnnnnnnnnnnnnnnnnnnnnnnnnnnnnnnnnnnnnnnnnnnnnnnnnnnnnnnnnnnnnnnnnnnnnnnnnnnnnnnnnnnnnnnnnnnnnnnnnnnnnnnnnnnnnnnnnnnnnnnnnnnnnnnnnnnnnnnnnnnnnnnnnnnnnnnnnnnnnnnnnnnnnnnnnnnnnnnnnnnnnnnnnnnnnnnnnnnnnnatgcctctactccggcctcatcagagttaaataagcaggagaaggagagcagcatgggtgatccaatggaagaagcacttgctctttgctcaggctcttttccaacagacaagnnnnnnnnnnnnnnngaggaggaatttggagacttccggctcatctcaaatgataatgagtttgatactgatgagnnnnnnnnnnnnnnnnnnnnnnnnnnnnnnnnnnnnnnnnnnnnnnnnnnnnnnnnnnnnnnnnnnnnnnnnnnnnnnnnnnnnnnnnnnnnnnnnnnnnnnnnnnnnnnnnnnnnnnnnnnnnnnnnnnnnnnnnnnnnnnnnnnnnnnnnnnnnnnnnnnnnnnnnnnnnnnnnnnnnnnnnnnnnnnnnnnnnnnnnnnnnnnnnnnnnnnnnnnnnnnnnnnnnnnnnnnnnnnnnnnnnnnnnnnnnnnnnnnnnnnnnnnnnnnnnnnnnnnnnnnnnnnnnnnnnnnnnnnnnnnnnnnnnnnnnnnnnnnnnnnnnnnnnnnnnnnnnnnnnnnnnnnnnnnnnnnnnnnnnnnnnnnnnnnnnnnnnnnnnnnnnnnnnnnnnnnnnnnnnnnnnnnnnnnnnnnnnnnnnnnnnnnnnnnnnnnnnnnnnnnnnnnnnnnnnnnnnnnnnnnnnnnnnnnnnnnnnnnnnnnnnnnnnnnnnnnnnnnnnnnnnnnnnnnnnnnnnnnnnnnnnnnnnnnnnnnnnnnnnnnnnnnnnnnnnnnnnnnnnnnnnnnnnnnnnnnnnnnnnnnnnnnnnnnnnnnnnnnnnnnnnnnnnnnnnnnnnnnnnccagtcgccctatggttattcaggaatcaaagtctttgctcagaaatccttttgaagccatcagaccaggaagtgctcaacaggtn

SEQ ID NO: 21499 - DNA, 1052 bp, Macaca Mulatta
  misc_feature (1)...(1052): n = A,T,C or G
agggtacgttccttcccccagagctcccaactgagccaggagaccgtgcgggtcctcatgaactatgccctgatggcctggggcatggagtcagacctcacatttcatgaggtagactcctcccagggccaggagcccgacatcctcatcgactttgcccgcgccttccaccaggacagctaccccttcgacgggttggggggcaccctagcccatgccttcttccccggggagcaccccatctctggggacactcactttgacgatgaggagaccaggacttttgggtcannnnnnnnnnnnnnnnnnnnnnnnnnnnnnnnnnnnnnnnnnnnnnnnnnnnnnnnnnnnnnnnnnnnnnnnnnnnnnnnnnnnnnnnnnnnnnnnnnnnnnnnnnnnnnnnnnnnnnnnnnnnnnnnnnnnnnnnnnnnnnnnnnnnnnnnnnnnnnnnnnnnnnnnnnnnnnnnnnnnnnnnnnnnnnnnnnnnnnnnnnnnnnnnnnnnnnnnnnnnnnnnnnnnnnnnnnnnnnnnnnnnnnnnnnnnnnnnnnnnnnnnnnnnnnnnnnnnnnnnnnnnnnnnnnnnnnnnnnnnnnnnnnnnnnnnnnnnnnnnnnnnnnnnnnnnnnnnnnnnnnnnnnnnnnnnnnnnnnnnnnnnnnnnnnnnnnnnnnnnnnnnnnnnnnnnnnnnnnnnnnnnnnnnnnnnnnnnnnnnnnnnnnnnnnnnnnnnnnnnnnnnnnnnnnnnnnnnnnnnnnnnnnnnnnnnnnnnnnnnnnnnnnnnnnnnnnnnnnnnggccccagttctgggtgttccaggaccggcagctggagcgcggggcgcggccgctcacggagctggggctgccccccggggaggaggtggatgccgtgttctcgtggccacagaacgggaagacctacctggtccgcggccggcagtactggcgctacgatgagtcggcggcgcgcccggaccctggctaccctcgcgacctgagcctctgggaaggcgcgcccccctcccctgacgatgtcaccgtcagcaacgcaggtg

SEQ ID NO: 21500 - DNA, 301 bp, Macaca Mulatta
  misc_feature (1)...(301): n = A,T,C or G
tggacatgagggcccccgctcagctcctggagctcctgttgctctggctcnnaggtgccagatgtgccatccagatgacccagtctccatcctccccgtctgcaactgtaggagacagagtcaccatcacttgccgtgtgagtcagaacattaacaataatttagcctggtatcagcagaaaccagggaaaactcctaagcttctgcatccagttttcaaactgggattccctctcggttcagcggcagtggatctgggacggattacactctcaccatcggcagcctgcagccagaagat

SEQ ID NO: 21501 - DNA, 552 bp, Macaca Mulatta
tctgtccattttaagcctgcctctgtccatttcaagggtgactctgtccatttcaagcctgactctgttcatttcaagcctgcttccagccaccccaagcccatcactggtcaccatgtctctactggcagccactccaagtctgccttcagtgctgccaccagccaccctaaacccaccactgttcacatcaagccagctaccagccatgctgagcccaccactgctgactatcccaagcctgccaccaccagccaccctgagcccactgctgctgaccaccctgagctctctgcctcccactgccccgagatccctgccattgcccaccctgagtctgacgacagtgacctccctgcatcggcctctagccctgccagtgggcccaccaagcctgctgccagccagctggagcctgacaccatcgctgaccttcctgacactactgtagtcactaccaatacccatgattaccatgatgttgtggttattgatgttgaagatgatctcaatgaaatggctgtgtgaaaaatgctctcacaagtggccagg

SEQ ID NO: 21502 - DNA, 684 bp, Macaca Mulatta
  misc_feature (1)...(684): n = A,T,C or G
tgagagcatcagccacctgctctaccaccacctgcagaacgggcagcccatcgtggccgcccatagcgagctgcacctgcgcggcgtcgtctcacgggagccctgagccaggtgncaggtgaccgtgctcagccccggctcctgcctgtnctcagccccggctcctgcctgtcgtggccttggggcgctcagccctcctcctggatcctggtcaggccgaacctccgctgcctctccttccttcgcatgagcctctggcacggtcctccctgcagccggcccgggctgggcagagcctcctcctgccgggacccctgccnnnnnnnnnnnngcctggagtgggggtgttcataccaaagacataaccatttcgcctttaaagaaaatatatccagaggccgccgctgcctgggagccctggcctgtgggtccccctctcgcccggctggttcggtctcatgcccgggagagtcagggctcccaggaccctggggaggaggcggatcccgggcctggctgggcttacttttcccacttgaggaactgggtgcacggttgtctttgatgggggacagttaaggtgctttggggttctcaggccaggacacatgctggcgttggaagtggaggcagccttgaggtgacctgggattccggggcagccaggccgctccaagacagtgg

SEQ ID NO: 21503 - DNA, 773 bp, Macaca Mulatta
gggaagttgctgggtttcgaatattaagctaaaagttttccactattatagaaattctgatttttggtaaatcatactcaaactttctgtataagttgtattattagactctctagttttatcttaaattgatactgttcttcattagatgtttatttagaaactggttctgtgttgaatatatagttgaaagtaaaaaataattgagactgaaagaaactttaagatttatctgcaaggattttttaaaaattagcattttaagtatttaaaagcaaatactgattttcaaaaaaaagtttttaaaaccctatattgaaaggtcagaattttgatagtctgaatacaagcatttcacttctccaacaagtacctgtgagcagtacagtatttacaatattgagctttgcatttatgatttgtctagaaatttaccacaaaagcagaatttttaaaactgcatttttaatcagtggaactcaatatatagttagctttattgaagtcttcttatctaaacccagtaaaacagattcaaagcaaacagtccaatcagtgggtcgtgtttattcaaaatattttatcttttatctagaatccacatatataaatcctatttgataagggtagtaattaggataactaaaattctaggcctaattttttaaagaatccaagacaaactaaactttactaggtacataagcttctcaatgagtcaccattcgtcttttttgtaaaaacttttttctttgaaatgctgaacttggctg

SEQ ID NO: 21504 - DNA, 881 bp, Macaca Mulatta
  misc_feature (1)...(881): n = A,T,C or G
caggcctctgtctatattcagggacaggacatgtgcccagtggtgacagaatatcaaggagtctctttggaatgtccaagcctccagctcctgcctggggtaaccactctgaagtgtgaacctccaccgcttcctcaagagaacccccaagaagtgagtgnnnnnnnnnnnnnnnnnnnnnnnnnnnnnnnnnnnnnnnnnnnnnnnnnnnnnnnnnnnnnnnnnnnnnnnnnnnnnnnnnnnnnngacattggtgaagactgaggaagaaacagcccaggcccttgctacagagaagtggccacatctgagtctggctcggaggaacctctgtgggaactcagctcagaagacagttacaagcctcagtctgatgannnnnnnnnnnnnnnnnnnnnnnnnnnnnnnnnnnnnnnnnnnnnnnnnnnnnnnnnnnnnnnnnnnnnnnnnnnnnnnnnnnnnnnnnnnnnnagagagtgtgcaccccagattccttgtagtactcctatccctgctgaaaggacagttacacatttgaacactctgaaggaccgtcacccaggtgatttgtgggcccggatgcacatctcatccttggaatatgctgcaggagacattacccgaaaagggagaagaaaagacaaagctcgagtgagtgaactgctccaaggtctctcattctctggtgactcagatgtggaaaaagataatgagcctgagatccagcctgcccaaaagaagttaaaggtgtcttgtttcccagaaaagagttggaccaaaagagacattaaacccaactttccaagctggtcagcactagattctggacttttgaatctcaagagtgaaaagttgaatccagtagagctttttgaattatt

SEQ ID NO: 21505 - DNA, 985 bp, Macaca Mulatta
  misc_feature (1)...(985): n = A,T,C or G
agctgtctctgccctactccagaccgccccaaagactctgtgggatgaacctgagtcagccgaatcccagccccttcccttgggcctgccgtggcgcgggacatcagtgacaggcggaagcagcggaccatcnnnnnnnnggaggcccggggcgcttgcgaagatgaagtttggcagcctctccttccggcagccttatgctggccttgtctnnnnnnnnnnnnnnnnnnnnnnnnnnnnnnnnnnnnnnnnnnnnnnnnnnnnnnnnnnnnnnnnnnnnnnnnnnnnnnnnnnnnnnnnnnnnnnnnnnnnnnnnnnnnnnnnnnnnnnnnnnnnnnnnnnnnnnnnnnnnnnnnnnnnnnnnnnnnnnnnnnnnnnnnnnnnnnnnnnnnnnnnnnnnnnnnnnnnnnnnnnnnnnnnnnnnnnnnnnnnnnnnnnnnnnnnnnnnnnnnnnnnnnnnnnnnnnnnnnnnnnnnnnnnnnnnnnnnnnnnnnnnnnnnnnnnnnnnnnnnnnnnnnnnnnnnnnnnnnnnnnnnnnnnnnnnnnnnnnnnnnnnnnnnnnnnnnnnnnnnnnnnnnnnnnnnnnnnnnnnnnnnnnnnnnnnnnnnnnnnnnnnnnnnnnnnnnnnnnnnnnnnnnnnnnnnnnnnnnnnnnnnnnnnnnnnnnnnnnnnnnnnnnnnnnnnnnnnnnnnnnnnnnnnnnnnnnnnnnnnnnnnnnnnnnnnnnnnnnnnnnnnnnnnnnnnnnnnnnnnnnnnnnnnnnnnccacccactaagcactgtgcatgtacacaggtttcttttctcagatgaaggaagtagggggaggggctttcctggtgtgatgccttcttagacacacaggcaatgtctcaagtactttgacctttgggtagaaggaaaagctgccagtaaatgtctcggcactgttgctaattttggtcctgctagtttctggattgtgtaaataaatgtgttgtagatga

SEQ ID NO: 21506 - DNA, 839 bp, Macaca Mulatta
tgccgggagcagcgctagcggcttttggacgtccagcttcagggtccccagcccctcagcctgcatggagcctcccaggccctggactcctctccagccgggtctacaccaccgtcccccgtcatcttcttctgggttactgagcagcttcttttaaaatagcaacaccgaggaaggccccgaagcccagtcttgcacctcgtggtgtgaagtcgtttaatcctgcccgctaatgcgaaaggactttccaccgtgtgcaggactcggcgctgggcaggggctctcgcagggtttgaaccgacctccgcctccgcctgcgggttcacaggccggcgagggagtcccgggaaggagacgcgctactgtgcgaggctggcctgagcggcttgggcagtggttgtccggggctggggacggctttcggctcccaggccattccgtcggggtatctgcggccaatctcgaaggtgaagaggctcagggttggcacagacttcacgggaggggtcctagaaggggaaaggggtgatatttgcccttagcgcagtctgggcgtgacgcggaaactttaaatcaccagaacctctggagagcttggagcacctgggaaggagcaaccagagtgggccggagttagggaaggaaggcatcgcggcgaattcgcccgctttgaccgcctttagggcggccgcttgtgcagccagccttctggaaggtaggctttgcgcttggtgcagagaagccccctcctccggatctgtgttccgccccagtccatgaataaggaggtgatcgcacaagtcaagcttctctagttctcggtggaatgagacgccctt

SEQ ID NO: 21507 - DNA, 104 bp, Macaca Mulatta
  misc_feature (1)...(104): n = A,T,C or G
gacctatgatgcctactccactttctacctgaattccagtggcctcatttgtcgccatcgtctagataaantgatgccttcacactcacctccaacgcctgtga

SEQ ID NO: 21508 - DNA, 851 bp, Macaca Mulatta
  misc_feature (1)...(851): n = A,T,C or G
gggctcctttcccaggcggctgccgaagatggcggaggtgcaggtcctggtgcttgatggtcgaggccatctcctgggccgcctggcggccatcgtggctaaacaggtactgctgggccggaaggtggtggtcgtacgctgcgaaggcatcaacatttctggcaatttctacagaaacaagttgaagtacctggctttcctccgcaagcggatgaacaccaacccttccagaggcccctaccacttccgggcccccagccgcatcttctggcggaccgtgcgaggcatgctgcctcacaagaccaagcgaggccaggctgccctggaccgcctcaaggtgtttgacggcatcccaccgccctacgataagaaaaagcggatggtggttcctgctgccctcaaggtcgtgcgtctgaagcctacgagaaagtttgcctatctggggcgcctggctcacgaggttggctggaagtaccaggcagtgacagccaccttggaggagaagaggaaggagaaagccaagatccactacagggaagaagaagcagctcatgaggttacggaaaacaggctgagaagaacgtgggagaagaannnatttgacaaaatacacacagggtccctcaagaacccaccggacctcctgggtcttgaagcccaanaaaaggacctggtttaatttcccggcgcgaaaannaaaatataaataaattcccgtggtccgggcccgccctccgggcccccttcgaaaaaaaacctttttcttaaaaaccacatttccgtttgtgggcgcgccgccgggggcccccccgnttaggggtttaaaagtgggaaaacaattgggggtcact

SEQ ID NO: 21509 - DNA, 462 bp, Macaca Mulatta
agccatgctgtgacctacaagcaaactaaatagccaacatttctgaaaccctgtgtctcctgtgccaagctgctccctgaaatggacttcttcatctgtacagatttgttaaaccattctatttgcttcttaataataggatttatattagtactcattaccattggacacaatgacagaagtactctccacagtaaagcagaccttccacaacagtcactctgtgtcctaaaattttccaacatagatgtgatttatataactttgttgatacataaattgtcttggggtttacggaaattaactattatgtttgcactaagatttgctgggagtggtaggtggacatatctatatatcaataaggactaaccgtcttttttgtacataggagattgataatactgtatttgttttaaccccacagtgttttactccactttcaaaaagatcaatttggca

SEQ ID NO: 21510 - DNA, 167 bp, Macaca Mulatta
tagtcaaatatataacaacagcaaaagattctacataagggaaaaatagcttacatttaggtacatcaacaaagattagtctgaaaacatcttctacctttcaaacataatttagacaatgaaacacaaagaagagcagcttgacgtgaccataatcttggtttctg

SEQ ID NO: 21511 - DNA, 766 bp, Macaca Mulatta
atgatgaaagaggatatgaacaaatggaggagcggagaaaaattcttcctgttttattgaatggggacttcctggaactaaaaacaaaaccaaagatttggacttctccacttccagtctttcaagaagtaagaccaagactggagtaagaccttttaaccctggtagaatgaatgtggcaggagacttatttcagaatggagaatttgcaactcatcatagtcctgattcttggatctcccagtcagcttcatttccccgtaatcagaaacagccaggggtggattctttatcaccagtggccttacttcgtaagcagaatttccagcctacagcccaacagcaacttactaacccagctaaaatcacttgtgcaaattgcaaaaaacctttacagaagggacagacagcttatcaacgaaaaggatcagctcacctcttttgctgtaccacctgcctttcttccttttctcataaacgtactcaaaacacacgaagtgtaatatgtaaaaaagatgcatctacaaagaaggctgatgttgttcttccagtagaatcaagcagatccttccaagaattttgtagtacatcttgtgtgtctccctgtgaaaacaaccggaatctctaaaaaggagtttttaataaagtcaagatgtacaatttgtagtaaattagcagagattcggcatgaagtcagggtaaatatgttacacattaaactgtgcgtaacattgctttaatagttccgatggccaaggcctaataa

SEQ ID NO: 21512 - DNA, 1352 bp, Macaca Mulatta
  misc_feature (1)...(1352): n = A,T,C or G
attaaagatgaggctctttctgatgaagacgaatgtgtttcccatggaaagaacaatggtgaagatgaggacatggnnnnnnnnnnnnnnnnnnnnnnnnnnnnnnnnnnnnnnnnnnnnnnnnnnnnnnnnnnnnnnnnnnnnnnnnnnnnnnnnnagattcaggaagctgggtttgaaattctaacaaatgaagacagaaccatgacagaggcagaaatgcgacttttctaccaacacagagctggagaggnnnnnnnnnnnnnnnnnnnnnnnnnnnnnnnnnnnnnnnnnnnnnnnnnnnnnnnnnnnnnnnnnnnnnnnnnnnnnnnnnnnnnnnnnnnnnnnnnnnnnnnnnnnnnnnnnnnnnnnnnnnnnnnnnnnnnnnnnnnnnnnnnnnnnnnnnnnnnnnnnnnnnnnnnnnnnnnnnnnnnnnnnnnnnnnnnnnnnnnnnnnnnnnnnnnnnnnnnnnnnnnnnnnnnnnnnnnnnnnnnnnnnnnnnnnnnnnnnnnnnnnnnnnnnnnnnnnnnnnnnnnnnnnnnnnnnnnnnnnnnnnnnnnnnnnnnnnnnnnnnnnnnnnnnnnnnnnnnnnnnnnnnnnnnnnnnnnnnnnnnnnnnnnnnnnnnnnnnnnnnnnnnnnnnnnnnnnnnnnnnnnnnnnnnnnnnnnnnnnnnnnnnnnnnnnnnnnnnnnnnnnnnnnnnnnnnnnnnnnnnnnnnnngaacagggaaccacattttagctgtaggttaggaatggtaatttttatctggtgttttagtttccaaaacatttacatattgatctactcctcaccccagaccaaacctaattccattcttactgatatgcacaaccactctgtcttcattgtcacctcaccctaaactcctccctttctcagtctacctactctttgtgactcttttatacctttcccccctggcatggatgtcctgctcagacactcagaagacagattccctttttcactgtcctcccaccactcattactcctgctccagatcccaactgctgatgttgctctagaaaaaccaccaaatatggctgttctttccgtgtaagctattccacctcagcagcaccctcactgctggtgaccagccttgtaaccccctggagatgcccatattccctacagtagctacctcttacttcaaattcttcctgcctccctcatgctcgcagccactctgtgcccacctcatcttcgtagggaccttgttttattttggggacacacattgcaacttcccacttttgacgaaaggtctccatgcttttgctgttttctttactcttgtcaaggtagggtacttcaagctcaaagcc

SEQ ID NO: 21513 - DNA, 325 bp, Macaca Mulatta
acaccccaaatcaatttatcttttggaggaatgatttggttggcaaattttgcacacccactctggagcagatcacaatggtacctcgggtcatcactgggactgggggaaaggacacgctccaaggaagaaaacaattcgtctggacgaatatccctgggcggttctccatgaactcttcgagggggcttagtgtgtagtctctcgagcacctctgatactaaactatcatctgagtccatgagtaataacagacccagaacagttcccaaaccttggcactttcgctcatttagccagaggtacccggcctagccttggcttt

SEQ ID NO: 21514 - DNA, 198 bp, Macaca Mulatta
  misc_feature (1)...(198): n = A,T,C or G
nagcccatttgacactgatggctctgcgtttggcttgtgactttttggcccggggtggctgcttcatcacaaaggttttccgttctcgtgactatcagcctttgctatggatctttcagcagctgttccgccgtgtccaggccaccaagccccaagcctctcgccacgaatctgcagagatctttgtagtctgccaag

SEQ ID NO: 21515 - DNA, 665 bp, Macaca Mulatta
ttctgactttccagaccccaggtccagtctgcagatcccaccagggtgctcctcctttgccttacctcctggagctgccagaggagatgaggtaccttttcaaagtgcagccgaaagtgagaaccaagcgactctctaggcttcagacacaaataggctcctctacacctgaagacaaaggcaaggtcaaatgggaaccagaataaatcttagaccccacagtccctcccatttccagccctaatctgcagacaggaatgcccttcaggtttcttccctccccctcttgacctaccccagatatttgtgtggaagaggaggaatcaccatttacaaggtggacaaatgctaatatttttatctagaaagaagagtgagtgttaacttttatttttttttcttctggggagtctgttgactcctttcttctgggtgctgcctataaatcttggaggaatcatttctcctcctcaaaaactgattcagaaactgacttggggaaggaatttaatactttgaagtcatgagatgcaccatcaaggctacccccaagaaggggcagaagagaaattgatgagaggggattagaggtcctcccttcaggaggcctgtgaaagcctcatcagtggagttaaaagcacgaacaatgcctgtggacaagatgt

SEQ ID NO: 21516 - DNA, 181 bp, Macaca Mulatta
atttttaaaaatcaatcagaggaggaaaagaaattctgcttttcaagtaggaaggaatgtacctagcaagaaagtaatttatttgaaacttctaatggatttttgagtgataaaacatttactaccttgtcccttaagtctgctaggctctcagtaccctaaaataacctagattgtgtta

SEQ ID NO: 21517 - DNA, 103 bp, Macaca Mulatta
cagtgcacccccaaggtggactttccccaggaccagctgacggcgctcactgggcggatccaggaggccggcacggaggtggtcaaggctaaagctggagcag

SEQ ID NO: 21518 - DNA, 464 bp, Macaca Mulatta
gaccggacgccagagacaaaggctcccaaggcaagagggactgtggccttgcgtcggctctgttcgggactgctgaccccaggactttacgccccttcgtttttctcttctgattcttctcttctcccaagcccgcgtcccctcacgcgtggcctctctccttgccgggagggccgcgatggaggtcccgccccggctttcccatgtgccgccgccattgttcccctccgctcccgctactttagcctcccgcagcctctcccattggcggccgcgggcgccgcggcagctagccccgctcctcccttcactcgctcccagctccgcccggcagggggcgcgccgggcccagcgccacgtcaccgcccagcagccctcccgattggcgggcggggagactataaagggagggcgcaggcggcgcccggatctcttccgccgccattttaaatccagctccatac

SEQ ID NO: 21519 - DNA, 215 bp, Macaca Mulatta
  misc_feature (1)...(215): n = A,T,C or G
agatctaccactggttcacacgcatgttcgccttcttcagaaaccatcctgccacctggaagnagaacgccatccgccacaacctgagcctgcacaagtgctttgtgcgggtggagagcgagaagggggctgtgtggaccgtggatgagttggagttccgcaagaaacggagccagaggccaagcaggtgttccaaccctacacctggcccctga

SEQ ID NO: 21520 - DNA, 324 bp, Macaca Mulatta
ccagagctcgtgagcctgcggaccctggatcaacacccggttgggacgggagaccacagggatgccacacagctcggatttcagcctctgatgtcagctcctgggtccactggctccactgagggtgcctagactctacagacaggtggccgggattcaactccctgcctggatctcaccagcactttccctctgtttcctgacctacgaaacagagaaaatatcagcacttatttattgttgttggatgctgcaaagtgttagtggatatgaggtgtttgcatctctgccatatagagagcagcaaagagatcatgaccaact

SEQ ID NO: 21521 - DNA, 96 bp, Macaca Mulatta
agctccagtgcgatgtgtctgtggaggaggacagccggcaggagtggaccttcaccctgtacgactttgacaacaacggcaaggtcacccgagagg

SEQ ID NO: 21522 - DNA, 2177 bp, Macaca Mulatta
  misc_feature (1)...(2177): n = A,T,C or G
ggaagcagctgtcaccccttgctagccggctgggcttcttacaggaggagaggacctttgtaaaacgaaaaccccgaggnnnnnnnnnnnnnnnnnnnnnnnnnnnnnnnnnnnnnnnnnnnnnnnnnnnnnnnnnnnnnnnnnnnnnnnnnnnnnnnnnnnnnnnnnnnnnnnnnnnnnnnnnnnnnnnnnnnnnnnnnnnnnnnnnnnnnnnnnnnnnnnnnnnnnnnnnnnnnnnnnnnnnnnnnnnnnnnnnnnnnnnnnnnnnnnnnnnnnnnnnnnnnnnnnnnnnnnnnnnnnnnnnnnnnnnnnnnnnnnnnnnnnnnnnnnnnnnnnnnnnnnnnnnnnnnnnnnnnnnnnnnnnnnnnnnnnnnnnnnnnnnnnnnnnnnnnnnnnnnnnnnnnnnnnnnnnnnnnnnnnnnnnnnnnnnnnnnnnnnnnnnnnnnnnnnnnnnnnnnnnnnnnnnnnnnnnnnnnnnnnnnnnnnnnnnnnnnnnnnnnnnnnnnnnnnnnnnnnnnnnnnnnnnnnnnnnnnnnnnnnnnnnnnnnnnnnnnnnnnnnnnnnnnnnnnnnnnnnnnnnnnnnnnnnnnnnnnnnnnnnnnnnnnnnnnnnnnnnnnnnnnnnnnnnnnnnnnnnnnnnnnnnnnnnnnnnnnnnnnnnnnnnnnnnnnnnnnnnnnnnnnnnnnnnnnnnnnnnnnnnnnnnnnnnnnnnnnnnnnnnnnnnnnnnnnnnnnnnnnnnnnnnnnnnnnnnnnnnnnnnnnnnnnnnnnnnnnnnnnnnnnnnnnnnnnnnnnnnnnnnnnnnnnnnnnnnnnnnnnnnnnnnnnnnnnnnnnnnnnnnnnnnnnnnnnnnnnnnnnnnnnnnnnnnnnnnnnnnnnnnnnnnngggatttaactggactctgttcatacaaactgtgctatcctctgtcaaaatcaagctgctgccagatgaggaagtggtggtctacggcatcccctacctgcagaaccttgaaaacatcatcgacacctactcagccaggnnnnnnnnnnnnnnnnnnnnnnnnnnnnnnnnnnnnnnnnnnnnnnnnnnnnnnnnnnnnnnnnnnnnnnnnnnnnnnnnnnnnnnnnnnnnnnnnnnnnnnnnnnnnnnnnnnnnnnnnnnnnnnnnnnnnnnnnnnnnnnnnnnnnnaacagcaatatggagaacgccgtgggctccctctacgtcagggaggcgttccctggagacagcaagagcatggtnnnnnnnnnnnnnnnnnnnnnnnnnnnnnnnnnnnnnnnnnnnnnnnnnnnnnnnnnnnnnnnnnnnnnnnnnnnnnnnnnnnnnnnnnnnnnnnnnnnnnnnnnnnnnnnnnnnnnnnnnnnnnnnnnnnnnnnnnnnnnnnnnnnnnnnnnnnnnnnnnnnnnnnnnnnnnnnnnnnnnnnnnnnnnnnnnnnnnnnnnnnnnnnnnnnnnnnnnnnnnnnnnnnnnnnnnnnnnnnnnnnnnnnnnnnnnnnnnnnnnnnnnnnnnnnnnnnnnnnnnnnnnnnnnnnnnnnnnnnnnnnnnnnnnnnnnnnnnnnnnnnnnnnnnnnnnnnnnnnnnnnnnnnnnnnnnnnnnnnnnnnnnnnnnnnnnnnnnnnnnnnnnnnnnnnnnnnnnnnnnnnnnnnnnnnnnnnnnnnnnnnnnnnnnnnnnnnnnnnnnnnnnnnnnnnnnnnnnnnnnnnnnnnnnnnnnnnnnnnnnnnnnnnnnnnnnnnnnnnnnnnnnnnnnnnnnnnnnnnnnnnnnnnnnnnnnnnnnnnnnnnnnnnnnnnnnnnnnnnnnnnnnnnnnnnnnnnnnnnnnnnnnnnnnnnnnnnnnnnnnnnnnnnnnnnnnnnnnnnnnnnnnnnnnnnnnnnnnnnnnnnnnnnnnnnnnnnnnnnnnnnnnnnnnnnnnnnnnnnnnnnnnnnnnnnnnnnnnnnnnnnnnnnnnnnnnnnnnnnnnnnnnnnnnnnnnnnnnnnnnnnnnnnnnnnnnnnnnnnnnnnnnnnnnnnnnnnnnnnnnnnnnnnnnnnnnnnnnnnnnnnnnnnnnnnnnnnnnnnnnnnnnnnnnnnggtactggggtcactgcagaacctggccgcctttgcagacacgttccactgtgcccagggcacccccatgcaccccaaggatcgatgccgcgtgtggta

SEQ ID NO: 21523 - DNA, 613 bp, Macaca Mulatta
  misc_feature (1)...(613): n = A,T,C or G
ctcatgcaagttaccaccatagtcatagccatgaagaaccagcaatggaaatgaaaagaggaccactttttagtcatctgtcttctcaaaacatagaagaaagtgcctattttgattccacatggaagggtctaacagctctaggaggcctgtatttcatgtttcttgtcgaacatgtcctcacattgatcaaacaatttaaagataagaagaaaaagnnnnnnnnnnnnnnnnnnnnnnnnnnnnnnnnnnnnnnnnnnnnnnnnnnnnnnnnnnnnnnnnnnnnnnnnnnnnnnnnnnnnnnnnnnnnnnnnnnnnnnnnnnnnnnnnnnnnnnnnnnnnnnnnnnnnnnnnnnnnnnnnnnnnnnnnnnnnnnnnnnnnnnnnnnnnnnntggaagaagaagaggtcatgatagctcatgctcatccacaggaagtctacaatgaatatgtacccagagggtgcaagaataaatgccattcacatttccacgatacacttggccagtcagacgatcnnnnnnnnnnnnnnnnnnnnnnnnnnnnnnnnnnnnnnnnnnnnnnnnnnnnnnnnnnnnnnntcacagtcacagccagcgctactctcgggag

SEQ ID NO: 21524 - DNA, 627 bp, Macaca Mulatta
  misc_feature (1)...(627): n = A,T,C or G
agtgaactggccaggaaaaggtggtgagagcagcggctcagaaagccctgggagaatctaaaggacctggtgagaagggcgagagggactggagttcacaggcccagccaaagagagggcagaaccgctgttccattccttctgctggaaggaagtggcctggacctggtgagccttgttagtctggtttaaggttgctttttctttcgctatcctgagccactgaagaatcctgttaaatgatccagtcttattctttgctgtgctacaggaaattaaaaggagctattgagtctgctgggagcagagaacaagaaggggtcatctacaggaccctggtggcggcggctgcagctgccagcatgggattcccacagctgggcaatcagggctgagtggcctcaggagtcagcaccgcggagggattcactcctcttgagagttttctctctcttttannnnnnnnnnnnnnnnnnnngatcttgnnnnnnnnnnnnnnnnnnnnnnnnnnntgagatcgtggctcactgtagcctcgacctaggatcaagcaatcctcccaactcagcctcccgaggagctgggcctacaggagtcagagcctgacaaagtgaagagatgatgccg

SEQ ID NO: 21525 - DNA, 290 bp, Macaca Mulatta
gttggatactttaagtgaagcctcccactggaaacaagctgcagttgttttagataatcccatcctggttgaaatgggagaagaacttgtactcagcgttcagcaccacaaaagcaatgtcagcatcacagtaaagcaatgaagagcagttttccaatgaaaactgtttaaatagagcatcaacaagtacaaaattcttatcttaattagtgggggtctataaaaattccttgtaatggtcaaatattttttaaacattgacattaataaagcatattttaaaagattct

SEQ ID NO: 21526 - DNA, 151 bp, Macaca Mulatta
tcccaggggtgagcagcttttggatttaatatgaacatgtacagcgtgcgtagggactcttgccttaaggagtgtaaacttgatctagcatttgctgatatgtggtctaccacacaagaaatgcatgtttcacagaaaattctctattgta

SEQ ID NO: 21527 - DNA, 2530 bp, Macaca Mulatta
  misc_feature (1)...(2530): n = A,T,C or G
atgccggctgagctgctgctgctgctgattgttgccttcgccagccccagctgccaggtgctctcatcactgcgcatggnnnnnnnnnnnnnnnnnnnnnnnnnnnnnnnnnnnnnnnnnnnnnnnnnnnnnnnnnnnnnnnnnnnnnnnnnnnnnnnnnnnnnnnnnnnnnnnnnnnnnnnnnnnnnnnnnnnnnnnnnnnnnnnnnnnnnnnnnnnnnnnnnnnnnnnnnnnnnnnnnnnnntgtgtcagatcttgcccaaaggggttgtgtctgtcctcgggccctcctccagcccagcatctgcctccactgtgagccatatctgtggagagaaggagnagatcccccacatcaaggtgggtcccgaggagacaccccgccttcagtaccttcgcttcgcctctgtcagcctgtaccccagtaacgaggacctcagcttggcagtctcccgaatcctcaagtccttcaactttccctccgcccacccttatctgcgccaaggctgagtgngcctgctgcgattggaggaactggtgcgtggcttcctcatctccaaggagacgctgtcagtgaggatgctggacgacagccgggaccccacgccactgctcaaggagatccgtgatgacaaggtgtccaccatcatcatcgatgccaacgcctccatctcccacctcatcctccgtaaggnnnnnnnnnnnnnnnnnnnnnnnnnnnnnnnnnnnnnnnnnnnnnnnnnnnnnnnnnnnnnnnnnnnnnnnnnnnnnnnnnnnnnnnnnnnnnnnnnnnnnnnnnnnnnnnnnnnnnnnnnnnnnnnnnnnnnnnnnnnnnnnnnnnnnnnnnnnnnnnnnnnnnnnnnnnnnnnnnnnnnnnnnnnnnnnnnnnnnnnnnnnnnnnnnnnnnnnnnnnnnnnnnnnntgatgtttgatgccgtgccgtggtggtgagcgctgtccgagagctgaaccgcagccaggagatcggtgtgaagccgctggcctgtacgtcagccaacatttggccccatgggaccagcctcatgaactacctgcgcatggtnnnnnnnnnnnnnnnnnnnnnnnnnnnnnnnnnnnnnnnnnnnnnnnnnnnnnnnnnnnnnnnnnnnnnnnnnnnnnnnnnnnnnnnnnnnnnnnnnnnnnnnnnnnnnnnnnnnnnnnnnnnnnnnnnnnnnnnnnnnnnnnnnnnnnnnnnnnnnnnnnnnnnnnnnnnnnnnnnnnnnnnnnnnnnnnnnnnnnnnnnnnnnnnnnnnnnnnnnnnnnnnnnnnnnnnnnnnnnnnnnnnnnnnnnnnnnnnnnnnnnnnnnnnnnnnnnnnnnnnnnnnnnnnnnnnnnnnnnnnnnnnnnnnnnnnnnnnnnnnnnnnnnnnnnnnnnnnnnnnnnnnnnnnnnnnnnnnnnnnnnnnnnnnnnnnnnnnnnnnnnnnnnnnnnnnnnnnnnnnnnnnnnnnnnnnnnnnnnnnnnnnnnnnnnnnnnnnnnnnnnnnnnnnnnnnnnnnnnnnnnnnnnnnnnnnnnnnnnnnnnnnnnnnnnnnnnnnnnnnnnnnnnnnnnnnnnnnnnnnnnnnnnnnnnnnnnnnnnnnnnnnnnnnnnnnnnnnnnnnnnnnnnnnnnnnnnnnnnnnnnnnnnnnnnnnnnnnnnnnnnnnnnnnnnnnnnnnnnnnnnnnnnnnnnnnnnnnnnnnnnnnnnnnnnnnnnnnnnnnnnnnnnnnnnnnnnnnnnnnnnnnnnnnnnnnnnnnnnnnnnnnnnnnnnnnnnnnnnnnnnnnnnnnnnnnnnnnnnnnnnnnnnnnnnnnnnnnnnnnnnnnnnnnnnnnnnnnnnnnnnnnnnnnnnnnnnnnnnnnnnnnnnnnnnnnnnnnnnnnnnnnnnnnnnnnnnnnnnnnnnnnnnnnnnnnnnnnnnnnnnnnnnnnnnnnnnnnnnnnnnnnnnnnnnnnnnnnnnnnnnnnnnnnnnnnnnnnnnnnnnnnnnnnnnnnnnnnnnnnnnnnnnnnnnnnnnnnnnnnnnnnnnnnnnnnnnnnccagaattcacggtaccaaacgtaccagcgcatgtggaactacatgcagtcgaagcagcccagcgtgttcgtcaagagcacagaagagggcatcgcccgcgtcctcaactcccgctatgccttcctgctcgagtccaccatgaacgagtaccaccggcgcctcaactgcaacctcacccagattgggggactcctcgacaccaagggctacggcatcggcatgccgctgggnggctccccgttccgggatgagatcacactggccatcctgcagcttcaggagaacaaccggctggagatcctgaagcgcaaatggtgggaggggggccggtgccccaaggaggaggaccatcgagctaaaggtnaggtttgggcatggagaacattggtggcatttttgtcgtactcatctgtggcctcatcattgctgtcttcgtggcagtcatggaattcatatggtccacacggaggtcagcagagtccgaggaggtg

SEQ ID NO: 21528 - DNA, 761 bp, Macaca Mulatta
  misc_feature (1)...(761): n = A,T,C or G
ggggagtcacggctcgcgactggcctaaatcgccgcaggacaccatgaagcagttgccagtcttggaacctggagacaagcccaggaaagcaacatggtacaccttgactctccctggtgacagcccctgtgctcgagttggccacagctgttcgtatttacccccagttggtaatgccaagacaggaaaggtcttcatcgttggcggagcaaatccaaacagaagcttctcagacgtgcacgccatggatctgggaaaacaccagtgggacttagttacctgcaagggcctcttgccccgctatgaacatgctagcttcattccctcctgcacatccgaccatatctgggtatttggaggtgccaaccaatcaggaaatcgaaattgtctacaagtcctgaatcctgaaaccaggatgaggaccacgccagaagtgaccagccccccaccatccccaagaacattccacacatcatccgcagccattggaaaccagctgtatgtctttgggggcggagagagaggtgcccagcctgttcaggacacgaagctgcacgtgtttgacgcanagactctgacctggtcacagccagagacacttgggaatcctccatctccccggcatggtcatgtgatggtggcagcagggacaaagctcttcatccacggaggcttggcaggggacaaattctatgatgatctccactgcattgatataagtaacatgaaatggcagaagctaaattcccactgggggcac

SEQ ID NO: 21529 - DNA, 1738 bp, Macaca Mulatta
  misc_feature (1)...(1738): n = A,T,C or G
cagaaatccgatggagcggatgtatcaacgcacattctactaccactttgaaaataaacccatcctctatggtcggagctacacctggctgtgctacgaagtgaaaataaggaagcacccctcaaagctcccttgggacacaggggtctttcgaggccaggtnnnnncaggtgtatttccagcctcagtaccaaaaagaaatgtgcttcctctcttggttctgtggcaaccagctgcctgcttacaagcgcttccagatcacctggtttgtatcctggaacccctgcccggactgtgtggcaaaggtgaccgaattccnnnnnnnnnnnnnnnnnnnnnnnnnnnnnnnnnnnnnnnnnnnnnnnnnnnnnnnnnnnnnnnnnnnnnnnnnnnnnnnnnnnnnnnnnnnnnnnnnnnnnnnnnnnnnnnnnnnnnnnnnnnnnnnnnnnnnnnnnnnnnnnnnnnnnnnnnnnnnnnnnnnnnnnnnnnnnnnnnnnnnnnnnnnnnnnnnnnnnnnnnnnnnnnnnnnnnnnnnnnnnnnnnnnnnnnnnnnnnnnnnnnnnnnnnnnnnnnnnnnnnnnnnnnnnnnnnnnnnnnnnnnnnnnnnnnnnnnnnnnnnnnnnnnnnnnnnnnnnnnnnnnnnnnnnnnnnnnnnnnnnnnnnnnnnnnnnnnnnnnnnnnnnnnnnnnnnnnnnnnnnnnnnnnnnnnnnnnnnnnggctaagaatgttccctgtggtgattacggctgccacgtggagctgcgcttcctgtgtgaggttccttcttggcagttggacccggcccagacatacagggtcacttggttcatctcctggagcccctgcttcaggaggggctgtgccgggcaagtgcgtgtgttccttcaggagaacaaacacgtgagactgcgcatcttcgctgcccgcatctatgattacgaccccctgtatcaggaggcactgcgaacgctgcgggatgcaggggcccaagtctccatcatgacctacgannnnnnnnnnnnnnnnnnnnnnnnnnnnnnnnnnnnnnnnnnnnnnnnntccagccctgggatggactagatgagcacagccaagccctgagtgggaggcttcgggccattctccaggtgacggcttcctccctctgcctggnnnnnnnnnnnnnnnnnnnnnnnnnnnnnnnnnnnnnnnnnnnnnnnnnnnnngctcagagcctcctctgggttcctgctccccccagggcgcccagctccatccctccctttccttctcacagcccccctttctctcccacctcccgcatccctccctcctctcctgtcattgtcactgtccccaggcctcctccctgtgccctctttccactatctcacctcctgctccattcaaccccactgctcttccagaatcagggaaactgaaggatgggcctcagtctctaaggaaggcagagacctgggttgagcctcagaataaaagatcttcttccaagaaatgcaaacaggccgttcaccaccatctccagcagctcacagacaccagcgaagcaaggcgctcctgaccaagtagattttttaaaaatcagagtgaattaattttaatggaaaatttctcttatgttctaagtatataatagtaagattgtgctcaatattctcagaattgtttttaatttattaatgaaatgattaactggcttcatatctagactaataaaacattaagaatcttccataa

SEQ ID NO: 21530 - DNA, 710 bp, Macaca Mulatta
  misc_feature (1)...(710): n = A,T,C or G
gggcttgtcttatgttttcatctgtttacttcgtggcattcaatttcnnnnnnnnnnnnnnnnnnnnnnnnnnnnnnnnnnnnnngcaaagaaaatcaaaatttttatagccaaataacaaatgtgccatgtaaaaataagtctggagttaagagtttaaaatttttaaacatcaatttccaagtttatatcatatgaatacatttcaggggataacttattnnnnnnnnnnnnnatgcctaaatatcttttatttgcaatattcagtatcaaattagagcattttggccaactgaaacatataacgttctcatctcctttcctggagaaagcagctgcagaggttctctagttcctgcatttccatcatcctagtgaaaagacaacccacaggattggaannnnnnnnnnnnnnnnnnnnnnnnnnnnnnnnnnnnnnnngagatggagtttcgctcttgttgcccaggctggaatgcaatggcatgatctcagctcactgcaagttccgcctcccaggttcaagcgattctcctgcctcagccacccaagtagctgggattacaggcatgcatcaccacacccggataattgcttatatttttagtagagacagggtttctccatgtcggtcaggctggtctcgaactcccgacctcaggtgactcacctcagcctcccaaagtgttgggattacaggcgtgagccac

SEQ ID NO: 21531 - DNA, 237 bp, Macaca Mulatta
  misc_feature (1)...(237): n = A,T,C or G
caatatcacaagctctcaggagccggctctgctgtccacagcctcctcctcagncagcacctaatacatccctggcaaccacaccggcctccttacaagtacctgaaattactttctgtgaaatcctgccatgtcaggagacttattgctgccccatctggggaatgaaagaagtcttttcaagtcctgtgcaaagacaatctgaagacaaggaattccatcagaggcaatggtcag

SEQ ID NO: 21532 - DNA, 901 bp, Macaca Mulatta
gactttgggtttaaaacaacggagaaaacagattctatttcctgagaaaagtgaagatttcagagagaatatattccgatatgatgacgaagggggtggagaagaagatacagaggcctttgacgtagcagcgctgaggagtagcaccataatgcgggaacgcaagactcggaaaaccaccagcgctgagatcaggagcctatacaggcagtctttgcaagttggccccgacagtgccatattcaggaagttcatcctggaaaagctcgaagaagctgatactgatccgtgtgcccctccttttgattccctccagacctacgcttttgagggaacagggtcattagctggatccctgagctccttagaatcagctgtctctgatcaggatgaaagctatgattaccttaacgagttgggacctcgctttaaaagattagcatgcatgtttggttctgcagtgcagtcaaataattagggcttcttaccatcaacatttttgaaagtactaatgtatatttgaaccaaagggtagtcttaaagagttttgtgccctggctctatggcagggaaagccctagtctatagagttttctgatttccctggagtaaataccccatggttattttaagctacctacatgctgtcattgaacagacgtggggagaaacgtaaacaatcaactcacaggcatcaatacaaccagatacgaagtaaaataatttaggaagatattacaagtaggtgagaggacataagatgtagtcaatccttgtgcaattatgtcattatttacttaggaaagagtaaaaataccaaacgagaaaatttaaaggagccaaaatttgaaagtcaaatagaaatgtacaaatcgagataaaatttacatttctatcatat

SEQ ID NO: 21533 - DNA, 816 bp, Macaca Mulatta
  misc_feature (1)...(816): n = A,T,C or G
gggggatctgggactccgtggaccctacctccagctcagcctcgctagctccgcctgcggtacgtgctcccgcctccgactcaaaatgcctgtctggggaggtggaaacaagtgtggggcctgcgggaggaccgtgtaccacgcagaagaggtgcagtgtgatggcaggagcttccaccgctgctgctttctctgcatggtttgcaggaaaaatttagatagtacaactgtggcaattcacgatgaagagatctactgcaaatcctgctacggaaagaaatatgggccaaaaggctacggttacggccagggcgctggcacgcttaacatggaccgtggcgagaggctgggcatcaagccagagagtgttcagcctcacaggcctacaacaaatccaaacacttctaaatttgctcagaaatatggaggtgctgagaagtgttccagatgcggggattctgtatatgctgccgagaagataattggagctggaaagccctggcacaaaaactgtttccgatgtgcaaagtgtgggaagagtcttgaatcaacaactctgactgaaaaagaaggtgaaatctattgtaaaggatgctatgcaaagaactttgggcccaagggatttggctatggccaaggagcaggggctcttgttcatgccccagtaaggtgtaaaccctggaacttaacatcacacactgagaatctcttcataacctaggcacagataatctttaacaactaaactactgtgaaattctacccagcattaagtactgtatattgccctgntnnacttggataggctggctaact

SEQ ID NO: 21534 - DNA, 2542 bp, Macaca Mulatta
  misc_feature (1)...(2542): n = A,T,C or G
atgagttcctgcaacttcacacatgccacctttgtgcttattggtatcccaggactagagaaagcccatttctgggttggcttccccctcctttccatgtatgtagtggcagtgtttggaaactgcatcgtggtcttcatcgtaaggacggaacgcaacctgcactctccgatgtacctctttctctgcatgctggcagccattgacctggccttatccacatccaccatgcctaagatccttgcacttttctggtttgattcccgagagattagctttgaggcctgccttacccagatgtatttattcatgccctctcggccattgaatccacnnnnnnnnnnnnnnnnnnnnnnnnnnnnnnnnnnnnnnnnnnnnnnnnnnnnnnnnnnnnnnnnnnnnnnnnnnnnnnnnnnnnnnnnnnnnnnnnnnnnnnnnnnnnnnnnnnnnnnnnnnnnnnnnnnnnnnnnnnnnnnnnnnnnnnnnnnnnnnnnnnnnnnnnnnnnnnnnnnnnnnnnnnnnnnnnnnnnnnnnnnnnnnnnnnnnnnnnnnnnnnnnnnnnnnnnnnnnnnngcccaatgtggtatatggtcttgctgccattctgctggtcatgggagaggatgtaatgctcatctccttgtcttattctgtgataatacgagcggtgctgcaactgcattccaagtcagagcgggccaaggcctttggaacctgtgtgtcacatattggtgtggtacttgccttctatgtgccacttattggcctctcagtggtacaccgctttggaaacagccttcatcccattgtgcgtgttgtcatgggtgacatctacctgctgctgcctcctgtcatcaatcccatcatatatggtgccaaaaccaaacagatcagaacaagggtgctggctatgttcaagatcagctgtgacaaggactttcaggctgtgggaggccaagtgaccgcttaacactccacttctccttatctttattggcttgataaacataattatttccaacactagcttatttccagttgcccataagcacatcagtgcttttctnnnnnnnnnnnnnnnnnnnnnnnnnnnnnnnnnnnnnnnnnnnnnnnnnnnnnnnnnnnnnnnnnnnnnnnnnnnnnnnnnnnnnnnnnnnnnnnnnnnnnnnnnnnnnnnnnnnnnnnnnnnnnnnnnnnnnnnnnnnnnnnnnnnnnnnnnnnnnnnnnnnnnnnnnnnnnnnnnnnnnnnnnnnnnnnnnnnnnnnnnnnnnnnnnnnnnnnnnnnnnnnnnnnnnnnnnnnnnnnnnnnnnnnnnnnnnnnnnnnnnnnnnnnnnnnnnnnnnnnnnnnnnnnnnnnnnnnnnnnnnnnnnnnnnnnnnnnnnnnnnnnnnnnnnnnnnnnnnnnnnnnnnnnnnnnnnnnnnnnnnnnnnnnnnnnnnnnnnnnnnnnnnnnnnnnnnnnnnnnnnnnnnnnnnnnnnnnnnnnnnnnnnnnnnnnnnnnnnnnnnnnnnnnnnnnnnnnnnnnnnnnnnnnnnnnnnnnnnnnnnnnnnnnnnnnnnnnnnnnnnnnnnnnnnnnnnnnnnnnnnnnnnnnnnnnnnnnnnnnnnnnnnnnnnnnnnnnnnnnnnnnnnnnnnnnnnnnnnnnnnnnnnnnnnnnnnnnnnnnnnnnnnnnnnnnnnnnnnnnnnnnnnnnnnnnnnnnnnnnnnnnnnnnnnnnnnnnnnnnnnnnnnnnnnnnnnnnnnnnnnnnnnnnnnnnnnnnnnnnnnnnnnnnnnnnnnnnnnnnnnnnnnnnnnnnnnnnnnnnnnnnnnnnnnnnnnnnnnnnnnnnnnnnnnnnnnnnnnnnnnnnnnnnnnnnnnnnnnnnnnnnnnnnnnnnnnnnnnnnnnnnnnnnnnnnnnnnnnnnnnnnnnnnnnnnnnnnnnnnnnnnnnnnnnnnnnnnnnnnnnnnnnnnnnnnnnnnnnnnnnnnnnnnnnnnnnnnnnnnnnnnnnnnnnnnnnnnnnnnnnnnnnnnnnnnnnnnnnnnnnnnnnnnnnnnnnnnnnnnnnnnnnnnnnnnnnnnnnnnnnnnnnnnnnnnnnnnnnnnnnnnnnnnnnnnnnnnnnnnnnnnnnnnnnnnnnnnnnnnnnnnnnnnnnnnnnnnnnnnnnnnnnnnnnnnnnnnaatacagttacttaactaccacgttctattgcttcctgggtaacatctgccatttatttcctcagctgtacaaatcctctgttttctttctgttacacgctaacatcaatggctttgaacgtgtgatgagagataatcctgccctagttgtgggcaacacatgcagaatactcttcctgttttacagccacctttcatggtcttattgcttgcttctttccagattcagggagaatgttgttgtctatttgtctcttacatctccttgatcatgtcttcatttcttaatgtgctctgtacctgtcaaaaattttgaatgtacaccacatgctattgtctgaacttaagtataagataaaataaaattttattttaaatttt

SEQ ID NO: 21535 - DNA, 977 bp, Macaca Mulatta
  misc_feature (1)...(977): n = A,T,C or G
aattctcgaaattggttctggtgcttatatcatgtcccacttattttctttgttccaagaaaccaagggattaactatcattttttctgaatgttttacagcactgcctatacaatcattttcacgtgaaaaagagtctcaccaacacagaaaagactcggtcccagtcatcagtcgcccaggttccaacgtcaaacccaccctccctccaatccctcagggccgcaggtagaccagcacttgatatctgatcctaacatggaaaacttgctctgctgatgttgaattccttgccttacctggccatggatccagctgtttctcactcaacccattacccacagaagaacgttctatctgccttaattctctcaatcagtttcttttgtgattctttggctggtgtctttagattttttaattaaaaaaaatgtttcttaaataatttttaaagatgtgagttttttttagaatgtgaattattcttagcttttaaaaatatcgtttcttttttttctatagctataaataaattttttccagctgctacctgctcggaaatatcagatgggaaaatctcccaagatccctgcactgcgatatacagagtggctttctgatatatccaactgggattgtgctcttaaaatttcaacatgtccatttacaacattcctgtatgctctagaggattgatttattttgttctgattatgaaaggactgcagagttccatttaacttgtaaccaacatgatattgactgcatctctcataaggaattaatggtattttgggggggttcttgacttgctttagcacatgaaacataaagagtacagttgaatcttttatttcaccttcttttgactctgatatggactggnctgtgatagatatacttttagacaacttcatcatctttgtggtttcacttctggtctaaaagaacacctccattgagcattatagacaagc

SEQ ID NO: 21536 - DNA, 807 bp, Macaca Mulatta
  misc_feature (1)...(807): n = A,T,C or G
ggcttggtactgaatatacttaaatataactcaagaatccagggacctggtgtcaaaacaggattagagcatataaaggtacatctagattcatatttgaatcttatactgtatttttctcttagtattgctaatgagtaaagaaaagtctcataaggtagccaaatgaaaaagaatgaaggggaaagtgaaaaattaagggaacaaaagatgggatgtgaaaagaagaattctagtttgatagtgactcatattcacgataggatacaaagtgtgatttgttggaaacatgtcccaaaatttctaaaattctgtttctctgccaaaagcaatgtctttcttggttgatatttgagttttaaaaggatcaaatctttctaaccttgtgtatttttagagggcagcactagaagaaatcagcaggtctaatcccacaaataagaaaagtaccacttcttgatttttacagatttaaaaaaatcttttcagtacttcttagacatacagtaatcatnnnnnnnnnnnnnnnnnnnnnnnnnnnnnnnnnnnnnnnnnnnnnnnnnnnnnnnnnnnnnnnnnnnnnnnnnnnnnnnnnnnnnnnnnnnnnnnnnnnnnnnnnnnnnnnnnnnnnnnnnnnnnnnnnnnnnnnnnnnnnnnnnnnnnnnnnnnnnnnnnnnnnnnnnnnnnnnnnnnnnnnnnnnnnnnnnnnnnnnnnnnnnnnnnnnnnnnnnnnnnnnnnnnnnnnnnnnnnnnnnnnnnnnnnnnnnnnnnnnnnnnnnnnnnnnnnnnnnnnnnnnnnnnnnnnnn

SEQ ID NO: 21537 - DNA, 564 bp, Macaca Mulatta
aggggtgaggccagggccctccagggggaggggtagccagcttgggctgtccccttgagaccgggacaagaggctgggggtgtcagcattcctggcttcccaagctgcccccaggcggcagagtctgagggtctgggggtctggtcggcagctggagaaagaggcaaaaagcccatagccgggcaagaggatctcaagtcagtctgggcccattgccaccgcctcccacatccagcacccacgcccgctgcaccgctgccatcctcagattcaccgcgtgctctgcgtggccgaggccggagcaccacatccacctcgccccagagagtccctgctccctcctatggaggggctgtgggccaggctgctcagactcctgggtggcttccagacggaccgggcagcccctctccgtcctcagggctgtgcctctgggagccactgggccaggggccctgggtcacagagagcacgttcccgttatttattcccctccgcgtcctacgcaggctgccctggcagctgccttcaagggtaggccgagctccccgccatggagcccct

SEQ ID NO: 21538 - DNA, 590 bp, Macaca Mulatta
tggaggagctgcggcgtgggagcgcttcacccagcgacctccgagagcctgagtgcacgcagcccgattccacgggcgactgacagctctgcaggagagattgcaacaccatcccacactgtccaggccttaactgagaggttcggaagacgctggagggagagaaggaagcggaaagtgtgcttctcagggaggaaaccggcttgtcagcaagtagattcttacgaactcccacttgcaattcaggggacatgtcccagtgtttttgttgttgtttttagatactaaatcgtcccttctccagtcctgattactgtacacagtagctttagatggcgtggacgtgaataaatgcaacttatattttcttgttggttcctttttcagtatcactgtgtttgtaaagagcattcacaatactgtggaatttcaaaagctggaagagctcgagatcattcctcaggcagacgcgtgggtccatcattcttccaagagggtttgtgtgacaactacaccctctgtcactggcaaggtgcagttggctctcgcccattcttgttatggaaacctaagatgatcattgggaagaa

SEQ ID NO: 21539 - DNA, 2858 bp, Macaca Mulatta
  misc_feature (1)...(2858): n = A,T,C or G
ataagctttctggaaccaaaaaaatccacttctgtttatccccatttttctactacaaacctcataggacccgatccaaccttccgcggtttatggagcgcttttcatgttgaaaatggtgactctttgccggctggttttgccttcttaaaaggaagcgcgagcacctcgagctcagcagagcagccgctggggatcacccaaatgccaaaggctgaagtgaatctgggggggctgtctagtttagtagtgaacaccccaattacctctgtctccctcagccactcatcgtctgagtctagcaagatgtcagagagcaaagaccaagagaacaactgtgaaaggccaaaagaaagcaacgttttacacccaaacggggagtgccctgtcaaaagtgagcccaccgaaccgggagatgaggagaagaagannnnnnnnnnnnnnnnnnnnnnnnnnnnnnnnnnnnnnnnnnnnnnnnnnnnnnnnnnnnnnnnnnnnnnnnnnnnnnnnnnnnnnnnnnnnnnnnnnnnnnnnnnnnnnnnnnnnnnnnnnnnnnnnnnnnnnnnnnnnnnnnnnnnnnnnnnnnnnnnnnnnnnnnnnnnnnnnnnnnnnnnnnnnnnnnnnnnnnnnnnnnnnnnnnnnnnnnnnnnnnnnnnnnnnnnnnnnnnnnnnnnnnnnnnnnnnnnnnnnnnnnnnnnnnnnnnnnnnnnnnnnnnnnnnnnnnnnnnnnnnnnnnnnnnnnnnnnnnnnnnnnnnnnnnnnnnnnnnnnnnnnnnnnnnnnnnnnnnnnnnnnnnnnnnnnnnnnnnnnnnnnnnnnnnnnnnnnnnnnnnnnnnnnnnnnnnnnnnnnnnnnnnnnnnnnnnnnnnnnnnnnnnnnnnnnnnnnnnnnnnnnnnnnnnnnnnnnnnnnnnnnnnnnnnnnnnnnnnnnnnnnnnnnnnnnnnnnnnnnnnnnnnnnnnnnnnnnnnnnnnnnnnnnnnnnnnnnnnnnnnnnnnnnnnnnnnnnnnnnnnnnnnnnnnnnnnnnnnnnnnnnnnnnnnnnnnnnnnnnnnnnnnnnnnnnnnnnnnnnnnnnnnnnnnnnnnnnnnnntaaacccttccgttgtgaggtttgtaactactctaccactaccaaaggcaacctcagtattcatatgcagtcagacaagcacctgaacaatgtccagaatctccaaaatggcaatggtgagcaggtgtttggccactctgccccagcccccaacaccagcctcagtggctgcggaacaccctctccgtccaaacccaaacagaaacccacctggcggtgtgaggtttgtgattatgaaaccaatgtcgccaggaacctccgaattcatatgaccagcgaaaagcacatgcataatatgatgcttttgcagcagaacatgaagcaaatacagcataatctgcacttgggcctcgccccggcggaagcagagctttatcagtactacctagcccagaacataggcctgaccggaatgaagctggaaaaccctgccgaccctcagctgatgatcaatccatttcagctggatccagcgacagcagcggctttggcaccagggctcgngtaaataatgagctgccgcctgaaatccggcttgccagtggtcagctaatgggtgatgacctgtccctccttactgcaggagagctgtcaccttatatcagtgacccagcgctgaagctattccagtgtgctgtttgcaacaaattcacctctgacagcctggaggccctaagtgtgcatgtgagcagtgagcgctctctccctgaagaggaatggagggcagtaattggagatatctaccagtgcaagctctgcaactacaacactcagctcaaagccaacttccagctacactgcaagactgataaacatatgcagaaatatcaactggtggctcacattaaagaagggggcaaaagcaatgagtggaggttgaagtgtattgccattggcaaccctgttcacctaaaatgtaacgcctgtgactattacaccaacagtgtggataaattacgcttgcataccaccaatcacaggcacgaggcggccctgaagctctacaagnagcacttgcagaagcaagagggtgcagtgaatcctgaatcttgctattacttctgtgccgtgtgcgattactccaccaaggtcaagttgaatctggtacaacatgtccgttcggtgaagcatcagcagaccgagggcctacggaagctccagctccaccagcaaggcctggcaccggaggaggacaacctcagtgagatcttttttgttaaagactgcccaccaaatgagcttgngccctgggggaaaggcccagtaaatctactccaagaattcttgcatcctttccccaggatgagttgaaaagtaattgccacaagccgtcataggtcgcgaactagagatcatgtcacgtgtgtgaacttgggagggacacacacagcccaatccagttgatctcagccctccagcctcccaaatccagctcagccaccagcattttacctaccagcatggcctggtgctgggaggagggagcnnttctatcaatgtccttattgtaactacaatagtagggaccaaagtcgtatccagatgcatgtcctctcacagcactcggtgcagccggtcatctgctgtcctctctgccaggacgtcctcagcaacaaaatgcatctccaactgcatctgacacatttgcacagtgtgtctccagattgtgttgagaagctgcttatgacagtngtgcctgtccctgatgtgatgatgccaaacagtatgctactgccagcagctgcctctgagaaatcagagcgggaca

SEQ ID NO: 21540 - DNA, 4660 bp, Macaca Mulatta
  misc_feature (1)...(4660): n = A,T,C or G
cttctcttgcctcttgctgcaagaatgtctgaggagtcttactttgaatctaaaacagaggagtcaaacagtgcagagatgtcatgtcagatcacagcaacaagtaacggggagggccatggcatgaacccaagtctgcaggccatgatgctgatgggctttggggatatcttctcaatgaacaaagcaggagctgtgatgcattctgggatgcagataaacatgcaagccaagcagaattcttccaaaaccacatctaagagaagggggaagaaagtcaacatggctctggggttcagtgattttgacttgtcagaaggtgacnnnnnnnnnnnnnnnnnggtgaggaggaggataatgacatggataatagtgaatgaaagcagaaagcaaagtaataaaattaaaaacgtttggaaaacacaaaagtaatttgtttatctcagtctgtacaaaaacaagtaaggaggcagaaaaccaagcactgcattttaggccaatcacatttacatgaccgtaatttcttatcaattnnnnnnnnnnnnnnnnnnnnnnnnnnnnnnnnnnnnnnnnnnnnnnnnnnnnnnnnnnnnnnnnnnnnnnnnnnnnnnnnnnnnnnnnnnnnnnnnnnnnnnnnnnnnnnnnnnnnnnnnnnnnnnnnnnnnnnnnnnnnnnnnnnnnnnnnnnnnnnnnnnnnnnnnnnnnnnnnnnnnnnnnnnnnnnnnnnnnnnnnnnnnnnnnnnnnnnnnnnnnnnnnnnnnnnnnnnnnnnnnnnnnnnnnnnnnnnnnnnnnnnnnnnnnnnnnnnnnnnnnnnnnnnnnnnnnnnnnnnnnnnnnnnnnnnnnnnnnnnnnnnnnnnnnnnnnnnnnnnnnnnnnnnnnnnnnnnnnnnnnnnnnnnnnnnnnnnnnnnnnnnnnnnnnnnnnnnnnnnnnnnnnnnnnnnnnnnnnnnnnnnnnnnnnnnnnnnnnnnnnnnnnnnnnnnnnnnnnnnnnnnnnnnnnnnnnnnnnnnnnnnnnnnnnnnnnnnnnnnnnnnnnnnnnnnnnnnnnnnnnnnnnnnnnnnnnnnnnnnnnnnnnnnnnnnnnnnnnnnnnnnnnnnnnnnnnnnnnnnnnnnnnnnnnnnnnnnnnnnnnnnnnnnnnnnnnnnnnnnnnnnnnnnnnnnnnnnnnnnnnnnnnnnnnnnnnnnnnnnnnnnnnnnnnnnnnnnnnnnnnnnnnnnnnnnnnnnnnnnnnnnnnnnnnnnnnnnnnnnnnnnnnnnnnnnnnnnnnnnnnnnnnnnnnnnnnnnnnnnnnnnnnnnnnnnnnnnnnnnnnnnnnnnnnnnnnnnnnnnnnnnnnnnnnnnnnnnnnnnnnnnnnnnnnnnnnnnnnnnnnnnnnnnnnnnnnnnnnnnnnnnnnnnnnnnnnnnnnnnnnnnnnnnnnnnnnnnnnnnnnnnnnnnnnnnnnnnnnnnnnnnnnnnnnnnnnnnnnnnnnnnnnnnnnnnnnnnnnnnnnnnnnnnnnnnnnnnnnnnnnnnnnnnnnnnnnnnnnnnnnnnnnnnnnnnnnnnnnnnnnnnnnnnnnnnnnnnnnnnnnnnnnnnnnnnnnnnnnnnnnnnnnnnnnnnnnnnnnnnnnnnnnnnnnnnnnnnnnnnnnnnnnnnnnnnnnnnnnnnnnnnnnnnnnnnnnnnnnnnnnnnnnnnnnnnnnnnnnnnnnnnnnnnnnnnnnnnnnnnnnnnnnnnnnnnnnnnnnnnnnnnnnnnnnnnnnnnnnnnnnnnnnnnnnnnnnnnnnnnnnnnnnnnnnnnnnnnnnnnnnnnnnnnnnnnnnnnnnnnnnnnnnnnnnnnnnnnnnnnnnnnnnnnnnnnnnnnnnnnnnnnnnnnnnnnnnnnnnnnnnnnnnnnnnnnnnnnnnnnnnnnnnnnnnnnnnnnnnnnnnnnnnnnnnnnnnnnnnnnnnnnnnnnnnnnnnnnnnnnnnnnnnnnnnnnnnnnnnnnnnnnnnnnnnnnnnnnnnnnnnnnnnnnnnnnnnnnnnnnnnnnnnnnnnnnnnnnnnnnnnnnnnnnnnnnnnnnnnnnnnnnnnnnnnnnnnnnnnnnnnnnnnnnnnnnnnnnnnnnnnnnnnnnnnnnnnnnnnnnnnnnnnnnnnnnnnnnnnnnnnnnnnnnnnnnnnnnnnnnnnnnnnnnnnnnnnnnnnnnnnnnnnnnnnnnnnnnnnnnnnnnnnnnnnnnnnnnnnnnnnnnnnnnnnnnnnnnnnnnnnnnnnnnnnnnnnnnnnnnnnnnnnnnnnnnnnnnnnnnnnnnnnnnnnnnnnnnnnnnnnnnnnnnnnnnnnnnnnnnnnnnnnnnnnnnnnnnnnnnnnnnnnnnnnnnnnnnnnnnnnnnnnnnnnnnnnnnnnnnnnnnnnnnnnnnnnnnnnnnnnnnnnnnnnnnnnnnnnnnnnnnnnnnnnnnnnnnnnnnnnnnnnnnnnnnnnnnnnnnnnnnnnnnnnnnnnnnnnnnnnnnnnnnnnnnnnnnnnnnnnnnnnnnnnnnnnnnnnnnnnnnnnnnnnnnnnnnnnnnnnnnnnnnnnnnnnnnnnnnnnnnnnnnnnnnnnnnnnnnnnnnnnnnnnnnnnnnnnnnnnnnnnnnnnnnnnnnnnnnnnnnnnnnnnnnnnnnnnnnnnnnnnnnnnnnnnnncagacatagagaagtactacctgacttgagtcaatgcacccaagcagaaaagcttggagtagagtagaagggagggcttggaattcttgtctttctggcatgccttgggctgcagtggtcagccacctgaggagagagccaatagcatggggtttacaaggcaaagatatagtcattcattcaacacatattcattgagctcattctctgtgccagacactgttctggatgatagctaggtgaaaatctttgcactcacagagcttacatgccagtgagtaaagattgatgataaataaagcaaatgcatcacatgttcacatttgataagtatacaccaaaaaatgaagccgggaaggaggataaggcccatgggtgaatgctgagttttttaaagtatgatcaggaaaggtgccactgataatgtaacatttgagcaaggctgaaaaaggcaaggggatctctggggctaacttcgggatnnnnnnnnnnnnnnnnnnnnnnnnnnnnnnnnnnnnnnnnnnnnnnnnnnnnnnnnnnnnnnnnnnnnnnnnnnnnnnnnnnnnnnnnnnnnnnnnnnnnnnnnnnnnnnnnnnnnnnnnnnnnnnnnnnnnnnnnnnnnnnnnnnnnnnnnnnnnnnnnnnnnnnnnnnnnnnnnnnnnnnnnnnnnnnnnnnnnnnnnnnnnnnnnnnnnnnnnnnnnnnnnnnnnnnnnnnnnnnnnnnnnnnnnnnnnnnnnnnnnnnnnnnnnnnnnnnnnnnnnnnnnnnnnnnnnnnnnnnnnnnnnnnnnnnnnnnnnnnnnnnnnnnnnnnnnnnnnnnnnnnnnnnnnnnnnnnnnnnnnnnnnnnnnnnnnnnnnnnnnnnnnnnnnnnnnnnnnnnnnnnnnnnnnnnnnnnnnnnnnnnnnnnnnnnnnnnnnnnnnnnnnnnnnnnnnnnnnnnnnnnnnnnnnnnnnnnnnnnnnnnnnnnnnnnnnnnnnnnnnnnnnnnnnnnnnnnnnnnnnnnnnnnnnnnnnnnnnnnnnnnnnnnnnnnnnnnnnnnnnnnnnnnnnnnnnnnnnnnnnnnnnnnnnnnnnnnnnnnnnnnnnnnnnnnnnnnnnnnnnnnnnnnnnnnnnnnnnnnnnnnnnnnnnnnnnnnnnnnnnnnnnnnnnnnnnnnnnnnnnnnnnnnnnnnnnnnnnnnnnnnnnnnnnnnnnnnnnnnnnnnnnnnnnnnnnnnnnnnnnnnnnnnnnnnnnnnnnnnnnnnnnnnnnnnnnnnnnnnnnnnnnnnnnnnnnnnnnnnnnnnnnnnnnnnnnnnnnnnnnnnnnnnnnnnnnnnnnnnnnnnnnnnnnnnnnnnnnnnnnnnnnnnnnnnnnnnnnnnnnnnnnnnnnnnnnnnnnnnnnnnnnnnnnnnnnnnnnnnnnnnnnnnnnnnnnnnnnnnnnnnnnnnnnnnnnnnnnnnnnnnnnnnnnnnnnnnnnnnnnnnnnnnnnnnnnnnnnnnnnnnnnnnnnnnnnnnnnnnnnnnnnnnnnnnnnnnnnnnnnnnnnnnnnnnnnnnnnnnnnnnnnnnnnnnnnnnnnnnnnnnnnnnnnnnnnnnnnnnnnnnnnnnnnnnnnnnnnnnnnnnnnnnnnnnnnnnnnnnnnnnnnnnnnnnnnnnnnnnnnnnnnnnnnnnnnnnnnnnnnnnnnnnnnnnnnnnnnnnnnnnnnnnnnnnnnnnnnnnnnnnnnnnnnnnnnnnnnnnnnnnnnnnnnnnnnnnnnnnnnnnnnnnnnnnnnnnnnnnnnnnnnnnnnnnnnnnnnnnnnnnnnnnnnnnnnnnnnnnnnnnnnnnnnnnnnnnnnnnnnnaacccagtagcattgtcccttccccactgacaaacttatcaaatccagaagctttagagtttcgtgtctaattatttttctcctaaacgaaatcacccaagtcaaaaaaaaaatgtatttttagaattacagcaacgtacaacctgaattttgtgagtttcgtggctttatcttaaagcagcatttccct

SEQ ID NO: 21541 - DNA, 905 bp, Macaca Mulatta
aggactacacccaggtggactactctttcaatgggatgtatgcggactcagaaatgtgagggggtcgtacccggcgggaggccgagccccttccttgtcctttccttttgcctttgagaccaaaccaagtgcttccaaattcctttggtgcaatttaggagatatgccagatgcttaaacacatttaattgctgtcagattaattccatgatcactaaagagttgctgcttttttcatatttatttttgtaaatgatgctgtgcccaggagcagctgggggttccacctcagggtggggcgggcagggccctgtgcccccaggtgtcggagcctgacctgaattaaagtactgactgctccacagtcgtgtgggtgcatcctgctcctcggggcgcctgcctttctgccatgcgcgtagcagggtttggttttgtgaatgtgcaacatcgctccacaccctggaggttgactgtcgttaccactgtctcgggcttctccctggtacccacgcccgccctggtgcttgctgggaggctcctgggccccacaagaggccacagccagcatcttgaatcctttttctgacctgttcagtgagcctcctggagccagctttaggggtgaaggagctaaattcagcacatcacccccatggtgtggtcagctcggcctgaaccagagcagaacagaatctgatcccaccctgctcatgaggtggggtcattattgctagttctgaatagcccaggtcccttgccccaggaccccagggccaggcctgggattcgaccccagaacctgctccttgtcagaccaattcctccggattccagctcccatcctgaacagccagccagcacttgctctgggcttgttacattcctgccctgtccctgtgctgtgt

SEQ ID NO: 21542 - DNA, 273 bp, Macaca Mulatta
aatcttcatgaggttgcatccttttgcagcttcttatagtttattttcacttcctatgaagcaataaaataataaatataatagttatcgtgtgactgttgtggttcattctggtaggtagtttaattgaatgaaaagtacacaaggctaccctttcagccaaacaaaatggttgaaggaaaacttttagcagattattcctggggggaaatactcaattctgtccaggtccagtgagtcctgacttggggatggtaggtgctttttctttag

SEQ ID NO: 21543 - DNA, 2194 bp, Macaca Mulatta
  misc_feature (1)...(2194): n = A,T,C or G
ttttgccccaagtgttcccaggagggacggtccatccaggtgttctccgggaccaaggacccactgtccttcctcagtgacatgggaaaatgaagccccctcctgtagggacagctcagaatgttggagtccacagtccctccccgagtgagggtttcccctagcacaatagatcattttcatcccccaaaccgaacaccctcctgctcaactggcattattcctaaagtggcttctctgttcagactgaagggccacgggagccaaagtgatgagcggagaagaacagagcagtcagtagatattttgatccctgtaggaaactgggcatctctgtggtccctgagcatctcaggaggccgattgtacagagacctctgatcgctgcacccagtctgcctccacatccctggaatagcccaccatcggcccttcacccttggcaggtagacactattcaacctgctggggcaggtgtatccccatttcatggcatttggggacaactggactctctgtccaggtcgcactgtcctcaagtccttgggatgatgcccacccctgcttggggcttgagactccagagactcatgcaggtgtgggccactgnnnnnnnnnnnnnnnnnnnnnnnnnnnnnnnnnnnnnnnnnnnnnnnnnnnnnnnnnnnnnnnnnnnnnnnnnnnnnnnnnnnnnnnnnnnnnnnnnnnnnnnnnnnnnnnnnnnnnnnnnnnnnnnnnnnnnnnnnnnnnnnnnnnnnnnnnnnnnnnnnnnnnnnnnnnnnnnnnnnnnnnnnnnnnnnnnnnnnnnnnnnnnnnnnnnnnnnnnnnnnnnnnnnnnnnnnnnnnnnnnnnnnnnnnnnnnnnnnnnnnnnnnnnnnnnnnnnnnnnnnnnnnnnnnnnnnnnnnnnnnnnnnnnnnnnnnnnnnnnnnnnnnnnnnnnnnnnnnnnnnnnnnnnnnnnnnnnnnnnnnnnnnnnnnnnnnnnnnnnnnnnnnnnnnnnnnnnnnnnnnnnnnnnnnnnnnnnnnnnnnnnnnnnnnnnnnnnnnnnnnnnnnnnnnnnnnnnnnnnnnnnnnnnnnnnnnnnnnnnnnnnnnnnnnnnnnnnnnnnnnnnnnnnnnnnnnnnnnnnnnnnnnnnnnnnnnnnnnnnnnnnnnnnnnnnnnnnnnnnnnnnnnnnnnnnnnnnnnnnnnnnnnnnnnnnnnnnnnnnnnnnnnnnnnnnnnnnnnnnnnnnnnnnnnnnnnnnnnnnnnnnnnnnnnnnnnnnnnnnnnnnnnnnnnnnnnnnnnnnnnnnnnnnngaggtgggctactgcagggacctgagccacatcgcggccttgttcctcctttatctgcctgaggaggatgcattctgggcactggtgcagctgctggccagggagaggcactccctgcagggnnnnnnnnnnnnnnnnnnnnnnnnnnnnnnnnnnnnnnnnnnnnnnnnnnnnnnnnnnnnnnnnnnnnnnnnnnnnnnnnnnnnnnnnnnnnnnnnnnnnnnnnnnnnnnnnnnnnnnnnnnnnnnnnnnnnnnnnnnnnnnnnnnnnnnnnnnnnnnnnnnnnnnnnnnnnnnnnnnnnnnnnnnnnnnnnnnnnnnnnnnnnnnnnnnnnnnnnnnnnnnnnnnnnnnnnnnnnnnnnnnnnnnnnnnnnnnnnnnnnnnnnnnnnnnnnnnnnnnnnnnnnnnnnnnnnnnnnnnnnnnnnnnnnnnnnnnnnnnnnnnnnnnnnnnnnnnnnnnnnnnnnnnnnnnnnnnnnnnnnnnnnnnnnnnnnnnnnnnnnnnnnnnnnnnnnnnnnnnnnnnnnnnnnnncagccaaacccgagcaagtgtcctcaacacccaggcctgtgctggcttcacatggcaggatgatcctctgcaagggggacagacaggcccctccaggcccaccagcccggttccagcggcccatttggctagtttccccaccatgggcacctcgttcttccacatcctgtcctggtggggctgtccgggaagacacctaccctgtgggcacttggggtgtgcccagcccggccccggctcagggaagacctcagggttcctggagattcctggagtggaactcgatgccccggctcccgacggacctggatgtagggggcccttggttcccccattatgatttcgaacagagctgttgggtgcgt

SEQ ID NO: 21544 - DNA, 344 bp, Macaca Mulatta
aggtgggcaaaatgaggaagataagaagtccccccatgcggtttccctaccgcggtgggaataacactgtctttccacaggtcacagactgggacgagcaacgggctgaaggcacgtttcccgggaagatctgaactggctgtacctccctgtcctctgtcctctgtccttctcccaggatggtgaagggggacctagtacctagtgatccccaccccgggatcctaaatcgtgacttacctgctaataaaaactcgttggaaaagtgagaccatgcgtgtgaatgggctaggcagtggcaagaagctgggctggaatcagtgccctgaccagggaggggcttc

SEQ ID NO: 21545 - DNA, 408 bp, Macaca Mulatta
  misc_feature (1)...(408): n = A,T,C or G
cagcaaatgaggagtgatgaagtaaatccggttgcaaaaggacatcaaagcaaaaagaaacattccagaaaatctaagagacactcttcatctaagagaaggaagagtatgtccctgtggttagacaaacaggaannnnnnnnnnnnnnnnnnnnnnnnnnnnnnnnnnnnnnnnnnnnnnnnnnnnnnnnnnnnnnnnnnnnnnnnnnnnnnnnnnnnnnnnnnnnnnnnnnnnnnnnnctcacaatatccgtgaagagagaatggannnnnnnnnnnnnnnnnnnnnnnnnnnnnnnnnnnnnnnnnnnnnnnnnnnnnnnnnnnnnnnnnnnnnnnnnnnnnnnnnnnnnnnnnnnnnnnnnnnnattctactgtcactcacaatatccgtgaagagagaatgga

SEQ ID NO: 21546 - DNA, 1170 bp, Macaca Mulatta
atggcgctgacccccgagtccccgagcagcttccctggactggcggccatcggcagctctgtgccggagccacctggcagccccaacgcaaccctcaacagctcctgggccagcccgacagagcccagctccctggaggacctggtggccacgggtgccattgggactctgctgtcagccatgggcgtggtgggcgtggtgggcaacgcctacacgctggtggtcacctgccgctccctgcgcgccgtggcctccatgtacatctacgtggtcaacctggcgctggctgacctgctgtacctgctcagcatccccttcatcgtggccacctacatcaccaaggagtggcacttcggggatgtgggctgccgcgtgctcttcagcctggacttcctgaccatgcacgccagcatcttcacgctgaccgtcatgagcagcgagcgctacgccgcggtgctgcggccgctggacaccgtgcagcgccccaagggctaccgcaagctgctggcgctgggcacctggctgctggcgctgctgctgacgctgcccgtgatgctggccatgcggttggtgcgtcggggccccaagagcctgtgcctgcccgcctggggcccgcgcgcccaccgcgcctacctgacgctgctcttcgccaccagcatcgcggggcccgggctgctcatcgggctactctacgcgcgtctggcccgcgcctaccgccgctcgcagcgcgcctccttcaagcgggcccggcggcccggggcgcgcgcgctgcgcctggtgctgggcatcgtgctgctcttctgggcctgcttcctgcccttctggctgtggcagctgctcgcccagtaccgcgaggccccgctggcgccgcggacggcgcgcatcgtcaactacctgaccacctgcctcacctacggcaacagctgcgccaaccccttcctctacacgctgctcaccaggaactaccgcgaccacctacgcggccgcgtgcggagcccgggcagcggcggagtccgggggcccgttccctccctgcagccccgcgcccgcttccagcgcggctccggccgctccctgtcttcctgcagcccgcagcccactgagagcctcgtgctggcggcggcggccccggccggacctgcgctcgagagtcccggggacccggcgtga

SEQ ID NO: 21547 - DNA, 407 bp, Macaca Mulatta
gtcagtacccatgcaaataagctgaccctcataatcacaagctccatttttgttctcctacttctcacccccattttcacttcctatggtgccatcgtccaggctgtactgaggatgtagttaactgctgggcttcggaaagtgtttggaatatgtggagctcatcttatggttgtacctctctttttctttctggccatgtgcatgtatctccagccaccatcaggaaattctcgagatcaaagcaagttcgttgctgttttatactgttgtcacacctagttgtaaccctataatctacaccctcagaaacaaagatgtaagagggccaatgaagagactaatggggtgggaatgagcctgtgtatgtgtgatagtaacaataaaatggagtctctcctcacaat

SEQ ID NO: 21548 - DNA, 2279 bp, Macaca Mulatta
  misc_feature (1)...(2279): n = A,T,C or G
gataattatcaaacagcacagctacttgccttaattttagagttactcacattttgtgtggaacatcacacatatcacattaaaaactatattatgaacaaggacttgctaagaagagtcttggtcttgatgaattcaaagcacacttttctggccttgtgtnnnnnnnnnnnnnnnnnnnnnnnnnnnnnnnnnnnnnnnnnnnnnnnnnnnnnnnnnnnnnnnnnnnnnnnnnnnnnnnnnnnnnnnnnnnnnnnnnnnnnnnnnnnnnnnnnnnnnnnnnnnnnnnnnnnnnnnnnnnnnnnnnnnnnnnnnnnnnnnnnnnnnnnggaagatatcaagtctcttactgcacatatagttgaaaacttttataaagcacttgaatcgattgaatatgttcagacattcaaaggattgaagactaaatatgagcaagaaaaagacagacaaaatcagaaactgaacagnacagtgtaccatctatattgcgtagtaacagatttcgcagagatgcaaaagccttggaagaagatgaagaaatgtggtttaatgaagatgaggaagaggaaggaaaagtggttgtggcgccagtggaaaaatctaaaccagaagatgattttccagaatattatgaaaagtnnnnnnnnnnnnnnnnnnnnnnnnnnnnnnnnnnnnnnnnnnnnnnnnnnnnnnnnnnnnnnnnnnnnnnnnnnnnnnnnnnnnnnnnnnnnnnnnnnnnnnnnnnnnnnnnnnnnnnnnnnnnnnnnnnnnnnnnnnnnnnnnnnnnnnnnnnnnnnnnnnnnnnnnnnnnnnnnnnnnnnnnnnnnnnnnnnnnnnnnnnnnnnnnnnagggaagtttggttggcttagtggattatccagatgatgaagaggaagatgaagaagaagaaacatcccccaggaaaagacctcgtcttggctcataaaatatttattaggagaccctcaacatgtggtcttaaaatgctgcaactgttcaatgagctgtaaatccgaatcagaaagctttctcaatggaacttagaaaatatacaaggagtagcaaaagacactcaatatatcagctaagggagtttagttctaataaaaaaacaggcttcccaggaacttcattgcttgctagtaattaaggggtttgccttttaggctgtcaaaacaaacgttagtaaccagaacctgggagacagattctcagcaaggaaaagtcgcaggttttgggatggtttaggggaggggaaaaggttgatataataatgcagggttgctcctcggggtattgatctaaaaacaattttatagaacttcagttgtaaactctaataacattacttgtataatggtgctggccatgttgttgttttaatccagttgcctctttttaaaagaaaatttttatggaaaacacattcaactatcattaaaaaaatgaagttaagctgatgggaccatttatttaagatttaacaaaagttcagccttttaggtagttgaagggaagtacaccccatattcagcacatgttgaattttctacaccaggaattttcaatatgtatattgatgaaaacaagctcaattcaaactggacagttttaagataatgttaaaatcagcacttttagagacaatgaaggccaagaatcagtacagtagtattccaaaatgattttctctagaaatttgaaagtggatagaacagaatgttttcaaccacctaccagtacaatcttttgtggaagatactttgaaatcactttttgctttgttagtaaagttctctctctttccagagctgcaagttttaaagtgttacttatacagaccaacaaagaatagtgctgaattaagtggcatttagtatctagaagccattttgatccaagaagcaacttgtgaaagtcagcatacagcacatgtagcttttctgtaaacaagggtgtgatatgaaagctgcttttttaagaagagtaaaagcacattccatgtacgtaagtgaattttaaaattaaattgaggcaaacagttacgttttatttttagagcaacaagttaactgtacatattttaatgttagtttgctcatctatgatctgagatcatgccgaagtgagaaaaatgtccccaaaatacaatttaatgcattgggnnnnnnnnnntttaatagtaattccagccacaatctttagatcacccttgtaatgtgttatgggtccatttttcctggaatagtttaatctgaagcagtttcccctgttt

SEQ ID NO: 21549 - DNA, 218 bp, Macaca Mulatta
ggggtttatgccctggacagcatcatgcagacctggtttacactctttactcccaccgaggccacaagtatagttgcaactaccgtgatgtccaacagcaccatcgtccgcctccacctggactgccaccagcaggaaaagctggccagcagcgcccggacacttgcactgcagtgtgccaagagggatccacagaactgtgccctctctgcgctaac

SEQ ID NO: 21550 - DNA, 624 bp, Macaca Mulatta
tttagccggaggatattcctcagtggacactggaggacacacacgggagagaagccttacacgtgctttgagtgtgggcgaaactttagcctcaagtccgctcttagtgtacatcagaggatacactctggggagaagccttatgcgtgcgcggagtgtgggcgcggctttatcacaaaatcacagctcatcagacaccagaggacacacacaggagaaaagccttatgtctgcggagagtgtgggcgaggctttatcgctcagtcaaccctccactaccaccagagtacacactccggggagaaaccttatgtgtgcagccagtgtgggcgaggctttcgtgataaatcagctctcctcgcacacgagcagacacattcaggggagaagccttatgtgtgtggggaatgtgggtggggatttggccggaagatactcctcagcagacactggaggacacacacaggagagaagccttacgcgtgcatggagtgtgggcgaaactttagccacaagtccactctcagcttgcatcagaggatacactcgggggagaagccttatgcttgcacggagtgtgggcgagggtttaggaggaagtcacagctcagcatacaccagaag

SEQ ID NO: 21551 - DNA, 596 bp, Macaca Mulatta
actgtgaaaggttgaagatgatggtgatcgtaacaatggtggtaacaataaaaacaatgggatgtctttctatttcaggctcagactcttttcaagactacattaagtcctatctggaacaagccggtcggatctggtcatggctccttggggcggcgatggtaggagccgccctcactgccctgctggcagggcttgtgagcttgctgtgtggtcacaagagaaagcagcttgctgaagaaaggcagccactcctcatggagaaagaggattaccacaacttgttgtatcagagccatttataaaaggcttaggcaatagagtagggtaaaaagttagagtgacctcactctaactcaaagtaatgtccaggttcccacagaatatctgctgatatttttctgtaaagaccatttgcaaaattgcaacctaatacaaagtgtacccttcttccagctcaggtagaacacgcctgtctttgtcttgctgttttcactcagcccttttaacattttcccctaagcccacatgtctaaggaaaggatgctatttggtaatgaggaactgttatttgtatctgaattaaagtgctctta

SEQ ID NO: 21552 - DNA, 1027 bp, Macaca Mulatta
  misc_feature (1)...(1027): n = A,T,C or G
agaagcatggatctcggtatccctgacctgctggacgcgtggctggagcccccagaggatatcttctcgacaggatccgtcctggagttgggactccactgcccccctccagaggttccggtgactaggctacaggaacagggactgcaaggctggaagtccggtggggaccatggctgtnnnnnnnnnnnnnnnnnnnnnnnnnnnnnnnnnnnnnnnnnnnnnnnnnnnnnnnnnnnnnnnnnnnnnnnnnnnnnnnnnnnnnnnnnnnnnnnnnnnnnnnnnnnnnnnnnnnnnnnnnnnnnnnnnnnnnnnnnnnnnnnnnnnnnnnnnnnnnnnnnnnnnnnnnnnnnnnnnnnnnnnnnnnnnnnnnnnnnnnnnnnnnnnnnnnnnnnnnnnnnnnnnnnnnnnnnnnnnnnnnnnnnnnnnnnnnnnnnnnnnnnnnnnnnnnnnnnnnnnnnnnnnnnnnnnnnnnnnnnnnnnnnnnnnnnnnnnnnnnnnnnnnnnnnnnnnnnnnnnnnnnnnnnnnnnnnnnnnnnnnnnnnnnnnnnnnnnnnnnnnnnnnnnnnnnnnnnnnnnnnnnnnnnnnnnnnnnnnnnnnnnnnnnnnnnnnnnnnnnnnnnnnnnnnnnnnnnnnnnnnnnnnnnnnnnnnnnnnnnnnnnnnnnnnnnnnnnnnnnnnnnnnnnnnnnnnnnnnnnnnnnnnnnnnnnnnnnnnnnnnnnnnnnnnnnnnnnnnnnnnnnnnnnnnnnnnnnnnnnnnnnnnnnnnnnnnnnnnnnnnnnnnnnnnnnnnnnnnnnnnnnnnnnnnnnnnnnnntccttggtagctcagctccgccagctgcagacgctaattgctcaaacttccaacaaagccgcccagaccagcacttgtgttnngattcttcttttttccctggctctcatcatcctgcccagcttcagtccattccagggtcgaccagaagctgggcctgaggattaccagcctcacggagnagtgacttccagaaatatcctgacccac

SEQ ID NO: 21553 - DNA, 499 bp, Macaca Mulatta
  misc_feature (1)...(499): n = A,T,C or G
aggatggaggagctgtgcctgcatcccgctgaccatcaggtgtactttggacagctgctaggcatgtgtgaccagatcagcttcccgctggnnggctaccccgtgtacaagtacgtgccctacggccccgtgatggaggtgctgccctacttgtcccgtcgcgccctggagaacagcagcctcatgaagggcgcccgtcgggagcggcagctgctgtggctggaactcttgcggcggctccgaactggcaacctcttccgtcgccctgcctagcacccgccagcccaccnnnnnnnnnnnnnnnnnnnnnnnncccaggccgtcaccacagttgtaaccaaccccatcctcacatagactcaccttttttcactccacacttgcagagctgctggaggtggggtcaggtacctcccagtcctgcccagggtctgggcactcaggtgtgggccaaacctgctacctgcctgggatagctgcaggaaacggttgggaactc

SEQ ID NO: 21554 - DNA, 495 bp, Macaca Mulatta
gagaagtcttacaagtgtgaagaatgtggcaaagcatttatatggtcctcaaccctaactagacataagaggatacatactggagagaagccctgcaaatgtgaagaatgtggcaaagcttttagccattcctcaacccttgctaaacataagagaattcatactggagagaaaccctacaaatgtaaagaatgtggcaaagcttttagcaattcctcaacccttactaatcataagataactcatactgaagagaaaccctacaaatgtaaagaatgtggcaaagcttttaagcgactctcaacccttactaaacataaaataatacatgctggagagaaactctacaaatgtgaagaatgtggcaaagcttttaatcgatcttcaaatcttactgcacataagataattcatactggagagaaaccttataagtgtgaagaatgtggcaaagcatttatctggtcctcaagccttactaaacataaaagaatt

SEQ ID NO: 21555 - DNA, 955 bp, Macaca Mulatta
gaggaaggggacaagccgaaaaagaaagcagaaggggactcaatgccccttccatgttacgaaagacccagctagtttcctcagattcgccaactatttcgtttagctcgcgagcgacgtgtaagctgcatgcagaggaaaaaggtccagattcatagctgggatccctcgtgtttggcaagcgaccgatttaaccgcatactggcgaataccaacactgaccagctcttcacagtgaaccaagtagaagctggaggctccaagtacggcatcatcaccatgcgaggcctgacgacccctgaactccgggtatacccgcacaaaagcctctacgtccctaatcggaaggtgaattctatgtgctgggcttcactgaatcacttggattcccaccttctgctgtgcttcgtgggactcgcagatactcccagttgtgccgtgctgctcccagcgtcgctgttcataggtagctacccaggaatgcgtcggccaggcatgctctgcagtttccagatccctgatgcctggtcctgtgcctggtccctgaacatccacgcatatcactgcttcagtacaggcttgtctcagcaggtcctgttgacgaacgtggtgacgggacatcagcagtcatttggtactagcagtgatgttttggcccagcagtttgcaatcatgactcctttgctgtttaatggctgtcgctctggggaggtctttggcattgatatgcgctgtggaaatcaaggcagggggtggaaggccatttgcctatcccatgattcagcagtgacctctctgcaaatcctccaagaagggcaatgcctggtggcatcagacatgactggaactatcaagctgtgggacttgagggccactaaatgtgtaacacagtacgaaggtcatgtgaataactcggcactacctgcccctgcatggaacgaggaagaaggagtcg

SEQ ID NO: 21556 - DNA, 1024 bp, Macaca Mulatta
  misc_feature (1)...(1024): n = A,T,C or G
tgcttcccccacggcgtttacagactctcctgcggcaggcggtggaactacaaagggatcggtgcctatatcacaataccaaacttgataataatctagattctgtgtctctgcttatagatcatgtttgtagtaggnnnnnnnnnnnnnnnnnnnnnnnnnnnnnnnnnnnnnnnnnnnnnnnnnnnnnnnnnnnnnnnnnnnnnnnnnnnnnnnnnnnnnnnnnnnnnnnnnnnnnnnnnnnnnnnnnnnnnnnnnnnnnnnnnnnnnnnnnnnnncacacctgctaaaactgcttaaaacattagaaggacatgcttatggcgtttcttatattgcatggagtccagatgacaactatcttgttgcttgtggcccagatgactgctctgagctttggctttggaatgtacaannnnnnnnnnnnnnnnnnnnnnnnnnnnnnnnnnnnnnnnnnnnnnnnnnnnnnnnnnnnnnnnnnnnnnnnnnnnnnnnnnnnnnnnnnnnnnnnnnnnnnnnnnnnnnnnnnnnnnnnnnnnnnnnnnnnnnnnnnnnnnnnnnnnnnnnnnnnnnnnnnnnnnnnnnnnnnnnnnnnnnnnnnnnnnnnnnnnnnnnnnnnnnnnnnnnnnnnnnnnnnnnnnnnnnnnnnnnnnnnnnnnnnnnnnnnnnnnnnnnnnnnnnnnnnnnnnnnnnnnnnnnnnnnnnnnnnnnnnnnnnnnnnnnnnnnnnnnnnnnnnnnnnnnnnnnnnnnnnnnnnnnnnnnnnnnnnnnnnnnnnnnnnnnnnnnnnnnnnnnnnnnnnnnnnnnnnnnnnnnnnnnnnnnnnnnnnnnnnnnnnnnnnnnnnnnnnnnnnnnnnnnnnnnnnnnnnnnnnnnnnnnnnnnnnnnngatcacaaggtttacatctggcacaaacgtagtgaactgccaattgcggagctgacagggcacacacgtacagtaaactgtgtgagctggaacccacagattccatccatgatggccagcgcctcagatgatggca

SEQ ID NO: 21557 - DNA, 470 bp, Macaca Mulatta
cttaaacattatttgaaatagttaatataaatacataattgcatttgctctgtttattgtaatgtattctaaattaatgcagaaccatttggaaaatttcattaaaatctatccccaaatgtgctttctgtatccttccttctacctatgtattctgatttttaaaaaatgcagtcaatgtaccatttatttgcttgatgaagggagctctattttctttaccagaaatgttgctaagtaattaccaatagaaagctgcttattttcattaatgaaaaataaccatggtttgtatactagaagtcttctccagaaactggtgagcctttctgttcaattgcatttgtaaataaacttgctgatgcatttaaggagtgggttgtctttttcttctgtgtatgtgtctgacctcaggccttttagtcatatttcagtatgtggccttttttgatgttacgctttattcagta

SEQ ID NO: 21558 - DNA, 265 bp, Macaca Mulatta
tcctttgacaaaagtaaatgggagggcattccattccttcctgaagggggacactccatgagtgtctgtgagaggcagctatctgcactctaaactgcaaacagaaatcaggtgttttaagactgaatgtttttatttatcaaaatgtagcttttgggagggaggggaaatgtaatactggaataatttgtaaatgagtttaattttatattcagtgaaaagattttatttatgaaattaaccatttaataaagaaatatttacc

SEQ ID NO: 21559 - DNA, 794 bp, Macaca Mulatta
  misc_feature (1)...(794): n = A,T,C or G
cgtctaccaaccacgcacgtgacctcaggggtccgggagatcatgagggtgtccttgggttttggggggaagaggaagactgacggtccccccaggagttcaggtgctgggcacggtgggcacgtgggaggtttgctgccaccaccacatgtttttatctcaactctcttgtccaccttggtgttgctgggcttgtggtttacgttgcagacgtaggtctgggtgcccaagctgctggagggcacggtcaccacgctgctgagggagtagagccctgaggactgtaggacagccgggaaggtgtgcacgccgctggtcagggagcctgagttccacgacacggtcacgggttcagggaagtagtccttgaccaggcagcccagggccgctgtgctctcggaggtgctcctggaggagggcgccagggggaagaccgatgggcccttggtggaggcnnnnnnnnnnnnnnnnnnagttccccggccccagacatccatctctcgcacagtaatacacggccgtgtcctcagatctcaggctgctcagctccatgtaggctgtgtctgtagacgtgtccgcggtcatggtgactctgccctggaacttctgtgcgtagtttgtttcaccatattcaggatcaacacctcccatccactcaagcccttttccaggggcctgtcgcacccagtgcatggcagtagtctggtgaaggtgtatccagaagccttgcaggagatcttcactgaggccccaggcttcttcacctcagccccagactgcaccagctggacctc

SEQ ID NO: 21560 - DNA, 2120 bp, Macaca Mulatta
  misc_feature (1)...(2120): n = A,T,C or G
gctggtgcctgaagctttcacgaagtgggcgttgcatgctgccactgactccacagttctggtgtcctgctggtgttcagttcctgctcccaccgctccacaatgcactctcctgcggcctggatccactagacactagacatttccctgttgggggctctctgtggcagctgcacctcacatttccacttggcattactcaagtggagggtctctgtgggctgggcatgctagctcagttctcttttcctcttcttataaagccaccagtcccattcctgtgataacccattaatccattaacccatgaatgaaggtagagccttatcatccaatgacatctcaaaggctccacctttcagtattgccacattagggattaagtctcaacatgagtgttggaaggaacattcaaaccaaagcagtatgaaaacaatattcaactccaaggtatatggtcaagattacaggtggtaaggaataggctaaatttgccagagatgtgctgtggaattatctgtctgtatttctaactatgaccttagcttcctcaactccatttcactgcagaatatgaaaaaataaattgagatcctgnnnnnnnnnnnnnnnnnnnnnnnnnnnnntttgagacagagtctcaccctgtcactcaggccggagtgcagtggcacaatctcggcgcacagcaacctctgcctcctgggatgacatnnnnnnnnnnnnnnnngcctcctgagtagcggggactacaggtgcctgccaccatgnnnnnnnnnnnnnnnnnnnnnnnnataagagacaggtttcaccgtgttggttttgatttcctgacctcgtgatctgcctgtcttgcnnnnnnnnnnnnnnnnnnnnnnnnnnntgtgagccgccgtgcactgctcagtttcttatttttaatagaaaagtagaacagggaaggcacacaggtcagtgtgaggaagggggtcatggtagacatggaggtggagtgtttgtctgcctcctcatattatgctaacagggacaaagacagattcagaggcccttgcaaaaagagaagccagagtcccttaagacacaaaggggaggcgtgaagaaatcctgcatctcagttgcacacaaggcagctgtctcaggctttacaagctgtgagagactcatcagatccctgggtactgtcgctacacgaagcctgagagtagctccctccttttctacctgagctcttcctcctccacatcacagcaacaatcacagctccagtgaccacagctccaaggagaaccaggccagcaatgatgcccacgatggggatggtggactgggaagacggctcccatctcagggtgaggggctcgggtagcccctcatgctgcacatggcacgtgtatctctgctcctctccagaaggtaccaccacagctgcccacttctggaaagttccatcccctgcaggcctggtctccacaagctccgtgtcctgggtctggtcctccccatcccgctgccaggtcactgtgatctccgcagggtagaagcccagggcccagcaccttcagggtggcctcatgatcagagacggggtggtgggtcacgtgtgtctttgggggatcctccaggtaggctctctgccgctccgccgcccgggccgcctcccacttgcgctgggtgttctgagccgccatgtccgcggccgtccaggagcgcaggtcctcgttcaggacgatgtaatccctgccgtcgtaggcggactggtcatacccgcggaggaggcgcccgtcgggtcccaggtcgcagccgtacatccactggagggtgtgagaccccgtctcgctctggttgtagtagccgcgcagggtccgcaggttccctcggaaagtctgtgcggcctccttggcgatccgtgtctgctcttcccaatactccggcccctcctgctccatccacggcgcccgcggctccatcctcggactctcggcgtcgctgtcgaaccgcacgaactgcgtgtcgtccacgtagcccacggagatgaagcggggctcccagcggccgggccgggacacggcggtgtggaaatacctcaaggagtgggagccggcccaggtctcggtcagggc

SEQ ID NO: 21561 - DNA, 73 bp, Macaca Mulatta
ctatttacttctgtgttctacctccaggagatcaaaaacgctggccttcagacctgatcggactcccaggggg

SEQ ID NO: 21562 - DNA, 1277 bp, Macaca Mulatta
  misc_feature (1)...(1277): n = A,T,C or G
acattgccacacaaccaaagaagtctattagcttttttgctacaatgaaagcaacttcagggaaaggatatactggtgcaaatcaaagcagaatggctgtgtccaaaaccgtgcttattccacctgaattgaaaactgcagacaaaacaaatctcagtataaagacaannnnnnnnnnnnnnnaaatggaactgatgtcactcctcgacctctttaccatccagatccacttactggtacagcaaagcctaataaactcttgacatcacaagaaggatcacttggaccagaatttatatcttcccatagcctttatcagaatacaataaatcctagtatgttagggcagtttacaaggtnnnnnnnnnnnnnnnnnnnnnnnnnnnnnnnnnnnnnnnnnnnnnnnnnnnnnnnnnnnnnnnnnnnnnnnnnnnnnnnnnnnnnnnnnnnnnnnnnnnnnnnnnnnnnnnnnnnnnnnnnnnnnnnnnnnnnnnnnnnnnnnnnnnnnnnnnnnnnnnnnnnnnnnnnnnnnnnnnnnnnnnnnnnnnnnnnnnnnnnnnnnnnnnnnnnnnnnnnnnnnnnnnnnnnnnnnnnnnnnnnnnnnnnnnnnnnnnnnnnnnnnnnnnnnnnnnnnnnnnnnnnnnnnnnnnnnnnnnnnnnnnnnnnnnnnnnnnnnnnnnnnnnnnnnnnnnnnnnnnnnnnnnnnnnnnnnnnnnnnnnnnnnnnnnnnnnnnnnnnnnnnnnnnnnnnnnnnnnnnnnnnnnnnnnnnnnnnnnnnnnnnnnnnnnnnnnnnnnnnnnnnnnnnnnnnnnnnnnnnnnnnnnnnnnnnnnnnnnnnnnnnnnnnnnnnnnnnnnnnnnnnnnnnnnnnnnnnnnnnnnnnnnnnnnnnnnnnnnnnnnnnnnnnnnnnnnnnnnnnnnnnnnnnnnnnnnnnnnnnnnnnnnnnnnnnnnnnnnnnnnnnnnnnnnnnnnnnnnnnnnnnnnnnnnnnnnnnnnnnnnnnnnnnnnnnnnnnnnnnnnnnnnnnnnnnnnnnnnnnnnnnnnnnnnnnnnnnnnnnnnnnnnnnnnnnnnnnnnnnnnnnnnnnnnnnnnnnnnnnnnnnnnnnnnnnnnnnnngaacctgaacctgaagagcctgaagattttttagaaagtgcaacacatgaagaagtagaggaagaatctaagaaggaggaggaagaagaaatacatgcagaagaatcaacaatacccgccaacttggaacgactttggtctttttcctgtgacttaaccaa

SEQ ID NO: 21563 - DNA, 1422 bp, Macaca Mulatta
  misc_feature (1)...(1422): n = A,T,C or G
aggcttccacaaggtcatggagggcatccacaaggccatcgagctgggctacaaccctgtgaaggtgnnnnnnnnnnnnnnnnnnnnnnnnnnnnnnnnnnnnnnnnnnnnnnnnnnnnnnnnnnnnnnnnnnnnnnnnnnnnnnnnnnnnnnnnnnnnnnnnnnnnnnnnnnnnnnnnnnnnnnnnnnnnnnnnnnnnnnnnnnnnnnnnnnnnnnnnnnnnnnnnnnnnnnnnnnnnnnnnnnnnnnnnnnnnnnnnnnnnnnnnnnnnnnnnnnnnnnnnnnnnnnnnnnnnnnnnnnnnnnnnnnnnnnnnnnnnnnnnnnnnnnnnnnnnnnnnnnnnnnnnnnnnnnnnnnnnnnnnnnnnnnnnnnnnnnnnnnnnnnnnnnnnnnnnnnnnnnnnnnnnnnnnnnnnnnnnnnnnnnnnnnnnnnnnnnnnnnnnnnnnnnnnnnnnnnnnnnnnnnnnnnngctgaggatcattggggccgccgtgggcaggaagaagcggcagcatgcannnnnnnnnnnnnnnnnnnnnnnnnnnnnnnnnnnnnnnnnnnnnnnnnnnnnnnnnnnnnnnnnnnnnnnnnnnnnnnaagacccagaatgagtttctccagccagatggtcactttatggaaaggatgcagggtcccccaggcccttctgctagcccagcagcggctggggtctggctgctttcagagacactacacttcccgtgcagactcagatgccaactcaaagtgccttagcccaggttcctgggctcctgctgccccctcaggaccccagctaacctcagaacaactaactcatgtggactcggaaggacgggcagctatggtagatgtgggcaggaagccagacacagagcgggcggctgtggcttcagccgtggtccttctggggcctgtagccttcaagcttgtccagcggaaccagctcaagaaaggagatgccctggtggtggcccagctggctggaatccaggcagccaaggtgaccagccagctgatccctctgtgccaccacgtggccctgagtcatgtgcaggtgcagctggagctggacagcacacgccatgccgtgaggatccaggcatcttgccgggctcgggggcccaccggggtggagatggaggccctgacctctgctgcagtggccgccctcagcctgtatgacatgtgcaaggctgtcagcagggacattgtgttggaggagatcaagctcattagcaagactggcggtcagcggggggacttccatcgggcttagcgcctgaccttcttacccatggcccacccagacctggagctgggatgcaatttaggctgaaggaaagatgtcaggttcatgtaatcacagtcactgtttaccttgagcagtaaatccaaaggcagcctgctctactactaac

SEQ ID NO: 21564 - DNA, 182 bp, Macaca Mulatta
  misc_feature (1)...(182): n = A,T,C or G
ttcctgctgctgctctggtttctgcctatcactgangggtcccagcgggctgaacccctgttcactgcagtcaccaactcagttcttgcccctgactatgacagtaatcccacccagctcaactatggtgtggcagttactgatgtggaccatgatggggactttgagatcgccttggcggg

SEQ ID NO: 21565 - DNA, 703 bp, Macaca Mulatta
  misc_feature (1)...(703): n = A,T,C or G
ggattctagaggccgaggcggccgacnnnnnnnnnnnnnnnnnnnnnnnnnnnnnnnnnnnnnnnnnnngggtcattcatagtaaaacttttttgaacagaaaacccagcaaaggttttcacctccgcaaagttccccttattttaaagtaaagcactgctttttaaaaagcaattatacataagtctttcctaaaaaagtcctgctaaaacatgtctagcaatttcattgattatataaagtagtacacttagtgtaatttaaacattccaacaggaatcaaatcgtaccagcagaaccacttctgcatctatgacttctatgtacaaacacacatgcagacacacacttttggaaaagttcctcaagcataaacatgcgacacctaaggccttctacttacagtgcctattaaactacatacagtatatattaaagctcttcaaaataaagacatgagaagccttgggcattttttgttcaccaatttgtatcgcggcttcacgtttctgcttttgcttgatcacaaaagcatatcattatccacgctgtttttaaagaactcatcattgccatgtccaggagaggcaatctagctggagtcaggtgatgcactccattcctgtcaaagccttccggcagcctacagcacaaaacaccctttcatttttccaatggcctgggggggcctttttttggaaaa

SEQ ID NO: 21566 - DNA, 294 bp, Macaca Mulatta
  misc_feature (1)...(294): n = A,T,C or G
agtatagccgaaatacagaaagatgtggaatacagattgccattcaccataaacaacctgacaattaacattaatattnnnnnnnnnnnnnnnnnnnnnnnnnnnnnnnnnnnnnnnnnnnnnnnnnnnnnnnnnnnnnnnnnnnnnnnnnnnnnnnnnnnnnnnnnnnnnnnnnnnnnnnnnnnnnnnnnnnnnnnnnnnnnnnnnnnnnnnnnnnnnnnnnnnnnnnnnnnnnnnnnnnnnnnnnnnnnnnnnnnnnnnnnnnnnnnnagtatagccgaaatacagaaagat

SEQ ID NO: 21567 - DNA, 3272 bp, Macaca Mulatta
  misc_feature (1)...(3272): n = A,T,C or G
ggcttaatgccagaccgggggttggaggtgtccgatctcgagttgggatccagcaaggccttctcagccagtcaacacgcacagccaccttccagcagagatttgatgcccggcaaaagattggcctctcagatgcccggctcaaactgggagtcaaggatgcccgggagaagcttttgcagaaagatgcccgatttcggatcaaagggaaagtgcaggatgccagagagatgttgaactctcgcaagcagcagaccacggcgccccagaagccccgccaggtcactgatgcccgggagaagattagcttgaagaggagttcccctgctgccttcataaacccacctattgggacagtgacccctgctctgaaactcaccaaaaccatccaggnnnnnnnnnnnnnnnnnnnnnnnnnnnnnnnnnnnnnnnnnnnnnnnnnnnnnnnnnnnnnnnnnnnnnnnnnnnnnnnnnnnnnnnnnnnnnnnnnnnnnnnnnnnnnnnnnnnnnnnnnnnnnnnnnnnnnnnnnnnnnnnnnnnnnnnnnnnnnnnnnnnnnnnnnnnnnnnnnnnnnnnnnnnnnnnnnnnnnnnnnnnnnnnnnnnnnnnnnnnnnnnnnnnnnnnnnnnnnnnnnnnnnnnnnnnnnnnnnnnnnnnnnnnnnnnnnnnnnnnnnnnnnnnnnnnnnnnnnnnnnnnnnnnnnnnnnnnnnnnnnnnnnnnnnnnnnnnnnnnnnnnnnnnnnnnnnnnnnnnnnnnnnnnnnnnnnnnnnnnnnnnnnnnnnnnnnnnnnnnnnnnnnnnnnnnnnnnnnnnnnnnnnnnnnnnnnnnnnnnnnnnnnnnnnnnnnnnnnnnnnnnnnnnnnnnnnnnnnnnnnnnnnnnnnnnnnnnnnnnnnnnnnnnnnnnnnnnnnnnnnnnnnnnnnnnnnnnnnnnnnnnnnnnnnnnnnnnnnnnnnnnnnnnnnnnnnnnnnnnnnnnnnnnnnnnnnnnnnnnnnnnnnnnnnnnnnnnnnnnnnnnnnnnnnnnnnnnnnnnnnnnnnnnnnnnnnnnnnnnnnnnnnnnnnnnnnnnnnnnnnnnnnnnnnnnnnnnnnnnnnnnnnnnnnnnnnnnnnnnnnnnnnnnnnnnnnnnnnnnnnnnnnnnnnnnnnnnnnnnnnnnnnnnnnnnnnnnnnnnnnnnnnnnnnnnnnnnnnnnnnnnnnnnnnnnnnnnnnnnnnnnnnnnnnnnnnnnnnnnnnnnnnnnnnnnnnnnnnnnnnnnnnnnnnnnnnnnnnnnnnnnnnnnnnnnnnnnnnnnnnnnnnnnnnnnnnnnnnnnnnnnnnnnnnnnnnnnnnnnnnnnnnnnnnnnnnnnnnnnnnnnnnnnnnnnnnnnnnnnnnnnnnnnnnnnnnnnnnnnnnnnnnnnnnnnnnnnnnnnnnnnnnnnnnnnnnnnnnnnnnnnnnnnnnnnnnnnnnnnnnnnnnnnnnnnnnnnnnnnnnnnnnnnnnnnnnnnnnnnnnnnnnnnnnnnnnnnnnnnnnnnnnnnnnnnnnnnnnnnnnnnnnnnnnnnnnnnnnnnnnnnnnnnnnnnnnnnnnnnnnnnnnnnnnnnnnnnnnnnnnnnnnnnnnnnnnnnnnnnnnnnnnnnnnnnnnnnnnnnnnnnnnnnnnnnnnnnnnnnnnnnnnnnnnnnnnnnnnnnnnnnnnnnnnnnnnnnnnnnnnnnnnnnnnnnnnnnnnnnnnnnnnnnnnnnnnnnnnnnnnnnnnnnnnnnnnnnnnnnnnnnnnnnnnnnnnnnnnnnnnnnnnnnnnnnnnnnnnnnnnnnnnnnnnnnnnnnnnnnnnnnnnnnnnnnnnnnnnnnnnnnnnnnnnnnnnnnnnnnnnnnnnnnnnnnnnnnnnnnnnnnnnnnnnnnnnnnnnnnnnnnnnnnnnnnnnnnnnnnnnnnnnnnnnnnnnnnnnnnnnnnnnnnnnnnnnnnnnnnnnnnnnnnnnnnnnnnnnnnnnnnnnnnnnnnnnnnnnnnnnnnnnnnnnnnnnnnnnnnnnnnnnnnnnnnnnnnnnnnnnnnnnnnnnnnnnnnnnnnnnnnnnnnnnnnnnnnnnnnnnnnnnnnnnnnnnnnnnnnnnnnnnnnnnnnnnnnnnnnnnnnnnnnnnnnnnnnnnnnnnnnnnnnnnnnnnnnnnnnnnnnnnnnnnnnnnnnnnnnnnnnnnnnnnnnnnnnnnnnnnnnnnnnnnnnnnnnnnnnnnnnnnnnnnnnnnnnnnnnnnnnnnnnnnnnnnnnnnnnnnnnnnnnnnnnnnnnnnnnnnnnnnnnnnnnnnnnnnnnnnnnnnnnnnnnnnnnnnnnnnnnnnnnnnnnnnnnnnnnnnnnnnnnnnnnnnnnnnnnnnnnnnnnnnnnnnnnnnnnnnnnnnnnnnnnnnnnnnnnnnnnnnnnnnnnnnnnnnnnnnnnnnnnnnnnnnnnnnnnnnnnnnnnnnnnnnnnnnnnnnnnnnnnnnnnnnnnnnnnnnnnnnnnnnnnnnnnnnnnnnnnnnnnnnnnnnnnnnnnnnnnnnnnnnnnnnnnnnnnnnnnnnnnnnnnnnnnnnnnnnnnnnnnnnnnnnnnnnnnnnnnnnnnnnnnnnnnnnnnnnnnnnnnnnnnnnnnnnnnnnnnnnnnnnnnnnnnnnnnnnnnnnnnnnnnnnnnnnnnnnnnnnnnnnnnnnnnnnnnnnnnnnnnnnnnnnnnnnnnnnnnnnnnnnnnnnnnnnnnnnnnnnnnnnnnnnnnnnnnnnnnnnnnnnnnnnnnnnnnnnnnnnnnnnnnnnnnnnnnnnnnnnnnnnnnnnnnnnnnnnnnnnnnnnnnnnnnnnnnnnnnnnnnnnnnnnnnnnnnnnnnnnnnnnnnnnnnnnnnnnnnnnnnnnnnnnnnnnnnnnnnnnnnnnnnnnnnnnnnnnnnnnnnnnnnnnnnnnnnnnnnnnnnnnnnnnnnnnnnnnnnnnnnnnnnnnnnnnnnnnnnnnnnnnnnnnnnnnnnnnnnnnnnnnnnnnnnnnnnnnnnnnnnnnnnnnnnnnnnnnnnnnnnnnnccatctggagctggtgctttccgtgaccatctggtacattgaggggacctgtttgcctcctccactctataagtggtaatcttgggagaccgggaagagaaggtggtgggctagtcctgtgtcctccttcacttcccatgcccccgtgttacccgtctgtgtctcccatgcagaaggagaggaagaggcattaagggatgaagggtgattatgtattatccatttctgaataaacatttggtattccta

SEQ ID NO: 21568 - DNA, 550 bp, Macaca Mulatta
tgccccccaccgcctgcctacttgcttctctggctgcctggtcagtgcagaggtgccccctgcaggtgttcaataaaggagacaagtgctttcccagctcttttcctgcaccgcctgacctgggctcattctgtcacccacctgttcacctgggttcatccccatgctgggggtggagtagcacacagatgacaattgcacagccttggaggcaccagagctgctttgcatgactgaggagtcccagccaggcctgcagggactgctgtgaacccaataaggaggtggtacagtgccaggcctcaggatcactttcatccggggtttcagttcagtctcacattcccaacagggagaaggttgtggtgatgggcttgggatgcagctccatttaagccagtatttcctcagatgccctaataaagcactgccaggcagcttcaagtgacatatgctcgctgagcaagagaggacagcttttcacaactgtaccaagcctggcttattacttcgtaggcacattgcactgcatgtttggctggtgagccca

SEQ ID NO: 21569 - DNA, 2354 bp, Macaca Mulatta
  misc_feature (1)...(2354): n = A,T,C or G
gttactgcaaaatgcattaaaaggtatacagtcacttctaaatggtgggagaatgaaactaacgcagactgatgaacttggagcacttttagctgtgctaaagnnnnnnnnnnnnnnnnnnnnnnnnnnnnnnnnnnnnnnnnnnnnnnnnnnnnnnnnnnnnnnnnnnnnnnnnnnnnnnnnnnnnnnnnnnnnnnnnnnnnnnnnnnnnnnnnnnnnnnnnnnnnnnnnnnnnnnnnnnnnnnnnnnnnnnnnnnnnnnnnnnnnnnnnnnnnnnnnnnnnnnnnnnnnnnnnnnnnnnnnnnnnnnnnnnnnnnnnnnnnnnnnnnnnnnnnnnnnnnnnnnnnnnnnnnnnnnnnnnnnnnnnnnnnnnnnnnnnnnnnnnnnnnnnnnnnnnnnnnnnnnnnnnnnnnnnnnnnnnnnnnnnnnnnnnnnnnnnnnnnnnnnnnnnnnnnnnnnnnnnnnnnnnnnnnnnnnnnnnnnnnnnnnnnnnnnnnnnnnnnnnnnnnnnnnnnnnnnnnnnnnnnnnnnnnnnnnnnnnnnnnnnnnnnnnnnnnnnnnnnnnnnnnnnnnnnnnnnnnnnnnnnnnnnnnnnnnnnnnnnnnnnnnnnnnnnnnnnnnnnnnnnnnnnnnnnnnnnnnnnnnnnnnnnnnnnnnnnnnnnnnnnnnnnnnnnnnnnnnnnnnnnnnnnnnnnnnnnnnnnnnnnnnnnnnnnnnnnnnnnnnnnnnnnnnnnnnnnnnnnnnnnnnnnnnnnnnnnnnnnnnnnnnnnnnnnnnnnnnnnnnnnnnnnnnnnnnnnnnnnnnnnnnnnnnnnnnnnnnnnnnnnnnnnnnnnnnnnnnnnnnnnnnnnnnnnnnnnnnnnnnnnnnnnnnnnnnnnnttggtggcagagtcatcctcacagacccttactcagataattaagnagtgccttgcaaatttagtatcaaatgcaccttataatcgtctaaaactcagcctgctgaccaaagtctggaaccagataaagccttatattcgccacaaagnagatgttaatgttcgcgtgtcaagtctcacactcttgggagctatagtgtccacccacgcacctttacctgaggtccagctacttctgcaacagccatgttcttctggactcggtaatagcaattcagcaacccctcacctcagccctcctgattggtggaagaaagcccctgcaggaccctctctggaagaaacgtcagttagctcacctaaggggtcttcagagccctgctggctcattcgactctgcatttccattgtcgtactgcccaaggaggattcctgttcaggtagcgatgctggctctgcagcaggaagtgcctacgaaccatcccccatgcgactggaggccttacaggtannnnnnnnnnnnnnnnnnnnnnnnnnnnnnnnnnnnnnnnnnnnnnnnnnnnnnnnnnnnnnnnnnnnnnnnnnnnnnnnnnnnnnnnnnnnnnnnnnnnnnnnnnnnnnnnnnnnnnnnnnnnnnnnnnnnnnnnnnnnnnnnnnnnnnnnnnnnnnnnnnnnnnnnnnnnnnnnnnnnnnnnnnnnnnnnnnnnnnnnnnnnnnnnnnnnnnnnnnnnnnnnnnnnnnnnnnnnnnnnnnnnnnnnnnnnnnnnnnnnnnnnnnnnnnnnnnnnnnnnnnnnnnnnnnnnnnnnnnnnnnnnnnnnnnnnnnnnnnnnnnnnnnnnnnnnnnnnnnnnngaatgacaggcagatcctgtgcatcacagtgctgctcggactgaatgacagcaagaatcgcttagtgaaagctgcaacctcacgggccctgggagtctatgtgctttttccctgtctcagacaggnnnnnnnnnnnnnnnnnnnnnnnnnnnnnnnnnnnnnnnnnnnnnnnnnnnnnnnnnnnnnnnnnnnnnnnnnnnnnnnnnnnnnnnnnnnnnnnnnnnnnnnnnnnnnnnnnnnnnnnnnnnnnnnnnnnnnnnnnnnnnnnnnnnnnnnnnnnnnnnnnnnnnnnnnnnnnnnnnnnnnnnnnnnnnnnnnnnnnnnnnnnnnnnnnnnnnnnnnnnnnnnnnnnnnnnnnnnnnnnnnnnnnnnnnnnnnnnnnnnnnnnnnnnnnnnnnnnnnnnnnnnnnnnnnnnnnnnnnnnnnnnnnnnnnnnnnnnnnnnnnnnnnnnnnnnnnnnnnnnnnnnnnnnnnnnnnnnnnnnnnnnnnnnnnnnnnnnnnnnnnnnnnnnnnnnnnnnnnnnnnnnnnnnnnnnnnnnnnnnnnnnnngggagagccccagggacctcccagtcctacaatgccctgacatcggtcgtgacatcatgcaagaacttcaaag

SEQ ID NO: 21570 - DNA, 494 bp, Macaca Mulatta
  misc_feature (1)...(494): n = A,T,C or G
gatcgtcagtatttaaacagatcacatcatgcgtgagtacaagctagtggtccttggttcaggaggcgttgggaagtctgctctnnnnnnnnnnnnnnnnnnnnnnnnnnnnnnnnnnnnnnnnnnnnnnnnnnnnnnnnnnnnnnnnnnnnnnnnnnnnnnnnnnnnnnnnnnnnnnnnnnnnnnnnnnnnnnnnnnnnnnnnnnnnnnnnnnnnnnnnnnnnnnnnnnnnnnnnnnnnnnnnnnnnnnnnnnnnnnnnnnnnnnnnnnnnnnnnnnnnnnnnnnnnnnnnnnnnnnnnnnnnnnnnnnnnnnnnnnnnnnnnnnnnnnnnnnnnnnnnnnnnnnnnnnngttccaatgattttggttggcaataaatgtgacctggaagatgagcgagtagttggcaaagaacagggccagaatttagcaagacagtggtgtaactgtgcctttttagaatcttctgcaaagtcaaagatcaatgttaatga

SEQ ID NO: 21571 - DNA, 910 bp, Macaca Mulatta
agctctcagttctttgaacagggtgatgcccactcccaggttgaggaaggactatctataatgcatacaggacagaaaccttccaatcatgggaagtgtaaaccatccttcagtgatgtttccatctttgatcttcctcagcaaatacactcagcagagaagtctcattcccgtgatgagtgtggaaaaagcttctgttacatctcagcacttcatattcatcagagagtccacctgggagagaaactctttaagtgtgacgtgtgtggtaaggaattcagtcagagtttacatctgcaaactcatcagagagtccacactggagagaaacctttcaaatgtgaacaatgtgggagaggcttcagatgtagatcagcacttacagttcattgcaaattacacatgggagagaaacattataattgtgaggcatgtgggagggctttcattcatgatatccagcttcagaaacatcagagaattcacacaggggagaagccattcaaatgtgagatatgtagtatgagcttccgtcttaggtcaagtcttaataggcattgtgtggtccacacaggaaagaaaccaaacaacactggggaatatggaaaaggcttcatcggtaggctggatttgtgtaagcatcagacgatccacacaggagagaaaccatataattgtaaagaatgtgggaagagcttcagacggtcctcatatcttttgatccatcagcgagtccacactggagaaaagccatacaaatgtgacaagtgtgggaagagctacattactaagtcaggtcttgacttgcaccatagagcgcacacaggagagagaccttataactgtgatgactgtgggaagagctttagacaggcttcaagtattttgaatcataagagactccactgcc

SEQ ID NO: 21572 - DNA, 171 bp, Macaca Mulatta
tgaatagaaagaagagacctgtggacacaaaaaagacaaaacttgaagccttgtcccaagtgggtccagtaaatgagaatgttatggaagaagatctaaaaaccatgattgaaagacacttaacaggtagataattggaaggggtagtctttttgttttatgaggggatta

SEQ ID NO: 21573 - DNA, 95 bp, Macaca Mulatta
gagggatctggatctctaccagctactccagagactcttcaaaagccactcatctctggagggattgctcaaagccatgagccaggctagaacag

SEQ ID NO: 21574 - DNA, 856 bp, Macaca Mulatta
gggacagcctagcgctcttcgctgttgctcgttgtctcgcgcagggcgaccccggttctggtgtttggcgccggaattaaacaaccaccatgtcgagcaaaaaggcaaagaccaagaccaccaagaagcgccctcagcgcgcaacatccaatgtgtttgccatgtttgaccagtcacagattcaggagttcaaagaggccttcaacatgattgataagaatagagatggcttcatcgacaaggaagatttgcatgatatgcttgcttctctagggaagaatcccactgatgcataccttgatgccatgatgaatgaggcaccagggcccataaatttcaccatgttcatcaccatgtttggtgaagaatttaaatggcaacggatcctgaagatgtccatcagaatatgcttttgctttgctttgatgaagtaagcaaacagaggaccacttcatgaatattaccctgagagagctgcttgacaaccatggggggatcgggttctacgggatgaggaagtggaatgaactgatacagagaaagaaacttattgactaaaagggagaattttaactaacaacaaagttatcgacccatccacggtaacagcggagccgaattacataactaagacataaaaaaaaacttcaacataaaaacactccaaatctcaatatgactaaacctcaggacaaaatttttaaacagaaacgtgtacaatgataatttaatcataataattatttgacaaatatcattaatttaccctaagcaatttgcacccaccttccggattccactataactccacatagacttacgcggcagatgtaagaacaatggtatatacaccgag

SEQ ID NO: 21575 - DNA, 295 bp, Macaca Mulatta
gcccacctcatcacccaccactggcccgaggaaggacttggccgctgggccccatggccgcatggtggggcccagcgctacccgggccaagaagagagaagcctaacttctgcccgcaggagaccgaggtgctggtgtccaaggtgagcaagcaccaccagctgctgttcggcacggggctgctgaaagccgagcccactcgcaggtaccgcgtgtggagccgcatcctgcaggccgtgaacgcgctgggctactgccgccgtgacgtcgtggacctgaagcacaagtggcggga

SEQ ID NO: 21576 - DNA, 640 bp, Macaca Mulatta
  misc_feature (1)...(640): n = A,T,C or G
aagtttaaagttaacatatggaatttttagcttggatgatttacattaaaatctttccatgttattcttcagttttggcttgatgccatgttaagaatgatgtgaattcttcccagttctgccctggtgctagacattgccccaaactttcaattagacactagctaaatagtcctactcagtaaacttacatcttgaaaaataagaccagtaagaggacagggaaagtactaaagaaagaaaccaatgttgtgtgagtttcaaagcagatgcaaggctgtgtaaaagtagaatgttcattctccatttccaagagtgtttcagaataggatgtcttaagacttcaatcatgtcagnnnnnnnnnnnnnnnnnnnnngtgattattgagtttctccttctccttttaagtcatcaccttctttttatgaaatgatagtaaggaactcatctgctctgaaaggcatttgagaaatatctgagactcctggctgcttttttgctgggggtagagggtagaatacttctcatctagatataacttaccactaagaaacccccaacatgtcaccattgcctaaatctaactagaccagggtccagaggcccatccaggccaggcaggaaatgtacctcatgtga

SEQ ID NO: 21577 - DNA, 2550 bp, Macaca Mulatta
  misc_feature (1)...(2550): n = A,T,C or G
gctctcccgggccggcgccacgggttccgcgcgcggtcggacccagtggcggtggtggggagaccccgcggacttgcggcgctggcgctgcgcttcgacaagcccatcaagcaggccttcttacaacaccggggccgtgctgttcgtgtgcctgtgctgcggcgccgcggtgctggtctacttcatcctggaggccttcctgcggccgttgctctgggccgtgctgtgcggcactttcctgcaccccttcaagagctcgctgacgcgcctgggccgccactggctgcagcgcctgcaccgcgcgcacacgcccatcgtcctggccgcgctgctgctgccgctctgcttcatcgactacggcgtcgaggccctgggcgagcaggcgttgcgtcgccgccgcctgctcctgctgctcggcgccggcggcccgcttctgtacggcctctactgcctcggcagctacctgggcgtgcaggtgctgctgttgcacgctgccgcgctcatctgccgcgggcttgactacttcagcagcctgtgnnnnnnnnnnnnnnnnnnnnnnnnnnnnnnnnnnnnnnnnnnnnnnnnnnnnnnnnnnnnnnnnnnnnnnnnnnnnnnnnnnnnnnnnnnnnnnnnnnnnnnnnnnnnnnnnnnnnnnnnnnnnnnnnnnnnnnnnnnnnnnnnnnnnnnnnnnnnnnnnnnnnnnnnnnnnnnnnnnnnnnnnnnnnnnnnnnnnnnnnnnnnnnnnnnnnnnnnnnnnnnnnnnnnnnnnnnnnnnnnnnnnnnnnnnnnnnnnnnnnnnnnnnnnnnnnnnnnnnnnnnnnnnnnnnnnnnnnnnnnnnnnnnnnnnnnnnnnnnnnnnnnnnnnnnnnnnnnnnnnnnnnnnnnnnnnnnnnnnnnnnnnnnnnnnnnnnnnnnnnnnnnnnnnnnnnnnnnnnnnnnnnnnnnnnnnnnnnnnnnnnnnnnggcagacgaaggcctgaaataggaacttttcttagaaagaagaaaactagtgacatctacttcgtttctatggtttgggccattgtcgtcgtgcagatctggttgaacctgtggatagtacagttgctgccagtgccgattgcannnnnnnnnnnnnnnnnnnnnnnnnnnnnnnnnnnnnnnnnnnnnnnnnnnnnnnnnnnnnnnnnnnnnnnnnnnnnnnnnnnnnnnnnnnnnnnnnnnnnnnnnnnnnnnnnnnnnnnnnnnnnnnnnnnnnnnnnnnnnnnnnnnnnnnnnnnnnnnnnnnnnnnnnnnnnnnnnnnnnnnnnnnnnnnnnnnnnnnnnnnnnnnnnnnnnnnnnnnnnnnnnnnnnnnnnnnnnnnnnnnnnnnnnnnnnnnnnnnnnnnnnnnnnnnnnnnnnnnnnnnnnnnnnnnnnnnnnaggtacatcaagagagtgtacacatgattgaagtcacaagtaatttgattaatgaaactctagcaaatcaccctgagtgggcaannnnnnnnnnnnnnnnnnnnnnnnnnnnnnnnnnnnnnnnnnnnnnnnnnnnnnnnnnnnnnnnnnnnnnnnnnnnnnnnnnnnnnnnnnnnnnnnnnnnnnnnnnnnnnnnnnnnnnnnnnnnnnnnnnnnnnnnnnnnnnnnnnnnnnnnnnnnnnnnnnnnnnnnnnnnnnnnnnnnnnnnnnnnnnnnnnnnnnnnnnnnnnnnnnnnnnnnnnnnnnnnnnnnnnnnnnnnnnnnnnnnnnnnnnnnnnnnnnnnnnnnnnnnnnnnnnnnnnnnnnnnnnnnnnnnnnnnnnnnnnnnnnnnnnnnnnnnnnnnnnnnnnnnnnnnnnnnnnnnnnnnnnnnnnnnnnnnnnnnnnnnnnnnnnnnnnnnnnnnnnnnnnnnnnnnnnnnnnnnnnnnnnnnnnnnnnnnnnnnnnnnnnnnnnnnnnnnnnnnnnnnnnnnnnnnnnnnnnnnnnnnnnnnnnnnnnnnnnnnnnnnnnnnnnnnnnnnnnnnnnnnnnnnnnnnnnnnnnnnnnnnnnnnnnnnnnnnnnnnnnnnnnnnnnnnnnnnnnnnnnnnnnnnnnnnnnnnnnnnnnnnnnnnnnnnnnnnnnnnnnnnnnnnnnnnnnnnnnnnnnnnnnnnnnnnnnnnnnnnnnnnnnnnnnnnnnnnnnnnnnnnnnnnnnnnnnnnnnnnnnnnnnnnnnnnnnnnnnnnnnnnnnnnnnnnnnnnnnnnnnnnnnnnnnnnnnnnnnnnnnnnnnnnnnnnnnnnnnnnnnnnnnnnnnnnnnnnnnnnnnnnnnnnnnnnnnnnnnnnnnnnnnnnnnnnnnnnnnnnnnnnnnnnnnnnnnnnnnnnnnnnnnnnnnnnnnnnnnnnnnnnnnaggtggccatccttacctgacaggcttggcagtggccggtggagcatactacctaggcctggaaggagcaatcatcgggcctattcttctctgcatacttgtggttgcttccaatatctatagtgccatgctagtgagtcccacgaattcagtgcccacgccaaaccagaccccatggcctgctcagactcagcgg

SEQ ID NO: 21578 - DNA, 534 bp, Macaca Mulatta
tccagggtccaagttccccatcaggtggacagccccagaagctgccctctttggcagattcaccatcaagtcagatgtgtggtcctttgggatcctgctcactgaactcatcaccaagggccgaatcccctacccaggtttgccccaccaggggtagggctggggtgggggatggtcacggggaagggcttcttcctggctgtccctttgactaacagagccccatccttcaggcatgagtaaacgggaagtgttggaacaggtggagcagggctaccacatgccatgccctccaggctgcccagcgtccctgtatgaggccatggaacagacctggcgtctggacccggaggagaggcccaccttcgagtacctgcagtctttcctggaggactacttcacctccaccgaaccacagtaccagcccggggatcagacatagcctgtctgggcatcaaccacctctctggcggtgaccaccagtccttgccaatccccagagctctttttccaaagtccccaggctggcttaga

SEQ ID NO: 21579 - DNA, 625 bp, Macaca Mulatta
ctgccattaacttttcactaagattcaaaactttgtaatgtaaccaatccttatttgttaaaattaagcattttgcatttttccttccactcgttaagaagaagaaggtcttcgaggggagaagaggaaacgagatgctgaagatgatggagaggaagatgactagatcattctaagaccagactctctaatgtttctgggtgtgcaacagagtgattacatctttgtttcttcatgtacgatagctatccctacagaagataatgtgtaactttttataggaaaagtgtggttttactatttttgccttatcattccaaataagaactagtctgttaatgatcatattgtatgtagagaaaaattttcattgactcccattgtggaattccctagcaatttatttagacttaattttttaaattcaagcttactgtattagtcatttttagcccataattaaaacatcacttttacacaggtgtagtatggtgcatctcattccttatttataaattaactgaaattacagaatgctataatataaaatgacagtagtctcttgagtggtaagttggttattcttttagaggtaatccagggataatgagtttgaaggcagtta

SEQ ID NO: 21580 - DNA, 306 bp, Macaca Mulatta
ctcaggtgtgatccaatttcgggtcatgagtacctttactggtaccaacaggccccggggcagggcccagagtttctgacttacttccagaatgatgctcaacgagacaaatcagggctgcccaatgatcgcttctctgcagagaggactgagggatccgtctctactctgaagatccagcgcacagagcagggggactcggccgtgtatctctgtgccagtagcttcgactggggggatacctacttggatgagcagttctttgggccaggcacacggctcaccgtgctagaggacctgaaaaaa

SEQ ID NO: 21581 - DNA, 1743 bp, Macaca Mulatta
  misc_feature (1)...(1743): n = A,T,C or G
tcggtggctttctctcagggcctgcgtagccggtaacaaacgaggtgccagggatcgaaccgacacagccatnnnnnnnnnnnnnnnnnnnnnnnnnnnnnnnnnnnnnnnnnnnnnnnnnnnnnnnnnnnnnnnnnnnnnnnnnnnnnnnnnnnnnnnnnnnnnnnnnnnnnnnnnnnnnnnnnnnnnnnnnnnnnnnnnnnnnnnnnnnnnnnnnnnnnnnnnnnnnnnnnnnnnnnnnnnnnnnnnnnnnnnnnnnnnnnnnnnnnnnnnnnnnnnnnnnnnnnnnnnnnnnnnnnnnnnnnnnnnnnnnnnnnnnnnnnnnnnnnnnnnnnnnnnnnnnnnnnnnnnnnnnnnnnnnnnnnnnnnnnnnnnnnnnnnnnnnnnnnnnnnnnnnnnnnnnnnnnnnnnnnnnnnnnnnnnnnnnnnnnnnnnnnnnnnnnnnnnnnnnnnnnnnnnnnnnnnnnnnnnnnnnnnnnnnnnnnnnnnnnnnnnnnnnnnnnnnnnnnnnnnnnnnnnnnnnnnnnnnnnnnnnnnnnnnnnnnnnnnnnnnnnnnnnnnnnnnnnnnnnggtatggcagttgggctcttcatcaccaaacttcactttggaaggacatgagaagggcgtgaattgtattgattactacagtggtggggacaaaccatacctcatttcaggtgcagatgaccgtcttgttaaaatatgggattatcagnnnnnnnnnnnnnnnnnnnnnnnnnnnnnnnnnnnnnnnnnnnnnnnnnnnnnnnnnnnnnnnnnnnnnnnnnnnnnnnnnnnnnnnnnnnnnnnnnnnnnnnnnnnnnnnnnnnnnnnnnnnnnnnnnnnnnnnnnnnnnnnnnnnnnnnnnnnnnnnnnnnnnnnnnnnnnnnnnnnnnnnnnnnnnnnnnnnnnnnnnnnnnnnnnnnnnnnnnnnnnnnnnnnnnnnnnnnnnnnnnagcttggtcgggaggancctgccatgtccatggatgccaatggaaagataatttgggccaagcattcagaagtccagcaggccaacctaaaagcaatgggagatgctgaaattaaagatggagaaagattgccactggcagtaaaggatatgggcagttgtgaaatannnnnnnnnnnnnnnnnnnnnnnnnnnnnnnnnnnnnnnnnnnnnnnnnnnnnnnnnnnnnnnnnnnnnnnnnnnnnnnnnnnnnnnnnnnnnnnnnnnnnnnnnnnnnnnnnnnnnnnnnnnnnnnnnnnnnnnnnnnnnnnnnnnnnnnnnnnnnnnnnnnnnnnnnnnnnnnnnnnnnnnnnnnnnnnnnnnnnnnnnnnnnnnnnnnnnnnnnnnnnnnnnnnnnnnnnnnnnnnnnnnnnnnnnnnnnnnnnnnnnnnnnnnnnnnnnnnnnnnnnnnnnnnnnnnnnnnnnnnnnnnnnnnnnnnnnnnnnnnnnnnnnnnnnnnnnnnnnnnnnnnnnnnnnnnnnnnnnnnnnnnnnnnnnnnnnnnnnnnnnnnnnnnnnnnnnnnnnnnnnnnnnnnnnnnnnnnnnnnnnnnnnnnnnnnnnnnnnnnnnnnnnnnnnnnnnnnnnnnnnnnnnnnnnnnnnnnnnnnnnnnaggttcttggtgagattcaggaaattgtgaaaacggggctttgggtaggcgattgcttcatttacacaagttctgtgaacagattaaattattatgttggaggagaaatagtcaccattgcccacttggacag

SEQ ID NO: 21582 - DNA, 5517 bp, Macaca Mulatta
  misc_feature (1)...(5517): n = A,T,C or G
gcgggaagccggggaaaggaatggcatccggaaggaagggctgagagccggtcaggtgctggcagaagggctggttggatagagactgggacgggcccagagcatttggcgtcctcgacattcatatacacttggagagatgattccctggagatccaagtgcctgtatagacaatcttttctaggggttctacnnnnnngtgaggagagggtagatgtagaaattggagacgagaatagagtgttgtaaaggcatgcgtggttagagaactggctctggattcaggagtccccactcactagctgtgagaccttcagcaagtcacttagcctctctgtgcctcggttttctcatctctaaggtggggatgatgatggccatacctgcttcatagagtgacaattagatgagatgatgtctgtaaaattacataacacagcacccaaaagtagtactagttatttttcccttttcttattagagcagcttgggcacattttgatgtccgtgggaatgaacaggtagagtgggtggtattgaagccagaggggagagaagggacccacagatggggagagaagtcttgggtgtttgttttatctcaaaccccagggaaaggagggaacaggtagggctgtaggaaagtttgcagctatggggtacacagttaaagggagtgtcttctcatggtcttgatgcaggcctggaggtcgtttgctataggggtgaaggtcctgatgtacactgtggctgtaagatgccgtgccctctttgccaccagcctgtggcagccccgatgttacaccagggcaggtgggcagtttaatgtatctcaggaccgatgacctgcactgcccacctgtgaggctccnnnnnnnnnnnnnnnnnnnnnnnnnnnnnnnnnnnnnnnnnnnnnnnnnnnnnnnnnnnnnnnnnnnnnnnnnnnnnnnnnnnnnnnnnnnnnnnnnnnnnnnnnnnnnnnnnnnnnnnnnnnnnnnnnnnnnnnnnnnnnnnnnnnnnnnnnnnnnnnnnnnnnnnnnnnnnnnnnnnnnnnnnnnnnnnnnnnnnnnnnnnnnnnnnnnnnnnnnnnnnnnnnnnnnnnnnnnnnnnnnnnnnnnnnnnnnnnnnnnnnnnnnnnnnnnnnnnnnnnnnnnnnnnnnnnnnnnnnnnnnnnnnnnnnnnnnnnnnnnnnnnnnnnnnnnnnnnnnnnnnnnnnnnnnnnnnnnnnnnnnnnnnnnnnnnnnnnnnnnnnnnnnnnnnnnnnnnnnnnnnnnnnnnnnnnnnnnnnnnnnnnnnnnnnnnnnnnnnnnnnnnnnnnnnnnnnnnnnnnnnnnnnnnnnnnnnnnnnnnnnnnnnnnnnnnnnnntgtgtgcctttggaccaggcatcttgcttctctgaccctatgtacagctgcagaagaattccttgcaggttgctgtaaggatttggagggaaactgttgcccagcacacagtacacatgccaggagccatcgtttccaaggtgtacttctcctgcaaacgtggatctacgtcccacttggctgctgagaccagctgccgtgatcttgtagttgtttaatgctttgttctccttgaggcagcaaagtggtggcacctgaccggagcatgtagccacctatgacttcctgagtggggtggtgcagggagggccctgaggagtctgtggtcctaaggccttggatttcatcagggctttcctgctccttctggttgcctcagtcccaggcaagatagggtcccagaatcttacagcctagaagccacctgttgcgacttcttttttacagatggggtcatcagaacccactgtgaggaagtgacttctctttgagatcattcagacactccacacagagcagagcaaaagtgcctagaacttgaaattttggacttgccttcaacaccctggggatttccaccaggaannnnnnnnnnnnnnnnnnnnnnnnnnnnnnnnnnnnnnnnnnnnnnnnnnnnnnnnnnnnnnnnnnnnnnnnnnnnnnnnnnnnnnnnnnnnnnnnnnnnnnnnnnnnnnnnnnnnnnnnnnnnnnnnnnnnnnnnnnnnnnnnnnnnnnnnnnnnnnnnnnnnnnnnnnnnnnnnnnnnnnnnnnnnnnnnnnnnnnnnnnnnnnnnnnnnnnnnnnnnnnnnnnnnnnnnnnnnnnnnnnnnnnnnnnnnnnnnnnnnnnnnnnnnnnnnnnnnnnnnnnnnnnnnnnnnnnnnnnnnnnnnnnnnnnnnnnnnnnnnnnnnnnnnnnnnnnnnnnnnnnnnnnnnnnnnnnnnnnnnnnnnnnnnnnnnnnnnnnnnnnnnnnnnnnnnnnnnnnnnnnnnnnnnnnnnnnnnnnnnnnnnnnnnnnnnnnnnnnnnnnnnnnnnnnnnnnnnnnnnnnnnnnnnnnnnnnnnnnnnnnnnnnnnnnnnnnnnnnnnnnnnnnnnnnnnnnnnnnnnnnnnnnnnnnnnnnnnnnnnnnnnnnnnnnnnnnnnnnnnnnnnnnnnnnnnnnnnnnnnnnnnnnnnnnnnnnnnnnnnnnnnnnnnnnnnnnnnnnnnnnnnnnnnnnnnnnnnnnnnnnnnnnnnnnnnnnnnnnnnnnnnnnnnnnnnnnnnnnnnnnnnnnnnnnnnnnnnnnnnnnnnnnnnnnnnnnnnnnnnnnnnnnnnnnnnnnnnnnnnnnnnnnnnnnnnnnnnnnnnnnnnnnnnnnnnnnnnnnnnnnnnnnnnnnnnnnnnnnnnnnnnnnnnnnnnnnnnnnnnnnnnnnnnnnnnnnnnnnnnnnnnnnnnnnnnnnnnnnnnnnnnnnnnnnnnnnnnnnnnnnnnnnnnnnnnnnnnnnnnnnnnnnnnnnnnnnnnnnnnnnnnnnnnnnnnnnnnnnnnnnnnnnnnnnnnnnnnnnnnnnnnnnnnnnnnnnnnnnnnnnnnnnnnnnnnnnnnnnnnnnnnnnnnnnnnnnnnnnnnnnnnnnnnnnnnnnnnnnnnnnnnnnnnnnnnnnnnnnnnnnnnnnnnnnnnnnnnnnnnnnnnnnnnnnnnnnnnnnnnnnnnnnagccttctacactgccaagtatggctacaagttatgcctgcggctgtacctgaatggagatggcactggaaagaggacccacctgtcgcttttcatcgtgatcatgagaggggagtatgacgcgttgctgccatggcctttccggaacaaggtnnnnnnnnnnnnnnnnnnnnnnnnnnnnnnnnnnnnnnnnnnnnnnnnnnnnnnnnnnnnnnnnnnnnnnnnnnnnnnnnnnnnnnnnnnnnnnnnnnnnnnnnnnnnnnnnnnnnnnnnnnnnnnnnnnnnnnnnnnnnnnnnnnnnnnnnnnnnnnnnnnnnnnnnnnnnnnnnnnnnnnnnnnnnnnnnnnnnnnnnnnnnnnnnnnnnnnnnnnnnnnnnnnnnnnnnnnnnnnnnnnnnnnnnnnnnnnnnnnnnnnnnnnnnnnnnnnnnnnnnnnnnnnnnnnnnnnnnnnnnnnnnnnnnnnnnnnnnnnnnnnnnnnnnnnnnnnnnnnnnnnnnnnnnnnnnnnnnnnnnnnnnnnnnnnnnnnnnnnnnnnnnnnnnnnnnnnnnnnnnnnnnnnnnnnnnnnnnnnnnnnnnnnnnnnnnnnnnnnnnnnnnnnnnnnnnnnnnnnnnnnnnnnnnnnnnnnnnnnnnnnnnnnnnnnnnnnnnnnnnnnnnnnnnnnnnnnnnnnnnnnnnnnnnnnnnnnnnnnnnnnnnnnnnnnnnnnnnnnnnnnnnnnnnnnnnnnnnnnnnnnnnnnnnnnnnnnnnnnnnnnnnnnnnnnnnnnnnnnnnnnnnnnnnnnnnnnnnnnnnnnnnnnnnnnnnnnnnnnnnnnnnnnnnnnnnnnnnnnnnnnnnnnnnnnnnnnnnnnnnnnnnnnnnnnnnnnnnnnnnnnnnnnnnnnnnnnnnnnnnnnnnnnnnnnnnnnnnnnnnnnnnnnnnnnnnnnnnnnnnnnnnnnnnnnnnnnnnnnnnnnnnnnnnnnnnnnnnnnnnnnnnnnnnnnnnnnnnnnnnnnnnnnnnnnnnnnnnnnnnnnnnnnnnnnnnnnnnnnnnnnnnnnnnnnnnnnnnnnnnnnnnnnnnnnnnnnnnnnnnnnnnnnnnnnnnnnnnnnnnnnnnnnnnnnnnnnnnnnnnnnnnnnnnnnnnnnnnnnnnnnnnnnnnnnnnnnnnnnnnnnnnnnnnnnnnnnnnnnnnnnnnnnnnnnnnnnnnnnnnnnnnnnnnnnnnnnnnnnnnnnnnnnnnnnnnnnnnnnnnnnnnnnnnnnnnnnnnnnnnnnnnnnnnnnnnnnnnnnnnnnnnnnnnnnnnnnnnnnnnnnnnnnnnnnnnnnnnnnnnnnnnnnnnnnnnnnnnnnnnnnnnnnnnnnnnnnnnnnnnnnnnnnnnnnnnnnnnnnnnnnnnnnnnnnnnnnnnnnnnnnnnnnnnnnnnnnnnnnnnnnnnnnnnnnnnnnnnnnnnnnnnnnnnnnnnnnnnnnnnnnnnnnnnnnnnnnnnnnnnnnnnnnnnnnnnnnnnnnnnnnnnnnnnnnnnnnnnnnnnnnnnnnnnnnnnnnnnnnnnnnnnnnnnnnnnnnnnnnnnnnnnnnnnnnnnnnnnnnnnnnnnnnnnnnnnnnnnnnnnnnnnnnnnnnnnnnnnnnnnnnnnnnnnnnnntctgaccctcaaaggagatgccgcacaggacagactggagagagaagcctgggcaatgctgcctgcctggtggtggcccacacctgtcttctcacnttagaggccacactcaactttccaaagaccctgagacaagtcaggatcctaccactcccctactgccttcctgacagcttactcttcctccatccgctgagcctgtgctagacttcactcctcaaaccattagggttgcttctataaaatgggtcagtagcccttcctattctctccagcccagcatacaggaggatcaaaggaggtgagggagcatcatggcacagcagactcaatgggtcagaaacccagcccagccgggctctaagcctggcatcctgtcatgcttagcccttcaggagaagatgaggggaagcccctcccttgccctgtccagctctaggggttttcaggaggcccagtcgcaataatggagcactaagtgcttttatgtgcaatgacgtcgtccatgcacaatggcagcaaacattctggggctgctttttcttgttcccagctgtgacagtgtggcagcagagactgtggaggcagtggagactgacttcttcccgctggcagctggatgtcacacatgaaggtctggcctagcgagcgatgggtctaggccctgaagctgatgtcctagcaataacctctggatccctactcaccaagtgttgggtcaagggggatttgtagaacaagcccccatgagaaacagttgttactgtacacttttgattgtctgtttctgatggcaaaagatacataccctcttcaaagagcatgagatgcagc

SEQ ID NO: 21583 - DNA, 235 bp, Macaca Mulatta
ttcttccacataccaccccatggccccctggttaacgaggttctttctgcagaaacttccaaaattactttgcatgaaagaccacgtggatcgctactcattcccagagaaagaggagagtcaaccagtagtgaaaggcaaagtcctcaaaaaaaagaaacagaaacagcttagtgatggagaaaaagttctggttgcttttttggaaaaagctgctgattctattagatacatt

SEQ ID NO: 21584 - DNA, 450 bp, Macaca Mulatta
  misc_feature (1)...(450): n = A,T,C or G
aacatggaggagcgggagcggggggcgaggtcggctcgcgccgcgagtcccgcgcgcccgcccagcccgcggctggatgtcagctctgacagcttcgacccgctgctggcgctgtacgcgccccgcctgcctcccatcccctaccccaatgccccctgcttcaacaacgtggcggagtacgagagcttcctcaggannnnnnnnnnnnnnnnnnnnnnnnnnnnnnnnnnnnnnnnnnnnnnnnnnnnnnnnnnnnnnttccctccgcgcccgggccctcaggcaggactcgccgccgcccggacgcgcccgccccggaccccgagcgcatccagcgtctccgccgtctcatggtggccaaagaggaaggggacggagccgcaggagcgggccggaggggtcccggtcgaagcaggaaggcgccacgcaacgtgctcacgcgaatgccct

SEQ ID NO: 21585 - DNA, 617 bp, Macaca Mulatta
gggtgaatcaaattggcttctagaaatcagatgcccagatgatccaggactagtttgctatctcatctggaacctacactaagagatgcaatcagcatcttacagtaaatattcatggaagctaaaaaatttacctcttttccttttccctttccccttaaaacaccagacaaatcgataacttctatatatatatctgtaaaaatgtattttctgttaatttttttggccaatttattttctcccactttgtcattaaaatcaaatgtctaactggctcaccacatagtgtgctttgattgtattttggctttgactctgccatttctgaaacgtgggggaggatggaggcaactgacctctccaattgctgtgttgtattcctacccaatttcctgggcagttgatgcatctctgggaaaaacaccagaaagcttgctgaaatggaaaacttggaagaattgtgcatctcttaggctttcatttggatgggcctgccttaacattgtttgaaatgcagcgtgagtagctcttttgtttactgtttataccccttaattggcatgtcaactcctgtacttcccttactatattaacctttcttgagatgcattgtc

SEQ ID NO: 21586 - DNA, 818 bp, Macaca Mulatta
  misc_feature (1)...(818): n = A,T,C or G
gggagcaccatggcggttggcaagaacaagcgccttacgaaaggcggcaaaaagggagccaagaagaaagtggttgatccattttctaagaaagattggtatgatgtgaaagcacctgctatgttcaatataagaaatattggaaagacgctcgtcaccaggacccaaggaaccaaaattgcatctgatggtctcaagggtcgtgtgtttgaagtgagtcttgctgatttgcagaatgatgaagttgcatttagaaaattcaagctgattactgaagatgttcagggcaaaaactgcctgactaacttccatggcatggatcttacccgtgacaaaatgtgttccatggtcaaaaagtggcagacaatgattgaagctcatgttgatgtcaagactaccgatggttacttgcttcgtctgttctgtgttggttttactaaaaaacgcaacaatcagatacggaagacctcttatgctcagcaccaacaggtccgtcaaatccggaagaagatgatggaaatcatgacccgagaggtgcagacaaatgacttgaaagaagtggtcaataaattgtaagtgtttctttgcttccctccggcacaaaaccttgagatattgattattcccccaaaaagggcaaaaccctttgaaaacaaggaaaaagcctgtttaaaatcctggtttgggaaatccctcaaagcataaatcccttttacgggaaaaaagaaaactccccccccnnnnnnnnnnnnnnnnnnngtccaaaatctttttctttgttcccccaatggttgcgagggccccggggggcgcactcc

SEQ ID NO: 21587 - DNA, 784 bp, Macaca Mulatta
  misc_feature (1)...(784): n = A,T,C or G
ggcgactttcttctttacgaaggtctcaagcttgttgctcccaccgggttctggagaacgccatcacctcgctgcttaaaattaaaccacaggttccattatgggtcgacttgatgggaaagtcatcatcctgacagccgctgctcaggggattggccaagcagctgccttagcttttgcaagagaaggtgccaaagtcatagccacagacattaatgagtccaaacttcaggaactggaaaagtacccgggcattcaaactcgtgtccttgatgtcacaaagaagaaacaaattgatcagtttgccaatgaagttgagagagttgatgttctctttaatgttgctggttttgtccatcatggaacagtcctggattgtgaggagaaagactgggacttctcgatgaatctcaatgtgcgcagcatgtacctgatgatcaaggcattccttcctaaaatgcttgctcagaaatctggcaatattatcaacatgtcttctgtggctttcagcatcaaaggagttgtgaacagatgtgtgtacagcacaaacaaggcagctgtgatttggctcacaaaatctgtggctgcagatttcatccagcagggcatcaggtgcaactgtgtggtggcccaggaacgggttgataccccatcttctacaagaaagaaatacaaggccagaggaaaatccctgaagaagcacgggaatgattttcctgaaagagacaaaaagaccgggaaagatttgcaaactggcagaaangaaatagcccatgcctctgnc

SEQ ID NO: 21588 - DNA, 396 bp, Macaca Mulatta
  misc_feature (1)...(396): n = A,T,C or G
ggactctggggcctggtgaataatgctggcatctccttgcctgtggcccccaatgagttgctgaccaagcaggactttgtgacggtactggacgtgaacttgttgggggtgatcgacgtgactctgagcctgctgcccttagtgaggaaggccaggggccgtgtggtcaatgtctccagtnnnnnnnnnnnnnnnnnnnnnnnnnnnnnnnnnnnnnnnnnnnnnnnnnnnnnnnnnnnnnnnnnnnnnnnnnnnnnaggagggaactctcctactttggggtgaaggtggctatgattgagcctggctatttcaagacggctttgaccagtaaggagagattcttaaagagcttcctggagatttgggaccagtccagtccagaagtcaaggagg

SEQ ID NO: 21589 - DNA, 2106 bp, Macaca Mulatta
  misc_feature (1)...(2106): n = A,T,C or G
atttgcacatcataccatccagatnnnnnnnnnnnnnnnnnnnnnnnnnnnnnnnnnnnnnnnnnnnnnnnnnnnnnnnnnnnnnnnnnnnnnnnnnnnnnnnnnnnnnnnnnnnnnnnnnnnnnnnnnnnnnnnnnnnnnnnnnnnnnnnnnnnnnnnnnnnnnnnnnnnnnnnnnnnnnnnnnnnnnnnnnnnnnnnnnnnnnnnnnnnnnnnnnnnnnnnnnnnnnnnnnnnnnnnnnnnnnnnnnnnnnnnnnnnnnnnnnnnnnnnnnnnnnnnnnggaacctatggactgtcatgccagcataacccactgattatcaatgtgacccatcaccagaatatccttttccaccataccacctcagtgctgctgaatttctcatccccacgggtcggcatctcagctgtggctctaaggacattctccnnnnnnnnnnnnnnnnnnnnnnnnnnnnnnnnnnnnnnnnnnnnnnnnnnnnnnnnnnnnnnnnnnnnnnnnnnnnnnnnnnnnnnnnnnnnnnnnnnnnnnnnnnnnnnnnnnnnnnnnnnnnnnnnnnnnnnnnnnnnnnnnnnnnnnnnnnnnnnnnnnnnnnnnnnnnnnnnnnnnnnnnnnnnnnnnnnnnnnnnnnnnnnnnnnnnnnnnnnnnnnnnnnnnnnnnnnnnnnnnnnnnnnnnnnnnnnnnnnnnnnnnnnnnnnnnnnnnnnnnnnnnnnnnnnnnnnnnnnnnnnnnnnnnnnnnnnnnnnnnnnnnnnnnnnnnnnnnnnnnnnnnnnnnnnnnnnnnnnnnnnnnnnnnnnnnnnnnnnnnnnnnnnnnnnnnnnnnnnnnnnnnnnnnnnnnnnnnnnnnnnnnnnnnnnnnnnnnnnnnnnnnnnnnnnnnnnnnnnnnnnnnnnnnnnnnnnnnnnnnnnnnnnnnnnnnnnnnnnnnnnnnnnnnnnnnnnnnnnnnnnnnnnnnnnnnnnnnnnnnnnnnnnnnnnnnnnnnnnnnnnnnnnnnnnnnnnnnnnnnnnnnnnnnnnnnnnnnnnnnnnnnnnnnnnnnnnnnnnnnnnnnnnnnnnnnnnnnnnnnnnnnnnnnnnnnnnnnnnnnnnnnnnnnnnnnnnnnnnnnnnnnnnnnnnnnnnnnnnnnnnnnnnnnnnnnnnnnnnnnnnnnnnnnnnnnnnnnnnnnnnnnnnnnnnnnnnnnnnnnnnnnnnnnnnnnnnnnnnnnnnnnnnnnnnnnnnnnnnnnnnnnnnnnnnnnnnnnnnnnnnnnnnnnnnnnnnnnnnnnnnnnnnnnnnnnnnnnnnnnnnnnnnnnnnnnnnnnnnnnnnnnnnnnnnnnnnnnnnnnnnnnnnnnnnnnnnnnnnnnnnnnnnnnnnnnnnnnnnnnnnnnnnnnnnnnnnnnnnnnnnnnnnnnnnnnnnnnnnnnnnnnnnnnnnnnnnnnnnnnnnnnnnnnnnnnnnnnnnnnnnnnnnnnnnnnnnnnnnnnnnnnnnnnnnnnnnnnnnnnnnnnnnnnnnnnnnnnnnnnnnnnnnnnnnnnnnnnnnnnnnnnnnnnnnnnnnnnnnnnnnnnnnnnnnnnnnnnnnnnnnnnnnnnnnnnnnnnnnnnnnnnnnnnnnnnnnnnnnnnnnnnnnnnnnnnnnnnnnnnnnnnnnnnnnnnnnnnnnnnnnnnnnnnnnnnnnnnnnnnnnnnnnnnnnnnnnnnnnnnnnnnnnnnnnnnnnnnnnnnnnnnnnnnnnnnnnnnnnnnnnnnnnnnnnnnnnnnnnnnnnnnnnnnnnnnnnnnnnnnnnnnnnnnnnnnnnnnnnnnnnnnnnnnnnnnnnnnnnnnnnnnnnnnngaaatggaggaaggaggaagagcatgaaggatcttataagaaatgccagaggatattgataggtgccaactagttcatcgaatagcccaagtaggagagaatcataggcaaaagtttctttaaagtggcagttgattaacatggaaggggaaatacaatagatacataaggaccctcctccctcatttatattctattaaatcctatcttcaactcttaccctgctccccactctacaccctgccaactattcagtcccacccaacttgtaaaccattaccaaaat

SEQ ID NO: 21590 - DNA, 822 bp, Macaca Mulatta
  misc_feature (1)...(822): n = A,T,C or G
gcctatatgcatccaacagcaatggcaagatcaaggggttcaatccagtcttcagggccaacaatacaggattatctgaatcgaccaaggcctacctggaaagaagtaaaagagcaaccagaaaagaaaaagaaaggctccagggctttggctgaataaaatgaatgagaactggaagaaagaactagaaaaacacagggggaaattgttaagtggaagtgagagctcatcnnnnnnnnnnnnnnnnnnnaaaaaagaaaagaagaaatctgataggcattcatcttcttcttcatcaaggtctgattcttccagcagttcttcagattctgaagataaggataagagataaggaaaacagagaaagaagaaccgttcacataaatcttctgaaaggtccaaatcagaaactgaatcagacagtaaggatagttttaaaaagannnnnnnnnnnnnnnnnnnnnnnnnnnnnnnnnngatattaaaggactcagcaaaaagagaaagatgtattctgaagataaacctttatcatcggagtccttgtcagaatcagagtatattgaggaggtacgagcaaaaaagnnnnnnnnnnnnnnnnnnnnnnnnnnnnnnnnnnnnnnnnnnnnnnnnnnnnnnnnnnnnnnnnnnnnnnnnnnnnnnnnnnnnnnnnnnnnnctagttcaagtcctgactcaccataacactaagaaaaatcaggattcccttataaagaaagtgcaatgtctgaggaaatttcaactgtgaaaactacaacatatttacgaaaatgcatgaattttcttctttttagaattattc

SEQ ID NO: 21591 - DNA, 831 bp, Macaca Mulatta
  misc_feature (1)...(831): n = A,T,C or G
ggggaactgcggttgcttctgcagctgaggtacagcggcggtttctgaggctcctgaccggcgaccaacggagctgccgtggcgtcttcacacgcaaccatgaagttgaaggacacaaaatcaaggccaaaggcatcaaactatggcaaatttcagacaaagggaatcaaagttgtgggaaaatggaaggaagtgaagattgacccaaatatgtttgtagatggacagatggatgatttggtatgctttgaggaattgacagattaccagttggtctctcctgccaagaatccctcgagtctcttctcaaaggaggcacccaagagaaaggcacaagctgtttcagaagaagaggaggagggagagtctagctcaccaaagaaaaagatgaagttgaagaaaagtaaaaatgtagcaactgaaggaactagtacccagaaagaggttgaagtcaaagattctgagctggaggcccagggagatggcatggtttgtgatgatccggaggctggagagaagacatcagaaaacctggtccaaactgctccnnnnnnnnnnnnnnnnnnnnnnnnnnnnngtttggagccttctcagagcactgctgttaaggtgcccaaaaaagtgaagacatggattcctgaagttcatgatcagaaggcagatgtgtcagcttggaaaggacctgtttgttcccaggccggttctccgagcactcagctttctaggcttctctgcacccccaccgatccaagcccctgacctgggcacctgccatcccgtgaaagactgggacatcccttggggcctgctgaagacagggaagtggggaaa

SEQ ID NO: 21592 - DNA, 670 bp, Macaca Mulatta
  misc_feature (1)...(670): n = A,T,C or G
cgctctctgcccgccagcccgtctacccccagcatgagcggcctgcgcgtctacagcacgtcnggtcaccggctcccgcgaaatcaagtcccagcagagcgaggtgacccgaatcctggatgggaagcgcatccaataccagctagtggacatctcccaggacaacgccctgagggatgagatgcgcgccttggcgggcaaccccaaggccaccccaccccagaattgtcaacggggaccagtactgtggggactatgagctcttcgtggaggccgtggaacaaaacacgctgcaggagttcctgaagctggcctgagtcaagcctgtccagagttcccctgctggactccatcaccacactcccccaagccttcacctggccatgaaggaccttttgaacaactccctgtaattcctatcctaaccttagagtccctcccgcaatccaggccacttctcctccctcctctctaaatgtagtcccctcttctccatccaaaggcaacattccttacccattagtctcagaaattgtcttaagcaacagacccaaatgctggctgtccccagccaagcattggggccgccatcctgcctggcactggctgatgggcacctctattggttccatcagccagagctctgccaaaggccccgcagtccctctcc

SEQ ID NO: 21593 - DNA, 937 bp, Macaca Mulatta
atacagaatctatctctcattccacacttggggccactcatgggcagcagaagtctgacagttcttttattctggggaatccagcaaccccagcaccagctataggcttaccatctccctcagcccagccactgagtggcagcataattccaccaggttttgcagagttaacatcaccatattctgcattgggcacacctattaatgccgagcctgccaagagtcacaatgcaagtgctttccccaatggcacagcaaagacttctggatttagagttgccactgggatgcctggcactggagacagcacctcactggttggaaatactattctaggcccacaagtgattatgggacctggaacccctatggatggtgggagcattggattcaccatgtctgccccaggccccagttccacatcaggagaactcagcactggacaagaacagagtgggacacccagcaccacttctgttttcccatttggtcgagtagcctgggacccaactggccacagcatggctgctgcaccacaaggggctaataacattcctgtatttggatttacttctgctgccacctacattcctggtttggacccacctacccagaattcaggcagcggtatgggaggggatggcaccaaacccatggttggaggcccttgtgttcctgcttttcaacagtgcatcctgcagcacacatggacagagaaaaaattctacacttcaagcacccaccactatgaacaagaaacatacgttaggagacatgtctgtttccaacttccataaaagcacctgtggttcacctgaccacaccacatcagttgtggttgtaaacaccagcattatccctttgtatggtcatgcttccagtttcaccttcatgccaagtgcctgccacatacctctccagaactcaggttgtgcac

SEQ ID NO: 21594 - DNA, 125 bp, Macaca Mulatta
aggtagcgctggtggattggaatcttgaagcaggtgtacagtgtaaagctgccctggatgagaagtttgaacctcagaagactttgttcatccagtgcgatgtggctgaccagcaacaactgaga

SEQ ID NO: 21595 - DNA, 3476 bp, Macaca Mulatta
  misc_feature (1)...(3476): n = A,T,C or G
gatgggcaactctcaaaaaaggtacaaacaattgaaggatggataccatggcatatggtaaaagcatgtcgaaaggaaaataagnagaaagccaggaatctcaggatgaatcagtctacatctagatcagatggtggcagtgaagaaagcttatctcaagaccataatcatcatgaaaatgagagaagatggcagcaagagcgtctccacagagaagaggcctattatcagtttattaatgaactcaatgatgaagattatcggcttatgagagaccataaccttttaggcacccctgnnnnnnnnnnnnnnnnnnnnnnnnnnnnnnnnnnnnnnnnnnnnnnnnnnnnnnnnnnnnnnnnnnnnnnnnnnnnnnnnnnnnnnnnnnnnnnnnnnnnnnnnnnnnnnnnnnnnnnnnnnnnnnnnnnnnnnnnnnnnnnnnnnnnnnnnnnnnnnnnnnnnnnnnnnnnnnnnnnnnnnnnnnnnnnnnnnnnnnnnnnnnnnnnnnnnnnnnnnnnnnnnnnnnnnnnnnnnnnnnnnnnnnnnnnnnnnnnnnnnnnnnnnnnnnnnnnnnnnnnnnnnnnnnnnnnnnnnnnnnnnnnnnnnnnnnnnnnnnnnnnnnnnnnnnnnnnnnnnnnnnnnnnnnnnnnnnnnnnnnnnnnnnnnnnnnnnnnnnnnnnnnnnnnnnnnnnnnnnnnnnnnnnnnnnnnnnnnnnnnnnnnnnnnnnnnnnnnnnnnnnnnnnnnnnnnnnnnnnnnnnnnnnnnnnnnnnnnnnnnnnnnnnnnnnnnnnnnnnnnnnnnnnnnnnnnnnnnnnnnnnnnnnnnnnnnnnnnnnnnnnnnnnnnnnnnnnnnnnnnnnnnnnnnnnnnnnnnnnnnnnnnnnnnnnnnnnnnnnnnnnnnnnnnnnnnnnnnnnnnnnnnnnnnnnnnnnnnnnnnnnnnnnnnnnnnnnnnnnnnnnnnnnnnnnnnnnnnnnnnnnnnnnnnnnnnnnnnnnnnnnnnnnnnnnnnnnnnnnnnnnnnnnnnnnnnnnnnnnnnnnnnnnnnnnnnnnnnnnnnnnnnnnnnnnnnnnnnnnnnnnnnnnnnnnnnnnnnnnnnnnnnnnnnnnnnnnnnnnnnnnnnnnnnnnnnnnnnnnnnnnnnnnnnnnnnnnnnnnnnnnnnnnnnnnnnnnnnnnnnnnnnnnnnnnnnnnnnnnnnnnnnnnnnnnnnnnnnnnnnnnnnnnnnnnnnnnnnnnnnnnnnnnnnnnnnnnnnnnnnnnnnnnnnnnnnnnnnnnnnnnnnnnnnnnnnnnnnnnnnnnnnnnnnnnnnnnnnnnnnnnnnnnnnnnnnnnnnnnnnnnnnnnnnnnnnnnnnnnnnnnnnnnnnnnnnnnnnnnnnnnnnnnnnnnnnnnnnnnnnnnnnnnnnnnnnnnnnnnnnnnnnnnnnnnnnnnnnnnnnnnnnnnnnnnnnnnnnnnnnnnnnnnnnnnnnnnnnnnnnnnnnnnnnnnnnnnnnnnnnnnnnnnnnnnnnnnnnnnnnnnnnnnnnnnnnnnnnnnnnnnnnnnnnnnnnnnnnnnnnnnnnnnnnnnnnnnnnnnnnnnnnnnnnnnnnnnnnnnnnnnnnnnnnnnnnnntagaactcgctccagagtagggctagcagaaaatacagtcactattgaaagcaatagtgggggctttcgccgaaccatttctcgtttagagcggtcaggtattcgaacctatgttagtaccataacagttcctcttcgtaggatttctgagaatgagctggttgagccatcatcagtggctcttcggtcaattttaaggcagatcatgactgggtttggagaactgagttctctaatggaggctgaatctgagtcagagcttcagagaaatggccagcatttcccagagatgcactcagaactaagtaacttaggtacagttaacaacaggaaccagcacagggaaggctcctctcaagacaggcaggcccaaggagtcagcactgaaatgcatggtgaaaacgagaccacccagcctcatactggaaacagtgacagtaggggtggcaggcagtcgcgaaattcaaacaatttagttgaaactggaacactacctattcttcgccttgctcacttttttttactaaatgaaggtgatgatgatgatcgaatacgtggtttaaccaaagagcagattgacaatctttccnnnnnnnnnnnnnnnnnnnnnnnnnnnnnnnnnnnnnnnnnnnnnnnnnnnnnnnnnnnnnnnnnnnnnnnnnnnnnnnnnnnnnnnnnnnnnnnnnnnnnnnnnnnnnnnnnnnnnnnnnnnnnnnnnnnnnnnnnnnnnnnnnnnnnnnnnnnnnnnnnnnnnnnnnnnnnnnnnnnnnnnnnnnnnnnnnnnnnnnnnnnnnnnnnnnnnnnnnnnnnnnnnnnnnnnnnnnnnnnnnnnnnnnnnnnnnnnnnnnnnnnnnnnnnnnnnnnnnnnnnnnnnnnnnnnnnnnnnnnnnnnnnnnnnnnnnnnnnnnnnnnnnnnnnnnnnnnnnnnnnnnnnnnnnnnnnnnnnnnnnnnnnnnnnnnnnnnnnnnnnnnnnnnnnnnnnnnnnnnnnnnnnnnnnnnnnnnnnnnnnnnnnnnnnnnnnnnnnnnnnnnnnnnnnnnnnnnnnnnnnnnnnnnnnnnnnnnnnnnnnnnnnnnnnnnnnnnnnnnnnnnnnnnnnnnnnnnnnnnnnnnnnnnnnnnnnnnnnnnnnnnnnnnnnnnnnnnnnnnnnnnnnnnnnnnnnnnnnnnnnnnnnnnnnnnnnnnnnnnnnnnnnnnnnnnnnnnnnnnnnnnnnnnnnnnnnnnnnnnnnnnnnnnnnttcatgaaagagtatttggctgaatgtttgctatacatacgttacttgaaatgttaaatatacagcataccatgtatgcatatataggtatataattttaaggttaaaagattcagtctacaagtctggctcttatttaagctcttcggctaaatctgcatatggcacaatgtttaatattggcaagatcatctcagagagaaaggggattcagatatcattttaatatagagataatttactgaagcatctctgacaatctgacttagtagaaagcaagcaatatataacactgaacaagcatctattcagtaatggaaaatttagatccatataggttatttgacttgtggtcagccttttggtaacattttttgaaagtgcaaacaattctttggattattaaataaggtatacaatatgcatggtttctcaaatttagttttaagatctaaaaaaaagtctataaagaatcagatgcatagatactatgttaagtttacttggaggctaaaaatctccaatgaaaacaaaacaaaaacctttaagagaatgtagagtttatataaacacagagtacgcattgaagatctgtttctaccaataaacattaaaacaaagactgt

SEQ ID NO: 21596 - DNA, 324 bp, Macaca Mulatta
ggaaatttgtagaacagaaatgttttagttaaaatgtgactttcagaaagggaaaatcagggtacagccttagtctgtgttccccaaataatcagactttaaagaattcttcaatccccaagggacagttatggtcctttgattctctgctgtggcagtaggtgcctcatgcccttccagtgcaatgcaagccctccacgcctcacccccgcgaggatgtcagcagcagcctgaggctaaatccaggttgaaaaaagagtaacttgaaaaaatatatttgcacacacagaattttgtttttcttccaagttggttaagacatat

SEQ ID NO: 21597 - DNA, 77 bp, Macaca Mulatta
ctctggagctcagactttaacactaagcaagattgtgccacatatatgcaacttacttggagatccaaacagccagg

SEQ ID NO: 21598 - DNA, 184 bp, Macaca Mulatta
caggtccttggagaccagcctggtgccactctcagaccccaagctggccgtgctcatcaccaactctaacgtccgccactccctgggctccagtgagtaccctgtgcggcggcgccagtgtgaagaagtggcccaggcgctgggcaaggagagcctccgggaggtgcagctggaagagctagag

SEQ ID NO: 21599 - DNA, 638 bp, Macaca Mulatta
taaaaattaatttaaatcaggaggggtttatttcatttgattttgccccaaaaaagtggggtcttaaagccatggaaatagggtttttcccacttggcaaagggcaggatccaattcctatggagcctcagtccttgacattgtttggccgtcccattgctagggcaagtggaggttgcttttggcagattgggggtttctaatattgcactgttaagagctgagcacacaggttcttctgaatcgggtcaagctgatttccaactgggctgtcccagggatctgaatatgctagtaaactgaatgcatccttcaacatttttttatttgcagtgttcttgccgcagtctctccttagctgttcactcatcgcttgcagctctcgtccaaagtggatcattctttctatggcggcctgacttcctccacacaactggcgtctcaactgacttgaatcaacttccatttcggtgtcacaatcttccatttcgtggtcatgtttagagctaccatttaggaaaccattggatgaagtttctccaactccattggagtagtgatctgtttccatgtctacatcattactggtgaagttattaacttgctgtgatcttgacatatttatactgttcagtccc

SEQ ID NO: 21600 - DNA, 1356 bp, Macaca Mulatta
  misc_feature (1)...(1356): n = A,T,C or G
gtgtctagaatgctggagcgtaggtgaaaggacaaaagccagacacaattcgacatgagggatccactgacagattgtccgnnnnnnnnnnnnnnnnnnnnnnnnnnnnnnnnnnnnnnnnnnnnnnnnnnnnnnnnnnnnnnnnnnnnnnnnnnnnnnnnnnnnnnnnnnnnnnnnnnnnnnnnnnnnnnnnnnnnnnnnnnnnnnnnnnnnnnnnnnnnnnnnnnnnnnnnnnnnnnnnnnnnnnnnnnnnnnnnnnnnnnnnnnnnnnnnnnnnnnnnnnnnnnnnnnnnnnnnnnnnnnnnnnnnnnnnnnnnnnnnnnnnnnnnnnnnnnnnnnnnnnnnnnnnnnnnnnnnnnnnnnnnnnnnnnnnnnnnaagaagaaattaatggttagtaccaagaaacatgaagcacttttccagcttgtagaaagctccaagcaatctacgactgagaaggagaggcggaagnagctcctcaataaactgacaaaatcaactgagaagttggaaaaggaagatgaaaattactaccaaaaaaacatggtgggttattctaccagactgaaatgggaaaacacactagagaactgctaccannnnnnnnnnnnnnnnnnnnnnnnnnnnnnnnnnnnnnnnnnnnnnnnnnnnnnnnnnnnnnnnnnnnnnnnnnnnnnnnnnnnnnnnnnnnnnnnnnnnnnnnnnnnnnnnnnnnnnnnnnnnnnnnnnnnnnnnnnnnnnnnnnnnnnnnnnnnnnnnnnnnnnnnnnnnnnnnnnnnnnnnnnnnnnnnnnnnnnnnnnnnnnnnnnnnnnnnnnnnnnnnnnnnnnnnnnnnnnnnnnnnnnnnnnnnnnnnnnnnnnnnnnnnnnnnnnnnnnnnnnnnnnnnnnnnnnnnnnnnnnnnnnnnnnnnnnnnnnnnnnnnnnnnnnnnnnnnnnnnnnnnnnnnnnnnnnnnnnnnnnnnnnnnnnnnnnnnnnnnnnnnnnnnnnnnnnnnnnnnnnnnnnnnnnnnnnnnnnnnnnnnnnnnnnnnnnnnnnnnnnnnnnnnnnnnnnnnnnnnnnnnnnnnnnnnnnnnnnnnnnnnnnnnnnnnnnnnnnnnnnnnnnnnnnnnnnnnnnnnnnnnnnnnnnnnnnnnnnnnnnnnnnnnnnnnnnnnnnnnnnnnnnnnnnnnnnnnnnnnnnnnnnnnnnnnnnnnnnnnnnnnnnnnnnnnnnnnnnnnnnnnnnnnnnnnnnnnnnnnnnnnnnnnnnnnnnnnnnnnnnnnnccctggtgcagcccagctcagcagcagactttgcaaggccttatattcttttcaagccaggcaagatgatgagttgaatttggaaaaggg

SEQ ID NO: 21601 - DNA, 120 bp, Macaca Mulatta
agaattttctcccaaactggttggcttgactggcacgagagaagaagtcgatcaagtggccagagcatacagagtgtattacagccctggccccaaggatgaagatgaagactacatagt

SEQ ID NO: 21602 - DNA, 456 bp, Macaca Mulatta
gttaccattaggcatttatacagacgtaaagactagattacatcttagacctgacatctggctattgcacagacagaatccaaatgcacgtgcttgttctatgaaccctgattgcgttgtcttcgtggaaatggaacatctcctcacaggggaaactctggtaaatgtgctcatttgtggttgccatgagagtgaactgcttttaaagaaagtgacacttcctcaggcccctgccttggtttccctgaacattcagggagggataataggtccaggcttgagctcatagccagagtgcacaaaaagctgttgctacttggtggaggaacacctcctagaaccagcaggcctcggtggggagagggggaatccacctggagtttaaggaggtctccacattgaactatctgtgtggacagagcctggatctcccacccagcactgacctccttggtg

SEQ ID NO: 21603 - DNA, 477 bp, Macaca Mulatta
gctgagtgtcctgaagcactcagaaccagtgtcccaccgtgagcactgtgaagaggcatacagggttcttcttgctctgcgggaggccaattcagaagcaggagacgaagcccccacgagtgacctgcaagcagctgaagaggaagcatggaggctgctggcacaagaggaggccaccatggatgcaggggcacggcagaatccacagccaaggtacctccccggaaccctgggaactggcctggttgaggagtggggtcttgactggggaatggggctcccagaactcaccatgtttgggggcttggtgtggctgtgtccagcaaggtcggtatggagcacactgtagttggttgacatgaggctcaactgcagttggcctgttgctacttgacaaagttagcatggtggttgacagatattgcagttggcgtgaagatggataatgatgcctactggttaaaactggcacccaca

SEQ ID NO: 21604 - DNA, 784 bp, Macaca Mulatta
actcagtgtaatgtataggattttttttctctaagttctattctcacaaaagatagtacatggatggggacaatgaagaggatatattacaaaagttacagtctagaaggaaaaacaagatatatacctgttaaatctttaaaacattaccacagttaagtgctattctgtaaaaggtatcaatatgggatgaatgatggggacatctttaagaatgcattggggatttgaactagcttctaaagaattaataatagaagagaaaattgcaaataaaaagtataatctttgtttcctccattgcaggctggctcacagttggaccaacacttacaaatagcaactacaatgcggaaacatatgcatcctatttcagtgctcctaattcctacttgactggttgtacagaagaaattgagagacttcgaccaaaatcacctcctcccaaatctaaatctgaccgaggaggtggagctcccagaggtggaggaagaggtggaacttctgctggccgtggacgagaaagaaatcgatctaacttccgaggagaaagaggtggctttagagggggccgtggaggagcacacagaggtggctttccaccccgataattgttgaagacattgaacctattcatcctcctctaaccttctttactgtaattaaatttcaagtgggagacttaactttagaactcacctccagcttgcactttgctttaatttctctgagctccaggaatgtcttagccagcctcgcttgcggttgtcacacacactgtctc

SEQ ID NO: 21605 - DNA, 1026 bp, Macaca Mulatta
  misc_feature (1)...(1026): n = A,T,C or G
agggttacctgggttgccaagccttgtctgagatgatccagttttacctggaggaggtgatgccccaagctgagaaccacgacccagacatcaaggagcatgtgaactccctgggggagaatctgaagaccctcaggctgaggctgcggcgctgnnnnnnnnnnnnnnnnnnnnnnnnnnnnnnnnnnnnnnnnnnnnnnnnnnnnnnnnnnnnnnnnnnnnnnnnnnnnnnnnnnnnnnnnnnnnnnnnnnnnnnnnnnnnnnnnnnnnnnnnnnnnnnnnnnnnnnnnnnnnnnnnnnnnnnnnnnnnnnnnnnnnnnnnnnnnngactctatagactctaggacataaattagaggtctccaaaatcagatccagggttctgggatacctgacccagccccttgggaaaccttattgtacctctctcatagaatatttattacctctgatacctcaacccccatttctatttatttactgagcttctctgtgaacgacttagaaagaagcccaatattataattttttttcaatatttattattttcacctgtttttaagctgtttccatagggtgacaccctatggtatttgagtgttttaagataaattataagttatataagggannnnnnnnnnnnnnnttgggaagccaacagaagcttccattccaagcctgaccacgctttctagctgttgagctgttttccctcacctccctctaatttcttttgtctgtgggcttggggcttcctaactgctacagatactcttaggaagagaaaccagggagcccctttgatgattaattcaccttccagtggctcagagggattcccctaacctcattcaccaacaacttcattcttgaaagctgtggccagcttgttatttataacaacctaaatttggttctatgccgggcgcggtggctcacgcctgtaatcccagcactttgggaggccgaggtgggtggatcacttaaggtcaggagttcctaaccagactggccaacgtggtgaaa

SEQ ID NO: 21606 - DNA, 871 bp, Macaca Mulatta
tgtgcctttcatcagaaagtcaatcttcaattatccccaaattcagcttctatatcacctgaatccttctctcgctcatttaagtcccacgttatcactgtttgcttttacttactttcagtagcaccataacgaagtagctttaagtgaaaccttttaactacctttctttgctccaagtgaagtttggacccagcagaaagcattactttgagtattttgaaaggtgatatacagtggggcacagaaaataaacgaaaaccttcagtttctcacagattttcaccatgtggcttcatcaatttatgtgctaatacaataaaaaataaaatgcatttaatgctttaaaattcatctttttatgataaactatattctctgtatttctctatagcattaataatcaacattaatgccaatcagtctgttaataagaaataatatcttcaattttcaaaaacataatttgcctatttttttctgatagaagtagacattgtttatatcttcaaaaaagcaaaaggatgtcctagcaggaaataaaatggttcatatagagaggaatctcagtcctttaaacaaccgatccagttctcatcagcataatgtacattaaattcgaaatagtttaatttaacctgccataatcagaagaaaccacctgctaaaacatctctttgccagtacagacacagacaagacagtctggtcagctgtgacccctgccctcctgatggatagaaaggaaacctggaaatgtactataagttgaggagagaaagtcatgtagaccaaaggcaatcagagtaacttgctgcatttgtactatttatactcctattatttaagatggtattattggatagcttct

SEQ ID NO: 21607 - DNA, 1012 bp, Macaca Mulatta
ccgttacctgacctcggccccgccctccagccccacccagccctcaggagcaagactccaggccgcacccgcaagtgccccggggaccagcgaccccgcgctttgtatggttgtattggctctggagattggagatgtccccctcatggcggtgctgagaccttagggtgggctgccaggctgggcggatacagcccaagtgcacaggaccttgggcagagctggctgcaagattcgggtacgccagtggtgggcgggcaccacctcctgcagcgtctcaccggggcctgtctgtgcctctgcagccgagagggtgacctctctgggcaaggactggcatcggccttgcctgaagtgcgagaaatgtgggaagacgctgacctctgggggccacgctgaggtaggtgggacctaccctggtggcaggggccacgcgtgatggcaccatctcacggaccttctcctatgtagcacgaaggccaaacctactgcaagcaaccatgaatatgaaacaatgtagggcctaacggctttgggcggggtggacccgagaccaacaactttccaagtaaacctgctggaggagaccacaacctatgacatgctgctgcgccactgtcacgcaaatgcaggaatgcccaagatcccagaaacctagaaacctaatacctcaaagccgtacgctggaacgagagaaaaagacagaggggcagaaccatacccgacgggccaatccacagagcccaagacaggcatgaacccaggacatcacaaccaagccacgccaacagcaaagcaacacaaaacgggaaacgacaacgaagaaaccagcaacacacaccagtgccggtccccaacaacaagaccacggtcgcgggcaagggagccagggcagcaggaggcggggacgcaggggagaaagaggggagagaaagacgccggcgcagcgacaacgagaggcgagcgaaacggcagcgggagcacggggacgccgacgagaagacgaggagag

SEQ ID NO: 21608 - DNA, 2204 bp, Macaca Mulatta
  misc_feature (1)...(2204): n = A,T,C or G
gatatggcaatgtggctcccaagacccctgctggtcgcctcttctgtgtcttctatggtctcttcggggtgccgctctgcctgacgtggatcagtgccctgggcaagttcttcgggggacgcgccaagagactagggcagttccttaccaggagaggcgtgagtctgngcggaaggcgcagatcacgtgcacagtcatcttcatcgtgtggggcgtcctggtccacctggtgatcccacccttcgtgttcatggtgaccgaggggtggaactacatcgagggcctctactactccttcatcaccatctccaccattggcttcggtgactttgtggccggtgnnnnnnnnnnnnnnnnnnnnnnnnnnnnnnnnnnnnnnnnnnnnnnnnnnnnnnnnnnnnnnnnnnnnnnnnnnnnnnnnnnnnnnnnnnnnnnnnnnnnnnnnnnnnnnnnnnnnnnnnnnnnnnnnnnnnnnnnnnnnnnnnnnnnnnnnnnnnnnnnnnnnnnnnnnnnnnnnnnnnnnnnnnnnnnnnnnnnnnnnnnnnnnnnnnnnnnnnnnnnnnnnnnnnnnnnnnnnnnnnnnnnnnnnnnnnnnnnnnnnnnnnnnnnnnnnnnnnnnnnnnnnnnnnnnnnnnnnnnnnnnnnnnnnnnnnnnnnnnnnnnnnnnnnnnnnnnnnnnnnnnnnnnnnnnnnnnnnnnnnnnnnnnnnnnnnnnnnnnnnnnnnnnnnnnnnnnnnnnnnnnnnnnnnnnnnnnnnnnnnnnnnnnnnnnnnnnnnnnnnnnnnnnnnnnnnnnnnnnnnnnnnnnnnnnnnnnnnnnnnnnnnnnnnnnnnnnnnnnnnnnnnnnnnnnnnnnnnnnnnnnnnnnnnnnnnnnnnnnnnnnnnnnnnnnnnnnnnnnnnnnnnnnnnnnnnnnnnnnnnnnnnnnnnnnnnnnnnnnnnnnnnnnnnnnnnnnnnnnnnnnnnnnnnnnnnnnnnnnnnnnnnnnnnnnnnnnnnnnnnnnnnnnnnnnnnnnnnnnnnnnnnnnnnnnnnnnnnnnnnnnnnnnnnnnnnnnnnnnnnnnnnnnnnnnnnnnnnnnnnnnnnnnnnnnnnnnnnnnnnnnnnnnnnnnnnnnnnnnnnnnnnnnnnnnnnnnnnnnnnnnnnnnnnnnnnnnnnnnnnnnnnnnnnnnnnnnnnnnnnnnnnnnnnnnnnnnnnnnnnnnnnnnnnnnnnnnnnnnnnnnnnnnnnnnnnnnnnnnnnnnnnnnnnnnnnnnnnnnnnnnnnnnnnnnnnnnnnnnnnnnnnnnnnnnnnnnnnnnnnnnnnnnnnnnactgggagtgggggccaggggccttcctaaccttccatcattcccagctgggtgcatgcccaggacagggcctctgttacccagctgatccacaccctggctgtgggggcgtctgtcctgagcttggctggtgtatctcacaatgcaaagacatgcaggctggtgggacaggtgggcgggactgaccctgaggaggccttgcccgcatggttttcactccaccatttgctggagtgtcacacggttctctgaggcccagggcctcagctgtttaagtttaccggcattaccgagctcggcatttggagcgggagctctgaagtgtctggggaggtaccgctgtgtgtggggtcaggcgtttccgnnnnnnnnnnnnnnnnnnnnnnnnnncatcccagctgtgggcctgccggtcaggtggggcacctactacaaactgtagtggggtggaggctgctggaggtgggagtgaggagatgcgggcaggggctcaaacagtcctgactcacgggacctggaaacaagtcccatgtgggcctggggcctggggtcctcatcctccttgttggtctactcaggcccagcccaaagccgcgttccctgtctcaggtcaagcagtggcagacacaaggctttctgtgggcccccgagtggtaggagggagagtggcagggttactggaagccgggactgctagggctggtggccagggagctgcaagagtgaggctcagctctggctggttctgccctgacccctcctgcccgccggagaactgcacaccctgccccttggcctgaggagctgcactccccatcctgctgtcttctccttccctgtgccctgaacaaggacctcactgcccacttctccctcccaccagcccccttggg

SEQ ID NO: 21609 - DNA, 733 bp, Macaca Mulatta
  misc_feature (1)...(733): n = A,T,C or G
gattgggacactggtgaaggtgagagagaagctttaacttctaggctaaaacctgggatgcctcttcattggattcacaaacttcctcagccccattccatttatgtcttctgtctctccagcatttctgaggtggaaagattataactgtgatgtgaggttaccctatgtctgcaagttcactgactagggcaggagggaagtcagcagcctgtgtttggtgtgcaactcatcatgggcatgagaccagtgtgaagactcaccctggaagagaatattcgcttaattccctcacacctgaccacctcactcttatcttccttctgtttcttcctccccactctcatttcagtctcttcattttgtcatatggcctaaggctttaaagagcaatagtaaaatttttagtctgcacttgtttgtcttgtatgtgccagtgtcatagccataccctgagaaggacaaagtggttgaggggagtaaactttgtaggtcctccttcttccctattcacccaggtctctagggaaaatgatgaaatgtgcatccctactagtgtgttgtgatgagggcgtggctcctgctcatgtaggatttgtgttgtgaagagatgaggacatttctctcccacgtacttccagccctcccattcccatagcccanacctgacaatgtgacatgaacagatttaggaagctctgatggtgcttagaatagtacttctcagagaatg

SEQ ID NO: 21610 - DNA, 887 bp, Macaca Mulatta
  misc_feature (1)...(887): n = A,T,C or G
cataaaagaggtgaccagcacagtgctacgtgtgaaagtgcctctggctgcaaccactgaattaaattcagatgagnagatgtttcagaaagaacaagtggatcctcttcagatgaaattgcagcaggtgaatggacttggccagggattaattcagagtgcaggaaaagactgtgatgtgcagggtttagaacatgacatggaagagatcaatgctcgatggaatacattgaataaaaaggtnaggtcgcacaaagaattgcacagttacaggaggccttgttgcattgtgggaagtttcaagatgccttggagccattgctcagctggttggcagatacggaggagctcatagccaatcagaaacctccatctgctgagtataaagtggtaaaagcacagatccaagaacagaagnagttgctccagcggctcctagatgatcgaaaggccacagtagacatgcttcaagcagaaggaggcagaatagcccagtcagcagagctggctgatagagagaaaatcaccgggcagctgaagagtcttgaaagtagatggactgaactactcagtaaggcagcagccaggnaggcaaaaacagctggaagacatcctggttctggccaaacagttccatgagacagctgagcctatttcggacttcttatctgtcacagagaaaaagcttgctaactcagaacctgttggcactcagactgccaaaatacagcagcagatcattcgacacaaggnaggctctggaagaagacatagaaaaccatgcaacagatgtgcaccaggcagtcaaaattgggcagtccctctcctccctgacatctcctgcagaacagggtgtgctgtcagaaaagatagactcattgcaggcc

SEQ ID NO: 21611 - DNA, 2362 bp, Macaca Mulatta
  misc_feature (1)...(2362): n = A,T,C or G
gcaggtgagcggcgggaggagatggcggagcagtgggagctggacgaggaaggcatccgccgcctgggggcgctgacgctggagcagccgtggaaaaatccattccattggtgatgccttcagaaattttaaaaatctccgatccttagatttatcaaggaatttgatcactagccttaaggnnnnnnnnnnnnnnnnnnnnnnnnnnnnnnnnnnnnnnnnnnnnnnnnnnnnnnnnnnnnnnnnnnnnnnnnnnnnnnnnnnnnnnnnnnnnnnnnnnnnnnnnnnnnnnnnnnnnnnnnnnnnnnnnnnnnnnnnnnnnnnnnnnnnnnnnnnnnnnnnnnnnnnnnnnnnnnnnnnnnnnnnnnnnnnnnnnnnnnnnnnnnnnnnnnnnnnnnnnnnnnnnnnnnnnnnnnnnnnnnnnnnnnnnnnnnnnnnnnnnnnnnnnnnnnnnnnnnnnnnnnnnnnnnnnnnnnnnnnnnnnnnnnnnnnnnnnnnnnnnnnnnnnnnnnnnnnnnnnnnnnnnnnnnnnnnnnnnnnnnnnnnnnnnnnnnnnnnnnnnnnnnnnnnnnnnnnnnnnnnnnnnnnnnnnnnnnnnnnnnnnnnnnnnnnnnnnnnnnnnnnnnnnnnnnnnnnnnnnnnnnnnnnnnnnnnnnnnnnnnnnnnnnnnnnnnnnnnnnnnnnnnnnnnnnnnnnnnnnnnnnnnnnnnnnnnnnnnnnnnnnnnnnnnnnnnnngagttcagacattactcgcctcgtcagtccacagtccgatccccagagaagatgacatagagaagggtnnnnnnnnnnnnnnnnnnnnnnnnnnnnnnnnnnnnnnnnnnnnnnnnnnnnnnnnnnnnnnnnnnnnnnnnnnnnnnnnnnnnnnnnnnnnnnnnnnnnnnnnnnnnnnnnnnnnnnnnnnnnnnnnnnnnnnnnnnnnnnnnnnnnnnnnnnnnnnnnnnnnnnnnnnnnnnnnnnnnnnnnnnnnnnnnnnnnnnnnnnnnnnnnnnnnnnnnnnnnnnnnnnnnnnnnnnnnnnnnnnnnnnnnnnnnnnnnnnnnnnnnnnnnnnnnnnnnnnnnnnnnnnnnnnnnnnnnnnnnnnnnnnnnnnnnnnnnnnnnnnnnnnnnnnnnnnnnnnnnnnnnnnnnnnnnnnnnnnnnnnnnnnnnnnnnnnnnnnnnnnnnnnnnnnnnnnnnnnnnnnnnnnnnnnnnnnnnnnnnnnnnnnnnnnnnnnnnnnnnnnnnnnnnnnnnnnnnnnnnnnnnnnnnnnnnnnnnnnnnnnnnnnnnnnnnnnnnnnnnnnnnnnnnnnnnnnnnnnnnnnnnnnnnnnnnnnnnnnnnnnnnnnnnnnnnnnnnnnnnnnnnnnnnnnnnnnnnnnnnnnnnnnnnnnnnnnnnnnnnnnnnnnnnnnnnnnnnnnnnnnnnnnnnnnnnnnnnnnnnnnnnnnnnnnnnnnnnnnnnnnnnnnnnnnnnnnnnnnnnnnnnnnnnnnnnnnnnnnnnnnnnnnnnnnnnnnnnnnnnnnnnnnnnnnnnnnnnnnnnnnnnnnnnnnnnnnnnnnnnnnnnnnnnnnnnnnnnnnnnnnnnnnnnnnnnnnnnnnnnnnnnnnnnnnnnnnnnnnnnnnnnnnnnnnnnnnnnnnnnnggtcctgcccgagatttgcttctgtctttggtagtcccggctccttctcagccgaggtgtcgctcacatcctgaagacacgacgaaagccttctgcaggagggagcttgaactgaaggaggctgcgcagctggtccctaatgacatgnnnnnnnnnnnnnnnnnnnnnnnnnnnnnnnnnnnnnnnnnnnnnnnnnnnnnnnnnnnnnnnnnnnnnnnnnnnnnnnnnnnnnnnnnnnnnnnnnnnnnnnnnnnnnnnnnnnnnnnnnnnnnnnnnnnnnnnnnnnnnnnnnnnnnnnnnnnnnnnnnnnnnnnnnnnnnnnnnnnnnnnnnnnnnnnnnnnnnnnnnnnnnnnnnnnnnnnnnnnnnnnnnnnnnnnnnnnnagatccctggtggtaactaatgagtatctgctgcagcagctgaataaggagccaaaaggttattctgggaaagcgctcctgcctcctgagaagggtcatcatctggggagatcatcgccctttgggaaaagcacattgtcttcctcctcaccagtggcacatgacactggttcagtatctaatacagagcgtctcggatgctgccccagagcctggcttatggagctagcatggaacccacaccacagcttccctggtccacagaggctctcaccgccattgccaccagtatggtggtatgtactcacaaagattaagaaagaaatgtattctg

SEQ ID NO: 21612 - DNA, 598 bp, Macaca Mulatta
tggcttagataacatgtaccattttaaatggagatcataattttatgttcacttgatggggaatgactagaatggggcaataacaaatcatttctaaagttattttccattaaaagccatattaagtattttgcttgttaaattctagttttatgttttaaatctcttagtagttacattgccatttggtagcatcatgtatatatttatgcttatgagtttgcattatgactcctgtaaaatatgaaattataatgcaataaaagtgttatctttcttacaaaagttttgtacctaagtggatataaataactgcataaatgaataaattaattcagaattaactccttcaatattatttctagtagcacaactgataataaaattgatattttctacaagtgttacttctaaaattacagacaaaattacttatacaactcagttaagatgctttgacactgaataaaatattgatttagtgaaatcattttgctgtactttttatctatagctctttgtagtctatgcaacagataatttgtgttcaatttagtaatgctcataaaacttgccttccatgttagtatttcactag

SEQ ID NO: 21613 - DNA, 252 bp, Macaca Mulatta
ggtcgctaggtatgaataaccctgttcagatgtcagaagtatatatcataggagcacagcctctctgcagccaactggaaggactttctcaaggacagaagaaactgtgccacttgtatcaggaccacatgcagtacatcggagaaggcgcgaagacaggcatcaaagaatgccagtatcaattccgacaccgaaggtggaactgcagcactgtggataacacctctgtttttggcagggtgatgcagatag

SEQ ID NO: 21614 - DNA, 299 bp, Macaca Mulatta
  misc_feature (1)...(299): n = A,T,C or G
nnnnnnnnnnnnnnnnnnnnnnnnnnnnnnnnnnnngggtggctctaaaaagagcctttggtctttggtttgtttgtctgcatttatttgcttttggctttgtggctttcagttttctttggtaacagaacggcctggatgttaggcaaaacgccgccctgggcgatggtgactttgcccagcagcttgttcagttcctcgtcgttgcggatggccagctggaggtgacgagggatgatgcgcgtcttcttgttgtcccgagctgcgttgcccgccagctccaggatctcggcggtccc

SEQ ID NO: 21615 - DNA, 285 bp, Macaca Mulatta
aaccttaaaacaccaatttatttccatgtgaaaaagtgttatatatgacaagtgttttttgactctaagtgcgttaaatcttttgagagtgtaaatgccgggctagggcaactgcagttaatacttaccgaggttagtgaagggctcattaagttgtaggggaagcaagctgggaagaatcagatcagatgttttcctgaccaaaaaaaatgaccctatagagagcatcaaaatgtggtgttcttgttaagtaattgatcgtggtcttcattttaatcttagttc

SEQ ID NO: 21616 - DNA, 618 bp, Macaca Mulatta
agatgcctcattctgaggtacagagaccagcctgaggctcccaaagcctcctgctccccagagcctcactgaaggggagggcacggcctatagtcagaggccaagggcaggggcctggacactgagcttctgatgcccatggccaggcctgggcacatgcctgccctctgcctttccaccacaatcagcgagccaacggtgcaccccaggaggctgacaggggcccccttacggctactctctgggagggtcagacctacatgaccgagtctggggagcttagcaaggggcgcccctctccagccaggcctcaggggtctgccccctactgcaagaagagcacctggtcctagtgtggctctggacatcctcagagctcagagctccgagctgggaggccagctcctttccccacacacctatctcctaatgagctcattcattaggtgccaggcagggttcaacagctctctcctgcggcataaaccctatttgtttgatcgattttttgcattcaggcttgtggcatttgttcccaggaacagaactgctccttcaggcatggtgggaaggaatggtccttttgggtagggctgtggggctgggatagtcctgctc

SEQ ID NO: 21617 - DNA, 102 bp, Macaca Mulatta
caggccactgaaggaccttgtaacatgcccaaaccaggtgtatttgacttgatcaacaaggccaaatgggatgcatggaatgcccttggcagcctgcccaag

SEQ ID NO: 21618 - DNA, 245 bp, Macaca Mulatta
  misc_feature (1)...(245): n = A,T,C or G
tgttgtcccggttaagagtagtttctaccacttgcactttggcgtgtcgacgtttgcacataaaagaaaaaggcaagccacttatgctgaacccgagaaccaacaaggnagggaatggcatttactttacaagaacgacaaatgcttggtcttcaaggacttctacctcccaaaatagagacacaagatattcaagccttacgattccatagaaacttaaagaaaatgactagccctttggaaaa

SEQ ID NO: 21619 - DNA, 658 bp, Macaca Mulatta
  misc_feature (1)...(658): n = A,T,C or G
catccttcctatcatctgtctgagagcagagccaggtagttgtgtgccttgnggcccagggaaccctccatcaacctgagacaggactcagcatatggttattgggtatgcctaccaggtggaataaaggacacagattgattnnnnnnnnnnnnnnnnnnnnnnnnnnnnnnnnnnnnnnnnnnnnnnnnnnnnnnnnnnnnnnnnnnnnnnnnnnnnnnnnnnnnnnnnnnnnnnnnnnnnnnnnnnnnnnnnnnnnnnnnnnnnnnnnnnnnnnnnnnnnnnnnnnnnnnnnnnnnnnnnnnnnnnnnnnnnnnnnnnnnnnnnnnnnnnnnnnnnnnnnnnnnnnnnnnnnnnnnnnnnnnnnnnnnnnnnnnnnnnnnnnnnnnnnnnnnnnnnnnnnnnnnnnnnnnnnnnnnnnnnnnnnnnnnnnnnnnnnnnnnnnnnnnnnnnnnnnnnnnnnnnnnnnnnnnnnnnnnnnnnnnnnnnnnnnnnnnnnnnnnnnnnnnnnnnnnnnnnnnnnnnnnnnnnnnnnnnnnnnnnnnnnnnnnnnnnnnnnnnnnnnnnnnnnnnnnnnnnnnnnnnnnnnnnnnnnnnnnnnnnnnnnnnnnnnnnnnnnnnnnnnnnnnnnnnnnnnnnnnnnnnnnnnnnnnnnnnn

SEQ ID NO: 21620 - DNA, 502 bp, Macaca Mulatta
cagaatccacactgggagagaagccatatgaatgtgaggagtgcggtaaggccttcagcgggagttcagacctcaccaaacacatattaatccacactggggaacgaccttatgagtgcagcgagtgtggaagggccttcagtcggagctcagacctaagcaagcacaaacgaatccatattagggagaaacactatgggtgcccccagtgtggaaaagacttcagcatcaaggcagaactcaccaaacacagaaggatgcacactgaagagaaacgttacaggtgtgaggagtgtgggaaagcctttcgtcataactgtaagcgccgggctcatgaacgagagcacaccggggagaagccctatcaatgcggacattgtgggaaaaccttccaagaccggcactgccttaccatccatcagagaatccacactggagagaaaccttacaaatgtttagagtgtgggaaagctttcggtgggaagtcaaacttgaccaatca

SEQ ID NO: 21621 - DNA, 1347 bp, Macaca Mulatta
  misc_feature (1)...(1347): n = A,T,C or G
gttaaaattaactaactggatccttaacaaccattctaagaggcannnnnnnnnnnnnnnnnnnnnnnnnnnnnnnnnnnnnnnnnnnnnnnnnnnnnnnnnnnnnnnnnnnnnnnnnnnnnnnnnnnnnnnnnnnnnnnnnnnnnnnnnnnnnnnnnnnnnnnnnnnnnnnnnnnnnnnnnnnnnnnnnnnnnnnnnnnnnnnnnnnnnnnnnnnnnnnnnnnnnnnnnnnnnnnnnnnnnnnnnnnnnnnnnnnnnnnnnnnnnnnnnnnnnnnnnnnnnnnnnnnnnnnnnnnnnnnnnnnnnnnnnnnnnnnnnnnnnnnnnnnnnnnnnnnnnnnnnnnnnnnnnnnnnnnnnnnnnnnnnnnnnnnnnnnnnnnnnnnnnnnnnnnnnnnnnnnnnnnnnnnnnnnnnnnnnnnnnnnnnnnnnnnnnnnnnnnnnnnnnnnnnnnnnnnnnnnnnnnnnnnnnnnnnnnnnnnnnnnnnnnnnnnnnnnnnnnnnnnnnnnnnnnnnnnnnnnnnnnnnnnnnnnnnnnnnnnnnnnnnnnnnnnnnnnnnnnnnnnnnnnnnnnnnnnnnnnnnnnnnnnnnnnnnnnnnnnnnnnnnnnnnnnnnnnnnnnnnnnnnnnnnnnnnnnnnnnnnnnnnnnnnnnnnnnnnnnnnnnnnnnnnnnnnnnnnnnnnnnnnnnnnnnnnnnnnnnnnnnnnnnnnnnnnnnnnnnnnnnnnnnnnnnnnnnnnnnnnnnnnnnnnnnnnnnnnnnnnnnnnnnnnnnnnnnnnnnnnnnnnnnnnnnnnnnnnnnnnnnnnnnnnnnnnnnnnnnnnnnnnnnnnnnnnnnnnnnnnnnnnnnnnnnnnnnnnnnnnnnnnnnnnnnnnnnnnnnnnnnnnnnnnnnnnnnnnnnnnnnnnnnnnnnnnnnnnnnnnnnnnnnnnnnnnnnnnnnnnnnnnnnnnnnnnnnnnnnnnnnnnnnnnnnnnnnnnnnnnnnnnnnnnnnnnnnnnnnnnnnnnnnnnnnnnnnnnnnnnnnnnnnnnnnnnnnnnnnnnnnnnnnnnnnnnnnnnnnnnnnnnnnnnnnnnnnnnnnnnnnnnnnnnnnnnnnnnnnnnnnnnnnnngtcaggtctaatagcccagaacctcagtgcctaggcttcactgtaaataataagcgacgtaaataacatttacaaatatcctttgtgagcagaaacagcattaccagtaactgggtactagaacgcatccgttttcgtcgtttagtcctccaggggctccctagcctgcattccatggacaacagcagtgcagctgcagaagcacttctggaagccccgtgacttgaactagacctt

SEQ ID NO: 21622 - DNA, 621 bp, Macaca Mulatta
gggatgcaggccagttccacagtaacagtgtgggcagcagcatctgaagcaaagcatcaacctccatcagattttctttggaaggaacaagacaagtttagaacaagtcccgattgtataacaatcctgtgcaaaccgaacggtcaagccattgcctggtacacccctatccactggaagcaagcatgggaaaaattagatactgacattgaatttaacagatgttcagtagtatctccaacattccggaagcatgtgtttcagtggactgcatctacaactacaataactaaagaaaaacaagatcaacctaaggaagatatcttaaattatcaggtggaacaagctcaagtttttcttaagagagagaaggaaatcccaccaaccgttttccccaatcgcagcccttggtgccagaatccctatgtctctgcacatccttactgtcctctgattgaaccacgcaatacatccactgctggaggcaacttggatagacagcccaggtctcggtcaaccagacctaatcgagcctcagaaaaatttaccaagtctttgatgcatccaagaaaatgttatatctgtggcaatgattatccttgtgcctgtctacttgtgcat

SEQ ID NO: 21623 - DNA, 715 bp, Macaca Mulatta
aggtagaagatgacggtgaaatgttccacacactggatgatggccacacaagatttacagatctaatacaactggtggagttctatcaactcaataagggcgttcttccttgcaagttgaaacattattgtgctaggattgctctctagctaaaccagaagtgacttattaaactattgaagaaaaaggactcaagaaaaataataaaagaccataaataagggtgaaaatgttaccatgtgaaaagaatgtattttacctgcaagttacaaaaaaaatagtttgtgcattgcaaataagcaaagacttggattgactttacattcatcatttaaaattcattagttaaaattaaaccttagaaaaaaattgacttggtgtgttcttgtgtgatttttacattactataatattttcttcaaatatgcatattaaaacatctatctcccttatttactatatagcaacatcagaattctcaaacacaaaatatgaaataaattgggggtcagaaataattatttgtgcactaaatttcaattatactattttttaatgttaagaaatatgataatttatcaattaaaagaaactatccacaacctgttaatgaaagtaaaagctattttgaattacatattttctgggtttatgatcttcttaaaatgaaatcatattttgagatagtagctttaaaccattttgaaatatgttg

SEQ ID NO: 21624 - DNA, 465 bp, Macaca Mulatta
ccctttgttagagtcctgtgatcattgaaaacaatgtaatattctcccacttcaagcggaaaacgtcctatccgttagtgtctggaaagaaaaggtagttccattgaggagttttcacaggagttactactgggaaatgcatgtacaagcttatttcacatggtgtaacccaattatatgagccaaaaggatctatggctctaaagtcagtagggagcagtgtcatgagggaaagccacattcaaaggtaagtcgggcatgttttccagtttttattaggatatttggcatggtatagatacaacttatcccttaccaccaaacacataatatagctagtcaaaatgattatttttaaaggaaactatttaaaataaagccactagtacatataagttaggaaagaaaagtcaagctggagccatcttgatattctaatgagcaggcctatttagttctacatct

SEQ ID NO: 21625 - DNA, 1155 bp, Macaca Mulatta
  misc_feature (1)...(1155): n = A,T,C or G
catggatcaccagcagcagaggttcctcacacatgtcaaagaggtggccactgtgtgccggcagctagcagagaagagaatgctggatccatcaattaagggaaactttcactggtctggcaatgaacagatgactaagtatgaaatggcgtgtacaattacagatgccttcaacctccccagcagtcacttaagacctattactgacagccctgtcctaggagcacagcgtccaagaaatgctcagcttgactgctccaaattggagaccttgggcactggccaacgaacaccacttcgaattggatttaaagaatcactttggcctttcctcattgacaagagatggagacaaatggtctttcattagttnnnnnnnnnnnnnnnnnnnnnnnnnnnnaatgaaaagtatagcatgtggcactttttaaagaacaaaggaaatagttttgtatgagtactttaattgtgactcttaggatctttcaggtcaatgatgctcttgcactagtgaaattgtctaaagaaactaaagggcaatgttgccctgtttgctttaatttttctttttatcattttgtttgtcctggctaaacttggagtttgagtatagtaaattagatccttaaatatttgagagccaggatgaagcagatctgctgtagacttttcagatgaaatgcattgttcattctcataacctccatattttcaggatttttgaagctgttgaccttttcatgttcattattttaaattgtgtgaaatggtatagaaatcattggtgttcattatttgctttgcttgagctcagatcaaaatgtctgaagaaaggaactttatttttgcaagttatgtacagtttttatgcttaagatatttcaacatgttatgtatattggaacttctacagcttgatgcttcctgcttttatagcagtttatggggagcacttgaaagagcatgtgtacgtgtatttttttcctaggtaaacattgaatgcaaatgtgtatttttttaatataaatatataactgtccttttcatcccatgttgccgctaagtgatatttcgtatgtgtggttatactcataaaaatgggccttgtaagtcttttcaccattcatgaataataataaatatgtactgctggca

SEQ ID NO: 21626 - DNA, 662 bp, Macaca Mulatta
  misc_feature (1)...(662): n = A,T,C or G
ggtaatttatttgcacaggtttttctgcatcaaaaaagtatctgctaaaaagagaacagttgtgtccgaatcacatttcccgccgacttctaaaaatatttcccctaaaaaagaatccactcatttaattttaaagaaaatatacttcttacacaagacaatccaaactgatgcaaaatatttattccaagttagttattttatgcagtagtttccccctcgagacttgtgagtaaccacatcttttaaatctgtaaataatgttatcaaaataatcttaatctttgaaatctcacaaaaatttatattttacaatccacccgtgaatatcaaggctgcaagataacacaacatttcctatatccaaatattttacagctgtacccnnnnnnnnnnnnnnnnnnnnnnnnnnnnnnnnnnnnnnnnnnnnnncaaaaaaaccacgtatgcttggttaagggctaaagttacccgagcagccnnnnnnnnnnnnnnnnnnccaaattattagcattaatttaatacaattataccttcaatagtcactttgtcattgacaatgattgcttgagcacaggggtgagtgccctaagggctggtattagaagctgttgttgcagaccggtgtctcctcttccctgcactgccagctctacctgtgc

SEQ ID NO: 21627 - DNA, 612 bp, Macaca Mulatta
  misc_feature (1)...(612): n = A,T,C or G
atgcgtgtggtggtgatcggagcgggagtcatcgggctgtccaccgccctctgcatccatgaacgctaccactcagtgctgcagccactggacataaaggtctacgcggaccgcttcaccccactcacctccaaaggcgtagctgccggcttctggcagccctacctttctgaccccagcaacccaaaggaggcnnnnnnnnnnnnnnnnnnnnnnnnnnnnnnnnnnnnnnnnnnnnnnnnnnnnnnnnnnnnnnnnnnnnnnnnnnnnnnnnnnnnnnnnnnnnnnnnnnnnnnnnnnnnnnnnnnnnnnnnnnnnnnnnnnnnnnnnnnnnnnnnnnnnnnnnnnnnnnnnnnnnnnnnnnnnnnnnnnnnnnnnnnnnnngctatggctggttccatacaagcctaattctggagggaaagaactatctacagtggctgactgaaaggnnnnnagaggggattgaagttcttccagcggaaggtggagtcttttgaggaggtgnnnnaggtggcaagagaaggcgcagatgtgattgtcaactgcactggggtatgggctggggtgctgcaaccagaccccctgctgcagccaggccgggggcagatc

SEQ ID NO: 21628 - DNA, 818 bp, Macaca Mulatta
cacaagctcccaacccagcagttgatgagtcatgggattaaagccaaaacatccttcaactttgaggttttgatgcagagaagaaaatagttttgatttttgagtttttaacagaagtataaaacttgacattctcatagctcctgtccttgtattctcactcctacacttaaaaaaaatccttactgactagttatgtgagatgctaaaacttacaacagtgcagttactgatacaaacggtgttaactagaaatattaaagcattctaaatgtctttcttatttctggtatcttcttcagggggcttagacatgtttaatgtttaaatgccaagtcttactatagtgtttattgatcttataaaacaagtaaataggatatgatacacttttggttaaaaattactgggtctcatttttacttgagtctttaaaacagtagtgtgtcactataatgtgataacataatctttaagaaacagtagaatacctaagcctttcaaagtgattttgatttttagatcatcagatgtatgatgaaaatggttaaatgtttgtgatgggagctctgtactcaatggcataacaatgtttgtttttataatatacaatctttccttgaaataaaggatgaaacacttttcccttaagttttccatcagcactttaaatttttctttgttgcacatcctagcccacactcctgtatttttgaaactgttttttttgtgtcttgtgtaaccaatgcagtgaacaaagtcttacataaattaaatattaattataaaatacattactgtacagatgtggcaatgaa

SEQ ID NO: 21629 - DNA, 209 bp, Macaca Mulatta
atgtttccaaggatcgtcttcagtcatggccttgggattaaagtgcttccgcatgttccaccctgcctttcgcaattatcttgcagcctctatcaaaccagtttcagaagttacactgaagacagtgcatgaaagacagcatggccataggcagtacgtggcctattcagctgtaccagtccgccatttcgctaccaagaaagccaaag

SEQ ID NO: 21630 - DNA, 642 bp, Macaca Mulatta
  misc_feature (1)...(642): n = A,T,C or G
gggggatatgtggagtttgggttgtatgctggcaagtatgatctttcggaaggagccatttttccatggacatgacaattatgatcagttggtgaggatagccaaggttctggggacagaagatttatatgactatattgacaaatacaacattgaattagatccacgtttcaatgatatcttgggcagacactctcgaaagcgatgggaacgctttgtccacagtgaaaatcagcaccttgtcagccctgaggccttggatttcctggacaaactgctgcgatatgaccaccagtcacggcttactgcaagagaggccatggaacacccctatttctacactgttgtgaaggaccaggctcgaatgggttcatctagcatgccagggggcagtacgcccgtcagcagcgccaatatgatgtcagggatttcttcagtgccaaccccttcaccccttggacctctggcaggctcaccagtgattgctgctgccaacccccttgggatgcctgttccagctgccgctggcgctcagcagtaacggccctatctgtctcctgatgcctgagcagaggtgggggaagtcaccctctccttgatgcagcttgcgcctggtgnggaggggtgaaaacttcaaagcac

SEQ ID NO: 21631 - DNA, 2119 bp, Macaca Mulatta
  misc_feature (1)...(2119): n = A,T,C or G
cagcaccccctgctggaggcaccgagagaggaccctgtgcttccggtgctggaggaggctccccagactcctgtggcctccgaccacagtccccagggcttggctcagaaggcaagggatggaggcccccaggccttgaacttggcttccccagcatcagactcagtgctcaaggggtcagctgagtgtccccaggcacctgattgggaaacacaggaggcagagagtcnnnnnnnnnnnnnnnnnnnnnnnnnnnnnnnnnnnnnnnnnnnnnnnnnnnnnnnnnnnnnnnnnnnnnnnnnnnnnnnnnnnnnnnnnnnnnnnnnnnnnnnnnnnnnnnnnnnnnnnnnnnnnnnnnnnnnnnnnnnnnnnnnnnnnnnnnnnnnnnnnnnnnnnnnnnnnnnnnnnnnnnnnnnnnnnnnnnnnnnnnnnnnnnnnnnnnnnnnnnnnnnnnnnnnnnnnnnnnnnnnnnnnnnnnnnnnnnnnnnnnnnnnnnnnnnnnnnnnnnnnnnnnnnnnnnnnnnnnnnnnnnnnnnnnnnnnnnnnnnnnnnnnnnnnnnnnnnnnnnnnnnnnnnnnnnnnnnnnnnnnnnnnnnnnnnnnnnnnnnnnnnnnnnnnnnnnnnnnnnnnnnnnnnnnnnnnnnnnnnnnnnnnnnnnnnnnnnnnnnnnnnnnnnnnnnnnnnnnnnnnnnnnnnnnnnnnnnnnnnnnnnnnnnnnnnnnnnnnnnnnnnnnnnnnnnnnnnnnnnnnnnnnnnnnnnnnnnnnnnnnnnnnnnnnnnnnnnnnnnnnnnnnnnnnnnnnnnnnnnnnnnnnnnnnnnnnnnnnnnnnnnnnnnnnnnnnnnnnnnnnnnnnnnnnnnnnnnnnnnnnnnnnnnnnnnnnnnnnnnnnnnnnnnnnnnnnnnnnnnnnnnnnnnnnnnnnnnnnnnnnnnnnnnnnnnnnnnnnnnnnnnnnnnnnnnnnnnnnnnnnnnnnnnnnnnnnnnnnnnnnnnnnnnnnnnnnnnnnnnnnnnnnnnnnnnnnnnnnnnnnnnnnnnnnnnnnnnnnnnnnnnnnnnnnnnnnnnnnnnnnnnnnnnnnnnnnnnnnnnnnnnnnnnnnnnnnnnnnnnnnnnnnnnnnnnnnnnnnnnnnnnnnnnnnnnnnnnnnnnnnnnnnnnnnnnnnnnnnnnnnnnnnnnnnnnnnnnnnnnnnnnnnnnnnnnnnnnnnnnnnnnnnnnnnnnnnnnnnnnnnnnnnnnnnnnnnnnnnnnnnnnnnnnnnnnnnnnnnnnnnnnnnnnnnnnnnnnnnnnnnnnnnnnnnnnnnnnnnnnnnnnnnnnnnnnnnnnnnnnnnnnnnnnnnnnnnnnnnnnnnnnnnnnnnnnnnnnnnnnnnnnnnnnnnnnnnnnnnnnnnnnnnnnnnnnnnnnnnnnnnnnnnnnnnnnnnnnnnnnnnnnnnnnnnnnnnnnnnnnnnnnnnnnnnnnnnnnnnnnnnnnnnnnnnnnnnnnnnnnnnnnnnnnnnnnnnnnnnnnnnnnnnnnnnnnnnnnnnnnnnnnnnnnnnnnnnnnnnnnnnnnnnnnnnnnnnnnnnnnnnnnnnnnnnnnnnnnnnnnnnnnnnnnnnnnnnnnnnnnnnnnnnnnnnnnnnnnnnnnnnnnnnnnnnnnnnnnnnnnnnnnnnnnnnnnnnnnnnnnnnnnnnnnnnnnnnnnnnnnnnnnnnnnnnnnnnnnnnnnnnnnnnnnnnnnnnnnnnnnnnnnnnnnnnnnnnnnnnnnnnnnnnnnnnnnnnnnnnnnnnnnnnnnnnnnnnnnnnnnnnnnnnnnnnnnnnnnnnnnnnnnnnnnnnnnnnnnnnnnnnnnnnnnnnnnnnnnnnnnnnnnnnnnnnnnnnnaggccgagaagtctgtgctggagattaagggccaggagctgcatcggaagctggaggtgctggaggaggaggtgcggtcggcgcggcggtcccaggaggagacccgcgggcagcagcaggccctgcttcgggaccacgaggccctggcacagctgcagcggcggcaggaggccgagctagagggactgctggtgcggcaccgagacctcaaggccaacatgcgggcactggagttggctcaccgggagctgcaggg

SEQ ID NO: 21632 - DNA, 4712 bp, Macaca Mulatta
  misc_feature (1)...(4712): n = A,T,C or G
gagcctgagcccgtgtgaagccggcaatgacaagtctgaatggtcgccatgccgagaaaaccactgacatgccaaaaccatcagcccctaaagtgcacgtgcagaggtccgtgtcccgagataccatcgccattcacttctcggcatccggnnnnnnnnnnnnnnnnnnnnnnnnnnnnnnnnnnnnnnnnnnnnnnnnnggctggatgaccaaagcattgtaacagggctggaagccaaggaagacctctatcttgaaccccaggttggccatgaccccaccggccctgctgcctcgcctattctggcagatggactgtccgtgtcccaggcccctgccattttgcccgtctccaagaacactgtaaagctgttggagtcccctcttccagcagcacaagtattaagtacagtgccattggctctgtccccagggtcgtctttgttggggcccttagctagctctcccagtgtgtcatccctttctgagcagaaaaccagttcctcctccccattgtcctctccttctaagtctcccatcctctcatccagtgcctcaacctccaccctttccagtgcaaaacccttcatgagccttgtgaagtggcagtcgaccgaggtggnnnnnnnnnnnnnnnnnnnnnnnnnnnnnnnnnnnnnnnnnnnnnnnnnnnnnnnnnnnnnnnnnnnnnnnnnnnnnnnnnnnnnnnnnnnnnnnnnnnnnnnnnnnnnnnnnnnnnnnnnnnnnnnnnnnnnnnnnnnnnnnnnnnnnnnnnnnnnnnnnnnnnnnnnnnnnnnnnnnnnnnnnnnnnnnnnnnnnnnnnnnnnnnnnnnnnnnnnnnnnnnnnnnnnnnnnnnnnnnnnnnnnnnnnnnnnnnnnnnnnnnnnnnnnnnnnnnnnnnnnnnnnnnnnnnnnnnnnnnnnnnnnnnnnnnnnnnnnnnnnnnnnnnnnnnnnnnnnnnnnnnnnnnnnnnnnnnnnnnnnnnnnnnnnnnnnnnnnnnnnnnnnnnnnnnnnnnnnnnnnnnnnnnnnnnnnnnnnnnnnnnnnnnnnnnnnnnnnnnnnnnnnnnnnnnnnnnnnnnnnnnnnnnnnnnnnnnnnnnnnnnnnnnnnnnnnnnnnnnnnnnnnnnnnnnnnnnnnnnnnnnnnnnnnnnnnnnnnnnnnnnnnnnnnnnnnnnnnnnnnnnnnnnnnnnnnnnnnnnnnnnnnnnnnnnnnnnnnnnnnnnnnnnnnnnnnnnnnnnnnnnnnnnnnnnnnnnnnnnnnnnnnnnnnnnnnnnnnnnnnnnnnnnnnnnnnnnnnnnnnnnnnnnnnnnnnnnnnnnnnnnnnnnnnnnnnnnnnnnnnnnnnnnnnnnnnnnnnnnnnnnnnnnnnnnnnnnnnnnnnnnnnnnnnnnnnnnnnnnnnnnnnnnnnnnnnnnnnnnnnnnnnnnnnnnnnnnnnnnnnnnnnnnnnnnnnnnnnnnnnnnnnnnnnnnnnnnnnnnnnnnnnnnnnnnnnnnnnnnnnnnnnnnnnnnnnnnnnnnnnnnnnnnnnnnnnnnnnnnnnnnnnnnnnnnnnnnnnnnnnnnnnnnnnnnnnnnnnnnnnnnnnnnnnnnnnnnnnnnnnnnnnnnnnnnnnnnnnnnnnnnnnnnnnnnnnnnnnnnnnnnnnnnnnnnnnnnnnnnnnnnnnnnnnnnnnnnnnnnnnnnnnnnnnnnnnnnnnnnnnnnnnnnnnnnnnnnnnnnnnnnnnnnnnnnnnnnnnnnnnnnnnnnnnnnnnnnnnnnnnnnnnnnnnnnnnnnnnnnnnnnnnnnnnnnnnnnnnnnnnnnnnnnnnnnnnnnnnnnnnnnnnnnnnnnnnnnnnnnnnnnnnnnnnnnnnnnnnnnnnnnngatttatcttgtacctaaaactttggctcgaaagcgaatctggaataaaaagtaccccatttgtatcgagcttggtcaacaagatgactttatgtctaaagctcagactgataaggagacttcagaagagaagccgccagctgagggaagcgaggaccctaagaagccaccccgccctcaggagggaacaagatctacccagcgagatcagatactctatctctttgggagaactggnnnnnnnnnnnnnnnnnnnnnnnnnnnnnnnnnnnnnnnnnnnnnnnnnnnnnnnnnnnnnnnnnnnnnnnnnnnnnnnnnnnnnnnnnnnnnnnnnnnnnnnnnnnnnnnnnnnnnnnnnnnnnnnnnnnnnnnnnnnnnnnnnnnnnnnnnnnnnnnnnnnnnnnnnnnnnnnnnnnnnnnnnnnnnnnnnnnnnnnnnnnnnnnnnnnnnnnnnnnnnnnnnnnnnnnnnnnnnnnnnnnnnnnnnnnnnnnnnnnnnnnnnnnnnnnnnnnnnnnnnnnnnnnnnnnnnnnnnnnnnnnnnnnnnnnnnnnnnnnnnnnnnnnnnnnnnnnnnnnnnnnnnnnnnnnnnnnnnnnnnnnnnnnnnnnnnnnnnnnnnnnnnnnnnnnnnnnnnnnnnnnnnnnnnnnnnnnnnnnnnnnnnnnnnnnnnnnnnnnnnnnnnnnnnnnnnnnnnnnnnnnnnnnnnnnnnnnnnnnnnnnnnnnnnnnnnnnnnnnnnnnnnnnnnnnnnnnnnnnnnnnnnnnnnnnnnnnnnnnnnnnnnnnnnnnnnnnnnnnnnnnnnnnnnnnnnnnnnnnnnnnnnnnnnnnnnnnnnnnnnnnnnnnnnnnnnnnnnnnnnnnnnnnnnnnnnnnnnnnnnnnnnnnnnnnnnnnnnnnnnnnnnnnnnnnnnnnnnnnnnnnnnnnnnnnnnnnnnnnnnnnnnnnnnnnnnnnnnnnnnnnnnnnnnnnnnnnnnnnnnnnnnnnnnnnnnnnnnnnnnnnnnnnnnnnnnnnnnnnnnnnnnnnnnnnnnnnnnnnnnnnnnnnnnnnnnnnnnnnnnnnnnnnnnnnnnnnnnnnnnnnnnnnnnnnnnnnnnnnnnnnnnnnnnnnnnnnnnnnnnnnnnnnnnnnnnnnnnnnnnnnnnnnnnnnnnnnnnnnnnnnnnnnnnnnnnnnnnnnnnnnnnnnnnnnnnnnnnnnnnnnnnnnnnnnnnnnnnnnnnnnnnnnnnnnnnnnnnnnnnnnnnnnnnnnnnnnnnnnnnnnnnnnnnnnnnnnnnnnnnnnnnnnnnnnnnnnnnnnnnnnnnnnnnnnnnnnnnnnnnnnnnnnnnnnnnnnnnnnnnnnnnnnnnnnnnnnnnnnnnnnnnnnnnnnnnnnnnnnnnnnnnnnnnnnnnnnnnnnnnnnnnnnnnnnnnnnnnnnnnnnnnnnnnnnnnnnnnnnnnnnnnnnnnnnnnnnnnnnnnnnnnnnnnnnnnnnnnnnnnnnnnnnnnnnnnnnccatggaccctcgctccacttcctgcctcctgaaagacccacctgtggaggttgctgatcagccatgatgggtgatgtcagatgttccccgtattgtgacatccagctggatgtgtggggttcttggccgccatctgtactgtagcactggcctctgtgccacagctactctttcttaaaggactgcttctgccctctgcctgccagtgcccattccactgtgaggtgtcattcccccatccagtgacaattgtctggattgcctgctgcaaagctttgatttggcaaaggagaccatggaagaatcatggtggatccagaagttacaggtgacccacaccatggcttttaagtctacccagttttgtggcagcaaatgagcacagtaagagcaaagctgaacaacttgcctcctctactcctccaaagcttttcttcaggcagccggtgcacagtgggactttttcacttctacactttgtatgcagccttccacacttccagagaatgtcagtgtgcaatgtgtctggagggtggggagaggaattctgtgagccttttcatttcggtgacagaagagatgggcagagcaacttactttttttcacattaaattgtgcatttgggaagcaagtagccatagnnnnnnnnnnnnnnnnnnnnnnnnnnnnnnnnnnnnnnnnnnnnnnnnnnnnnnnnnnnnnnnnnnnnnnnnnnnnnnnnnnnnnnnnnnnnnnnnnnnnnnnnnnnnnnnnnnnnnnnnnnnnnnnnnnnnaatgttttcctgagacaggagcgtatgtgaaaacatcaaacactgcacagaatgacaggatgggtcctctcatacagatgggtagggccagaaagccagaaccacttttccatctggtgtttcctgtatcctccaggtttttatatgggaatcgaaagtttgttaatctgattgggagagttccacaggcagatttcccttcctgaaggccaaaacggagaactgctctcttaaattatttcaagagtcaagaccaaaagtttgctcagcatcacactacatctcaaaattaatgttgccaacttaattttgtgcatttgtgtcagaatgcttagtttacaaggttgggnnnnnntttgcttcaagaagtaaacctaacaccattttttattgtttaaagttgcattcaacgtcaaaattacctagggtaacttttgataacttacatctgtggacaaagctaatagtggttttttaaacagcaccttgcctgaacatgactttaaagaaattaatatattgaaaacatgtttgaatccttgattattttaattgcaccattaaaacatttgacttaa

SEQ ID NO: 21633 - DNA, 1244 bp, Macaca Mulatta
  misc_feature (1)...(1244): n = A,T,C or G
taaagtaaatcattaaacgtgtttagagctcctttcttgtgaaccttttagagtgtttctatggaaaaataaaaccaaaagtacatttaaagatattaaagtattgctaaaaaatccatttttgtggactgctttaagccagatttactccactggcccaaaggaacaaggaggaataaaaggnnnnnnnnnnnnnnnnnnnnnnntcacgtggcgccaaatggataaatactctgtttttgtgtgtcgcttgccatgttctcaatttgagtggttagtggagtcccttctaaagtctttttggtagatcactgttatttactgggttcctcctttgtatgataagtgtgttggatgctaataaaaaataataactccagtttaaagcaaaaaccctcaaattacccccactccccacccccatggtgtttgtggagagtgcatttggagcagtatgctcaggaaataccactgactggagccctgagaaggtgtgtgtcatctctggcttgggggtgtggggagtggagatgggtaagcttttgacagacgtggagattagcatgcatttcaggtttatttttgtagcctctccctttgcgatggacattgccattcctcgtactatggatggaagctgatgtggtcttgctggctgctcatgtagtcactacaaatttatcaagnnnnnnnnnnnnnnnnnnnnnnnnnnnnnnnnnnnnnnnnnnnnnnnnnnnnnnnnnnnnnnnnnnnnnnnnnnnnnnnnnnnnnnnnnnnnnnnnnnnnnnnnnnnnnnnnnnnnnnnnnnnnnnnnnnnnnnnnnnnnnnnnnnnnnnnnnnnnnnnnnnnnnnnnnnnnnnnnnnnnnnnnnnnnnnnnnnnnnnnnnnnnnnnnnnnnnnnnnnnnnnnnnnnnnnnnnnnnnnnnnnnnnnnnnnnnnnnnnnnnnnnnnnnnnnnnnnnnnnnnnnntggtcgatttgcttcaggaattaacagatatagacaccctccatgagagtgaagagggagcagaagtgcttatcgatgctctggtnnnggtggatgggcaggtggtagcactgctggtacagaatctggagcgcctggatgagtctgtgaaagaggaggcagatggcgtccacaacactctgctattgtggaaaacatggctgagttccggcctgagatgtgtacagacggtgcccagcagggtcttctacagtggctgttgaagaggctgaagg

SEQ ID NO: 21634 - DNA, 146 bp, Macaca Mulatta
ataattatcaccgtttctgctctgttctggatctgcccccttttctcctcggggaacccaacgccccactctcgctctggatttcatttgggtcagcctggctggtccccaaggattaagatgggggggaccaaagcaacttatgt

SEQ ID NO: 21635 - DNA, 665 bp, Macaca Mulatta
  misc_feature (1)...(665): n = A,T,C or G
caccgtgccaaccccacccagctccaggcccgccggatgctgtggcctctgacgcccggccggccagacgctgtgccccgcctggcctggggaagccgaccaattagagtcactgctgctactgcccctctccaaaagaagacacagaaccaacaaaaccgcattcaatgcacctgcctcagctacctaatgattctgcgcggagacctcttgacaacctctcttcaagcatcctcagaagcctcaatgagctttagacagcagagcggatgccgcgggcgcggcacctctgcccacctctctctcttttcctccctctctgtctccccctctctgtcttctctatcctctctctctctctctatgactatcacacactttctcttcaatgaaaaaatctaattggtggcttatattttcagcaaagaattttggggggttttgtttgttggcaaaagagctactcagaaatggacaaagaaaactctgggggttctccccctcctgattaaaaagggagaaagaaaactgtgattntatagccggagatctgaacccagctgtgcccctcccccaggggcgtgaggctgattggcgaagacgggaggaaggatttcaatttctgactcaagaagcatttttggtttcagattttttttttcctg

SEQ ID NO: 21636 - DNA, 919 bp, Macaca Mulatta
  misc_feature (1)...(919): n = A,T,C or G
gagggcggggactccggaagccgccgtgcgcccgccgcccggccctgcccgggagggggacgcgcacacggcccccgtggcccgggcccgagaagctgcggggcgcaggtccctcctttccgcagcgggccccaggaccgctcctgactttgcctcgggcgcggggaagctgcctccgcggcgactactccgagcctggaaaacggccgggtccgggacgaagccccagaaacctgtggttcagaggggctaggggctcgggcgggagccggcgagaaggccgaggacgcgaccatggaggagggcgccatcttccaggaggagccagcggaggaggtggagaagcagcaggtgggggagngggggaggagaagcaggaggtgggagcggaggcccaggagggcccggggctcctgaaccttggtgccctaattgtggacccactggaggccnnnnnnnnnnnnnngaggccgtgagcgcccaggccgacagggcctacctccggcttgagcgcaggtttcggcggatgcacaggtcgcaccttgcccgtaggagcttcatcatccagaatattccgggcttctgggtcaccgccttcctgaaccacccgcagctgtcagccatgatcagccttcgagatgaagacatgctctgctacctgatgaatttggaggtgaaggagctcaggcactccaggacaggttgcaaattcaagttccgcttttggagcaacccctacttccagaacaaggtgataatgaaggagtatgaatgcagagcctcaggccgagtggtgtctattgcgactcgcatccgatggcaccggggccaggaacccccggccctcgtacacaggaaccgggacactgtccgaagcttcttcagctggttttcacagcacagcctcccagatgccgac

SEQ ID NO: 21637 - DNA, 391 bp, Macaca Mulatta
tgtgtgaaagcatattaccttataagcagataataattgaatttgggaaataataaccatttatatatttttccaaagtcattcactgatttgtatttttcattgttccatgttctaactccatggtggaaattccaagacatttttcaaaacctcacaaaatgccattattaatttatattctagtcttagttcagtgttcctaaaaaccttccttaaattacagtgccttgttgaggaggcacttataattagagtcaatgggcaaaaaatgacttagaattactgtatctgcaaaataatattcacattttactgtaaaatgtacctatctgcttcactgtgtatagtaataggatatgtaaaaaataatgaagtgtttcatacctga

SEQ ID NO: 21638 - DNA, 655 bp, Macaca Mulatta
cacaagtgcaaagttcttttgcacataaagttgcatattccctggtcccgggggagtaggacgtgaacatctttgagggttatcctgtagcctgccataacataacccaatccttccaagcacagcagagctgctcctacaagggctcagacatagggatttgagacactccccttgcaggccttttttgccttctctcctattcttgtttccaatcatgtacaggagagaagaggactttgccagtgggagaagtaggctcccccgatttaacggggccccaaaagaagggccaccagcaaagtggagtctttccatgaaggttatgctaaggaagctggtccagcaggggatggggtctccccagtggggagtctcatgccccagcccacaggtcacgcctgctcccacagcccacacgtgtggtgcctcgtgctgcaggcagagatcctagcatggagcagtgacagtccatcgatctttcatcttttctagccccctgatccaatgcaggtattatttcatgattgcagtttggggctgtggtagtggctctgtaagtgccttttatagtgtgaatgcagaaccagggcaggaaggacctgtgctacaccctcagcctaccgctgtgagcacccagggcagcagagggcag

SEQ ID NO: 21639 - DNA, 129 bp, Macaca Mulatta
gtaccagttacattcagggatgtggctgtgatcttcacagaagcagaatggaagagactgagtccagagcagaggaatctatacaaagaagtgatgctggagaattataggaatcttctctcattgggt

SEQ ID NO: 21640 - DNA, 578 bp, Macaca Mulatta
cgagggtaactggacatttccttatacctggagactcccaagccctacatctccagcagcaacttaaaccccagtggagggcacggagactgtgatcttatcctgtgatcctgacactcaggacgtaagctacttgtggtggataaatggacagagcctccctatcagtcgcaagttgcagctgtccgaaaacaacaggaccctcgttctatctggtgtcagaaaggatactgcaggaacctatgaatgtgaaatgaagaacccagtgagctccagccgcagtgacccagtcaccttgaatctcctctctcgttcaggaataggacgtccatccttgggcattaatccgattatagcaggcgtgatgtcctttcctgtattttcgggaagactggcagacagttgccttgattcttcccttgaaggtatttataaattcaggttacagttccaaaattgctttgacctttggaagggagaatctatgcgaaaaagaacctctgaccaacaactccttggaatattaggttctggaataaaacttccagatccttacccctgggagtctctggagaaac

SEQ ID NO: 21641 - DNA, 669 bp, Macaca Mulatta
attaaaaactacctgcaatatggaacacccaatgtgcttaatgaagacgtccaagagatgttaaaacctgccgagaattctagcgctgtgatacaaagaaaacatattttgtctattctcccccaaatcaaaagcattaacttttttgctaataccaaccttgtcatcattccaaatgccacccctgtgaactctgccaccgtcagcaccatgacctcaggacagatcacatacactgctacttctaccaagagtaacaccaaagaaagcagagattctgccactgcctcccccaccaccagcaccacctccaccaaacatactgccaacaccatcactggagctggaggaagcagaagagcagtaatggggatctttcccttaaaacttaaagtttcaagttcctctctatttttgctatctataaaatgacatagaactgtttcctctgtcatcagtcattcaataaacactgtttgagcacctacagtttatacaatggtatcattctcacaagagcctcacaggaggtagagctaggaagggatggaattgttttaagtttagatgcgtaggagaaagtaagcatcaggaaggtgactgcagcatcaaatttgtcccatgcatggcctagattaggcctctgtaacaagcatttatgtctctcat

SEQ ID NO: 21642 - DNA, 167 bp, Macaca Mulatta
ggaaggcccaaagaagtttgcagggggcagtgcagcacaaagcagcatctttcagtgctttgacgtcctgctgggcatccaacagaatgctggtggaggacatgctgctcagttcccccaggacatgagaacatatatgccaccagctcacaggaacttcctgtact

SEQ ID NO: 21643 - DNA, 787 bp, Macaca Mulatta
ggggcagatcatggcaggcagccggctggaaaccgtagggagcgtcttctcgcggactcggaacctgattcgggccggggtgctgaaggagaaacctctgtggttggacatatataacgcctttcccccgctgagggagcccgtcttccaaagaccccgattgcgatatggcaaagccaaagcttccatccaggacatctggtaccacgaggatcagattagagcgaagttttattcagtgtatgggtctggtcaaagagcttttgatctgttcaatccaaactacaagtctacctgtcaacggtttgtggagaagtacactgagctgcagaaacttggagaaacagatgaagagaagttatttgtggaaacagggaaggctttattggcagaaggtgtcattttaagacgagttggcgaagcaaggactcaacatgaaggtagtcacgattcctggaaatccgaacacttgagtgtcagaccacagactgcggtggaagagaacgagactcagaaagaagttccacaggaccagcatttggaggcacctgcagaccagttgaaaggtctctcgcctccctgaaagacctgtatactgtgtatgctggcattcacgctactcactggctgaatgttgagctatttttaaacgttgaactgtgtaaatgtttcctgatctctaaggtattatgtttgccttctcttagttattttcggggtgtcataaagctcggtatcataattttgacaaaaagcaattatgcgaactttttaggttaggacattt

SEQ ID NO: 21644 - DNA, 627 bp, Macaca Mulatta
  misc_feature (1)...(627): n = A,T,C or G
ttctaaaagaaaaagaccaacttactacagacctgaattccatggagaagtccttctccgacctcttcaagcgttntgagaaacagaaggaggtgatcgagggctaccgcaaggtatgttcccgctgccccgatgtcctcacctcggaggttgatggactcatggtccaagccagcggggctacaagctgctgtttgcaccttggtccttggccaagcctccccttgccatgggggcgtgggatgacctgtgaatgagacagggtgcaggagtcacagctggtttgcaaggcagctgagggtggtgggaggcagagtgagnnnnnnnnnnnnnnnnnnnnnngctgttatgtgagagacgacttggctatgatcaaacacctgtgagatttgagacagtgctggtgcaccggggcctggagcacttcagaaagggcgtcaaacctgggctgtctaagcgcttgggtcccaagggttggggacccagggcatgcagtatccaaggcaggaggcccatagaaaggtggtcacggctatgcaaggtcaccctggcgtcctcctggccataggactctgagcgccctccaccttctgtgctgggcaaggcccatgtgctgctggaaggagg

SEQ ID NO: 21645 - DNA, 994 bp, Macaca Mulatta
  misc_feature (1)...(994): n = A,T,C or G
ggggcgctctctttctgctgtttcccagctctcggatacagccgacaccatgggtttcggagacctgaaaagccccgccggcctccaggtgctcaacgattacctggcggacaagagctacatcgaggggtatgtgccatcacaagcagatgtggcaatatttgaagccgtgtccgggccaccgcctgctgacttgtgtcatgccctacgttggtataatcacatcaggtcctacgaaaaggaagagggcagcctgcgaggagtgaaggaaactttgggcaagtattgtcctgctgatgtggaagacgctaacgggaagtggaagctaccgatagtaaaggatgatgatgaatattggatctctttgggatctggatgaatgaaggaagaaaaagtggaaaaagggctaaggaagacgtaaggagnaaagaaacgtcctgtgccacaactagtggagatgcgagaagaaaaagccgaaaagaaaccctggcacctgtggtgagcccaaaaatcatgtgcccagtccattagactaggaatgattggaaaaaccctctggggagagatggatcgaaggaccagaaatattggagcgcaaaaaattgtgaaaagggaaagtggccgataccgagaaagaccattttcnnaaggaccgaaaccgggcctgtaggttggctcggggagcatcacagacctaagaacctaagatttccccggntagagagaataatggcggcagttgagaaaaaaaacctatcgaaaatacacaggggtgggttagtcttgaaaagaatgagtagaaagctttgggnaaccgcaagtagtgccttgagagagagaacgagaagtgcacctgccgcttattaaaagagaactgtgtaggtgcagagaccacaggagaaatagtaggactagcgcttgtcaaagcaagaaatcctgaaagaatcccggtcccagggagatagagagggaagtgtaaaataaaagagcggag

SEQ ID NO: 21646 - DNA, 1269 bp, Macaca Mulatta
  misc_feature (1)...(1269): n = A,T,C or G
ntgcagtccatgcgaacggctggtacgaggccctggccgcgtcttcgccggtgcgggttgcggaagaagtactgctcggcgtgcaggccaccacgggcctgccctggtggggcagcattctgctctccaccgtggccctgcggggtgctgtcacgctgcctttggccgcctaccagcactacatcctggccaaggtnnnnnnnnnnnnnnnnnnnnnnnnnnnnnnnnnnnnnnnnnnnnnnnnnnnnnnnnnnnnnnnnnnnnnnnnnnnnnnnnnnnnnnnnnnnnnnnnnnnnnnnnnnnnnnnnnnnnnnnnnnnnnnnnnnnnnnnnnnnnnnnnnnnnnnnnnnnnnnnnnnnnnnnnnnnnnnnnnnnnnnnnnnnnnnnnnnnnnnnnnnnnnnnnnnnnnnnnnnnnnnnnnnnnnnnnnnnnnnnnnnnnnnnnnnnnnnnnnnnnnnnnnnnnnnnnnnnnnnnnnnnnnnnnnnnnnnnnnnnnnnnnnnnnnnnnnnnnnnnnnnnnnnnnnnnnnnnnnnnnnnnnnnnnnnnnnnnnnnnnnnnnnnnnnnnnnnnnnnnnnnnnnnnnnnnnnnnnnnnnnnnnnnnnnnnnnnnnnnnnnnnnnnnnnnnnnnnnnnnnnnnnnnnnnnnnnnnnnnnnnnnnnnnnnnnnnnnnnnnnnnnnnnnnnnnncaattgttctctactggttatgctccagcttcatgggtctttcacagaacttgctgctgcgttctcctggatttcgccaactttgccgaataccatcgaccaagtcagattcagagactccttataaagacatatttgctgcctttaataccaagttcatttcaagaaaatgacatattttccaataatttaaaaacagttgcaagagtcactatcaccttaatgtatttagacttagaaattcagatgttatttgatttccttttttttaaaatcatgaacttcatgaaatattgtacattaagatggaatccagaccagngaacggtggctcatgcctgtaatcccagcactttgggaggccgaggtgggtggatcacctgaggtcaggagttcgagaccagcctgcccaacatggtgaaaccccgtctctactaaaaatacaaaacttagctgggcgtggtggtgcaggcctgtagtcccagctactcaggaggctgaggtaggacgattgcttgaacacgggaggcagaggttgcagtgagctgagatcatgccactgcactccagcctgggtgaca

SEQ ID NO: 21647 - DNA, 757 bp, Macaca Mulatta
  misc_feature (1)...(757): n = A,T,C or G
ggccaaggattctaccctagctgaggaagaatctgagttcccttctacttctatctctgcagttctgtctgacttagctgacttgagaagctgtgatggccaacctttgccctcccaggaccccgaggttgctttgtctctcagttgtggccattccagaggactctttagtcatatgcagcaacatgacattttagataccctgtgtaggaccattgaatctacaatccatgtggtcacaaggatatctggcaaaggaaaccaagctgcttcttgacattaggtgtagcatgtctacttttaagtccctcacccccatgctgtttgtataagttttgcttatttgtttttgtgcttcagtttgtctagtgctctctgcttgaatggcaagatagatttataggcttaattcttggtcaggcagaactccagatgaaaaaaacttgcatcttcagtatacttcctaaagggcaatcagataatggatatgttttatgtaattaagagttcactgtagtggctttcatttaatatggctgtctgggaagaacagggatccctagccctgtacaatgtaatttaaacttacagcatttttactgtgtataatatggtgtcctctgtgccagttttgtaccttatagaggcagattgccntccgatcgctgtggtttctattatcaaaatttagttttacttggtatacgggaacaacccacaggaaattttgatttctgtaaaggattcctcttttaac

SEQ ID NO: 21648 - DNA, 2892 bp, Macaca Mulatta
  misc_feature (1)...(2892): n = A,T,C or G
ccaggcagaggaaaatattgacttcttagatgatggctctaattcttttgcaactggcttgccatcaggaactattaaccacaagaaatacatcaagttttctaaaacaatagagaagaaaatttcaccggaagttaggagtttgagcccagaatannnnnnnnnnnnnnnnnnnnnnnnnnnnnnnnnnnnnnnnnnnnnnnnnnnnnnnnnnnnnnnnnnnnnnnnnnnnnnnnnnnnnnnnnnnnnnnnnnnnnnnnnnnnnnnnnnnnnngattatccctccttttctgaagctgtcaaaggagaaggtgactaggaaagaaaactctttatnnnnnnnnnnnnnnnnnnnnnnnnnnnnnnnnnnnnnnnnnnnnnnnnnnnnnnnnnnnnnnnnnnnnngggaaaaggaaatgctatctaacctctacatgacattatatgatgaagtaacccatggatatttatactcacaagaattaagtcacttcataaagcctgtaaaatttttagtaaaattcgaagtggtaagatttatgtgaatgatcttccagtgatcctcggcatcttgagaatttctataagtgatttagaaatgcgacaggcactaaagactattgatattgatgnnnnnnnnnnnnnnnnnnnnnnnnnnnnnnnnnnnnnnnnnnnnnnnnnnnnnnnnnnnnnnnnnnnnnnnnnnnnnnnnnnnnnnnnnnnnnnnnnnnnnnnnnnnnnnnnnnnnnnnnnnnnnnnnnnnnnnnnnnnnnnnnnnnnnnnnnnnnnnnnnnnnnnnnnnnnnnnnnnnnnnnnnnnnnnnnnnnnnnnnnnnnnnnnnnnnnnnnnnnnnnnnnnnnnnnnnnnnnnnnnnnnnnnnnnnnnnnnnnnnnnnnnnnnnnnnnnnnnnnnnnnnnnnnnnnnnnnnnnnnnnnnnnnnnnnnnnnnnnnnnnnnnnnnnnnnnnnnnnnnnnnnnnnnnnnnnnnnnnnnnnnnnnnnnnnnnnnnnnnnnnnnnnnnnnnnnnnnnnnnnnnnnnnnnnnnnnnnnnnnnnnnnnnnnnnnnnnnnnnnnnnnnnnnnnnnnnnnnnnnnnnnnnnnnnnnnnnnnnnnnnnnnnnnnnnnnnnnnnnnnnnnnnnnnnnnnnnnnnnnnnnnnnnnnnnnnnnnnnnnnnnnnnnnnnnnnnnnnnnnnnnnnnnnnnnnnnnnnnnnnnnnnnnnnnnnnnnnnnnnnnnnnnnnnnnnnnnnnnnnnnnnnnnnnnnnnnnnnnnnnnnnnnnnnnnnnnnnnnnnnnnnnnnnnnnnnnnnnnnnnnnnnnnnnnnnnnnnnnnnnnnnnnnnnnnnnnnnnnnnnnnnnnnnnnnnnnnnnnnnnnnnnnnnnnnnnnnnnnnnnnnnnnnnnnnnnnnnnnnnnnnnnnnnnnnnnnnnnnnnnnnnnnnnnnnnnnnnnnnnnnnnnnnnnnnnnnnnnnnnnnnnnnnnnnnnnnnnnnnnnnnnnnnnnnnnnnnnnnnnnnnnnnnnnnnnnnnnnnnnnnnnnnnnnnnnnnnnnnnnnnnnnnnnnnnnnnnnnnnnnnnnnnnnnnnnnnnnnnnnnnnnnnnnnnnnnnnnnnnnnnnnnnnnnnnnnnnnnnnnnnnnnnnnnnnnnnnnnnnnnnnnnnnnnnnnnnnnnnnnnnnnnnnnnnnnnnnnnnnnnnnnnnnnnnnnnnnnnnnnnnnnnnnnnnnnnnnnnnnnnnnnnnnnnnnnnnnnnnnnnnnnnnnnnnnnnnnnnnnnnnnnnnnnnnnnnnnnnnnnnnnnnnnnnnnnnnnnnnnnnnnnnnnnnnnnnnnnnnnnnnnnnnnnnnnnnnnnnnnnnnnnnnnnnnnnnnnnnnnnnnnnnnnnnnnnnnnnnnnnnnnnnnnnnnnnnnnnnnnnnnnnnnnnnnnnnnnnnnnnnnnnnnnnnnnnnnnnnnnnnnnnnnnnnnnnnnnnnnnnnnnnnnnnnnnnnnnnnnnnnnnnnnnnnnnnnnnnnnnnnnnnnnnnnnnnnnnnnnnnnnnnnnnnnnnnnnnnnnnnnnnnnnnnnnnnnnnnnnnnnnnnnnnnnnnnnnnnnnnnnnnnnnnnnnnnnnnnnnnnnnnnnnnnnnnnnnnnnnnnnnnnnnnnnnnnnnnnnnnnnnnnnnnnnnnnnnnnnnnnnnnnnnnnnnnnnnnnnnnnnnnnnnnnnnnnnnnnnnnnnnnnnnnnnnnnnnnnnnnnnnnnnnnnnnnnnnnnnnnnnnnnnnnnnnnnnnnnnnnnnnnnnnnnnnnnnnnnnnnnnnnnnnnnnnnnnnnnnnnnnnnnnnnnnnnnnnnnnnnnnnnnnnnnnnnnnnnnnnnnnnnnnnnnnnnnnnnnnnnnnnnnnnnnnnnnnnnnnnnnnnnnnnnnnnnnnnnnnnnnnnnnnnnnnnnnnnnnnnnnnnnnnnnnnnnnnnnnnnnnnnnnnnnnnnnnnnnnnnnnnnnnnnnnnnnnnnnnnnnnnnnnnnnnnnnnnnnnnnnnnnnnnnnnnnnnnnnnnnnnnnnnnnnnnnnnnnnnnnnnnnnnnnnnnnnnnnnnnnnnnnnnnnnnnnnnnnnnnnnnnnnnnnnnnnnnnnnngaaagtggcaaggttaccattcaagaatttatgactaaattctccgatatattgacaattcctaaacctgcaggtaagttttatttaatatgtaattattgcccagatctagaaaggcaagcagtggtttacatgttaaaaacaatacaggattcaatagttaaagcacaggtaagtaagaaggaatacaatatgaatatgaaacaacacaagattagattacataacttctgtttgaattctaaggcaaatattgctaaacttaacccaaactcaaaatttta

SEQ ID NO: 21649 - DNA, 533 bp, Macaca Mulatta
cccagaacagtatcaaagcgctttttggactttattggccacatcttgacgtaacctcctgcgcgtgcctcggacggacatgaacatgagatggacagaggtggcttcagtgtaagaaaaatgaaaaccaaactcagtgaagtactcatcttgcaggaagcaaacctccttgtttacatcttcaggccaagatgactgatttgggggctactcgctttacagctacctgattttcccagcatcgttctagctatttctgactttgtgtatatgtgtggggggtgagagtgtgtgcgcattttaaaagtcataaattaaaacagatccactttggtcagaatgtgtcccaacaaagaccctttgattccagctatggccgaatgagtgaacaagtgaacacacgtgtaggggaggggagaaggaagtgcatgtcaggcacccgtgttggcatcaacgcgacaaactgtggatcagttctcagtacacacgctaccaccacattcgagttgacagatgtgagacagtattcagaa

SEQ ID NO: 21650 - DNA, 2295 bp, Macaca Mulatta
  misc_feature (1)...(2295): n = A,T,C or G
gatgatatcagctctgattccgataccttctccgatgacatggccttcaaactagacagaagggtagaacgacgaacgtcgtggatcagatcggagcgaccgcctgcacaaacatcgtcaccaccagcacaggcgttcccgggacttactaaaagctaaacagaccgaaaaagaaaaaagccaggaagtctccagcaagtcgggatcgatgaaggaccggatatcgggaagttcaaagcgttcgaatgaggagactgatgactatgggaaggcgcaggtagccaaaagcagcagcaaggaatccaggtcatccaagctccacaaggagaagaccaggaaagaacgggagctgaagtctgggcacaaagaccggagtaaaagtcatcgaaaaagggaaacacccaaaagttacaaaacagtggacagccccaaacggagatccaggagcccccacaggaagtggtctgacagctccaaacaagatgatagcccctcgggagcttcttatggccaagattatgaccttagtcccccaagatctcatacctcgagcaattatgactcctacaagaaaagtcctggaagtacctcgagaaggcagtcgatcagccccccttacaaagagccttcggcctaccagtcaagcacccggtcaccgagcccctacagtaggcgacagaggtctgtcagtccctatagcaggagacggtcgtccagctacganaggagcggctcttacagcgggcgatcgcccagcccctatggtcgaaagcggtccagcagccctttcctgagcaagcggtccctgagtcggagtccactccccagnccagtaggaaatccatgaagtccagaagtagaagtcctgcatattcaagacattcatcttctcatagtaaaaagaagagatccagttcacgcagtcgtcattccagtatctcacctgtcaggcttccactgaattccagtctgggagctgaactcagtaggaaaaagaaggaaagagcagctgctgctgctgcagcaaaaatggatggaaaggaatccaagggttcacctgtatttttgcctagaaaagagaacagttcagtagaggctaaggattcaggtttggagtctaaaaagttacccagaagtgtaaaattggaaaaatctgctccagatactgatctggtgaatgtaacacatctaaacacagaggtaaaaaattctttagatacagggaaagtaaagttggatgagaactctgagaagcatcttgttaaagatttgaaagcacagggaacaagagactctaaacccatagcactgaaagaggagattgttactccaaaggagacagaaacatcagaaaaggagacccctccacctcttcctacaattacttctcccccaccccctctaccaactactacccctccacctcagacaccccctttgccacctttgcctccagtaccagctcttccgcagcaannnnnnnnnnnnnnnnnnnnnnnnnnnnnnnnnnnnnnnnnnnnnnnnnnnnnnnnnnnnnnnnnnnnnnnnnnnnnnnnnnnnnnnnnnnnnnnnnnnnnnnnnnnnnnnnnnnnnnnnnnnnnnnnnnnnnnnnnnnnnnnnnnnnnnnnnnnnnnnnnnnnnnnnnnnnnnnnnnnnnnnnnnnnnnnnnnnnnnnnnnnnnnnnnnnnnnnnnnnnnnnnnnnnnnnnnnnnnnnnnnnnnnnnnnnnnnnnnnnnnnnnnnnnnnnnnnnnnnnnnnnnnnnnnnnnnnnnnnnnnnnnnnnnnnnnnnnnnnnnnnnnnnnnnnnnnnnnnnnnnnnnnnnnnnnnnnnnnnnnnnnnnnnnnnnnnnnnnnnnnnnnnnnnnnnnnnnnnnnnnnnnnnnnnnnnnnnnnnnnnnnnnnnnnnnnnnnnnnnnnnnnnnnnnnnnnnnnnnnnnnnnnnnnnnnnnnnnnnnnnnnnnnnnnnnnnnnnnnnnnnnnnnnnnnnnnnnnnnnnnnnnnnnnnnnnnnnnnnnnnnnnnnnnnnnnnnnnnnnnnnnnnnnnnnnnnnnnnnnnnnnnnnnnnnnnnnnnnnnnnnnnnnnnnnnnnnnnnnnnnnnnnnnnnnnnnnnnnnnnnnnnnnnnnnnnnnnnnnnnnnnnnnnnnnnnnnnnnnnnnnnnnnnnnnnnnnnnnnnnnnnnnnnnnnnnnnnnnnnnnnnnnnnnaggtgccttttaccttgtatttgagtatatggaccatgacttaatgggactgctagaatctggtttggtgcacttttctgaagaccatatc

SEQ ID NO: 21651 - DNA, 2644 bp, Macaca Mulatta
  misc_feature (1)...(2644): n = A,T,C or G
gaactgttcacatcaggtagcatccgtaggaaccatgtaagaagcctccacttccacggacgatttcgtgatcgtatagaaatgttgctttcggcccagacctttgtggggcaagtgttggtnnnnnnnnnnnnnnnnnnnnnnnnnnnnnnnnnnnnnnnnnnnnnnnnnnnnnnnnnnnnnnnnnnnnnnnnnnnnnnnnnnnnnnnnnnnnnnnnnnnnnnnnnnnnnnnnnnnnnnnnnnnnnnnnnnnnnnnnnnnnnnnnnnnnnngtttatggcagctgatgacaagatcaagttctggctggagatgaattctatcgtagacatctttaccatcccaccaacctttatttcttactatttgaagagcaattggctaggnnnnnnnnnnnnnnnnnnnnnnnnnnnnnnnnnnnnnnnnnnnnnnnnnnnnnnnnnnnnnnnnnnnnnnnnnnnnnnnnnnnnnnnnnnnnnnnnnnnnnnnnnnnnnnnnnnnnnnnnnnnnnnnnnnnnnnnnnnnnnnnnnnnnngtggaaaattctggtgatccctggctcaaaggtagaaattcacagaacatatcatattttgattcagtttacctggtcatggcaacaacgtcaactgttggctttggagatgtggtagccaagacatccttaggacggacattcatcatattcttcacactggggagtttgnnnnnnnnnnnnnnnnnnnnnnnnnnnnnnnnnnnnnnnnnnnnnnnnnnnnnnnnnnnnnnnnnnnnnnnnnnnnnnnnnnnnnnnnnnnnnnnnnnnnnnnnnnnnnnnnnnnnnnnnnnnnnnnnnnnnnnnnnnnnnnnnnnnnnnnnnnnnnnnnnnnnnnnnnnnnnnnnnnnnnnnnnnnnnnnnnnnnnnnnnnnnnnnnnnnnnnnnnnnnnnnnnnnnnnnnnnnnnnnnnnnnnnnnnnnnnnnnnnnnnnnnnnnnnnnnnnnnnnnnnnnnnnnnnnnnnnnnnnnnnnnnnnnnnnnnnnnnnnnnnnnnnnnnnnnnnnnnnnnnnnnnnnnnnnnnnnnnnnnnnnnnnnnnnnnnnnnnnnnnnnnnnnnnnnnnnnnnnnnnnnnnnnnnnnnnnnnnnnnnnnnnnnnnnnnnnnnnnnnnnnnnnnnnnnnnnnnnnnnnnnnnnnnnnnnnnnnnnnnnnnnnnnnnnnnnnnnnnnnnnnnnnnnnnnnnnnnnnnnnnnnnnnnnnnnnnnnnnnnnnnnnnnnnnnnnnnnnnnnnnnnnnnnnnnnnnnnnnnnnnnnnnnnnnnnnnnnnnnnnnnnnnnnnnnnnnnnnnnnnnncctaaacagacctggcagaaacacttcttgaatagcatgaaaaacaatattctgacccaacgtctctctgatgactttgctggaatgagctttcctgaagatgcccgnnnnnnnnnnnnnnnnnnnnnnnnnnnnnnnnnnnnnnnnnnnnnnnnnnnnnnnnnnnnnnnnnnnnnnnnnnnnnnnnnnnnnnnnnnnnnnnnnnnnnnnnnnnnnnnnnnnnnnnnnnnnnnnnnnnnnnnnnnnnnnnnnnnnnnnnnnnnnnnnnnnnnnnnnnnnnnnnnnnnnnnnnnnnnnnnnnnnnnnnnnnnnnnnnnnnnnnnnnnnnnnnnnnnnnnnnnnnnnnnnnnnnnnnnnnnnnnnnnnnnnnnnnnnnnnnnnnnnnnnnnnnnnnnnnnnnnnnnnnnnnnnnnnnnnnnnnnnnnnnnnnnnnnnnnnnnnnnnnnnnnnnnnnnnnnnnnnnnnnnnnnnnnnnnnnnnnnaggacttttccacatgatgtagaacaagattctgaccagcttgatagcagtgggatgtttcactggtgcaaaccaatctctttggacaaggtgactctaaacgaagtcgcaagttaaaacataagtttcggaaccacattgtagcatgtgtatttggagatgcccaatcagccctgatagggcttcggaactttgtaatgcccttgagagccagcaactataccaggaaggagctgaaggacatagtgttcattgggtctctggactatctacagagagaatggcgatttctccggaattttccccagatatacattctgcctgnnnnnnnnnnnnnnnnnnnnnnnnnnnnnnnnnnnnnnnnnnnnnnnnnnnnnnnnnnnnnnnnnnnnnnnnnnnnnnnnnnnnnnnnnnnnnnnnnnnnnnnnnnnnnnnnnnnnnnnnnnnnnnnnnnnnnnnnnnnnnnnnnnnnnnnnnnnnnnnnnnnnnnnnnnnnnnnnnnnnnnnnnnnnnnnnnnnnnnnnnnnnnnnnnnnnnnnnnnnnnnnnnnnnnnnnnnnnnnnnnnnnnnnnnnnnnnnnnnnnnnnnaaaatccttccaacattcactttattgaacagcttggtggactggaagggtccctccaagaaacaaatctgcatctcagcactgccttttctacaggcactgttttttctggcagcttcttggattctctcctgnnnnnnnnnnnnnnnnnnnnnnnnnnnnnnnnnnnnnnnnnnnnnnnnnnnnnnnnnnnnnnnnnnggccttctacaattatcatgtcctggaattgcttcagatgctggtg

SEQ ID NO: 21652 - DNA, 1260 bp, Macaca Mulatta
  misc_feature (1)...(1260): n = A,T,C or G
agtgctggtagcatcccgtaattttgcaaatgatgctacatttgaaattaagaaatgtgaccttcaccgactggaagaaggccctcctgtcacaacagtgctcaccagggaggatgggctcaaatactacaggatgatgcagactgtgcgccgaatggagttgaaagcagatcagctgtataaacagaaaattattcgtgctttctgtcacttgtgtgatggtcaggaagcttgctgtgtgggcctggaagccggcatcaaccccacagaccatctcataacagcctaccgggctcacggctttaccttcacccggggcctttccgtccgagaaattctcgcagagcttacaggacgaaaaggaggttgtgctaaaggcaaaggaggatcgatgcacatgtatgccaagaacttctacgggggcaatggcatcatggaagcgcaggtgcccctgggcctgggattgctctagcctgtaagtataatggaaaagatgaggtctgctgactttatacggcgatggtgctgctaaccagggccagatattcgaagcttacaacatggcagctttgtggaaattaccttgtattttcatctgtgaaaataatcgctatggaatgggaacatcttttgagagagcagcagccagcactgattactataagagaggtgatttcattcctgggctgagagtggatggaatggatatcctgtgcgtccgagaggcgacaaggtttgctgctgcctattgtagatctgggaaggggcccatcctgatggagctgcagacttatcgttaccacggacacagtatgagtgatcctggagtcagttaccgtacacgagaaagaaattcaggaagtaagaannnnnagggatcctataatgatctccaagatagaatggtaaacagcaagcttgccactgtggaagaattaaaggaaattgggactgaggtgaagaaagaaattgatgatgctgcccaatttgctatcagtgatcctgagccacgtctggaaggattaagcccatcacatctgcagcagtgattcatcttttgaagttcgtggtgcaaatccatggatcaagtttaagtccgtcagttaaagggaggctaagtgtgaatttatcatcagtctctcaatggaatgttcatggtcaaatttaagaaactatgttctcaactcaaggaggaataaaactcataaaacaaaagccttgtaagcatatatttaaagagattattaaaagagattgaaa

SEQ ID NO: 21653 - DNA, 4644 bp, Macaca Mulatta
  misc_feature (1)...(4644): n = A,T,C or G
ctgccgctgccgctgcctctgcgggcgctnnnnnnnnnnnnnnnnnnnnnnnnnnnnnnnnnnnnnnnnnnnnnnnnnnnnnnnnnnnnnnnnnnnnnnnnnnnnnnnnnnnnnnnnnnnnnnnnnnnnnnnnnnnnnnnnnnncctgccccggcggctggtgctgctgctggctctttgggtgcaggnnnnnnnnnnnnnnnnnnnnnnnnnnnnnnnnnnnnnnnnnnnnnnnnnnnnnnnnnnnnnnnnnnnnnnnnnnnnnnnnnnnnnnnnnnnnnnnnnnnnnnnnnnnnnnnnnnnnnnnnnnnnnnnnnnnnnnnnnnnnnnnnnnnnnnnnnnnnnnnnnnnnnnnnnnnnnnnnnnnnnnnnnnnnnnnnnnnnnnnnnnnnnnnnnnnnnnnnnnnnnnnnnnnnnnnnnnnnnnnnnnnnnnnnnnnnnnnnnnnnnnnnnnnnnnnnnnnnnnnnnnnnnnnnnnnnnnnnnnnnnnnnnnnnnnnnnnnnnnnnnnnnnnnnnnnnnnnnnnnnnnnnnnnnnnnnnnnnnnnnnnnnnnnnnnnnnnnnnnnnnnnnnnnnnnnnnnnnnnnnnnnnnnnnnnnnnnnnnnnnnnnnnnnnnnnnnnnnnnnnnnnnnnnnnnnnnnnnnnnnnnnnnnnnnnnnnnnnnnnnnnnnnnnnnnnnnnnnnnnnnnnnnnnnnnnnnnnnnnnnnnnnnnnnnnnnnnnnnnnnnnnnnnnnnnnnnnnnnnnnnnnnnnnnnnnnnnnnnnnnnnnnnnnnnnnnnnnnnnnnnnnnnnnnnnnnnnnnnnnnnnnnnnnnnnnnnnnnnnnnnnnnnnnnnnnnnnnnnnnnnnnnnnnnnnnnnnnnnnnnnnnnnnnnnnnnnnnnnnnnnnnnnnnnnnnnnnnnnnnnnnnnnnnnnnnnnnnnnnnnnnnnnnnnnnnnnnnnnnnnnnnnnnnnnnnnnnnnnnnnnnnnnnnnnnnnnnnnnnnnnnnnnnnnnnnnnnnnnnnnnnnnnnnnnnnnnnnnnnnnnnnnnnnnnnnnnnnnnnnnnnnnnnnnnnnnnnnnnnnnnnnnnnnnnnnnnnnnnnnnnnnnnnnnnnnnnnnnnnnnnnnnnnnnnnnnnnnnnnnnnnnnnnnnnnnnnnnnnnnnnnnnnnnnnnnnnnnnnnnnnnnnnnnnnnnnnnnnnnnnnnnnnnnnnnnnnnnnnnnnnnnnnnnnnnnnnnnnnnnnnnnnnnnnnnnnnnnnnnnnnnnnnnnnnnnnnnnnnnnnnnnnnnnnnnnnnnnnnnnnnnnnnnnnnnnnnnnnnnnnnnnnnnnnnnnnnnnnnnnnnnnnnnnnnnnnnnnnnnnnnnnnnnnnnnnnnnnnnnnnnnnnnnnnnnnnnnnnnnnnnnnnnnnnnnnnnnnnnnnnnnnnnnnnnnnnnnnnnnnnnnnnnnnnnnnnnnnnnnnnnnnnnnnnnnnnnnnnnnnnnnnnnnnnnnnnnnnnnnnnnnnnnnnnnnnnnnnnnnnnnnnnnnnnnnnnnnnnnnnnnnnnnnnnnnnnnnnnnnnnnnnnnnnnnnnnnnnnnnnnnnnnnnnnnnnnnnnnnnnnnnnnnnnnnnnnnnnnnnnnnnnnnnnnnnnnnnnnnnnnnnnnnnnnnnnnnnnnnnnnnnnnnnnnnnnnnnnnnnnnnnnnnnnnnnnnnnnnnnnnnnnnnnnnnnnnnnnnnnnnnnnnnnnnnnnnnnnnnnnnnnnnnnnnnnnnnnnnnnnnnnnnnnnnnnnnnnnnnnnnnnnnnnnnnnnnnnnnnnnnnnnnnnnnnnnnnnnnnnnnnnnnnnnnnnnnnnnnnnnnnnnnnnnnnnnnnnnnnnnnnnnnnnnnnnnnnnnnnnnnnnnnnnnnnnnnnnnnnnnnnnnnnnnnnnnnnnnnnnnnnnnnnnnnnnnnnnnnnnnnnnnnnnnnnnnnnnnnnnnnnnnnnnnnnnnnnnnnnnnnnnnnnnnnnnnnnnnnnnnnnnnnnnnnnnnnnnnnnnnnnnnnnnnnnnnnnnnnnnnnnnnnnnnnnnnnnnnnnnnnnnnnnnnnnnnnnnnnnnnnnnnnnnnnnnnnnnnnnnnnnnnnnnnnnnnnnnnnnnnnnnnnnnnnnnnnnnnnnnnnnnnnnnnnnnnnnnnnnnnnnnnnnnnnnnnnnnnnnnnnnnnnnnnnnnnnnnnnnnnnnnnnnnnnnnnnnnnnnnnnnnnnnnnnnnnnnnnnnnnnnnnnnnnnnnnnnnnnnnnnnnnnnnnnnnnnnnnnnnnnnnnnnnnnnnnnnnnnnnnnnnnnnnnnnnnnnnnnnnnnnnnnnnnnnnnnnnnnnnnnnnnnnnnnnnnnnnnnnnnnnnnnnnnnnnnnnnnnnnnnnnnnnnnnnnnnnnnnnnnnnnnnnnnnnnnnnnnnnnnnnnnnnnnnnnnnnnnnnnnnnnnnnnnnnnnnnnnnnnnnnnnnnnnnnnnnnnnnnnnnnnnnnnnnnnnnnnnnnnnnnnnnnnnnnnnnnnnnnnnnnnnnnnnnnnnnnnnnnnnnnnnnnnnnnnnnnnnnnnnnnnnnnnnnnnnnnnnnnnnnnnnnnnnnnnnnnnnnnnnnnnnnnnnnnnnnnnnnnnnnnnnnnnnnnnnnnnnnnnnnnnnnnnnnnnnnnnnnnnnnnnnnnnnnnnnnnnnnnnnnnnnnnnnnnnnnnnnnnnnnnnnnnnnnnnnnnnnnnnnnnnnnnnnnnnnnnnnnnnnnnnnnnnnnnnnnnnnnnnnnnnnnnnnnnnnnnnnnnnnnnnnnnnnnnnnnnnnnnnnnnnnnnnnnnnnnnnnnnnnnnnnnnnnnnnnnnnnnnnnnnnnnnnnnnnnnnnnnnnnnnnnnnnnnnnnnnnnnnnnnnnngaggccctgagcgcccagtgcccgccggggcaaaggtgcctggagaaggccccaggccagtgtctgcgaccaccctgtgaggcctggggggagtgcggcacagaagagccaccgagcaccccctgcctgccgcgctccggccacctggacaataactgcgcccgcctcaccttgcgtttcaaccgtgaccatgtgccccaggnnnnnnnnnnnnnnnnnnnnnnnnnnnnnnnnnnnnnnnnnnnnnnnnnnnnnnnnnnnnnnnnnnnnnnnnnnnnnnnnnnnnnnnnnnnnnnnnnnnnnnnnnnnnnnnnnnnnnnnnnnnnnnnnnngtccttcagccctgcgagggacctgcctgacagcagcttgatccagggcgcggcccatgccatcgtggccgccatcacccagcgggggaacggctcactgctcctggctgtcaccgaggtgaaggtggagacagtcgttatgggcggctcttccacaggtnnnnnnnnnnnnnnnnnnnnnnnnnnnnnnnnnnnnnnnnnnnnnnnnnnnnnnnnnnnnnnnnnnnnnnnnnnnnnnnnnnnnnnnnnnnnnnnnnnnnnnnnnnnnnnnnnnnnnnnnnnnnnnnnnnnnnnnnnnnnnnnnnnnnnnnnnnnnnnnnnnnnnnnnnnnnnnnnnnnnnnnnnncacaaggacgtgctctaccagtgcaagaacttcacgccgccgccgcgcagggcagacgaggcgctgcccgggccggccggccacgcgggcgtcagggaggacgaggaggacgaggatctaggccgcggtgaggaggactccctggaggcggagaagttcctctcgcacaaattcaccaaagatcctggccgctcgccggggaggccggcccactgggcctcgggccccaaagtggacaaccgcgcggtcaggagcatcaatgaggcccgctacactggcaaggagtaggggcggccgccagctgggccgggacccagggccctcggtgggacctatgccgtctgccggacctggaggccaaggccatgtgcatagtttctttattttgtgtnnnnnnnnnnnnnnnnnnnnnnnnnnnngtttattttctacgtttctttaaccttgtataaattattcagtaactgtcaggccgaaaacaatggagtattctcggatagttgctatttttgtaaagtttccgtgcgtggcactcgctgtgcggcaggagagagcaaagggtgtctgcgtcctcaccaaatcgtagcgtttgttaccagaggttgtgcactgtttacagaatcttccttttattcctcactcgggtttctctgtggctccaggccaaagtgccggtgagacccatggctgtgttggtgtggcccatggctgtcggtgggacccatggctgatggtgtggcctgtggctgtcggtgggactcgtggctgtcagtgggacccgtggctgtcggtgggacctacggtggtcggtgggacactggttattgatgcggccccggccgccggcacggcccgtggctgttggcgcacctgtggttgttagtggggcctgaggtcatcggcgtggcctgaggccggcaggtcgacctcgcgcttgctggccagtccgccccgcctgccgtctgtgcttcctcctgcccagaacgcccgctccagcgatctctccactgtgctttcagaagtgcccttcctgctgcgcagttctcccctcctgggacggcggcagaagagaagcttgtgacaagtgccttcaca

SEQ ID NO: 21654 - DNA, 1345 bp, Macaca Mulatta
  misc_feature (1)...(1345): n = A,T,C or G
agtcctccctcggtggcctcgccgcggccctgccgggagacctggcgctggcggctgctgaggccggagcggagggcccgggagcgtgggagcaggagggtggcgcgcagccggtttcgcgttcggtcggccagggagctgccttcccaccagccggtagaggaaacaacggnnnnnnnnnnnnnnnnnnnnnnnnnnnnnnnnnnnnnnnnnnnnnnnnnnnnnnnnnnnnnnnnnnnnnnnnnnnnnnnnnnnnnnnnnnnnnnnnnnnnnnnnnnnnnnnnnnnnnnnnnnnnnnnnnnnnnnnnnnnnnnnnnnnnnnnnnnnnnnnnnnnnnnnnnnnnnnnnnnnnnnnnnnnnnnnnnnnnnnnnnnnnnnnnnnnnnnnnnnnnnnnnnnnnnnnnnnnnnnnnnnnnnnnnnnnnnnnnnnnnnnnnnnnnnnnnnnnnnnnnnnnnnnnnnnnnnnnnnnnnnnnnnnnnnnnnnnnnnnnnnnnnnnnnnnnnnnnnnnnnnnnnnnnnnnnnnnnnnnnnnnnnnnnnnnnnnnnnnnnnnnnnnnnnnnnnnnnnnnnnnnnnnnnnnnnnnnnnnnnnnnnnnnnnnnnnnnnnnnnnnnnnnnnnnnnnnnnnnnnnnnnnnnnnnnnnnnnnnnnnnnnnnnnnnnnnnnnnnnnnnnnnnnnnnnnnnnnnnnnnnnnnnnnnnnnnnnnnnnnnnnnnnnnnnnnnnnnnnnnnnnnnnnnnnnnnnnnnnnnnnnnnnnnnnnnnnnnnnnnnnnnnnnnnnnnnnnnnnnnnnnnnnnnnnnnnnnnnnnnnnnnnnnnnnnnnnnnnnnnnnnnnnnnnnnnnnnnnnnnnnnnnnnnnnnnnnnnnnnnnnnnnnnnnnnnnnnnnnnnnnnnnnnnnnnnnnnnnnnnnnnnnnnnnnnnnnnnnnnnnnnnnnnnnnnnnnnnnnnnnnnnnnnnnnnnnnnnnnnnnnnnnnnnnnnnnnnnnnnnnnnnnnnnatgactatgactccaagaaacgcaaacagcgggctgctggagagccctggggtgctaagaagccaaggcatgacctgcctccttaccgggtccacctcactccctacactgtggacagnagccccgtatgtgacttcctagaactccagcgtcgttaccgcagcctcgtggtcccctcagattttctgtccgagcatatgagttggctgtcagccttccctctgagccaacccttttccctccatcacccgagtcggatccaggtctcttgtgaaaaggaggcagctccagatgctggtgctgagcccatccctgcagacagtgaccccgcttatagttccaaggt

SEQ ID NO: 21655 - DNA, 274 bp, Macaca Mulatta
  misc_feature (1)...(274): n = A,T,C or G
ctactgccagcatattggggtggaccttttggtcatcaatgacctggagcagtgccagtggagccgcctgaagggtgagacccctggaatcatgcagttcacaaatgaggagaagcggaccctgctggccaggcttgtactttccaccaggtnccaggtttgaggagttcctacagcggaagtggtcctctgagaagcgctttggtctagaaggctgtgaggtactgatccctgccctcaagaccatcatcgacaagtcgagtgagaacggcgt

SEQ ID NO: 21656 - DNA, 1442 bp, Macaca Mulatta
  misc_feature (1)...(1442): n = A,T,C or G
aagctctacgtgtcatctgacttggggaaaaagtggacacttctgcaagagcgagtgaccaaagaccacnnnnnnnnnnnnnnnnnnnnnnnnnnnnnnnnnnnnnnnnnnnnnnnnnnnnnnnnnnnnnnnnnnnnnnnnnnnnnnnnnnnnnnnnnnnnnnnnnnnnnnnnnnnnnnnnnnnnnnnnnnnnnnnnnnnnnnnnnnnnnnnnnnnnnnnnnnnnnnnnnnnnnnnnnnnnnnnnnnnnnnnnnnnnnnnnnnnnnnnnnnnnnnnnnnnnnnnnnnnnnnnnnnnnnnnnnnnnnnnnnnnnnnnnnnnnnnnnnnnnnnnnnnnnnnnnnnnnnnnnnnnnnnnnnnnnnnnnnnnnnnnnnnnnnnnnnnnnnnnnnnnnnnnnnnnnnnnnnnnnnnnnnnnnnnnnnnnnnnnnnnnnnnnnnnnnnnnnnnnnnnnnnnnnnnnnnnnnnnnnnnnnnnnnnnnnnnnnnnnnnnnnnnnnnnnnnnnnnnnnnnnnnnnnnnnnnnnnnnnnnnnnnnnnnnnnnnnnnnnnnnnnnnnnnnnnnnnnnnnnnnnnnnnnnnnnnnnnnnnnnnnnnnnnnnnnnnnnnnnnnnnnnnnnnnnnnnnnnnnnnnnnnnnnnnnnnnnnnnnnnnnnnnnnnnnnnnnnnnnnnnnnnnnnnnnnnnnnnnnnnnnnnnnnnnnnnnnnnnnnnnnnnnnnnnnnnnnnnnnnnnnnnnnnnnnnnnnnnnnnnnnnnnnnnnnnnnnnnnnnnnnnnnnnnnnnnnnnnnnnnnnnnnnnnnnnnnnnnnnnnnnnnnnnnnnnnnnnnnnnnnnnnnnnnnnnnnnnnnnnnnnnnnnnnnnnnnnnnnnnnnnnnnnnnnnnnnnnnnnnnnnnnnnnnnnnnnnnnnnnnnnnnnnnnnnnnnnnnnnnnnnnnnnnnnnnnnnnnnnnnnnnnnnnnnnnnnnnnnnnnnnnnnnnnnnnnnnnnnnnnnnnnnnnnnnnnnnnnnnnnnnnnnnnnnnnnnnnnnnnnnnnnnnnnnnnnnnnnnnnnnnnnnnnnnnnnnnnnnnnnnnnnnnnnnnnnnnnnnnnnnnnnnnnnnnnnnnnnnnnnnnnnnnnnnnnnnnnnnnnnnnnnnnnnnnnnnnnnnnnnnnnnnnnnnnnnnnnnnnnnnnnnnnnnnnnnnnnnnnnnnnnnnnnnnnnnnnnnnnnnnnnnnnnnnnnnnnnnnnnnnnnnnnnnnnnnnnnnnnnnnnnnnnnnnnnnnnnnnnnnnnnnnnnnnnnnnnnnnnnnnnnnnnnnnnnnnnnnnnnnngcgactacggatttgagcgctccccctcctcagagtccaacaccaacaagtgctctgccaacttctggtttaatccattgtccccgcctgacgactgtgccctgggccagacctacaccagcagccttggg

SEQ ID NO: 21657 - DNA, 307 bp, Macaca Mulatta
gaagatgctgggagtgtatgcagaaggagacaattctttctctgccatccagctgagtgaaagtggaagtgactctgatgtggatctggtgggataaaatccaaacaaccccacatgcttcagcatgcttcaggagaacacaaggatgggcatggaaaatgaagaaagcatgatgtcctatgagggagacagtgggggaggcttcatacagtttggaggatagcaacatcagttatgggagctatgaggagcctgatcccaagttgaacacccaagacacaagcttcagcagcatcagaaatttcca

SEQ ID NO: 21658 - DNA, 322 bp, Macaca Mulatta
  misc_feature (1)...(322): n = A,T,C or G
ggtgtgactgtgtgggagctgatgacttttggggccaaaccttacgatgggatcccagcccgggagatccctgacctgctggaaaagggggagcggctgccccagccccccatctgcaccattgatgtctacatgatcatggtcaaatgnttggatgattgactctgaatgtcggccgagattccgggagttggtgtcggaattctcccgcatggccagggacccccagcgctttgtggtcatccagncagaatgaggacttgggcccagccagtcccttggacagcaccttctaccgctcactgctggaggacgatgacat

SEQ ID NO: 21659 - DNA, 407 bp, Macaca Mulatta
  misc_feature (1)...(407): n = A,T,C or G
ggaatcattgctgcgagcattttttgcaccatctggccacattgagggcttcacagcagaaattggagctagtgggtcatactgcccccagcanactgtggtaaagatgttcctcgtgacctttgacttctcggacatgcctgctgcccacatgaccttccttcgccatcgcctctttttggtgcctgtgggtgaggagggaaatgctaaccccacccaccgcctcctctgctacttgctgcacctnnctcaggttccggagctcccgctcaggccgcttaagcctgcatggagatatccgcctgcttttttcccgccggagcctggagctggacacagggctcccttacgaactgcaggctgtgaccgaggcccctcataatccacgttattcacctttgccctga

SEQ ID NO: 21660 - DNA, 705 bp, Macaca Mulatta
gcgcaggccagtacttcaccgagagtggcctggtgggcctcctggagcaggctgcagagctcttcagcacgggaggtttatatgagacggttaacgaggtctacaagctggtcatccccatcctagaagcgcatcgagaattccggaagctgacactcactcacagcaagctgcagagggccttcgacagcattgtgaacaaggatcataagagaatgtttggaacctacttccgagttggtttctttggatccaaatttggggatttggatgaacaagaatttgtttacaaagagcctgcaattaccaagcttcctgagatctcacatagactagaggcattttatggtcaatgttttggtgcagaatttgtggaagtgattaaagactccactcctgtggacaaaaccaagttggatcctaacaaggcctacatacagatcacttttgtggagccctactttgatgagtatgagatgaaagacagggtcacatactttgagaagaatttcaacctccggaggttcatgtacaccaccccgttcaccctggcggggcggcctcggggagagctgcatgagcagcacagaaggaacaccgtcttgaccaccatgcacgccttcccctacatcaagaccaggatcagcgtcatccagaaggaggagtttgttttgacaccgattgaagttgccattgaagacctga

SEQ ID NO: 21661 - DNA, 411 bp, Macaca Mulatta
ccgggcagggtcctggccagtggtgtgggagcaggaggggaaggatagttctgtgtgctcctcttgggagtaggggactgaactgggatgtcttggcttgtatgttttttgaagcttcgattatgatttttaaacaataaaaagttatccaaagcgctttgtgcatcagttactatacttcactgcaatattggcaggctcagattttgggttttttggccttagagtactagccccaggtgtgtaatctgagggcctgatgggtctgcagatgggaggtgcccaggggaggatgaaggggtcctgggctggggtcgggcgcctaggtttagtctgtttcgtacctgcgtggctttggaaaggtcttgttagggaaggcgtaccatgcgcccaccaccggctgcagacctt

SEQ ID NO: 21662 - DNA, 626 bp, Macaca Mulatta
  misc_feature (1)...(626): n = A,T,C or G
gggttgctgcctacgacctcacctggttccagtaccactctttggatgtgattgggttcctgttggcctgtgtggcaactgtgattttcatcatcacaaaatgtctgttttttgtcttgaagtttgttagaacaggaaagaagggaaaaagagattaattacatctgaggctggaagctgcaaaatccgataaatgagactccttcagtttattacaacaagaagaggtcgtgatacaagattcctttcttcttgtcacaaaacatctttcaaaacttaccttttcaagtctaaattnntttagtacctgtttaaccattagacatatttcacttcaaggaggaaaacattagggaaagtaaaaatgatataaagccatatgaacttatactgaaatttattgagtttatattgaaatttattgtnnnnnnnnnnnnnnnnnnnnnnnnnnnnnnnnnnnnnttaattacatatcacacactgtacatggaaacaagagcattaagaagtgcactgacagtatcaatactgttttgcacatactcagcatattttggattaatttcatgcaggattgttttgttttaactgtctctgaggaaactattaaataattagattgtata

SEQ ID NO: 21663 - DNA, 910 bp, Macaca Mulatta
  misc_feature (1)...(910): n = A,T,C or G
cggggagctccgggctacactgaggcccaatgccgccatggccgcctgccctgggcgcagctgttccagcccaccatcgcactgctccgagggggtcatgtggtggcccctgtcctcagccagttcctgcacaacggcttcctgcaccttccttgcaggcgtcaacgctgcnnnnnnnnnnnnnnnnnnnnnnnnnnnnnnnnnnnnnnnnnnnnnnnnnnnnnnnnnnnnnnnnnnnnnnnnnnnnnnnnnnnnnnnnnnnnnnnnnnnnnnnnnnnnnnnnnnnnnnnnnnnnnnnnnnnnnnnnnnnnnnnnnnnnnnnnnnnnnnnnnnnnnnnnnnnnnnnnnnnnnnnnnnnnnnnnnnnnnnnnnnnnnnnnnnnnnnnnnnnnnnnnnnnnnnnnnnnnnnnnnnnnnnnnnnnnnnnnnnnnnnnnnnnnnnnnnnnnnnnnnnnnnnnnnnnnnnnnnnnnnnnnnnnnnnnnnnnnnnnnnnnnnnnnnnnnnnnnnnnnnnnnnnnnnnnnnnnnnnnnnnnnnnnnnnnnnnnnnnnnnnnnnnnnnnnnnnnnnnnnnnnnnnnnnnnnnnnnnnnnnnnnnnnnnnnnnnnnnnnnnnnnnnnnnnnnnnnnnnnnnnnnnnnnnnnnnnnnnnnnnnnnnnnnnnnnnnnnnnnnnnnnnnnnnnnnnnnnnnnnnnnnnnnnnnnnnnnnnnnnnnnnnnnnnnnnnnnnnnnnnnnnnnnnnnnnnnnnnnnnnnnnnnnnnnnnnnnnnnnnnnnnnnnnnnnnnnnnnnnnnnnnnnnnnnnnntttggagcgatggtgtattcaccacggacaggcatcatcctcaacaacgagctcctggacttatgcgagcgatgcccccggggttccggcaccaccccctcacctg

SEQ ID NO: 21664 - DNA, 108 bp, Macaca Mulatta
aaggcgtttattgcaacagaacctgggatggatggctctgctggaacaatgttgcagcaggaactgaatcaatgcagctctgcggagattactttcaggactttgatc

SEQ ID NO: 21665 - DNA, 929 bp, Macaca Mulatta
ggggacgctccgtttcaagttacagatttcttaaaactacactttgtgtgcagttgaaggcccttgggcacaatgagagcgagtcctccaaacttttataaagtttcctgccccttctggcgggcggccaatcgccgggcgggcgaaggaaggaggggaaggcggtggagggagcgagacaaagggatggtctctcggggattgcaggaggagatgcttcagagagaggaagccgagaacaccctgcaatctttcagacaggatgttgacaatgcgtctctggcacgtcttgaccttgaacgcaaagtggaatctttgcaagaagagattgcctttttgaagaaactccatgaagaggaaatccaggagctgcaggctcagattcaggaacagcatgtccagatcgatgtggatgtttccaagcctgacctcacggctgccctgcgtgacgtacgtcagcaatatgaaagtgtggctgccaagaacctgcaggaggcagaagaatggtacaagtccaagtttgctgacctctccgaggctgccaaccggaacaatgacgccctacgccaggcaaagcaggagtccaatgaataccggagacaggtgcaatccctcacctgtgaagtggatgcccttaaaggaaccaatgagtccctggaacgccagatgcgtgaaatggaagagaactttgccgttgaagctgctaactaccaagacactattggccgtctgcaagatgagattcagaatatgaaggagggaaatggctcgtcaaccttcgttgaataccaaggacctggctcaatggttaagaaggggccttggactttggagaatggccaccctaccgggaaagctgcctggaaaggccaaaggaaaagcaaggaattttcctccggcccgtccttccaaaaaatttttctcccccc

SEQ ID NO: 21666 - DNA, 680 bp, Macaca Mulatta
  misc_feature (1)...(680): n = A,T,C or G
ccacatatgcaatgacttaatttcacttttgtagtttaatcctttgtattacaacatgaaatatagttgcatatatggacaccngacttgggaggacaggtcctgaatgtcctttctccagtgtaacatgttttactcacaaataaaattctttcnnnnnnnnnnnnnnnnnnnnnnnnnnnnnnnnnnnnnnnnnnnnnnnnnnnnnnnnnnnnnnnnnnnnnnnnnnnnnnnnnnnnnnnnnnnnnnnnnnnnnnnnnnnnnnnnnnnnnnnnnnnnnnnnnnnnnnnnnnnnnnnnnnnnnnnnnnnnnnnnnnnnnnnnnnnnnnnnnnnnnnnnnnnnnnnnnnnnnnnnnnnnnnnnnnnnnnnnnnnnnnnnnnnnnnnnnnnnnnnnnnnnnnnnnnnnnnnnnnnnnnnnnnnnnnnnnnnnnnnnnnnnnnnnnnnnnnnnnnnnnnnnnnnnnnnnnnnnnnnnnnnnnnnnnnnnnnnnnnnnnnnnnnnnnnnnnnnnnnnnnnnnnnnnnnnnnnnnnnnnnnnnnnnnnnnnnnnnnnnnnnnnnnnnnnnnnnnnnnnnnnnnnnnnnnnnnnnnnnnnnnnnnnnnnnnnnnnnnnnnnnnnnnnnnnnnnnnnnnnnnnnnnnnnnnnnnnnnnnnnnnnnnnnnnnnnnnnnnnnnnnnnn

SEQ ID NO: 21667 - DNA, 525 bp, Macaca Mulatta
cggcccttacactgtggtgtccagcagcatccggcttcatggggggccttgaaccctgcagcaggctcctgctcctgcctctcctgctggctgtaggtggtctccgtcctgtccaggcccaggcccagagcgattgcagttgctctacggtgagcccgggcgtgctggcagggatcgtgctgggggacttggtgctgacagtgctcatcgccctggctgtgtacttcctgggccggctggtccctcgggggcgaggggctgcggaggcagcgacccggaaacagcgtatcactgagacggagtcgccttatcaggagctccagggtcagaggtcggatgtctacagcgacctcaacacacagaggccatattacaaatgagcccgaatcatgacagtcagcaacctgatacctggatccagccattcctgaagcccaccccgcacctcattccaactcctaccgtgatacagaaccacagagtaccgtccctgagagaccagaccgctccccaatactctcaatc

SEQ ID NO: 21668 - DNA, 490 bp, Macaca Mulatta
ttatttgttttatattttgtgatgtggggaatcaattttagatggtcgcaatctaaattataatcaacaggtgaacttactaaataacttttctaaataaaaaacttagagactttaattttaaaagtcatcatatgagctaatatcacaattttcccagtttaaaaaactagttttcttgttaaaactctaaacttgactaaataaagaggactgataattatacagttcttaaatttgttgtaatattaatttcaaaactaaaaattgtcagcacagagtatgtgtaaaaatctgtaatataaatttttaaactgatgcctcattttgctacaaaataatctggagtaaatttttgataggatttatttatgaaacctaatgaagcaggattaaatactgtattaaaataggttcgctgtcttttaaacaaatggagatgatgattactaagtcacattgactttaatatgaggtatcactatacctt

SEQ ID NO: 21669 - DNA, 670 bp, Macaca Mulatta
aggggagccatggccccacggctgtctccccctgaggatgtcatcccggtctgagcccctcctattacaggaggggacaagcacctgccagcaccggcacccctcgatcccaacctcagatggcaccctttgggtgcggagtgggcaaggaagacgactcagctggtgaaggctcagtactttcccttttccccaatcactaagtaattctctcatccttgaaagcacttttctgctgaaattccgaaagaacttattttgaagttacgccagtaaaagctctggaaactgtgatgggagcctgtgctggaagccgaggacaaagctccatgctgattctcccttcctcttatttatttgcatgatctgagctaatttctcagctgtaatctacaccacccaccacctagaaacttcccagaaacgtccagcaggggaggggtgggaacgagaaagaatgcacccaacgttccggtggggtctgcgcagccgccagactgtttccagactgtcacggccgacttagtaattcgcttagaaggtctcccgaaataagcacaaaatgttggcagcaaatggtcaaagggaaatgccccagttttcttgggggacggaccctcttactttatcatatagcagtgtgagctaaagtgtgaggacggggcagaca

SEQ ID NO: 21670 - DNA, 213 bp, Macaca Mulatta
ggcggttcagcctgcccgcggccgccccgggagagcacgggtcccaggcgccctcgccgggggcagcggctgcccggtgcggtcagcatggcgacccattcaagctctactgccaggacgacggacgtgccatctgcgtggtgtgcgaccgcgcccgcgagcaccgcgagcacgccgtgctgccgctggacgaggcggtgcaggacgccaagg

SEQ ID NO: 21671 - DNA, 146 bp, Macaca Mulatta
ctggctgaccgtgatcttcatcatcctgggagccctcctcctcctgctgctgattggagtgtgctggtgccagtgctgtcctcagtattgctgctgctacatccgctgtccctgctgtcccgcccgctgctgctgtcctgaggaag

SEQ ID NO: 21672 - DNA, 838 bp, Macaca Mulatta
  misc_feature (1)...(838): n = A,T,C or G
tgtgtggtgcggccctgttggcagtgggcatctgggtgtcaatcgatggggcatcctttctgaagatcttcgggccgctgtcgtccagtgccatgcagtttgtcaacgtgggctacttcctcatcgcagccggcgctgtggtctttgctcttggtttcctgggctgctatggtgctcagactgagagcaagtgtgccctcatgacgnnnnnnnnnnnnnnnnnnnnnnnnnnnnnnnnnnnnnnnnnnnnnnnnnnnnnnnnnnnnnnnnnnnnnnnnnnnnnnnnnnnnnnnnnnnnnnnnnnnnnnnnnnnnnnnnnnnnnnnnnnnnnnnnnnnnnnnnnnnnnnnnnnnnnnnnnnnnnnnnnnnnnnnnnnnnnnnnnnnnnnnnnnnnnnnnnnnnnnnnnnnnnnnnnnnnnnnnnnnnnnnnnnnnnnnnnnnnnnnnnnnnnnnnnnnnnnnnnnnnnnnnnnnnnnnnnnnnnnnnnnnnnnnnnnnnnnnnnnnnnnnnnnnnnnnnnnnnnnnnnnnnnnnnnnnnnnnnnnnnnnnnnnnnnnnnnnnnnnnnnnnnnnnnnnnnnnnnnnnnnnnnnnnnnnnnnnnnnnnnnnnnnnnnnnnnagctggctgccatgattgtgtccatgtatctgtactgcaatctacaataagtacacttctgcctctgccactactgctgccacatgggaactgtgaagaggcaccctggcaagaagcagtgatgggggaagtgtcaggatctaacaatgtcacttggtacagagtggacctgcccttcctgctccagacttggggctataaagggaccactccttttagg

SEQ ID NO: 21673 - DNA, 626 bp, Macaca Mulatta
  misc_feature (1)...(626): n = A,T,C or G
cctgctcagacgtggctttcttcttgctggaagaggaggctgggagttgaacatcggcactcttccaggaatgggacccccagtgaggatgaggccttagggctccctctgacttggcagactcagcctgtcaccccaaatgcagcaatggcctggtgattcccaaacatccttcctgcatccccctgaccctcccacacagcttggctcttgcccctgacaggatactgagccaagccctgcctgtggccaggccctgagtggccactgccaagctgtggggaagggtcctgagcaggggcatctgggaggctccggctgccttctgcatnnnnnnnnnnnnnnnnnnnnnnncttgcttctaaggggtggtggccaccactgtttagaatgacccttgggaacagtgaacgtagagaattgtttttagcggagtttgtgaccaaagtcagagtggatcatggtggtttggcagcagggaagttgtcttgtcggagcctgctctgtgctccccactccatttctctgtccctctgcctgggctatgggaagtggggatgcggatggtcaagcttccaccctgggtattcgaaaacagcagacnnnnnnnnnnnnnnnnnnnnnnn

SEQ ID NO: 21674 - DNA, 522 bp, Macaca Mulatta
caagaggactggcctgtctttacccagagtaggaacgattcttccaaagatcccctctccctttgaatcattcttaaccacagtgagggtgcgttctgaatggcacacgcctgacactgcacaccagtggctatagcactgcccctcacaagctccagtggctctgcacagctcctcctctggtggaaaagctcaaattctccactctgggccaggagtcctagaagattttgggtctgaaccggtcaaattcaacccaagatcaaagaaacagaggttcaaaaatgtgaagcagctcccagcacccatccagtgttgattgtcaatacggtcctggtccctccataacgcccctctctaccgcttctacagaggagggcggtgagtgtagggggagggggcacggtgggcgtcccagggagcgcagcacaatcattctggcctcctcctcctccttttcctgggctctgccttcacgccagtcacctccccgggctccgcgttgccccctcacctgtctca

SEQ ID NO: 21675 - DNA, 13764 bp, Macaca Mulatta
  misc_feature (1)...(13764): n = A,T,C or G
cgtcacctggcgagggaagcatgagctccaggtgctagctgtggaccgcatgcggaaaatctctgagggcgatgggtttggcagcctggctgcacttgtcgttcatgtggagcctgccctcaggaagcccccagccattgcttcggtggtggtgactccaccagacagcaatgatggtaccacctatgccactgtactggtcgatgcaaatagctcaggagctgaagtggagtcagtggaagttgttggtggtgaccctggaaagcacttcaaagccatcaagtcttatgcccggagcaatgagttcagtttggggtctgtcaaagacatcaactggatggagtaccttcatgggttcaacctcagcctccaggacaggagtgggnnnnnnnnnnnnnnnnnnnnnnnnnnnnnnnnnnnnnnnnnnnnnnnnnnnnnnnnnnnnnnnnnnnnnnnnnnnnnnnnnnnnnnnnnnnnnnnnnnnnnnnnnnnnnnnnnnnnnnnnnnnnnnnnnnnnnnnnnnnnnnnnnnnnnnnnnnnnnnnnnnnnnnnnnnnnnnnnnnnnnnnnnnnnnnnnnnnnnnnnnnnnnnnnnnnnnnnnnnnnnnnnnnnnnnnnnnnnnnnnnnnnnnnnnnnnnnnnnnnnnnnnnnnnnnnnnnnnnnnnnnnnnnnnnnnnnnnnnnnnnnnnnnnnnnnnnnnnnnnnnnnnnnnnnnnnnnnnnnnnnnnnnnnnnnnnnnnnnnnnnnnnnnnnnnnnnnnnnnnnnccttggatgagaacatccctccaggcaccagtgttttggctgtgactgccactgaccgggatcacggggagaatggatatgtcacctattccattgctggaccaaaagctttgccgttttctattgacccttacctggggatcatctccacctccaaacccacagactatgaactcatgaagagaatttataccttccgggtaagagcatcagactggggatccccctttcgccgggagaaggaagtgtccatttttcttcagctcaggaacttgaatgacaaccagcccatgtttgaagaagtcaactgcacagggtctatccaccaagactggccagtagggaaatcaatagtgactatgtcagccatagatgtggatgagcttcagaacctaaaatacgagattatatcaggcaatgaattagagtattttgatctaaatcatttctccggagtgatatccctcaagcgctcttttatcagtcttactgctggtcaacccaccagttattccctgaaaattacagcctcagatggcaaaaactatgcctcacccacaactttgaatattactgtggtgaaggaccctcattttgaagttcctgtaacatgtgataaaacaggagtattgacacagttcacaaagactatcctccactctattgggcttcagaaccaggagtccagtgatgaggaattcacttctttaagcacatatcagattaatcattacaccccccagtttgaggaccacttcccccaatccattgatgtccttgagagtgtccctatcaacacccccttggcccgcctagcagccactgaccctgatgctggttttaatggcaaactggtctatgtgattgcagatggcaaagaggagggctgctttgacatagagctggagacagggctgnnnnnnnnnnnnnnnnnnnnnnnnnnnnnnnnnnnnnnnnnnnnnnnnnnnnnnnnnnnnnnnnnnnnnnnnnnnnnnnnnnnnnnnnnnnnnnnnnnnnnnnnnnnnnnnnnnnnnnnnnnnnnnnnnnnnnnnnnnnnnnnnnnnnnnnnnnnnnnnnnnnnnnnnnnnnnnnnnnnnnnnnnnnnnnnnnnnnnnnnnnnnnnnnnnnnnnnnnnnnnnnnnnnnnnnnnnnnnnnnnnnnnnnnnnnnnnnnnnnnnnnnnnnnnnnccacagagaagttctccctccaccctctcactggggaactggttgttacaggacacctggaccgtgaatcagagcctcggtacatactcaaggtggaggccagggatcagcccagcaagggccaccagctattctctgtcactgacctgataatcacattggaggatgtcaacgacaactctccccagtgcatcacagaacgcaacaggctgaaggtcccagaggacctgccccccgggactgtcttgacatttctggatgcctctgatcctgacctgggccccgcaggtgaagtgcgatatgttctgatggatggcgcccatgggaccttccgggtggacctgatgacaggggcgctcattctggagagagagctggactttgagaggcgagctgggtacaatctgagcctgtgggccagtgacagagagaggcccctggcccgcaggnnnnnnnnnnnnnnnnnnnnnnnnnnnnnnnnnnnnnnnnnnnnnnnnnnnnnnnnnnnnnnnnnnnnnnnnnnnnnnnnnnnnnnnnnnnnnnnnnnnnnnnnnnnnnnnnnnnnnnnnnnnnnnnnnnnnnnnnnnnnnnnnnnnnnnnnnnnnnnnnnnnnnnnnnnnnnnnnnnnnnnnnnnnnnnnnnnnnnnnnnnnnnnnnnnnnnnnnnnnnnnnnnnnnnnnnnnnnnnnnnnnnnnnnnnnnnnnnnnnnnnnnnnnnnnnnnnnnnnnnnnnnnnnnnnnnnnnnnnnnnnnnnnnnnnnnnnnnnnnnnnnnnnnnnnnnnnnnnnnnnnnnnnnnnnnnnnnnnnnnnnnnnnnnnnnnnnnnnnnnnnnnnnnnnnnnnnnnnnnnnnnnnnnnnnnnnnnnnnnnnnnnnnnnnnnnnnnnnnnnnnnnnnnnnnnnnnnnnnnnnnnnnnnnnnnnnnnnnnnnnnnnnnnnnnnnnnnnnnnnnnnnnnnnnnnnnnnnnnnnnnnnnnnnnnnnnnnnncaggtgctcatgctcaattctgcccccaggtgactgtgctggacaatggggagccctcactgaagtccacctccagggtggtgataggcatcttggacgtcaatgacaatccacctgtattctcccataaactcttcaatgtccgacttccagagagtctgannnnnnnnnnnnnnnnnnnnnnnnnnnnnnnnnnnnnnnnnnnnnnnnnnnnnnnnnnnnnnnnnnnnnnnnnnnnnnnnnnnnnnnnnnnnnnnnnnnnnnnnnnnnnnnnnnnnnnnnnnnnnnnnnnnnnnnnnnnnnnnnnnnnnnnnnnnnnnnnnnnnnnnnnnnnnnnnngatcaaggcaacagacagtgggcagccaccactctcagccagtgtccggctacacattgagtggatccctcagcctcggccgtcctccatccccctggcctttgatgagacccactacagctttacggtcatggagacggaccctgtgaaccacatggtgggggtcatcagcgtagagggcagacccggcctcttctggttcaacatctcaggtgnnnnnnnnnnnnnnnnnnnnnnnnnnnnnnnnnnnnnnnnnnnnnnnnnnnnnnnnnnnnnnnnnnnnnnnnnnnnnnnnnnnnnnnnnnnnnnnnnnnnnnnnnnnnnnnnnnnnnnnnnnnnnnnnnnnnnnnnnnnnnnnnnnnnnnnnnnnnnnnnnnnnnnnnnnnnnnnnnnnnnnnnnnnnnnnnnnnnnnnnnnnnnnnnnnnnnnnnnnnnnnnnnnnnnnnnnnnnnnnnnnnnnnnnnnnnnnnnnnnnnnnnnnnnnnnnnnnnnnnnnnnnnnnnnnnnnnnnnnnnnnnnnnnnnnnnnnnnnnnnnnnnnnnnnnnnnnnnnnnnnnnnnnnnnnnnnnnnnnnnnnnnnnnnnnnnnnnnnnnnnnnnnnnnnnnnnnnnnnnnnnnnnnnnnnnnnnnnnngtccgagaccaggaaatacccatcaagaggaactttgtgtgggtgaccattcgtgtggaggatggaaacctccacccaccctgcttcacccagctccactatgaagcaagtgttcctgacaccatagtccctggcacagagctgctgcaggtccgagccacggatgccgaccggggagtcaatgctgaggtccactactccctcctgaaaggnnnnnnnnnnnnnnnnnnnnnnnnnnnnnnnnnnnnnnnnnnnnnnnnnnnnnnnnnnnnnnnnnnnnnnnnnnnnnnnnnnnnnnnnnnnnnnnnnnnnnnnnnnnnnnnnnnnnnnnnnnnnnnnnnnnnnnnnnnnnnnnnnnnnnnnnnnnnnnnnnnnnnnnnnnnnnnnnnnnnnnnnnnnnnnnnnnnnnnnnnnnnnnnnnnnnnnnnnnnnnnnnnnnnnnnnnnnnnnnnnnnnnnnnnnnnnnnnnnnnnnnnnnnnnnnnnnnnnnnnnnnnnnnnnnnnnnnnnnnnnnnnnnnnnnnnnnnnnnnnnnnnnnnnnnnnnnnnnnnnnnnnnnnnnnnnnnnnnnnnnnnnnnnnnnnnnnnnnnnnnnnnnnnnnnnnnnnnnnnnnnnnnnnnnnnnnnnnnnnnnnnnnnnnnnnnnnnnnnnnnnnnnnnnnnnnnnnnnnnnnnnnnnnnnnnnnnnnnnnnnnnnnnnnnnnnnnnnnnnnnnnnnnnnnnnnnnnnnnnnnnnnnnnnnnnnnnnnnnnnnnnnnnnnnnnnnnnnnnnnnnnnnnnnnnnnnnnnnnnnnnnnnnnnnnnnnnnnnnnnnnnnntgttggtctataaaattttggagccggaggccttgaagtttttcaaaattgatcccagcatgggaacactaaccattgtatcagagatggattatgagagcatgccctctttccaattctgtgtctatgtccatgaccaaggaagccccatattatttgcacccagacctgcccaagtcatcattcacgtcagagatgtgaatgactctcctcccaggttctcagaacagatatatgaggtagcaatagtgggacctatccatccaggcatggagcttctcatggtgcgggccagcgatgatgactcagaagtcaattatagcatcaaaactggcaatgctgatgaagctgttaccatccatcctatcactggtagcatatctgtgctgaatcctgctctcctgggactctctcggaagctcaccatcagggcttctgatggcttgtatcatcacactgcactggtaaaaatttctttgacccaagtgcttgacaaaagcttgcagtttgatcaggatgtctatacagcagctgtgaaggaggacttacaggacagaaaggcactggtgattcttggtgcccagggcaatcatttgaatgacaccctttcctacttcctcttgaatggcacagatatgtttcatatggtccagtcagcaggcgtgttgcagacaatatgtgtggcatttgaccgggagcagcaggacactcacgagctggcagtggaagtgagagacaatcggacgcctcagcgggtggctcaggctttggtcagagtctctattgaggatgtcaatgacaatccccccaaatttaagcatctgccctattacacaatcatccaagatggcacagagccaggggatgtcctctttcaggtatctgccactgatgaggacttggggacaaatggggccgttacatatgaatttgcagaagattacacatatttccgaattgacccctatcttggggacataacactcaagaaaccctttgattatcaagctttaaataagtatcgcctcaaagtcattgctcgggatggaggaacgccatccctccagnnnnnnnnnnnnnnnnnnnnnnnnnnnnnnnnnnnnnnnnnnnnnnnnnnnnnnnnnnnnnnnnnnnnnnnnnnnnnnnnnnnnnnnnnnnnnnnnnnnnnnnnnnnnnnnnnnnnnnnnnnnnnnnnnnnnnnnnnnnnnnnnnnnnnnnnnnnnnnnnnnnnnnnnnnnnnnnnnnnnnnnnnnnnnnnnnnnnnnnnnnnnnnnnnnnnnnnnnnnnnnnnnnnnnnnnnnnnnnnnnnnnnnnnnnnnnnnnnnnnnnnnnnnnnnnnnnnnnnnnnnnnnnnnnnnnnnnnnnnnnnnnnnnnnnnnnnnnnnnnnnnnnnnnnnnnnnnnnnnnnnnnnnnnnnnnnnnnnnnnnnnnnnnnnnnnnnnnnnnnnnnnnnnnnnnnnnnnnnnnnnnnnnnnnnnnnnnnnnnnnnnnnnnnnnnnnnnnnnnnnnnnnnnnnnnnnnnnnnnnnnnnnnnnnnnnnnnnnnnnnnnnnnnnnnnnnnnnnnnnnnnnnnnnnnnnnnnnnnnnnnnnnnnnnnnnnnnnnnnnnnnnnnnnnnnnnnnnnnnnnnnnnnnnnnnnnnnnnnnnnnnnnnnnnnnnnnnnnnnnnnnnnnnnnnnnnnnnnnnnnnnnnnnnnnnnnnnnnnnnnnnnnnnnnnnnnnnnnnnnnnnnnnnnnnnnnnnnnnnnnnnnnnnnnnnnnnnnnnnnnnnnnnnnnnnnnnnnnnnnnnnnnnnnnnnnnnnnnnnnnnnnnnnnnnnnnnnnnnnnnnnnnnnnnnnnnnnnnnnnnnnnnnnnnnnnnnnnnnnnnnnnnnnnnnnnnnnnnnnnnnnnnnnnnnnnnnnnnnnnnnnnnnnnnnnnnnnnnnnnnnnnnnnnnnnnnnnnnnnnnncttacaattagaggataggcgcttctgatggagtcttccgagcaactgtgcctgtgtacatcaacactacaaatgtcaacaagtacagcccagagttccagcagcacctttatgaggcagaattagcagagaatgcaatggttggaaccaaggtgattgatttgctagccatagacaaagatagtggtccttatggcactgtagattatactatcatcaataaactagcaagtgagaagttctccataaaccccaatggccagattgccactctacagaaactggatcgggaaaattcaacagagagggtcattgctattaaggtcatggctcgggatggaggaggaagagtagccttctgcacgaagaagatcatcctcacagatgaaaatgacaaccctccacagttcaaagcatctgagtacacagtatccattcaatccaatgtcagtaaagactctccggttatccaggtgttggcctatgatgcagatgaaggtcagaatgcagatgtcacctactcaatgaatccagaggacctagttaaagatgtcattgaaattaacccagtcactggtgtggtcaaggagaaagacagcctggtgggattggaaaatcagacccttgacttcttcatcaaagcccaagatggagnnnnnnnnnnnnnnnnnnnnnnnnnnnnnnnnnnnnnnnnnnnnnnnnnnnnnnnnnnnnnnnnnnnnnnnnnnnnnnnnnnnnnnnnnnnnnnnnnnnnnnnnnnnnnnnnnnnnnnnnnnnnnnnnnnnnnnnnnnnnnnnnnnnnnnnnnnnnnnnnnnnnnnnnnnnnnnnnnnnnnnnnnnnnnnnnnnnnnnnnnnnnnnnnnnnnnnnnnnnnnnnnnnnnnnnnnnnnnnnnnnnnnnnnnnnnnnnnnnnnnnnnnnnnnnnnnnnnnnnnnnnnnnnnnnnnnnnnnnnnnnnnnnnnnnnnnnnnnnnnnnnnnnnnnnnnnnnnnnnnnnnnnnnnnnnnnnnnnnnnnnnnnnnnnnnnnnnnnnnnnnnnnnnnnnnnnnnnnnnnnnnnnnnnnnnnnnnnnnnnnnnnnnnnnnnnnnnnnnnnnnnnnnnnnnnnnnnnnnnnnnnnnnnnnnnnnnnnnnnnnnnnnnnnnnnnnnnnnnnnnnnnnnnnnnnnnnnnnnnnnnnnnnnnnnnnnnnnnnnnnnnnnnnnnnnnnnnnnnnnnnnnnnnnnnnnnnnnnnnnnnnnnnnnnnnnnnnnnnnnnnnnnnnnnnnnnnnnnnnnnnnnnnnnnnnnnnnnnnnnnnnnnnnnnnnnnnnnnnnnnnnnnnnnnnnnnnnnnnnnnnnnnnnnnnnnnnnnnnnnnnnnnnnnnnnnnnnnnnnnnnnnnnnnnnnnnnnnnnnnnnnnnnnnnnnnnnnnnnnnnnnnnnnnnnnnnnnnnnnnnnnnnnnnnnnnnnnnnnnnnnnnnnnnnnnnnnnnnnnnnnnnnnnnnnnnnnnnnnnnnnnnnnnnnnnnnnnnnnnnnnnnnnnnnnnnnnnnnnnnnnnnnnnnnnnnnnnnnnnnnnnnnnnnnnnnnnnnnnnnnnnnnnnnnnnnnnnnnnnnnnnnnnnnnnnnnnnnnnnnnnnnnnnnnnnnnnnnnnnnnnnnnnnnnnnnnnnnnnnnnnnnnnnnnnnnnnnnnnnnnnnnnnnnnnnnnnnnnnnnnnnnnnnnnnnnnnnnnnnnnnnnnnnnnnnnnnnnnnnnnnnnnnnnnnnnnnnnnnnnnnnnnnnnnnnnagaaagctccacttttgtcatttctctggccaggggagctgaccacactcacagccctggaccgagaaaggaaggatgtgttcaaccttgttgccaaggcgacggatggaggtggccgatcgtgccaggcagacgtcaccctccatgtggaggatgtgaatgacaatgccccacggttcttccccagccactgtactgtggctgtctttgacaacaccacagtgaagacccctgtggctgtagtatttgcccgggatcccgaccaagnnnnnnnnnnnnnnnnnnnnnnnnnnnnnnnnnnnnnnnnnnnnnnnnnnnnnnnnnnnnnnnnnnnnnnnnnnnnnnnnnnnnnnnnnnnnnnnnnnnnnnnnnnnnnnnnnnnnnnnnnnnnnnnnnnnnnnnnnnnnnnnnnnnnnnnnnnnnnnnnnnnnnnnnnnnnnnnnnnnnnnnnnnnnnnnnnnnnnnnnnnnnnnnnnnnnnnnnnnnnnnnnnnnnnnnnnnnnnnnnnnnnnnnnnnnnnnnnnnnnnnnnnnnnnnnnnnnnnnnnnnnnnnnnnnnnnnnnnnnnnnnnnnnnnnnnnnnnnnnnnnnnnnnnnnnnnnnnnnnnnnnnnnnnnnnnnnnnnnnnnnnnnnnnnnnnnnnnnnnnncagggatcctgtatgtcaacgcgagcctggactttgagacaagccccaagtacttcctgtccattgagtgcagccggaagagctcctcttccctcagtgatgtgaccacagtcgtggtcaacatcactgatgtcaatgaacaccggccccaattcccccaagatccatatagcacaagggtcttagagaatgcccttgtgggtgacgtcatccttacggtnnnnnnnnnnnnnnnnnnnnnnnnnnnnnnnnnnnnnnnnnnnnnnnnnnnnnnnnnnnnnnnnnnnnnnnnnnnnnnnnnnnnnnnnnnnnnnnnnnnnnnnnnnnnnnnnnnnnnnnnnnnnnnnnnnnnnnnnnnnnnnnnnnnnnnnnnnnnnnnnnnnnnnnnnnnnnnnnnnnnnnnnnnnnnnnnnnnnnnnnnnnnnnnnnnnnnnnnnnnnnnnnnnnnnnnnnnnnnnnnnnnnnnnnnnnnnnnnnnnnnnnnnnnnnnnnnnnncaggagaactcccccattggcagcaaagtcctgcagctgatcctgagtgaccnnnnnnnnnnnnnnnnnnnnnnnnnnnnnnnnnnnnnnnnnnnnnnnnnnnnnnnnnnnnnnnnnnnnnnnnnnnnnnnnnnnnnnnnnnnnnnnnnnnnnnnnnnnnnnnnnnnnnnnnnnnnnnnnnnnnnnnnnnnnnnnnnnnnnnnnnnnnnnnnnnnnnnnnnnnnnnnnnnnnnnnnnnnnnnnnnnnnnnnnnnnnnnnnnnnnnnnnnnnnnnnnnnnnnnnnnnnnnnnnnnnnnnnnnnnnnnnnnnnnnnnnnnnnnnnnnnnnnnnnnnnnnnnnnnnnnnnnnnnnnnnnnnnnnnnnnnnnnnnnnnnnnnnnnnnnnnnnnnnnnnnnnnnnnnnnnnnnnnnnnnnnnnnnnnnnnnnnnnnnnnnnnnnnnnnnnnnnnnnnnnnnnnnnnnnnnnnnnnnnnnnnnnnnnnnnnnnnnnnnnnnnnnnnnnnnnnnnnnnnnnnnnnnnnnnnnnnnnnnnnnnnnnnnnnnnnnnnnnnnnnnnnnnnnnnnnnnnnnnnnnnnnnnnnnnnnnnnnnnnnnnnnnnnnnnnnnnnnnnnnnnnnnnnnnnnnnnnnnnnnnnnnnnnnnnnnnnnnnnnnnnnnnnnnnnnnnnnnnnnnnnnnnnnnnnnnnnnnnnnnnnnnnnnnnnnnnnnnnnnnnnnnnnnnnnnnnnnnnnnnnnnnnnnnnnnnnnnnnnnnnnnnnnnnnnnnnnnnnnnnnnnnnnnnnnnnnnnnnnnnnnnnnnnnnnnnnnnnnnnnnnnnnnnnnnnnnnnnnnnnnnnnnnnnnnnnnnnnnnnnnnnnnnnnnnnnnnnnnnnnnnnnnnnnnnnnnnnnnnnnnnnnnnnnnnnnnnnnnnnnnnnnnnnnnnnnnnnnnnnnnnnnnnnnnnnnnnnnnnnnnnnnnnnnnnnnnnnnnnnnnnnnnnnnnnnnnnnnnnnnnnnnnnnnnnnnnnnnngtactgctgcaaggttcagtggtcagagctacgtgcggtacagggccccagcggctcggaactggcacatccgtttctatctgaaaacactccagccacaggccattctcctattcaccaatgaaacagcatccatctccctgaagnnnnnnnnnnnnnnnnnnnnnnnnnnnnnnnnnnnnnnnnnnnnnnnnnnnnnnnnnnnnnnnnnnnnnnnnnnnnnnnnnnnnnnnnnnnnnnnnnnnnnnnnnnnnnnnnnnnnnnnnnnnnnnnnnnnnnnnnnnnnnnnnnnnnnnnnnnnnnnnnnnnnnnnnnnnnnnnnnnnnnnnnnnnnnnnnnnnnnnnnnnnnnnnnnnnnnnnnnnnnnnnnnnnnnnnnnnnnnnnnnnnnnnnnnnnnnnnnnnnnnnnnnnnnnnnnnnnnnnnnnnnnnnnnnnnnnnnnnnnnnnnnnnnnnnnnnnnnnnnnnnnnnnnnnnnnnnnnnnnnnnnnnnnnnnnnnnnnnnnnnnnnnnnnnnnnnnnnnnnnnnnnnnnnnnnnnnnnnnnnnnnnnnnnnnnnnnnnnnnnnnnnnnnnnnnnnnnnnnnnnnnnnnnnnnnnnnnnnnnnnnnnnnnnnnnnnnnnnnnnnnnnnnnnnnnnnnnnnnnnnnnnnnnnnnnnnnnnnnnnnnnnnnnnnnnnnnnnnnnnnnnnnnnnnnnnnnnnnnnnnnnnnnnnnnnnnnnnnnnnnnnnnnnnnnnnnncaggtgtgaaatggaggcaaggggttgctcagaaggacactgcctagttactcctgagatcacaagaggggactgggggcagcaggagttactgatcatcatagtggccgtagtgttaattatcataagcactgtcgggcttctcctctactgccgccgttgcaagtctcacaagcctgtggccatggaggacccagacctcctggccaggagtgttggtgttgacacccaagccatacctgccatcgagctcaacccattgactgccagctcctgcaacaacctgaaccaaccggaacccagcaagacctcacttccaaatgaactcgtcacatttggacccaattctaagcaacggccagtggtctgcagtgtgccccccaggctcccgccagnnnnnnnnnnnnnnnnnnnnnnnnnnnnnnnnnnnnnnnnnnnnnnnnnnnnnnnnnnnnnnnnntgtaccctggcggagctatgatctggccacctacttactccaggaatgaacgctgggaatacccccactccgaagtgactcagggccctctgccgccctcggctcaccgccactcaacccccgtcgtgatgccggagcccactggcctctatgggggcttccccttccccctggagatggaaaataagcgggcacctctcccaccccgttacagcaaccagaacctggaagatctgatgccctctcggccccctagtccccgggagcgcctggttgccccctgtctcaatgagtacacggccatcagctactaccactcacagttccggcagggagggggagggccctgcctggcagaggggggctacaaggggatgagtatgcgcctcagccgagctgggccctcttatgctgtctgtgaggcagagggggcacctcttgcaggccagggccagcaccgggcgccccccaactatgagggctctgacatggtggagagtgattacggcagctgtgaggaggtcatgttctagcttcccattcccagagcaaggcaggtgggaggccaaggactggacttggcttatttcttcctgtctcnnnnnnnnnnnnnnnnnnnnnnnnnnnnnnnnnnnnnnnnnnnnnnnnnnnnnnnnnnnnnnnnnnnnnnnnnnnnnnnnnnnnnnnnnnnnnnnnnnnnnnnnnnnnnnnnnnnnnnnnnnnnnnnnnnnnnnnnnnnnnnnnnnnnnnnnnnnnnnnnnnnnnnnnnnnnnnnnnnnnnnnnnnnnnnnnnnnnnnnnnnnnnnnnnnnnnnnnnnnnnnnnnnnnnnnnnnnnnnnnnnnnnnnnnnnnnnnnnnnnnnnnnnnnnnnnnnnnnnnnnnnnnnnnnnnnnnnnnnnnnnnnnnnnnnnnnnnnnnnnnnnnnnnnnnnnnnnnnnnnnnnnnnnnnnnnnnnnnnnnnnnnnnnnnnnnnnnnnnnnnnnnnnnnnnnnnnnnnnnnnnnnnnnnnnnnnnnnnnnnnnnnnnnnnnnnnnnnnnnnnnnnnnnnnnnnnnnnnnnnnnnnnnnnnnnnnnnnnnnnnnnnnnnnnnnnnnnnnnnnnnnnnnnnnnnnnnnnnnnnnnnnnnnnnnnnnnnnnnnnnnnnnnnnnnnnnnnnnnnnnnnnnnnnnnnnnnnnnnnnnnnnnnnnnnnnnnnnnnnnnnnnnnnnnnnnnnnnnnnnnnnnnnnnnnnnnnnnnnnnnnnnnnnnnnnnnnnnnnnnnnnnnnnnnnnnnnnnnnnnnnnnnnnnnnnnnnnnnnnnnnnnnnnnnnnnnnnnnnnnnnnnnnnnnnnnnnnnnnnnnnnnnnnnnnnnnnnnnnnnnnnnnnnnnnnnnnnnnnnnnnnnnnnnnnnnnnnnnnnnnnnnnnnnnnnnnnnnnnnnnnnnnnnnnnnnnnnnnnnnnnnnnnnnnnnnnnnnnnnnnnnnnnnnnnnnnnnnnnnnnnnnnnnnnnnnnnnnnnnnnnnnnnnnnnnnnnnnnnnnnnnnnnnnnnnnnnnnnnnnnnnnnnnnnnnnnnnnnnnnnnnnnnnnnnnnnnnnnnnnnnnnnnnnnnnnnttacctgcagcgactcaaccctatgcatggagggtcaatgtgggcacatgtctacacatgtgggtgcccatggataatatgtgtgtacacatgcgtagaatgtatgtagccaggagtggtggggaccagaagcctctgtggccttnggngacctcaccactccttcccatccagtccctccctctggtccgctccttttcatgtgtgttgtttctggagacagaagtcaaaaggaagaacaatggagacttgcccatagggctgctgcttcacgcgagagggagctgtgtgggcgagagccaatttgtgtgagtggtttgtggctgcgtgtgtgactgtgagtgtgagtgacagatacatggtttcattggtc

SEQ ID NO: 21676 - DNA, 729 bp, Macaca Mulatta
  misc_feature (1)...(729): n = A,T,C or G
ggggattacaggcgtaagccacagcgcccggcctaaagttggttcctcgaagcaattgatgagattgagatcctggttttcagaaacgattagagtgatttatgtaagttgggaggggttttttgatagggttggtaaggtcttaaccttaaaggaaaggcatacagagatcgatcaatgttggtacttgagtcattagttttcaaagaagcctgaggtaatggaggaaaggtaagaattgattctgacagaatcttgagatgggcaggattaacatctggaagaagtcactgtgtcctgatttaccttacctgtctgtccaggatggccaggccatgttatgggatctcaacgaaggcaaacacctttacacgctagatggtggggacatcatcaacgccctgtgcttcagccctaaccgctactggctgtgtgctgccacaggtcccagcatcaagatctgggatttggagggaaagatcattgtagatgaactgaagcaagaagttatcagtaccagcagcaaggcagaaccaccgcagtgtacctccctggcctggtctgccgatggccagactctgtttgctggctacacagacaacctggtacgagtatggcaggtgaccatcggcacgcgctagaagtttatggcagagctttacaaattnnnnnnnnnnnnnnnnctnnnnnnnnnnnnnnnnnnnnnnnnnnnnnnnnnnnnnccttgtc

SEQ ID NO: 21677 - DNA, 687 bp, Macaca Mulatta
ccaaggacatcagcgatgaccacgtgatcctcatggactgcaccgtgtccacgggcgccgcggccatgatggcggtgcgcgtgctcctggtgagtgggccctgggtaggcggggcaggttcaggcagaggtgggatttacctgcccatacactttgtaggaccacgacgtgcctgaggacaagatctttctgctgtcactgctcatggcagagatgggcgtgcactcagtggcctatgcgtttccacgagtgagaatcatcaccacggcggtggacaagcgggtcaatgaccttttccgcatcatcccaggcattggtgaggctgcccaggcccttcagccgtgcatgagggcaaggtgggtggccctgggaggccccaccacacactggcccgctttctccagggaactttggcgaccgctactttgggacagacgcggtccccgatggcagtgacgaggaggaagtggcctacacgggttagctgcccagtgagccatccccgtccccgccaccctcctgcctcctgacccaggattgccgaatacaaagatgttaatttttaaaatgttaccagtataatttattttatgcattttataaaataaagaaagctttagaaaaatgaaggtgtgattggttagttacagcacaggagtggcgtcctggctgaggcttgcgtttgtg

SEQ ID NO: 21678 - DNA, 125 bp, Macaca Mulatta
gggtggatgtggcccatcttgtcctgtatcacctcagcgtttgctgtaagaagaaatactttgattttgatcgtgagatcctccccttcacttctgagaattgggacagtttgcttctgggggag

SEQ ID NO: 21679 - DNA, 166 bp, Macaca Mulatta
ggcaccttctcctcacaattttctctcctctcccaaaggatgatttaattttgccttcctaagattgctagtattctagctgttacctctatcttctctctcatgtctcctaaacataaaatggtttaatttacatgattataaagatctgttgatgaaaatggaa

SEQ ID NO: 21680 - DNA, 179 bp, Macaca Mulatta
gccatctgagcacactgccagtctcactatgggaaggccagctgctccagccagccggactccagcctgcctggcaggctgtctggccaggcctcttggcagtcacgtctcttcttccgaggctagtacctttctgtttattctttgatcttcagggaaccccatagattgagcaaagt

SEQ ID NO: 21681 - DNA, 134 bp, Macaca Mulatta
gatgctttatcagaagatctgctgagcatcattgcaaacatgtccgggtgtctcccttacatgctgcccccaaaatgcccaaacacgtgcctggcgaacaaatacagactcatcacaggagcttgcaacaacag

SEQ ID NO: 21682 - DNA, 550 bp, Macaca Mulatta
gggagttcacctatttctatcccaccagtgccacccctccacggcttcccaaaagaagggggcatgtgagaatgcttttcttttgacaaagctccttgcagattctatttctgatattttttcccctcttatgaaaatcatagctctaaaaacaagtgctattcagaaatgccctctcaaaaaatgcttaccttcacaattaaaccataaaaaaatcagagctacaaaaatgatgtcttgcttcccagaaccttgagccaagaagacttgaatgtgcagacagtcgtgcttgtgtttggtccagataaaggacacatacctgccagtgtccaagagtgagctttctagtctggtgtccttattgtcccaaagttaccaaattctccctataagtctcctttacagaccagagaggccgtgactttttaacccactgcaacctttttcagttgtcagatcgtccaggaaactgactttaagcaccatctggatttgttgccagtgtgaaaatgtttgtaagtgttcttgccttaaaaaagtaatttacatg

SEQ ID NO: 21683 - DNA, 603 bp, Macaca Mulatta
  misc_feature (1)...(603): n = A,T,C or G
gcctggcttgggccaaagcctggcatgaatgtgagatgttagagctgctgcccccatttgttggcctgtgtgcctccctggcaggccactccaatgcttggcaggcttacctgtcactgtcatccacagtgctgggtcctgcacctgggcctgggcctgagccacttagcctcctccagaagctgatcctgtggcgcgttctgcgacctgagtgcctggcaggtgccctggcagacttcacaaccagcctcctgggtcggcccctggatgaaaacatgggcgctcccaccatgccctttaaacatagtcgggctactcagcccatgctgatcttgttgccactgcctggccaccccacagccactctgcatcctctgactgtcatccagaatctggctgccaagtatcagcaggncaggggcagaagcatctgcaggtgatagccctgggctctgaagtctgggacccggtctcagttgtggtcagcactctatcccaggctatgtatgaggggcactggctggtgctggacaactgtcatctgatgccccattggccgaaagagctgctacagctcttgctggaactgttaggcagagccaa

SEQ ID NO: 21684 - DNA, 846 bp, Macaca Mulatta
  misc_feature (1)...(846): n = A,T,C or G
cgcgggggcttctcggggtccacgcacgccctgcgccgccaggacccgagcggagcctccccgcggcctggccgcgcctggtcctgagcggnnnnnnnnnnnnngtgcaggcagccatatggcctgctnctcagctgtctcaggcaacgtaatgtaagcagcgtgggcgcttcagaggggtccacagtgccagctagctgcgctgccttcacataagtgcatgggatgtggtgctaggcatgtcaggcaccttggtgtcatgcgagaatgcactagtggtgaccatcatcgtgggcacgcccgccttccgtgcccccatgttcctgatggtgggcagcctgcacgtggcagacctgctggcaggcctgggcctggtcctgtacttagctgctgtattctgcatcggctcagcggagatgagcctggtgtaggttggcgtgctggcaatggcatttcctgccagcatcggcagtctattgtccatcactgttgtccgctacctttctctgtacaatgccctctcctactattcagagacaacagtgacacggacaaagtgatgctggccttagtgtggggaggtgccgtgggcctggggaagctacctgtgaagacctggatctgcctggatgtcctgtccacatgtggcgtggtttatccactctccaagaaccatctggtagtcctggccattgctttcttcatggtgtttggcatcatgctgcagctctacgcccaaatttgccgcattgtcagccgccatacccagcagattgccctccagcggcacctgctgcctgcctcccactatgcggccacccgcaagggcattgccacactggccgt

SEQ ID NO: 21685 - DNA, 213 bp, Macaca Mulatta
  misc_feature (1)...(213): n = A,T,C or G
tatttcattatcagtctttccagtacccaaccacagtaggcacatttcgggatcggatttcctgggtgggaagtgtatacaaaggggatgcatctataagtataagcaaccctaccataaaggacaatgggacattcagctgtgctgtgaagaatcccccagatgtgcaccataatattcccttgacagagctaacagtcacagaaaggggtn

SEQ ID NO: 21686 - DNA, 889 bp, Macaca Mulatta
ggggaatagggggcgcgcgcagtctccgggcccaatttctacgcgcaccggaagacggaggtcctctttccttgcctaacgcagccatggctcgtggtcccaagaagcatctgaagcgggtagcagctccaaagcattggatgctggataaattgaccggtgtgtttgctcctcgtccatccaccggtccccacaagttgagagagtgtctccccctcatcatcttcctaaggaacagacttaagtatgccctgacaggagatgaagtaaagaagatttgcatgcagcggttcattaagatcgatggcaaggtccgaactgatataacctaccctgctggattcatggatgtcatcagcattgacaagacgggagagaatttccgtctgatctatgacaccaagggtcgctttgctgtacatcgtattacacctgaggaggccaagtacaagttatgcaaagtgagaaagatctttgtgggcacaaaaggaatccctcatctggtgactcatgatgcccgcaccatccgctaccccgatcccctcatcaaggtgaatgataccattcagattgatttggagactggcaagattactgatttcatcaagttcgacactggttaacctgtgtatggtggactggaggtggctaacctggggaagaattgggtgtgatcacccaccagagagaaggcatccctggatctttttgaacgtgggttccacgttgaaaaaatggccaaatgggcaacaagcttttggccacctccgaactttttcaaacattttttggttaattggggaaaggggccaacccaacgcagggggcactttcccgcgttcccccaagggaagaaggggtcaccccccccctccccactttgggcggg

SEQ ID NO: 21687 - DNA, 2324 bp, Macaca Mulatta
  misc_feature (1)...(2324): n = A,T,C or G
gatggcacgaacatgacctatggaacctctccttctggtctgaacatgggagagctgattgcacggatggtgaggaatatggataactagcggttccgggactcagacctcgaccccagagcctcagttgaaagaccgacccggacaatcgttcccgttcagtatgagacaagaatggcctgcgggctggtcagaggtcacgcctactctgtcacggggctggatgaggtnnnnnnnnnnnnnnnnnnnnnnnnnnnnnnnnnnnnnnnnnnnnnnnnnnnnnnnnnnnnnnnnnnnnnnnnnnnnnnnnnnnnnnnnnnnnnnnnnnnnnnnnnnnnnnnnnnnnnnnnnnnnnnnnnnnnnnnnnnnnnnnnnnnnnnnnnnnnnnnnnnngatgtcctatgaggatttcatttaccatttcacaaagttggagatctgcaacctcacggccgacgctctgcagtctgacaagcttcagacctggacagtgtctgtgaacgagggccgctgggtgcggggttgctcagccggaggctgccgcaacttcccagnnnnnnnnnnnnnnnnnnnnnnnnnnnnnnnnnnnnnnnnnnnnnnnnnnnnnnnnnnnnnnnnnnnnnnnnnnnnnnnnnnnnnnnnnnnnnnnnnnnnnnnnnnnnnnnnnnnnnnnnnnnnnnnnnnnnnnnnnnnnnnnnnnnnnnnnnnnnnnnnnnnnnnnnnnnnnnnnnnnnnnnnnnnnnnnnnnnnnnnnnnnnnnnnnnnnnnnnnnnnnnnnnnnnnnnnnnnnnnnnnnnnnnnnnnnnnnnnnnnnnnnnnnnnnnnnnnnnnnnnnnnnnnnnnnnnnnnnnnnnnnnnnnnnnnnnnnnnnnnnnnnnnnnnnnnnnnnnnnnnnnnnnnnnnnnnnnnnnnnnnnnnnnnnnnnnnnnnnnnnnnnnnnnnnnnnnnnnnnnnnnnnnnnnnnnnnnnnnnnnnnnnnnnnnnnnnnnnnnnnnnnnnnnnnnnnnnnnnnnnnnnnnnnnnnnnnnnnnnnnnnnnnnnnnnnnnnnnnnnnnnnnnnnnnnnnnnnnnnnnnnnnnnnnnnnnnnnnnnnnnnnnnnnnnnnnnnnnnnnnnnnnnnnnnnnnnnnnnnnnnnnnnnnnnnnnnnnnnnnnnnnnnnnnnnnnnnnnnnnnnnnnnnnnnnnnnnnnnnnnnnnnnnnnnnnnnnnnnnnnnnnnnnnnnnnnnnnnnnnnnnnnnnnnnnnnnnnnnnnnnnnnnnnnnnnnnnnnnnnnnnnnnnnnnnnnnnnnnnnnnnnnnnnnnnnnnnnnnnnnnnnnnnnnnnnnnnnnnnnnnnnnnnnnnnnnnnnnnnnnnnnnnnnnnnnnnnnnnnnnnnnnnnnnnnnnnnnnnnnnnnnnnnnnnnnnnnnnnnnnnnnnnnnnnnnnnnnnnnnnnnnnnnnnnnnnnnnnnnnnnnnnnnnnnnnnnnnnnnnnnnnnnnnnnnnnnnnnnnnnnnnnnnnnnnnnnnnnnnnnnnnnnnnnnnnnnnnnnnnnnnnnnnnnnnnnnnnnnnnnnnnnnnnnnnnnnnnnnnnnnnnnnnnnnnnnnnnnnnnnnnnnnnnnnnnnnnnnnnnnnnnnnnnnnnnnnnnnnnnnnnnnnnnnnnnnnnnnnnnnnnnnnnnnnnnnnnnnnnnnnnnnnnnnnnnnnnnnnnnnnnnnnnnnnnnnnnnnnnnnnnnnnnnnnnnnnnnnnnnnnnnnnnnnnnnnnnnnnnnnnnnnnnnnnnnnnnnnnnnnnnnnnnnnnnnnnnnnnnnccacagccacagcctggcagctctgaccaggaaagtgaggaacagcaacaattccggaacattttcaagcagatagcaggagnnnnnnnnnnnnnnnnnnnnnnnnnnnnnnnnnnnnnnnnnnnnnnnnnnnnnnnnnnnnnnnnnnnnnnnnnnnnnnnnnnnnnnnnnnnnnnnnnnnnnnnnnnnnnnnnnnnnnnnnnnnnnnnnnnnnnnnnnnnnnnnnnnnnnnnnnnnnnnnnnnnnnnnnnnnnnnnnnnnnnnnnnnnnnnnnnnnnnnnnnnnnnnnnnnnnnnnnnnnnnnnnnnnnnnnnnnnnnnnnnnnnnnnnnnnnnnnnnnnnnnnnnnnnnaggattccacctcaacaaccagctctacgacatcattaccatgcggtacgcagacaaacacatgaacatcgacttcgacagtttcatctgctgcttcgtcaggctggagggcatgttcagngagcttttcatgcatttgacaaggatggagacggtatcatcaaactcaatgttctggag

SEQ ID NO: 21688 - DNA, 163 bp, Macaca Mulatta
  misc_feature (1)...(163): n = A,T,C or G
nctcgggtgttgctgacagtcttggcacggcatgcacatgacgtggcccgagcccagctgggagaagatgcccacctctgtcccaccctaggcccaggggtccggcctcggctgtgccacatagtgaaagatgagggtggttttggcttcggcgtcacccatg

SEQ ID NO: 21689 - DNA, 265 bp, Macaca Mulatta
  misc_feature (1)...(265): n = A,T,C or G
cagagactggatgtcagcaacgtgactgcgctgctgggacacaacgtgggagacctgcagaaggcccgaagccaccccaccgtcaggtcctggctgtacagcctcaacagctccgccctgggccagctgggccttgacaccagccccgcctgccccnnnnnnnnnnnnnnnnnnnnnnnnnnnnnnnnnnnnnnnnnnnnnnnnnnnnnnatctggtccacacctcaggcctgccagggaaagctgcccaggcctacacctcagg

SEQ ID NO: 21690 - DNA, 1044 bp, Macaca Mulatta
  misc_feature (1)...(1044): n = A,T,C or G
gggtggcgagaagaaaaacgggccgttgccatcaacgaggtggtgacccgagaatacaccatcaacattcacaagcgcatccatggagtgggcttcaagaagcgtgcccctcgggcactcaaagagattcggaaatttgccatgaaggagatgggaactccagatgtgcgcattgataccaggctcaacaaagctgtctgggccaaaggaataaggaatgtcccataccgaatccgtgtgcggctgtccagaaaacgtaatgaggatgaagattcaccaaataagctctatactttggttacctatgtacctgttaccactttcaaaaatctacagacagttaatgtggatgagaactaatcgctgatcatcaaatacatcaaataaagttataaannnnnnnnnnnnnnnnnnnnnnnnnnnnnnnannnnnnnnnnnnnnnnnnnnnnnnnnnnnnnnnnnnnnnnnnnnnnnnnnnnnnnnnngcgtcgtnnnnnnttgtcggcccccccgggccccccgaaaaacttcttcaaaacaatttctttgggccccgggccccagaaggaaaggaaactgggccaaaccttttcccaagaaaacccgggcaagaacaagggctggaannnnnnnnnnnnnnnnnnnnnnnggggaaacaaaggttttgaaaaaatcccaaaggggttcctgaggcctttccggatttttcaaacggggtcccaagcgacccatatttaaattttccccccgccctgtgcattaatggaaaaaaggtgtgaatttattaaaacatcccggccccactgggaaccccctcccaaaccgggcttggtggaacaccaaaatcccccagggggaattcagaacccttttggccgcctgnnnnnnnnnnnnnnnnnncccccctgggggtaaaaaaaggcggggcgcaaaaaaaaattttgcccacttatttgggcccccacgtttttaaatactcaaaaaagtggggtggnnnnnnnnnnnnnnnnnncggggttatttgggcctcttaaacaaaacaa

SEQ ID NO: 21691 - DNA, 787 bp, Macaca Mulatta
  misc_feature (1)...(787): n = A,T,C or G
taccatcactgacctacccctggccctacctctgatccagggcaacgtccaggccaatgtgccagctggacgtcaggcccaggtgcgtgccttgtcctgggggattgaccatcatgtcttccctggagactatgacctggtgctgggggccgatatcgtgtacctggaacccaccttccctctgctgctggggaccctccaacacctgtgcaggccccatggcaccatctatctggcctccaagatgagagaggagcacgggacagagagcttctttcagcacctcctgccccagcatttccaactggagctggctcagcgggatgaggatgaaaatgtcaacatctatagggccaggcacagggaaccaagacctgcttgacatcacccctgctgttcttctcagtctcttgccctaatgaaggaactgggtatctcaaaaatcatgtttccagagccacaaacatgaagaccaaaaaggatggatttccctggcctctctcactttcttccttccctctttgttaccccagatactcttgggcaggtgcagtgagggacctgcttaccaggaatcccagagctctggcagcactagtgttagaacaccaaggaggttcctggctcctgttctcagaggaggaggatggtaaggtatctaggatttttaggggctaaggcaggtatatgggatatgagagcagtggttgtagagagactgtcactgatcacttccatttctgttgctgtttatacagaatggacttanaaaaaaattctatgggat

SEQ ID NO: 21692 - DNA, 643 bp, Macaca Mulatta
cttaagcttgcatagattttacaaaaaagtatgaatacgatttttgttaacatagaaaatggtgaataaaagttacagaatggatatgaagagagatcttgtccaaacttttatttgtgcacattcaattgaaaaagataacttttacaggttctttggtgcccatattcagcatacaaaaatgtaaaagactattcacaaataaaacacattagctcaaaatggaaaaaaataacaatgacaacaataagacaatctaaggtagtgcacactgtgacagctctgcttatggggacatgagaattactgcgaaaataaatagaatgtccttttgtaaaagcagcaatgtcatgtcttgtaaacttccttttatattacagcaaggtttggaataaaatccaaagggactggagcttacactgtagccgtgaatgaataaaagagtctatctcctcaattactgttggtccagttttccttttgagtccaatgtgcagcaggtttaaaaggtgctcagttagagattctaaccaattaagtggtgaattataaaatttctttcctgctttcaaacacaaatgggtaaatctgttccacagcagtagcaacagcctttacattgggccaaaggttcctcgtggtc

SEQ ID NO: 21693 - DNA, 1412 bp, Macaca Mulatta
  misc_feature (1)...(1412): n = A,T,C or G
naggtgctgtccaaccctgagtttctggcagagggaacggccatcaatgacctaaagtacccagacagggtactgattggaggggatgaaactccagagggccagagagctgtgcaggccctgtgtgctgtatatgagcactgggttcccagagaaaagatcctcaccactaatacttggtcttcagagctttccaaactggttnnnnnnnnnnnnnnnnnnnnnnnnnnnnnnnnnnnnnnnnnnnnnnnnnnnnnnnnnnnnnnnnnnnnnnnnnnnnnnnnnnnnnnnnnnnnnnnnnnnnnnnnnnnnnnnnnnnnnnnnnnnnnnnnnnnnnnnnnnnnnnnnnnnnnnnnnnnnnnnnnnnnnnnnnnnnnnnnnnnnnnnnnnnnnnnnnnnnnnnnnnnnnnnnnnnnnnnnnnnnnnnnnnnnnnnnnnnnnnnnnnnnnnnnngaatgactaccaaaggaggtggtttgcttcccggatcatagacagtctgtttaatacagtaactgataagaagatagctattttgggatttgcattcaaaaaggacactggtgatacnnnnnnnnnnnnnnnnnnnnnnnnnnnnnnnnnnnnnnnnnnnnnnnnnnnnnnnnnnnnnnnnnnnnnnnnnnnnnnnnnnnnnnnnnnnnnnnnnnnnnnnnnnnnnnnnnnnnnnnnnnnnnnnnnnnnnnnagtgtcccgcctcgtgaccatttccaatgatccatatgaagcatgtgatggtgcccatgctgttgttatttgcactgagtgggacatgtttaagnnaggaattggattatgaacgcattcataaaaaaatgctaaagccagcctttatcttcgatggacggcgtgtcctggatgggctccacaatgaactacaaaccattggcttccannnnnnnnnnnnnnnnnnnnnnnnnnnnnnnnnnnnnnnnnnnnnnnnnnnnnnnnnnnnnnnnnnnnnnnnnnnnnnnnnnnnnnnnnnnnnnnnnnnnnnnnnnnnnnnnnnnnnnnnnnnnnnnnnnnnnnnnnnnnnnnnnnnnnnnnnnnnnnnnnnnnnnnnnnnnnnnnnnnnnnnnnnnnnnnnnnnnnnnnnnnnnnnnnnnnnnnnnnnnnnnnnnnnnnnnnnnnnnnnnnnnnncccaggctggagtgcagtggcgccatctcagttcactataagctctgcctcctgggttctcgccattctcctgcctcagcttcctgagtagctgggactacaagcgcctgccaccacgcttggctaattttttgtatttttagtagagatggggtttcatcatgttggccaggatggtctcgatctcctgacctcatgatccacccgcctccacctcccaaagtgctgagattacaggcgtgagctaccacgc

SEQ ID NO: 21694 - DNA, 236 bp, Macaca Mulatta
cctccttcttggtcttaaatgccacccggttgtgggagtcaggccacacctcaccaccaggggtacttacagttatgtgaagactttcctacagtgaagaaccaccgctcaatttaagtggtggtcaaatcccaattttcctccactctggtagaggttaaaagactagagaggccaagaggagaagttagtgtgggtccgagagactgttttaagtcgagggtgccttaagagtg

SEQ ID NO: 21695 - DNA, 208 bp, Macaca Mulatta
  misc_feature (1)...(208): n = A,T,C or G
gatagatgagactacttcagctcattccaggaagaaaggttatgatgcaagatttctttcttcnnnnnnnnnnnnnnnnnnnnnnnnnnnnnnnnnnnnnnnnnntactttgtcaaataaaaatttgtttttcagagatttaccagccagttaatggttagaaatattttgtggaaatgaagaaaacacttcagaaaacacaaaataa

SEQ ID NO: 21696 - DNA, 138 bp, Macaca Mulatta
ctcaccttaaaataatctggattttctttgggcacaacagtcagacttgttgataatatatatgaagtttttattattaatatgctgaggaacttgaagattaataaaatatgctcttcagagaatgatatataaata

SEQ ID NO: 21697 - DNA, 2386 bp, Macaca Mulatta
  misc_feature (1)...(2386): n = A,T,C or G
ggagtcagctggagttgcccaggccctgtgagcaagtggctggcgtgcccagctgcatcgggggagagggctgttctcaaggccaaggtcattgtaaagggagaactggacgcctnnnnnnnnnnnnnnnaatggactcagcagccaaggatgagatgcagccggagttgtcccctggnctgagtggccggagcaggagcgggcagagcagctggcccggggtgcagcgcttaagtgggcctcgggcatcttctaccggccggagcagctggccaggctaggccagtaccgcagccgcgaggtgcagcgtacctgctccctggaagcacgcctcaagnagtcagtggtgcagtcatacctggaaggcgtgcagactggtgtgtggcagctggcccaggccattgaggcggtgcagggaacccgggaggccctgagccaggcccgtgggttgctccagggcatgtcccaggccttacggactctnnnnnnnnnnnnnnnnnnnnnnnnnnnnnnnnnnnnnnnnnnnnnnnnnnnnnnnnnnnnnnnnnnnnnnnnnnnnagtgccagctgcagtggcccacacacagaccctgattgatgcccaacagttcttggaggcatatatgagccttcgggagctggagcagctgcgagaggatacgtgggcacccctggggggcctggagttgccagtcttccaggggctggaccttctgttcgaggcactgggccaggctgtggaagcagctgcaggggccgcagggaagctggcacgggaggacccagccctgctggtggctgctgtgcgtgtggcggaggtggagactggacgaacaacccccctgggccaggtcccccgggactggcggcagcgctgtctgagggcactacaggagggcctggagcagacccactttgggtcacctctgctgcctgcgccaggggccctaccagggtggctggaggctctgcgagtggccctgccagttgagttggccacagctgaggcactagtagcgccttgctgcccaccgcagtacaatgtggtccagctatgggcccacacactgcatagcggtctgcgccgcagcctgcagcacctccttgcagggcctgagctggaagctgcggatgccttcgccttgctgcactgggcactgcatgtatacctgggnnnnnnnnnnnnnnnnnnnnnnnnnnnnnnnnnnnnnnnnnnnnnnnnnnnnnnnnnnnnnnnnnnnnnnnnnnnnnnnnnnnnnnnnnnnnnnnnnnnnnnnnnnnnnnnnnnnnnnnnnnnnnnnnnnnnnnnnnnnnnnnnnnnnnnnnnnnnnnnnnnnnnnnnnnnnnnnnnnnnnnnnnnnnnnnnnnnnnnnnnnnnnnnnnnnnnnnnnnnnnnnnnnnnnnnnnnnnnnnnnnnnnnnnnnnnnnnnnnnnnnnnnnnnnnnnnnnnnnnnnnnnnnnnnnnnnnnnnnnnnnnnnnnnnnnnnnnnnnnnnnnnnnnnnnnnnnnnnnnnnnnnnnnnnnnnnnnnnnnnnnnnnnnnnnnnnnnnnnnnnnnnnnnnnnnnnnnnnnnnnnnnnnnnnnnnnnnnnnnnnnnnnnnnnnnnnnnnnnnnnnnnnnnnnnnnagctcctcagtgtctgtcctgcagctggacggggcgccttcaggggccttggctccggtggaagctgcgctggacaagttacagaggaggatctgccgcctggtgttggaggcgctgcaggtggagctccagnccagcccctgttcgcggacctgccctcccgccagtggctgtcgagccctgagctgctggaaagtgtgtgcgaacggacggggcgcttctgccgggacttcgggcgcgtgcggaaccccacggttcancagctgctactggctgacgccgagcgcgccgtggtgctccagtacctgcgcgcgctgatgcannnnnnnnnnnnnnnnnnnnnnnnnnnnnnnnnnnnnnnnnnnccgagcgcctgcggcacgatgctgcccagcttcagccttttttcctcggtttggngggcctggaggagaacgcgcactgcgcgccggtgctgctcgccctgagagagctgctaaacctccgcgaccccgcgctgctgggcctggaggtggctggcctgcagcaacagtttcccgacgtgagnagcgaggaccacgtctccgccctcttgggcctgcgcggtgacttgtcccgggagcagcaactggccgctctcagctcgcttcaggctgcgctgccgccctcgccccgcgctagccgccgcgccctcttcagcctcgtgcccgccccagcacccgcgccggcctcctgcctgccctcggggtcctgcgcccgagcccggctgctctcagaataa

SEQ ID NO: 21698 - DNA, 3814 bp, Macaca Mulatta
  misc_feature (1)...(3814): n = A,T,C or G
gaaacctcgaccttgaagatggtgagtagccagccaaagtacgatctaatacgggaggtaggccgaggtagttacggtgttgtgtatgaagcagtcatcagaaagacctctgcacgggtggcagtgaagaaaattcgatgtcacgcacctgaaaatgttgaactagcccttcgtgagttctgggcactaagcagtatcaagagccaacatccaaatgtgattcacttggaggaatgcatcctacaaaaggatgggannnnnnnnnnnnnnnnnnnnnnnnnnnnnnnnnnnnnnnnnnnnnnnnnnnnnnnnnnnnnnnnnnnnnnnnnnnnnnnnnnnnnnnnnnnnnnnnnnnnnnnnnnnnnnnnnnnnnnnnnnnnnnnnnnnnnnnnnnnnnnnnnnnnnnnnnnnnnnnnnnnnnnnnnnnnnnnnnnnnnnnnnnnnnnnnnnnnnnnnnnnnnnnnnnnnnnnnnnnnnnnnnnnnnnnnnnnnnnnnnnnnnnnnnnnnnnnnnnnnnnnnnnnnnnnnnnnnnnnnnnnnnnnnnnnnnnnnnnnnnnnnnnnnnnnnnnnnnnnnnnnnnnnnnnnnnnnnnnnnnnnnnnnnnnnnnnnnnnnnnnnnnnnnnnnnnnnnnnnnnnnnnnnnnnnnnnnnnnnnnnnnnnnnnnnnnnnnnnnnnnnnnnnnnnnnnnnnnnnnnnnnnnnnnnnnnnnnnnnnnnnnnnnnnnnnnnnnnnnnnnnnnnnnnnnnnnnnnnnnnnnnnnnnnnnnnnnnnnnnnnnnnnnnnnnnnnnnnnnnnnnnnnnnnnnnnnnnnnnnnnnnnnnnnnnnnnnnnnnnnnnnnnnnnnnnnnnnnnnnnnnnnnnnnnnnnnnnnnnnnnnnnnnnnnnnnnnnnnnnnnnnnnnnnnnnnnnnnnnnnnnnnnnnnnnnnnnnnnnnnnnnnnnnnnnnnnnnnnnnnnnnnnnnnnnnnnnnnnnnnnnnnnnnnnnnnnnnnnnnnnnnnnnnnnnnnnnnnnnnnnnnnnnnnnnnnnnnnnnnnnnnnnnnnnnnnnnnnnnnnnnnnnnnnnnnnnnnnnnnnnnnnnnnnnnnnnnnnnnnnnnnnnnnnnnnnnnnnnnnnnnnnnnnnnnnnnnnnnnnnnnnnnnnnnnnnnnnnnnnnnnnnnnnnnnnnnnnnnnnnnnnnnnnnnnnnnnnnnnnnnnnnnnnnnnnnnnnnnnnnnnnnnnnnnnnnnnnnnnnnnnnnnnnnnnnnnnnnnnnnnnnnnnnnnnnnnnnnnnnnnnnnnnnnnnnnnnnnnnnnnnnnnnnnnnnnnnnnnnnnnnnnnnnnnnnnnnnnnnnnnnnnnnnnnnnnnnnnnnnnnnnnnnnnnnnnnnnnnnnnnnnnnnnnnnnnnnnnnnnnnnnnnnnnnnnnnnnnnnnnnnnnnnnnnnnnnnnnnnnnnnnnnnnnnnnnnnnnnnnnnnnnnnnnnnnnnnnnnnnnnnnnnnnnnnnnnnnnnnnnnnnnnnnnnnnnnnnnnnnnnnnnnnnnnnnnnnnnnnnnnnnnnnnnnnnnnnnnnnnnnnnnnnnnnnnnnnnnnnnnnnnnnnnnnnnnnnnnnnnnnnnnnnnnnnnnnnnnnnnnnnnnnnnnnnnnnnnnnnnnnnnnnnnnnnnnnnnnnnnnnnnnnnnnnnnnnnnnnnnnnnnnnnnnnnnnnnnnnnnnnnnnnnnnnnnnnnnnnnnnnnnnnnnnnnnnnnnnnnnnnnnnnnnnnnnnnnnnnnnnnnnnnnnnnnnnnnnnnnnnnnnnnnnnnnnnnnnnnnnnnnnnnnnnnnnnnnnnnnnnnnnnnnnnnnnnnnnnnnnnnnnnnnnnnnnnnnnnnnnnnnnnnnnnnnnnnnnnnnnnnnnnnnnnnnnnnnnnnnnnnnnnnnnnnnnnnnnnnnnnnnnnnnnnnnnnnnnnnnnnnnnnnnnnnnnnnnnnnnnnnnnnnnnnnnnnnnnnnnnnnnnnnnnnnnnnnnnnnnnnnnnnnnnnnnnnnnnnnnnnnnnnnnnnnnnnnnnnnnnnnnnnnnnnnnnnnnnnnnnnnnnnnnnnnnnnnnnnnnnnnnnnnnnnnnnnnnnnnnnnnnnnnnnnnnnnnnnnnnnnnnnnnnnnnnnnnnnnnnnnnnnnnnnnnnnnnnnnnnnnnnnnnnnnnnnnnnnnnnnnnnnnnnnnnnnnnnnnnnnnnnnnnnnnnnnnnnnnnnnnnnnnnnnnnnnnnnnnnnnnnnnnnnnnnnnnnnnnnnnnnnnnnnnnnnnnnnnnnnnnnnnnnnnnnnnnnnnnnnnnnnnnnnnnnnnnnnnnnnnnnnnnnnnnnnnnnnnnnnnnnnnnnnnnnnnnnnnnnnnnnnnnnnnnnnnnnnnnnnnnnnnnnnnnnnnnnnnnnnnnnnnnnnnnnnnnnnnnnnnnnnnnnnnnnnnnnnnnnnnnnnnnnnnnnnnnnnnnnnnnnnnnnnnnnnnnnnnnnnnnnnnnnnnnnnnnnnnnnnnnnnnnnnnnnnnnnnnnnnnnnnnnnnnnnnnnnnnnnnnnnnnnnnnnnnnnnnnnnnnnnnnnnnnnnnnnnnnnnnnnnnnnnnnnnnnnnnnnnnnnnnnnnnnnnnnnnnnnnnnnnnnnnnnnnnnnnnnnnnnnnnnnnnnnnnnnnnnnnnnnnnnnnnnnnnnnnnnnnnnnnnnnnnnnnnnnnnnnnnnnnnnnnnnnnnnnnnnnnnnnnnnnnnnnnnnnnnnnnnnnnnnnnnnnnnnnnnnnnnnnnnnnnnnnnnnnnnnnnnnnnnnnnnnnnnnnnnnnnnnnnnnnnnnnnnnnnnnnnnnnnnnnnnnnnnnnnnnnnnnnnnnnnnnnnnnnnnnnnnnnnnnnnnnnnnnnnnnnnnnnnnnnnnnnnnnnnnnnnnnnnnnnnnnnnnnnnnnnnnnnnnnnnnnnnnnnnnnnnnnnnnnnnnnnnnnnnnnnnnnnnnnnnnnnnnnnnnnnnnnnnnnnnnnnnnnnnnnnnnnnnnnnnnnnnnnnnnnnnnnnnnnnnnnnnnnnnnnnnnnnnnnnnnnnnnnnnnnnnnnnnnnnnnnnnnnnnnnnnnnnnnnnnnnnnnnnnnnnnnnnnnnnnnnnnnnnnattttacctgtgaagtgtaattctttgattgggggtaagggtatgaggtaatcaggaagtttcttctggaattttctcaagtccttgtattctaaaatagccaagcaaaatgatagtaaattctttgtctttgttctttcagtcagaggtatttattaagtacctactgtgtgctcagcactaaaggtttgttgataaaatgacaattaaaaaatggcatttagccaaaggccttttcgagccaggagtaagaaaagatgattagtgatatttggaaatacctggatatttgctagaggaaaaatgaaagcaaaactttgtgcacagtgccttgcccataataggtactcaataagcaattgttcctcatagagtctcttgccatggtttatggtgttttttgaaatttgtcttaattgaaaaaagaccaaatatttcaaatgagcttataggcaactgtggccagttaaaatatggggttgtacagttagttcctagaatgttattttgcactagttgtcacttagaaagatggggttcctgtagattttttggtgctaagggatactttgtcattatgatgaagtaagtgttaagtgtcacataaatagcacacaaaatagttatttctgctggtctgttttttctcttggttgaagttgtttttaattgtaaattgttatcaatcaaactattgtagcagc

SEQ ID NO: 21699 - DNA, 77 bp, Macaca Mulatta
ggtccctttgtgatacgtgctttccttcgtagttcaacaagtgaaggtttattactgaagattgatccattgttgcc

SEQ ID NO: 21700 - DNA, 110 bp, Macaca Mulatta
cagatcatccgccagctggagaacaacatcgagaagacaatgatcaagatcatcaccagccagaacatccacctgctgtatttggacctgctggattatctgaagacagt

SEQ ID NO: 21701 - DNA, 558 bp, Macaca Mulatta
tggtagcaagacaaggagtcaggtgacaggacacagtgtgtcacctctggtagtccctgcctctggcttccttgtcccaaacttttagggtcatgcttcctggagccaggtcttcctgaagtgtcatcaccaagtatgacaaagtgtgagatgaggagtagaactagacccatgggacctggctccctgctatctcccttcagctgggtcccagggccccaactcagtccctgcagatcatgctcaccacacctcttcagctctagaggccaccatcaccttgttattttggggtctagtcttccttatcccctcctcatctcaaactatctggccttgagccatctttctgccttaaaaacagctgctgatgttcatgctacctcccttgctcaagggaacctgaaacaggctagaaatggctctcagaaacgtactgtcagctcagactcatgcccatcattgtcttctgtcagtcataaccatttgggactgggttccccatgtgaagagcactccaggctcccagagtttgaagaacaactttggtttatgggt

SEQ ID NO: 21702 - DNA, 110 bp, Macaca Mulatta
gtgatatgggctgaacaacagtatgaaaaagaaagaactaaacgttcagctataaaggactcagcacaaaatctcttcaatgatcccatgtggaatcagcaatggtactt

SEQ ID NO: 21703 - DNA, 667 bp, Macaca Mulatta
  misc_feature (1)...(667): n = A,T,C or G
cacgctcagcacccgctggtgctctagcacgtctctctcagcctctccgtgcactataagaagggactcatctcaacggcattctccaacggagcgtttctgggaatcggcatcacggctcttcttttcctctgcctcaccctgatcatcatgaagattctaccaaagagacagactcaggcagataccccaaggcccaggttctcccggcacagcacgatcctggattacatcaatgtggtcccgaaggccggccccctggctcagaatcggaatcagaaagccacaccaagcagtccttctcggacccctcttccaccaggtgctccctccccagaatcaaagaagaaacagaaaaagcagcatcagttgcccagtttcccagaacccaaatgatccactcaagccccagaatcccaggagagccaagaggagctccattatgccacgctcaacttcccaggcgtcagacccaggcccgaggcctggatgcccaagggcacccaggcggattacgcagaagtcaagttccaatgaaggtctcttaggttttaggactgggacctcagctaggaagaaaggtagagtacgacagaggttgaagattacggagtgcaacgnnnnnnnnnnnnnnnnnnnnnnnnnnnnnnnnnnnnnnnnnnnnnnn

SEQ ID NO: 21704 - DNA, 124 bp, Macaca Mulatta
cagttgggtttgcctgggtacctttgctgaaagatggtagaatcattacatttgagcagcagctgccagtttccgccaatcttcccccaggctacttgaatctgaatgatgcggaatcaagaag

SEQ ID NO: 21705 - DNA, 2348 bp, Macaca Mulatta
  misc_feature (1)...(2348): n = A,T,C or G
gattgtgagccatgcctttggagaagaggaacattgagccccggcacttgtgccggggagctgtgcctgaaggaattaccagcgaactcgaatgtgtgaccaatatgtactcttgcnnnnnnnnnnnnnnnnnnnnnnnnnnnnnnnnnnnnnnnnnnnnnnnnnnnnnnnnnnnnnnnnnnnnnnnnnnnnnnnnnnnnnnnnnnnnnnnnnnnnnnnnnnnnnnnnnnnnnnnnnnnnnnnnnnnnnnnnnnnnnnnnnnnnnnnnnnnnnnnnnnnnnnnnnnnnnnnnnnnnnnnnnnnnnnnnnnnnnnnnnnnnnnnnnnnnnnnnnnnnnnnnnnnnnnnnnnnnnnnnnnnnnnnnnnnnnnnnnnnnnnnnnnnnnnnnnnnnnnnnnnnnnnnnnnnnnnnnnnnnnnnnnnnnnnnnnnnnnnnnnnnnnnnnnnnnnnnnnnnnnnnnnnnnnnnnnnnnnnnnnnnnnnnnnnnnnnnnnnnnnnnnnnnnnnnnnnnnnnnnnnnnnnnnnnnnnnnnnnnnnnnnnnnnnnnnnnnnnnnnnnnnnnnnnnnnnnnnnnnnnnnnnnnnnnnnnnnnnnnnnnnnnnnnnnnnnnnnnnnnnnnnnnnnnnnnnnnnnnnnnnnnnnnnnnnnnnnnnnnnnnnnnnnnnnnnnnnnnnnnnnnnnnnnnnnnnnnnnnnnnnnnnnnnnnnnnnnnnnnnnnnnnnnnnnnnnnnnnnnnnnnnnnnnnnnnnnnnnnnnnnnnnnnnnnnnnnnnnnnnnnnnnnnnnncccccagccggtgacccctttatacgcagctggtgacgtgccaccacatgggcctgcaattcaggctgcggagcatgaataccggcccccgtctgcctcggcgaggcacatggccctcaacagacctcagcagccgccgcccccgcctccgcctcaggcgccagaggggtcccaggcctctgcaccgatggctccagcagactacgggnnnnnnnnnnnnnnnnnnnnnnnnnnnnnnnnnnnnnnnnnnnnnnnnnnnnnnnnnnnnnnnnnnnnnnnnnnnnnnnnnnnnnnnnnnnnnnnnnnnnnnnnnnnnnnnnnnnnnnnnnnnnnnnnnnnnnnnnnnnnnnnnnnnnnnnnnnnnnnnnnnnnnnnnnnnnnnnnnnnnnnnnnnnnnnnnnnnnnnnnnnnnnnnnnnnnnnnnnnnnnnnnnnnnnnnnnnnnnnnnnnnnnnnnnnnnnnnnnnnnnnnnnnnnnnnnnnnnnnnnnnnnnnnnnnnnnnnnnnnnnnnnnnnnnnnnnnnnnnnnnnnnnnnnnnnnnnnnnnnnnnnnnnnnnnnnnnnnnnnnnnnnnnnnnnnnnnnnnnnnnnnnnnnnnnnnnnnnnnnnnnnnnnnnnnnnnnnnnnnnnnnnnnnnnnnnnnnnnnnnnnnnnnnnnnnnnnnnnnnnnnnnnnnnnnnnnnnnnnnnnnnnnnnnnnnnnnnnnnnnnnnnnnnnnnnnnnnnnnnnnnnnnnnnnnnnnnnnnnnnnnnnnnnnnnnnnnnnnnnnnnnnnnnnnnnnnnnnnnnnnnnnnnnnnnnnnnnnnnnnnnnnnnnnnnnnnnnnnnnnnnnntttgtataaataatgtgatattgcttctgcacatccaaaaattctgggtcttttcagtatttactgtgtaatacttaagtgccactgaacatagcaaattgtgctacacatggggaaataggctgtcactatcgcattgtcctgaaaacagcatctgctttcctcttgaccatgagagtatttcgtgcagtttgggtttactcttactgatcagtataactctgcagacttgctgtgtgtttgtgaagctgcctggtgttaggtctctgcaagactaatgactatgtcagagtgatgtcttccaaccagtaagtgatattgtttcaccgctttgnnnnnnnnnnnnnnnnnnnaaaggatgtgtttctgaagaagttggttttagagggaaaggttcaacaaatagggagaatccaaggtttctgctttcagtttcttggcttgatagcctctaagtgaatctgaatgctctgctgaataatttcatggcctctgctcacgcctgtcgaatatgaaattggaagggcccttttcaggctgggttccctgtgggtctttgcttagtaaatgcctgttgatggttttgcaagagagttcagcagctcaacagtaatgaaagtgaagaacagagtcctttttccttcctggggccattggggatgacattcaagatacttgccagcctctccagtgtgggcaccagctggccagaacagatgcgagcagtcca

SEQ ID NO: 21706 - DNA, 1323 bp, Macaca Mulatta
aggcagattgtttcttgaatgctttgtcaaattagggaagttaaagtgcaataatgtttgaagacaataagtggtggtgtatcttgtttctaataagataaacttttttgtctttatcttattagggagttgtatgtcagtgtataaaacatactgtggtataataggtttaaaataaattctttaagagaactgaaactagccctgtagatttgtctggtgcatgtgatgaaacctgcagctttgttggtgatggcaatgctgtgctggtttactttcaagtggctggatttttttagtttgacaggtacagacttttttaactgggctttagaaaatctgggttagcctgaagaaaattgcttctgccttcatagtaccattttaaattcacatacaaaaggtgaaagctccctagttcagtgctgtggcttcatgtaattcaatgattcgtggtagtggtattaatactggtgtgttttgaaattgaatgtgagataaaattagccttaagattggtaagctagcaatgaatgctagggtgggaagctggtaagccagtggccgttagataaatacctttcaagtgtgagaagtcaatcctaaaatatttaaccgtaatgctaattgtgatcattatgaatcctttcagtcacattagaggggaaagtagttggctataagtacctcattcttagtccagtcagtcttaaaaacatcttgggttacccattctgtgcactcccaccaggctacagaaaaggtcataaccgcatggtttgcaaccgtatgtgttttgtgcagttacttctcttgttcttggccaaactaccctaaaaattcttaccattcccacaaagttggggcatcacttgtggtcccagtgttgagtacacaacgcacatgggatttttgattcaatcaaaggcctccaagaaaacttaaactggtttaccaaggggggaattttaatatttaagataaagggttaacaaggggaatttcccccaaacctagaattctagagcatttctgggcgtttaaatctaaaagccgcggttttctccctgaaacccagttttcctccggaaccgccctcccagggggggcttgaaaaacggactaactgcagttggaaatttcacaagaaacttacagttatggagtttgtaagaaataatgtcttatggacagcatataatacatatacgtcctcgcgggtaaggcaaatttatgtagagcgagcgcataacccaacccctaatcatggctaagacccccaattttagcgttcattttccgagatgagcttgcctcgaaaaa

SEQ ID NO: 21707 - DNA, 4010 bp, Macaca Mulatta
  misc_feature (1)...(4010): n = A,T,C or G
gtggagcgagggagcggcgcgagcggcagcatgactcggaggcggagcaggccgagcggcggcgcgggtaggcgcgagcgggctcgggccgcggggccacagaagccccaggcgcccgagcccccgccgccgccnnnnnnnnnnnnnnnnnnnnnnnnnnnnnnnnnnnnnnnnnnnnnnnnnnnnnnnnnnnnnnnnnnnnnnnnnnnnnnnnnnnnnnnnnnnnnnnnnnnnnnnnnnnnnnnnnnnnnnnnnnnnnnnnnnnnnnnnnnnnnnnnnnnnnnnnnnnnnnnnnnnnnnnnnnnnnnnnnnnnnnnnnnnnnnnnnnnnnnnnnnnnnnnnnnnnnnnnnnnnnnnnnnnnnnnnnnnnnnnnnnnnnnnnnnnnnnnnnnnnnnnnnnnnnnnnnnnnnnnnnnnnnnnnnnnnnnnnnnnnnnnnnnnnnnnnnnnnnnnnnnnnnnnnnnnnnnnnnnnnnnnnnnnnnnnnnnnnnnnnnnnnnnnnnnnnnnnnnnnnnnnnnnnnnnnnnnnnnnnnnnnnnnnnnnnnnnnnnnnnnnnnnnnnnnnnnnnnnnnnnnnnnnnnnnnnnnnnnnnnnnnnnnnnnnnnnnnnnnnnnnnnnnnnnnnnnnnnnnnnnnnnnnnnnnnnnnnnnnnnnnnnnnnnnnnnnnnnnnnnnnnnnnnnnnnnnnnnnnnnnnnnnnnnnnnnnnnnnnnnnnnnnnnnctggcacctcctcgccatacccagcagagcagtcggagcagacagccaggctggccggaagagtttttggtggggtttctgccctgaggtggaaacccagcagaacctgccctttctcccttcccctgccccgcaaggcggcccaccccgaccctgagatcccgggtttggagactcctgctgagagtgaacagtaggaggattctccaaagcttccagcttgccacctggaagaaggtcactttcttttgagcaaaggagataatggggggtaccctgccaatgttcactgagaggcgggggtgacatgggccacggttgctctgggagggttgtggcactcggggctgggtggctctccctaagcttgctctgacaaaagagttttgagttggtcttttggctgagcctgcccaggaaggcaggctcctgcaggagtcttggagggtcggatgcggcgccggatgaggatgaggcgtggcggaagatgcgtttggctctgcagacactgcatcgggcagcaggggactctgggaggctggtgcagccagaaggcatggctcttgacagccttctagtagaatctctggaattgtgcannnnnnnnnnnnnnnnnnnnnnnnnnnnnnnnnnnnnnnnnnnnnnnnnnnnnnnnnnnnnnnnnnnnnnnnnnnnnnnnnnnnnnnnnnnnnnnnnnncctccagccagcctgtgcagacttgctgccttctgtgtcaccgggaacgcaaaggctgggaagaaggcccttctcaaaatggactggtgttgcagggtgagaagctgccccctgacttcatnnnnnnnnnnnnnnnnnnnnnnnnnnnnnnnnnnnnnnnnnnnnnnnnnnnnnnnnnnnnnnnnnnnnnnnnnnnnnnnnnnnnnnnnnnnnnnnnnnnnnnnnnnnnnnnnnnnnnnnnnnnnnnnnnnnnnnnnnnnnnnnnnnnnnnnnnnnnnnnnnnnnnnnnnnnnnnnnnnnnnnnnnnnnnnnnnnnnnnnnnnnnnnnnnnnnnnnnnnnnnnnnnnnnnnnnnnnnnnnnnnnnnnnnnnnnnnnnnnnnnnnnnnnnnnnnnnnnnnnnnnnnnnnnnnnnnnnnnnnnnnnnnnnnnnnnnnnnnnnnnnnnnnnnnnnnnnnnnnnnnnnnnngtgaggctttccccatctcggagcaccaccagcactcagacctcactgctccccctaacagccccaccggccaccacccccagccagcatctctaatcccgtctcaccccagctcctttggctccccgccccacccacacctgctgcccaccaccccggcagcacctttccctgcccaggcttcagagtgccctgttgctgctgccaccgccccccacactccagggccatgtcagagctcccatctgccctccaccagcatgccactcctgaagatgcccccaccattctcggggtgcagccacccctgcagcgggcactgtggtgagcactgcagtgggcctctccnnnnnnnnnnnnnnnnnnnnnnnnnnnnnnnnnnnnnnnnnnnnnnnnnnnnnnnnnnnnnnnnnnnnnnnnnnnnnnnnnnnnnnnnnnnnnnnnnnnnnnnnnnnnnnnnnnnnnnnnnnnnnnnnnnnnnnnnnnnnnnnnnnnnnnnnnnnnnnnnnnnnnnnnnnnnnnnnnnnnnnnnnnnnnnnnnnnnnnnnnnnnnnnnnnnnnnnnnnnnnnnnnnnnnnnnnnnnnnnnnnnnnnnnnnnnnnnnnnnnnnnnnnnnnnnnnnnnnnnnnnnnnnnnnnnnnnnnnnnnnnnnnnnnnnnnnnnnnnnnnnnnnnnnnnnnnnnnnnnnnnnnnnnnnnnnnnnnnnnnnnnnnnnnnnnnnnnnnnnnnnnnnnnnnnnnnnnnnnnnnnnnnnnnnnnnnnnnnnnnnnnnnnnnnnnnnnnnnnnnnnnnnnnnnnnnnnnnnnnnnnnnnnnnnnnnnnnnnnnnnnnnnnnnnnnnnnnnnnnnnnnnnnnnnnnnnnnnnnnnnnnnnnnnnnnnnnnnnnnnnnnnnnnnnnnnnnnnnnnnnnnnnnnnnnnnnnnnnnnnnnnnnnnnnnnnnnnnnnnnnnnnnnnnnnnnnnnnnnnnnnnnnnnnnnnnnnnnnnnnnnnnnnnnnnnnnnnnnnnnnnnnnnnnnnnnnnnnnnnnnnnnnnnnnnngccgccaagcgggcccggcacaagctgaaaaagaagnnnnnnnnnnnnnnnnnnnnnnnnnnnnnnnnnnnnnnnnnnnnnnnnnnnnnnnnnnnnnnnnnnnnnnnnnnnnnnnnnnnnnnnnnnnnnnnnnnnnnnnnnnnnnnnnnnnnnnnnnnnnnnnnnnnnnnnnnnnnnnnnnnnnnnnnnnnnnnnnnnnnnnnnnnnnnnnnnnnnnnnnnnnnnnnnnnnnnnnnnnnnnnnnnnnnnnnnnnnnnnnnnnnnnnnnnnnnnnnnnnnnnnnnnnnnnnnnnnnnnnnnnnnnnnnnnnnnnnnnnnnnnnnnnnnnnnnnnnnnnnnnnnnnnnnnnnnnnnnnnnnnnnnnnnnnnnnnnnnnnnnnnnnnnnnnnnnnnnnnnnnnnnnnnnnnnnnnnnnnnnnnnnnnnnnnnnnnnnnnnnnnnnnnnnnnnnnnnnnnnnnnnnnnnnnnnnnnnnnnnnnnnnnnnnnnnnnnnnnnnnnnnnnnnnntcgtgaggagactcaacaccgtgcccaacctgtcccgggtgatctgggtcaagacacccaagccgggctaccccagctccgaggagccaagctcaaaggaagttcccagttgcaagcaggagctgcctgagcctgtgtcctcaggtgggaagccgcggaagggcaagaggcagggcagtcaggccaagaagagcgaggcaagcccannnnnnnnnnnnnagccagcctagaggttcccagtgccaagggccaggttgctggccccaagcagccaggcaaggtcctagagcctcccaaagtaggcagctgttccgaggctggagaggggagccgggggagccggccaggaccaggttgggctggcagccccaaaactgagaaggagaagggcagctcctggcgaaactggccaggcgaggccaaggcacggcctcaggagcaggagtctgtgcagcccccaggcccagcaaggccacagagcttgccccagggcaagggccgcagccgccggagccgcaacaagcaggagaagccagcctcctccttggngacgatgtgttcctgcccaaggacatgg

SEQ ID NO: 21708 - DNA, 685 bp, Macaca Mulatta
agtaaagatctattctgtaacctgacactcatctggccctctgcggtttgccggccacattcccttgtgatttcccactggcccccacccagctgggaggaggggctctgatgtgcagattggaaatcagaaggctgtgagcagagcacgggagtgcatggcagctctgggccccaggcctggcccggcccctctgcttactccacctccagctctgctgttcctctactcttaggtccagatccctttggagccacagcgaggaaccctgtggtcctcaggcaggtgtaccttgggtcagccaggagccctcttttactgttttaaagcctgctctcgggctctgctcacctctggtgaccctccaagatgcccctgccctcagtttcccctcatgatccggcctctgcccgcctctccagccgcagcctctagtgcactttagcaataccaccagactagttagagttccccactcaccaagcaagacatgcagtttcatgcctctgtgccttcgctcacgctgtttcttccgactggaatgccttcccctgctcctcctgccttgtctgcctggcaagtacctgttcatctctcatgatcccctcaaaggccccctcctccaggaaggcaacccctgtgcccctccccctccagctacctctgcactttgtcaatgcttctc

SEQ ID NO: 21709 - DNA, 131 bp, Macaca Mulatta
aaagtagtccccatatatcaatggaaaaactgtctaaatagcaacttctagttccccaccctgctcaagttatgtcttcccagaatccttctttataattgtatccattggtctgtggtgtttggtgctta

SEQ ID NO: 21710 - DNA, 85 bp, Macaca Mulatta
cttaaatcgagagcctactgtggacatatctccagatactgttgggaccctcagtcttattatgctggcacaggctcaagaagta

SEQ ID NO: 21711 - DNA, 1683 bp, Macaca Mulatta
  misc_feature (1)...(1683): n = A,T,C or G
agcactttgggaggccgaggcaggaggatcactgagggtcaggagttcgagaccagcctggccaacatggcgaaacnccgtctctactaaaaatacaaaaattagccaggtatggtggcacacacctgtaatcccagctattaaggaggctgaggcaggagaatagcttgaacctgggaggcagaggttgcagtgagccaagatcatgccattgcactccagcctgggcaacagagcannnnnnnnnnnnnnnnnnnnnnnnnnnnnnnnnnnnnnnnnnnnnnnnnnnnnnnnnnnnnnnnnnnnnnnnnnnnnnnnnnnnnnnnnnnnnnnnnnnnnnnnnnnnnnnnnnnnnnnnnnnnnnnnnnnnnnnnnnnnnnnnnnnnnnnnnnnnnnnnnnnnnnnnnnnnnnnnnnnnnnnnnnnnnnnnnnnnnnnnnnnnnnnnnnnnnnnnnnnnnnnnnnnnnnnnnnnnnnnnnnnnnnnnnnnnnnnnnnnnnnnnnnnnnnnnnnnnnnnnnnnnnnnnnnnnnnnnnnnnnnnnnnnnnnnnnnnnnnnnnnnnnnnnnnnnnnnnnnnnnnnnnnnnnnnnnnnnnnnnnnnnnnnnnnnnnnnnnnnnnnnnnnnnnnnnnnnnnnnnnnnnnnnnnnnnnnnnnnnnnnnnnnnnnnnnnnnnnnnnnnnnnnnnnnnnnnnnnnnnnnnnnnnnnnnnnnnnnnnnnnnnnnnnnnnnnnnnnnnnnnnnnnnnnnnnnnnnnnnnnnnnnnnnnnnnnnnnnnnnnnnnnnnnnnnnnnnnnnnnnnnnnnnnnnnnnnnnnnnnnnnnnnnnnnnnnnnnnnnnnnnnnnnnnnnnnnnnnnnnnnnnnnnnnnnnnnnnnnnnnnnnnnnnnnnnnnnnnnnnnnnnnnnnnnnnnnnnnnnnnnnnnnnnnnnnnnnnnnnnnnnnnnnnnnnnnnnnnnnnnnnnnnnnnnnnnnnnnnnnnnnnnnnnnnnnnnnnnnnnnnnnnnnnnnnnnnnnnnnnnnnnnnnnnnnnnnnnnnnnnnnnnnnnnnnnnnnnnnnnnnnnnnnnnnnnnnnnnnnnnnnnnnnnnnnnnnnnnnnnnnnnnnnnnnnnnnnnnnnnnnnnnnnnnnnnnnnnnnnnnnnnnnnnnnnnnnnnnnnnnnnnnnnnnnnnnnnnnnnnnnnnnnnnnnnnnnnnnnnnnnnnnnnnnnnnnnnnnnnnnnnnnnnnnnnnnnnnnnnnnnnnnnnnnnnnnnnnnnnnnnnnnnnnnnnnnnnnnnnnnnnnnnnnnnnnnnnnnnnnnnnnnnnnnnnnnnnnnnnnnnnnnnnnnnnnnnnnnnnnnnnnnnnnnnnnnnnnnnnnnnnnnnnnnnnnnnnnnnnnnnnnnnnnnnnnnnnnnnnnnnnnnnnnnnnnnnnnnnnnnnnnnnnnnnnnnnnnnnnnnnnnnnnnnnnnnnnnnnnnnnnnnnnnnnnnnnnnnnnnnnnnnnnnnnnnnnnnnnnnnnnnnnnnnnnnnnnnnnnnnnnnnnnnnnnnnnnnnnnnnnnnnnnnnnnnnnnnaggtggttgcgaggggcctgtcccaggtcctggtgtttgaggatgacgtgcgctttgagagcaacttcagggggaggctggagcggctgatggaggatgtggaggcagagaaactgccatgggacctga

SEQ ID NO: 21712 - DNA, 547 bp, Macaca Mulatta
  misc_feature (1)...(547): n = A,T,C or G
agctggcaccgtgatggctctcagaaggctccgagatgggaggagaggccaggagctgcttcccaggctcttacctttttctatggcccaggtgagggggcggggagactggcctcatgtgaaggtcacggtcgcagtgtgtcagaacagtcttgtgcactgcatgaagcaggcgcaggctgggcgtgtgaagacggagctgctgaaggtggcacatcaccaggtggccaaggctgtccctgaagagtcccaaatcgtggtccttcatcttgccacagttgggtatgtctgcgtggccattaggactagaaaagcaagnnnnnnnnnnnnnnnnnnnnnnnnnnnnnnnnnnnnnnnnnnnnnnnnnnnnnnnnnnnnnnnnnnnnnnnnnnnnnnnnnnnnnnnnnnnnnnnnnnnnnnnnnnnnnnnnnnnnnnnnnnnnnnnnnnnnnnnnnnnnnnnnnnnnnnnnnnnnnnnnnnnnnnnnnnnnnnnnnnnnnnnnnnnnnagggtttctcgccggtgtgaattctttggtgatggataag

SEQ ID NO: 21713 - DNA, 323 bp, Macaca Mulatta
  misc_feature (1)...(323): n = A,T,C or G
gccgaccgctgtaaggaggtacagcagatccgcgaccagcaccccagcaaaatcccggtnggtgatcatcgagcgctacaagggtgagaagcagctgcccgtcctggacaagaccaagtttctggtcccggaccatgtcaacatgagcgagttggtcaagatcatccggnggcgccgcctgcagctgaaccccacgcaggccttcttcctgctggtgaaccagcacagcatggtgagcgtgtccacgcccatcgcggacatctacgagcaggagaaagacgaggacggcttcctctacatggtctacgcctcccaggaaacct

SEQ ID NO: 21714 - DNA, 836 bp, Macaca Mulatta
tcgggcaaaaagcgatgctgccacagcgcctgtggccgggattgccgagatcctgccagaggtgtggctcctgggtgcccggggcaggtgccttccctctccgagccccagctctaatactttcttcactgctgcaagcttaacagcatgcctccccagaagtcagggcctcccgtggctaggattggggaattggataggggctgggggagtcctgctaggataacagaggacctggaagtccttggttctcttcttgatcttgctgtggcatctggacaacagccctaaactgctccaggcttccgtttgcccttttgaagggggcggaggagtccagccttggtggcaaccagagctgagctggtcgggcatggatgggagaccaaggccagaaaccagagccctattatgggaaggaattaaccctttctttctccctcctcaggctaattctgatttaggatccgtggctctgcacctaagctggggaccaacggaaagagttcacgatgggaggcctggggccctgcccgccggacagcactatctctactagcggtggttccagccttctgataaacactggcctgctgtcacttccctgcaacgcatctgcccctggattctccccctgggagtcaaagtccatagcctgacctcggaggaaggcctctgtatcacgccagcaccctgcaccactgccacatgagcttcccacccttcctaacacgttcacaccaatccgtacatgctgcttcctccaccaagaaagcccaattcaggcagaccctgacctctccctcaggcagcccaaccacccagaatgaatattc

SEQ ID NO: 21715 - DNA, 1313 bp, Macaca Mulatta
  misc_feature (1)...(1313): n = A,T,C or G
accaccccttctggttccgctgcatgtacatgctgatctggggcaagtttgtcctgtacaaatacgtcacctgttggctggtcacagngaaggagtatgcattttgacgggccnnnnnnnnnnnnnnnnnnnnnnnnnnnnnnnnnnnnnnnnnnnnnnnnnnnnnnnnnnnnnnnnnnnnnnnnnnnnnnnnnnnnnnnnnnnnnnnnnnnnnnnnnnnnnnnnnnnnnnnnnnnnnnnnnnnnnnnnnnnnnnnnnnnnnnnnnnnnnnnnnnnnnnnnnnnnnnnnnnnnnnnnnnnnnnnnnnnnnnnnnnnnnnnnnnnnnnnnnnnnnnnnnnnnnnnnnnnnnnnnnnnnnnnnnnnnnnnnnnnnnnnnnnnnnnnnnnnnnnnnnnnnnnnncaggctgccaggctcattcaacagagccccaccctgagcaacctggccgccattactgccctccagcccttctactatttggtgcaacagaccatccactggctcttcatgggttactccatgactgccttctgcctcttcacgtgggataaatggcttaaggcaagtgaaggcctgctnnnnnnnnnnnnnnnnnnnnnnnnnnnnnnnnnnnnnnnnnnnnnnnnnnnnnnnnnnnnnnnnnnnnnnnnnnnnnnnnnnnnnnnnnnnnnnnnnnnnnnnnnnnnnnnnnnnnnnnnnnnnnnnnggtggcctatgcaggactggtgcagaaactacttatctcccttttcatagcactcctttgccccagagcacagagaatggaaaagccagggaggtggaagatcgatgcttccagttgtgcctctgctgccagccaagtcttcatttgggaccaaaggggaagctttttttttgaagaaggagtcttgctctgtcacccacgctggaatgcagtggcgcgatctcagctcaccgcaacctccacctcccgggttcaagtgattttcctgcctcagcctcccaagtagctgggaatacaggtgtgccaccacgcccagctaatttttgtattttcagtagaaacggggtttcaccacgttggccaggctggtctcgaactcctgacctcaagtgattcgcccgcctccgcctcccaaagtgctgggattacaggcgtgagccaccatgcctggcccaaaggggaaactcttgtgggaggagcagaggagtccacatctcccctctggctcccccatgcacattgccttatctctccccatctagccaggaatctattgtgtttttcttctgccaagttactatgattgtgtatgtgccgctaccacc

SEQ ID NO: 21716 - DNA, 613 bp, Macaca Mulatta
cgtggccgcttccagtctggtcgggtttcggcggcctcagtgcccagggaggaggcagtgacggccggggagattggtagtggcggcggcgacaggcagcagaggggagtccgaggttatgcgtctcaatgatcccgcggaaacgctacgggtctaagaacacggatcagggtgtctacctgggtctctcaaagacacaggtcctgtcccctgcacctgctggcagtagcagcagcgacatcgcccctctgccccccccagtggccctcgtccctccccctcccgacaccatgtcctgccgggatcggacccaggagtttctgtctgcctgcaagtcgctgcagacccgtcagaatggaatccagacaaataagccagctttgcgtgctgtccgacaacgcagtgaattcaccctcatggccaagcgcattgggaaagaccttagcaacacatttgccaagctggagaagctgacaatcttggcaaagcgcaagtccctctttgatgataaagcagtggaaattgaagaactaacatatatcatcaaacaggacatcaatagcctcaacaaacaaattgctcagctccaggatttcgtgagggccaagggcag

SEQ ID NO: 21717 - DNA, 113 bp, Macaca Mulatta
gatagcagcttactgggcaaggacagccccccgacacctaccatgtacaagtatcggccgggttacagtagcagcagtacatcagctgccatgccgcattcctccagcgccaa

SEQ ID NO: 21718 - DNA, 2561 bp, Macaca Mulatta
  misc_feature (1)...(2561): n = A,T,C or G
gctgcctgggggctgtagaggtcgtgctgctcctgctggggcctgcccacgccaaggacctgcctctgttgcctcctcttccatcgcccagnnnnnnnnnnnnnnnnnnnnnnnnnnnnnnnnnnnnnnnnnnnnnnnnnnnnnnnnnnnnnnnnnnnnnnnnnnnnnnnnnnnnnnnnnnnnnnnnnnnnnnnnnaggtcctgactgaggttgtacctatccacggacgaggcaactttccaccttggagataactctgaaggacatcgtccagaccgtccgcagtcggctggaagaggcaggcatcaaagtgcaggacgtccggctgaatggctctgcagctggccacgttttggtcaaagacaatggcttgggctgcaaagacctggacctaatcttccatgtggctcttccaacagaggcagaatttcagctggttagagatgtggttctgtgttcccttctgaacttcctgccagagggtgtgaacaagctcaaaatcagtccagtcactctgaaggaggcatatgtgcagaagctagtgaaggtttgcacggacactgaccgctggagcctgatctccctctccaacaagaatgggaagaacgtggagctgaagtttgtcgactccattcggcgtcagtttgagttcagtgtggactctttccaaatcatcctggattctttgcttttcttctatgactgttccaataaccccatctctgagcacttccaccccaccgtgattggggagagcatgtacggggacttcgaggaagcttttgaccatctgcagaacagactgattgccaccaagaacccagaagaaatcagaggcgggggacttctcaagtacagcaaccttctcgtacgggacttcaggcccacggaccaggaagaaatcaaaactctagagcgctacatgtgctccagattcttcatcgacttcccagacatccttgaacagcagaggaagttggagacctaccttcaaaaccactttgctgaagaagagagaagcaagtacgactacctcatgatccttcgcagggtggtgaatgagagcaccgtgtgtctcatggggcatgaacgcaggcagaccctgaacctcatctccctcctggccttgcgtgtgctggcggaacaaaacatcatccccnnnnnnnnnnnnnnnnnnnnnnnnnnnnnnnnnnnnnnnnnnnnnnnnnnnnnnnnnnnnnnnnnnnnnnnnnnnnnnnnnnnnnnnnnnnnnnnnnnnnnnnnnnnnnnnnnnnnnnnnnnnnnnnnnnnnnnnnnnnnnnnnnnnnnnnnnnnnnnnnnnnnnnnnnnnnnnnnnnnnnnnnnnnnnnnnnnnnnnnnnnnnnnnnnnnnnnnnnnnnnnnnnnnnnnnnnnnnnnnnnnnnnnnnnnnnnnnnnnnnnnnnnnnnnnnnnnnnnnnnnnnnnnnnnnnnnnnnnnnnnnnnnnnnnnnnnnnnnnnnnnnnnnnnnnnnnnnnnnnnnnnnnnnnnnnnnnnnnnnnnnnnnnnnnnnnnnnnnnnnnnnnnnnnnnnnnnnnnnnnnnnnnnnnnnnnnnnnnnnnnnnnnnnnnnnnnnnnnnnnnnnnnnnnnnnnnnnnnnnnnnnnnnnnnnnnnnnnnnnnnnnnnnnnnnnnnnnnnnnnnnnnnnnnnnnnnnnnnnnnnnnnnnnnnnnnnnnnnnnnnnnnnnnnnnnnnnnnnnnnnnnnnnnnnnnnnnnnnnnnnnnnnnnnnnnnnnnnnnnnnnnnnnnnnnnnnnnnnnnnnnnnnnnnnnnnnnnnnnnnnnnnnnnnnnttcaagggactgaattgcttacgtttattccctgtcagcagagcggagaatgtcattcatcaataaaccaaagccaatagctggagaattgagatctggttgaaagtggtttatggtttacatgctgtactatcctgaggaattgcgagatattgctgagnnnnnnnnnnntgaccttttcttgaaatgtaacttgaaaacaaaataaaatgtggaacgtaatgtttaattagaattgtgctggtggtagtggaaggggataattgtaaataggaaacatgaatgttcatttttttctttaaagaattcttattaaatgactccctgcnnnnnnnnnnnnnnnnnnnnnnnnnnnnnnnnnnnnnnnnnnnnnnnnnnnnnnnnnnnnnnnnnnnnnnnnnnnnnnnnnnnnnnnnnnnnnnnnnnnnnnnnnnnnnnnnnnnnnnnnnnnnnnnnnnnnnnnnnnnnnnnnnnnnnnnnnnnnnnnnnnnnnnnnnnnnnnnnnnnnnnnnnnnnnnnnnnnnnnnnnnnnnnnnnnnnnnnnnnnnnnnnncaaaaatagtaacttccttctccaggtgtgtttgacagcaactcaattcaggaatttcagtagaactgagtgacctgtggaactgctttagaatctaacctgctgtcttcgtgctgtgtgtgaaggggaaggtagggggttagcattaagtttggccttgtgtgcattggtgctaccaaggcactattgaaatcattc

SEQ ID NO: 21719 - DNA, 1271 bp, Macaca Mulatta
  misc_feature (1)...(1271): n = A,T,C or G
aggagctgagtaagctgattcctaagtctgcggttggggagctgagtgaggactccagcaatgtggtacagctcatcatggatgcttataatgtgagaggccannnnnnnnnnnnnnnnnnnnnnnnnnnnnnnnnnnnnnnnnnnnnnnnnnnnnnnnnnnnnnnnnnnnnnnnnnnnnnnnnnnnnnnnnnnnnnnnnnnnnnnnnnnnnnnnnnnnnnnnnnnnnnnnnnnnnnnnnnnnnnnnnnnnnnnnnnnnnnnnnnnnnnnnnnnnnnnnnnnnnnnnnnnnnnnnnnnnnnnnnnnnnnnnnnnnnnnnnnnnnnnnnnnnnnnnnnnnnnnnnnnnnnnnnnnnnnnnnnnnnnnnnnnnnnnnnnnnnnnnnnnnnnnnnnnnnnnnnnnnnnnnnnnnnnnnnnnnnnnnnnnnnnnnnnnnnnnnnnnnnnnnnnnnnnnnnnnnnnnnnnnnnnnnnnnnnnnnnnnnnnnnnnnnnnnnnnnnnnnnnnnnnnnnnnnnnnnnnnnnnnnnnnnnnnnnnnnnnnnnnnnnnnnnnnnnnnnnnnnnnnnnnnnnnnnnnnnnnnnnnnnnnnnnnnnnnnnnnnnnnnnnnnnnnnnnnnnnnnnnnnnnnnnnnnnnnnnnnnnnnnnnnnnnnnnnnnnnnnnnnnnnnnnnnnnnnnnnaggctttggtcgctgccaatgtggagtatgtcactgtcatgccaaccgcacgggcagagcatgcgaatgcagtggggacatggacagttgcatcagtcccgagggagggctctgcagtgggcatggacgctgcaaatgcaaccgctgccagtgctcggatggctactacggtgctctatgtgaccaatgcccaggctgcaagacaccatgtgagagacaccgnnnnnnnnnnnnnnnnnnnnnnnnnnnnnnnnnnnnnnnnnnnnnnnnnnnnnnnnnnnnnnnnnnnnnnnnnnnnnnnnnnnnnnnnnnnnnnnnnnnnnnnnnnnnnnnnnnnnnnnnnnnnnnnnnnnnnnnnnnnnnnnnnnnnnnnnnnnnnnnnnnnnnnnnnnnnnnnnnnnnnnnnnnnnnnnnnnnnnnnnnnnnnnnnnnnnnnnnnnnnnnnnnncaggccattgtgctgggctgcgtagggggcatcgtggcagtggggctggggctggtcctggcttaccggctctcggtggaaatctatgaccgccgggaatacagtcgctttgagaaggagcagcaacaactcaactggaagcag

SEQ ID NO: 21720 - DNA, 517 bp, Macaca Mulatta
  misc_feature (1)...(517): n = A,T,C or G
agggcagaaactcacctatggtctccacaggtgtctgaagatgggaaagcccatcctttcaaaatcaacttagaatcagaaccacaggnnnnnnnnnnnnnnnnnnnnnnnnnnnnnnnnnnnnnnnnnnnnnnnnnnnnnnnnnnnnnnnnnnnnnnnnnnnnnnnnnnnnnnnnnnnnnnnnnnnnnnnnnnnnnnnnnnnnnnnnnnnnnnnnnnnnnnnnnnnnnnnnnnnnnnnnnnnnnnnnnnnnnnnnnnnnnnnnnnnnnnnnnnnnnnnnnnnnnnnnnnnnnnnnnnnnnnnnnnnnnnnnnnnnnnnnnnnnnnnnnnnnnnnnnnnnnnnnnnnnnnnnnnnnnnnnnnnnnnnnnnnnnnnnnnnnnnnnnnnnnnnnnnnnnnnnnnnnngatgaccgtccggctggaacgcggagtgtgagagctccggtgacgaaagtccatggtggttcaggcggggcacagaggatgccgctctgtgacaaatgtgggagtggcatag

SEQ ID NO: 21721 - DNA, 667 bp, Macaca Mulatta
  misc_feature (1)...(667): n = A,T,C or G
tctcggcggccttcagcgccgcagacgctccggcaacgccggtatccgaggcccccgccctaggctcgcgggtccgggcggcgttcccccgtgcgggaggcgcggcgagccaatcctcactntcaaagctttcgcgtcctggaagtctatcgtggggggcaaaacgcgctggccccagacgaccggttcgtgaagtcacccttccgagcgacccggagcgggcgaccctgcagaaccgcggctcggggcccttgcggtcccgcgtagaggacccaggtcccgcggggggcggcggtgactcgccccctccggcggccgcgcttccgcccccggtacccgcacgctgctggaccgcccggcgtcgcgtcgccgcctcacaaagcctgggcggccgcctcatcgcgcgcagggatccgggccacgcgccctcccctcccccactcgccgccgctaccctgggcgcccaggtctttacccccgcgtcactttctcctcatcgagtccccggagacagacagcggagcgaggctcgccttcccgggcgagacgcaagctccagtcctcccttggcgccgaggcccccgcgccccacggagggactactttccgtctcctgtgaggcactacttcctcccccgcggaggcgtcggaccaggaggcgcgcacg

SEQ ID NO: 21722 - DNA, 405 bp, Macaca Mulatta
atggccgcgtacagggcagctctcgggggttcgctcgcagctgcccgactcctgcccctcggccgctgccacccgtcgcccgcgcccggctctaccttgtcgggcgccgccatggagcccgcgccttgctggctggcggggctgcgcttcgacaaccgcgccctgcgcgcgctgcccgtggaggcgccgcctcccggtcccgagggcgcccagtccgcgccgcgccaggtgcccggggcctgcttcacccgcgtgcggcccacccccctgcggcagccgcgccttgtggcgctgtcggagcccgcgctggcactgctgggcctgggcgcgccgcccgcacgcgaggccgaggccgaggccgcgctttcttcagcggcaacgcgctcctgccgggcgcgagcccgc

SEQ ID NO: 21723 - DNA, 642 bp, Macaca Mulatta
  misc_feature (1)...(642): n = A,T,C or G
agatagagcctttgtcaaatctgagaaatctgaaccaaacagaatgctttattttcccaagaaaaagaatcaagatgaaatacaaacaaatggaactaaaagccatatgaaataccctctcttggccgggcgtnnnnnnnnnnnnnnnnnnnnnnnnncaacaattattttttacatatagcaagtaatacaagcaatagaaaatgtttcaattaatagaaattaagagaattataaataaatctaatgtataattctcaatattcctaattgcttgcaagtgtccagtggataacagcataacaacaaaggacccctttaaaatgcattgtttttcagctttatttcaaatgctgtgtagcataagaacctagcagtcagacatcattttttagctatgaaaaatatgaaacaaggcatattctaaaatgctgaaggaattaattgtcctgttagataacgaatacctggaggaatgaacagagtgatttatggcttaaagtgcttgggtctgatcatcatcttagcctctttgaaggaggacttgtagccaccangggtgtgcctcacttacaccaggccaggtgccccagaaaatcccattacggacacctctgtattacttgtgagaatatttgccat

SEQ ID NO: 21724 - DNA, 399 bp, Macaca Mulatta
cccctcacccatccggtctcggcgccctcttcctcgggatccccactgtacgaaggggcggctgcggccacagacatcgtggacagccagtacgacgctgcagcccaaggccgcctcatagcctcatggacacctgtgtcgccaccttccatgtgaagcagcaaggcccaggtcccgaaagatgcagtgactttttgtcgtggcagccagtggtgactggattgacctactaggtacccagtggcagtctcatgggttaaggaaggaaatgcagcctcagtaacttccttttcaaagcagaggagaagcacaggccgcgctgttccccggagtcccagcaccccttgctcacacctgcagtagcggtgctgtcccaagtggcttacagatgaatccacc

SEQ ID NO: 21725 - DNA, 101 bp, Macaca Mulatta
ccccaccagcacacagtgggcttccatcgctaccagttcttcgtctatcttcaggaaggacatgtcatctctctccttcccaaggaaaacaaaactcgagg

SEQ ID NO: 21726 - DNA, 186 bp, Macaca Mulatta
gagcggctgaggaaggtggagctcaggacggccctgcggacgctggccctgatttccctgggcctttattctcactactggctgctcctgaacatgtcaggcttcaagagccccagctcggccctgggctgcacgttcctcaccagtcctgttggcccacccctaccaccacgtcaacatcttcca

SEQ ID NO: 21727 - DNA, 955 bp, Macaca Mulatta
  misc_feature (1)...(955): n = A,T,C or G
gggatcgcgcgaaagagaagatatacgagcgcgcggcttagcggctgccgtcatcttcggaaacccgggggtttgcccagtcgcagttttttgatggcccgacctcgggaggtcctgggtgtagcaagggcccttcgggtccgagagtagggacccccgtcccaagaagaccggccagcacaggccccaactccatcagcttctgctctggcagatcagacctgctctccattccactgtgagaggcctggtcacgcttgggtgctccacttggcaggtgtaaacctctccactctgaggaactgtttccagcatcaccagggtctggaaggtccagtctccattctggatcaggcctgtggacaccaccccagccttctcttcctggccgttccggaaccacctgacttcaatgctgcctggatagaaaccactcacagagcagaccaggaggttgtggtgctgcagggcctgggtctttgaaggatacacagtcaccttaggttggactcgccgctgcactgtgaagctctcaccaacccggtagttgtgtctacagtagttgtccacctgggcccgcttctgctccaggatagcccttctgaccgttccagactcggcttcaggtnnnnnnnnnnnnnacaccgcccggtactcccccatgtcgctgtcgaagcgcacgaactcctcctggttatggaagtatctctccaggaaccgcacccgctccgtcccgttgaagaaatgacactcagaggtaaggtactccaagaaacgtggtcgggtgtccccagccaaagccagtggggagctcagcaccatcagtgtcactgtcagagctgccatgcaggagcctccagggagcttcagacacaccatgctggagaacagacaggaccagggtccagaggagcagacaagcctcgctcagggataaccaccccgaggggggggg

SEQ ID NO: 21728 - DNA, 702 bp, Macaca Mulatta
tagtatttaatgtgtaattgaatggaattgaaaggataaactccatgtgatcttatttgatgagaagacactgtatattatttgatcaccttggaaatgttgattgagctaataaacacaagccattgtgttctctttccccacttcacagcaaaatgaaaaggagagcttgttgaaggaaagagatcacattttgtcaactctgggcgagactaagcagaacctaactggactttgccagaaagtttgtaaagaagcagctctgagtcaagaacaaatacagatactcgccaagtactcagcttcagattgcccactttcatttttaatttctgaaaaagataaaagtactcctgatggtgaactggccttaccatcaattttcagtttatctgacgggcctccagcagtgctgcctccttgtgccagaggaaacagtgagtccggctacacgcgggggcaggagtcccagcagacatccacagccacctctgagcaagccgggcctgcggaacagtgtcgtcagagtggtggaatctcagacttctgtcagcagatgactgataaatgtactactgatgagtaaacttgcattcacttccttcaaaccatctaattttctactgaagttttggcagtgtcttgaaagcctaatatgaccatctgttgcttaacaatattgtttttccctttagtagtttg

SEQ ID NO: 21729 - DNA, 809 bp, Macaca Mulatta
tgataagaagggcctgttgaggaattgcaattttaaggaggtagaaatcacaggactgagatggattgggcatgggggcgacccaggttctgcttctcggcctgtgagtggcactggcaggatttgaaccactgtgtctcttgccccgcaggtgatcgtgtgggggaactacgggcggatggagcggaagcagttcatgggtgtggctcgcgtgctactggaggagctggacttgaccaccctggccgtgggctggtacaagctcttccccacctcctccatggtggacccagccacaggccccctgctccggcaggcatcccagttgtccctcgagagcaccgtggggccctgcggagagcgctcttagtgctgggatggggaggggctccccaagatggcctggagaccacccagccctgacctgggaccccaggcccaggggcacattgaacaggaggatggggctctcccccatagtggggaagcagaatggggagacctgccccccttgggcccctcctcaccccttctttgcctcctaccccctgagaccttccctctcccaacgggattggctacacttttgacttggccggttcttgacctggtggatgtggctacagtccggagaaaggaaagattgaggtggcagagcagaccactctcccttcccaaactctgtccaacttctccccctttttgcctcctcggaagcttgctgcccagagccaagtccagaacccagccggccatttccatggtgccaattaccagcaagtgtctttcctgcggcaccgggttcaggc

SEQ ID NO: 21730 - DNA, 689 bp, Macaca Mulatta
  misc_feature (1)...(689): n = A,T,C or G
gaagcaaaagagaagagctaccatgnnnnnnnnnnnnnnnnnnnnnnnnnnnnnnnnnnnnnnnnnnnnnnnnnnnnnnnnnnnnnnnnnnnnnnnnnnnnnnnnnnnnnnnnnnnnnnnnnnnnnnnnnnnnnnnnnnnnnnnnnnnnnnnnnnnnnnnnnnnnnnnnnnnnnnnnnnnnnnnnnnnnnnnnnnnnnnnnnnnnnnnnnnnnnnnnnnnnnnnnnnnnnnnnnnnnnnnnnncgtggagttcttcaacctgaccctcctgccagccaccctcctccagggcgcctctaagctccaagaattgcacctctccagcaacaggctggaaagcctctcacccgagttcctgcggccagtgccgcagctgagggtgctggatctaactcgaaactccctgaccgggctgcccccaggcctcttccagaaatcagccaccctggacaccctggtgttgaaagaaaaccagctggaggtcctggaggcctcgtggctgcatggtctgaaagccctgaggcatctggacctgtctgggaactgcctccggaaactgccccctgggctgctggccaacttcaccctcctgcgcacccttgaccttgcggagaaccagttggagaccttgccccctgaccttctgcagggtccgctgcagttagaacggctacatctagaaggcaaca

SEQ ID NO: 21731 - DNA, 114 bp, Macaca Mulatta
atgcagtttgtatcctgggccacactgctaacgctcctggtgcgggacctggctgagatggggatcccagacgccgcggcggccgtgcgcaaggacaggctgcacccgaggcaa

SEQ ID NO: 21732 - DNA, 133 bp, Macaca Mulatta
atggaaaaaataaacaacgtaactgaattcattttctggggtctttctcagagcccagagattgagaaagtttgtttcgtggtattttctgtcttctacataatcattcttctgggaaatctcctcatcatgc

SEQ ID NO: 21733 - DNA, 1555 bp, Macaca Mulatta
  misc_feature (1)...(1555): n = A,T,C or G
aggtttgtgaatcttatctcggagaggaagacaaagtttgccaaggtccccctcaagtgtctggctcaagaggtnnnnnnnnnnnnnnnnnnnnnnnnnnnnnnnnnnnnnnnnnnnnnnnnnnnnnnnnnnnnnnnnnnnnnnnnnnnnnnnnnnnnnnnnnnnnnnnnnnnnnnnnnnnnnnnnnnnnnnnnnnnnnnnnnnnnnnnnnnnnnnnnnnnnnnnnnnnnnnnnnnnnnnnnnnnnnnnnnnnnnnnnnnnnnnnnnnnnnnnnnnnnnnnnnnnnnnnnnnnnnnnnnnnnnnnnnnnnnnnnnnnnnnnnnnnnnnnnnnnnnnnnnnnnnnnnnnnnnnnnnnnnnnnnnnnnnnnnnnnnnnnnnnnnnnnnnnnnnnnnnnnnnnnnnnnnnnnnnnnnnnnnnnnnnnnnnnnnnnnnnnnnnnnnnnnnnnnnnnnnnnnnnnnnnnnnnnnnnnnnnnnnnnnnnnnggaggctgtgctggatgcttttctggatgatggcttccttgtccccacatttgaacagttggcagctttgcagatagagtatgaagnnnnnnnnnnnnnnnnnnnnnnnnnnnnnnnnnnnnnnnnnnnnnnnnnnnnnnnnnnnnnnnnnnnnnnnnnnnnnnnnnnnnnnnnnnnnnnnnnnnnnnnnnnnnnnnnnnnnnnnnnnnnnnnnnnnnnnnnnnnnnnnnnnnnnnnnnnnnnnnnnnnnnnnnnnnnnnnnnnnnnnnnnnnnnnnnnnnnnnnnnnnnnnnnnnnnnnnnnnnnnnnnnnnnnnnnnnnnnnnnnnnnnnnnnnnnnnnnnnnnnnnnnnnnnnnnnnnnnnnnnnnnnnnnnnnnnnnnnnnnnnnnnnnnnnnnnnnnnnnnnnnnnnnnnnnnnnnnnnnnnnnnnnnnnnnnnnncatcttcaaagccatggggcagggcctgccagacgaggagcaggagaagctgctgcgcatctgttccatttatacccagagtggagaaaacagcctggtgcaggagggctctgaggcctcccccattgggaagtctccatatacactagacagcctgtattggagcatcaaaccagccagctccagcttcgggtctgaagcaaaggcccagcagcaggaggagcagggcaatgttaatgatgtcaaggaagaggagaaggaggagaacgaggtcttgccagaccaggtagaggaggaggaagaaaatgaccaagtggaggaagaggannnnnnnnnnnnnnnnnnnnnnnnnnnnnnnnnnnnnnnnnngtggggcctttctctacagggcaagagtcccccactgccgagaatgctaggctactggcccagaaaagaggagctttgcagggctctgcatgacagggtagctcanncagaagacgtgcgatgggacacatttcccctaggccgaatgccaggtcagaccgaggacccagcagagctcatgctggagaattatgacaccatgtatcttttggaccagcctgtgctagagcagcggctggaaccctcaacatgcaagactg

SEQ ID NO: 21734 - DNA, 110 bp, Macaca Mulatta
  misc_feature (1)...(110): n = A,T,C or G
cacctgtgcatagcagatcatcttcacctattcctctgactcctagcaaggaagggagtgctgtgtttgctggctttgaagggagaagaactaatgaaataaatgaggtn

SEQ ID NO: 21735 - DNA, 3470 bp, Macaca Mulatta
  misc_feature (1)...(3470): n = A,T,C or G
tgccgcaggaagcttggcttcccctcccatggggaagtgctggaatccactcttgcctgaccctcccataaaaaacaagggaaattcctttacgtgagctgccttgctcagaacaaagcttggcgtgtttcttattcctcatcaatctgacaaaatgggtatttatttgtgcctctcaagcgtgtggcttggacatgatgttccgcatcgtggaagtggccgtgtaccaagtgaaatatctgttactatagtaacagttcctttttattgataccagaataaacaggaatgcaaaggctgtctcacttgttggcacatttcagcagcctcccgttcccaggggtttaagaaccgccctctagaggcagccctccttgctagtctgggacttcccagtggagtgaggaacccagcaacacgctcctgacttcccttcccaaggactcgacctgagaagnnnnnnnnnnnnnnnnnnnnnnnnnnnnnnnnnnnnnnnnnnnnnnnnnnnnnnnnnnnnnnnnnnnnnnnnnnnnnnnnnnnnnnnnnnnnnnnnnnnnnnnnnnnnnnnnnnnnnnnnnnnnnnnnnnnnnnnnnnnnnnnnnnnnnnnnnnnnnnnnnnnnnnnnnnnnnnnnnnnnnnnnnnnnnnnnnnnnnnnnnnnnnnnnnnnnnnnnnnnnnnnnnnnnnnnnnnnnnnnnnnnnnnnnnnnnnnnnnnnnnnnnnnnnnnaggggccttggtgtggacagcaagccagagctgcagcgcgtcctggagcaccgccggcggaaccagctcatcaagaagaagaaggaagagctggaagccaagcggctgcagtgcccctttgagcaggagctgttgagacggcagcagaggctgaaccannnnnnnnnnnnnnnnnnnnnnnnnnnnnnnnnnnnnnnnnnnnnnnnnnnnnnnnnnnnnnnnnnnnnnnnnnnnnnnnnnnnnnnnnnnnnnnnnnnnnnnnnnnnnnnnnnnnnnnnnnnnnnnnnnnnnnnnnnnnnnnnnnnnnnnnnnnnnnnnnnnnnnnnnnnnnnnnnnnnnnnnnnnnnnnnnnnnnnnnnnnnnnnnnnnnnnnnnnnnnnnnnnnnnnnnnnnnnnnnnnnnnnnnnnnnnnnnnnnnnnnnnnnnnnnnnnnnnnnnnnnnnnnnnnnnnnnnnnnnnnnnnnnnnnnnnnnnnnnnnnnnnnnnnnnnnnnnnnngcatccctccctgtagggggttcagagcccagcacagggggtttctctggcacatttgaggaggaagaggcagccctctggcttgacaagccttctgttctgcccgggccttcccaccaggaatctccaaggctccccagggccccgcttctccgcgcacccagctcctaggtctcagagaactcccccacctgcgattttacctgcagccagcagagcttagcttcaaggtcacccgcctccaaagcactgaggggaggacgggcagggcagaccgcaggtggccttgttgctgccatcctgaccaggtgggaggacactaacaaagacagctgttttgggtgttctcccctcacccatgctttcatcatcccctccgcacagcnnccccatccaggccttctaaccacacctagccagggctgccacattcctgcgcccagaagtctgcagcagtgcctcacaaacttgattgtgcatgcaaatcactggggatcttgttaaaatacagcttctaactcagtagatctggggtgggggctgagatcctgcatttctaacaagctcccaggtgaggcagaggctgctggtgtgaggaccatgctgtgagcagcagggcgtgagtgcccagggctggtatgtattagaaatnnnnnnnnnnnnnnnnnnnnnnnnnnnnnnnnnnnnnnnnnnnnnnnnnnnnnnnnnnnnnnnnnnnnnnnnnnnnnnnnnnnnnnnnnnnnnnnnnnnnnnnnnnnnnnnnnnnnnnnnnnnnnnnnnnnnnnnnnnnnnnnnnnnnnnnnnntgtgttggttatgtgagtgttgttttaatcagagatgtatgtgattgccaatctgcatttcgtgccagtgtgaccacactgttatgatgcaaatctagccaaaaagaaannnnnnnnnnnnnnnnnnnnnnnnnnnnnnnnnnnnnnnnnnnnnnnnnnnnnnnnnnnnnnnnnnnnnnnnnnnnnnnnnnnnnnnnnnnnnnnnnnnnnnnnnnnnnnnnnnnnnnnnnnnnnnnnnnnnnnnnnnnnnnnnntcccccgcctctgtcacctgagacccaacccctaactggtccaactccaatgaattcacccatttttcttcttcagaaggcgtttcctatgtgagacccacttattttaaccttttgctcctatcccatttttaaagaattagagaataaaccaggcctgttcttttcccctgaaatccctgcctctggctcctaaacccatcatctaaggtgacagagcagtgctggaatagcatctcctttcacttcccccaaaactgcctcaaagagctgccactggcatgctctctgattcctggaagcaaacgtgggactgccggaggaaagggattgtcctggtcttactcgtaactgggtggtttgagggtgactgaagtcgtgcttttcctgtgtgtggccagcacagggctgtaaatgcagatattccgcctgtgtgcatataaagtcaagctcaaagaggctcctgaatgtgactggcgtgctgagaatgtggttatgctgtttaatgtatgtcaggtgagggttacgctgaagatgcacaatccctaaaataaagatcaccacatccccaaagaagcagccctcgggtccatgtgttgttcagacatgtgaagagaagcaagacagagggtctcagatagatgaggggtccccaagggaatgcctggggctttacccagtggtccccagaggtgctccatggaggcaacaagtctttccgtgaagccccagaagtagaagggacctcaagcaccacgccctccagggcagccgtgcagaagaccttggttcactcttcaggggtcgtcccaactccatatctccagccactccaactgtggaggctgtaaacccagattctcactgttccagtctcctttgcagcataggatggctatgtgattcggtgtggccaatgaaattgaagaggaagtctacaggggcttctgggaaagcttatgcatgtctgataaaagacacaggcatggctaacatctccctggccttcttctttctgctttgattgagggtgtgatgcctggagccacagcagccaccttgctaccatgagaaaaaggccaagagaatcacagagtcattgaccctatcattatttcaccaagccaatgccagccgccatccttctccataattattgtaaataaaataaatccctctttatttaa

SEQ ID NO: 21736 - DNA, 794 bp, Macaca Mulatta
  misc_feature (1)...(794): n = A,T,C or G
caggctgaggagaggccgccgtggactgtgtgcttcttcatggcttatctactcttctntcacagaccctacagctgggggcctgggctcctctgaccatcctcattgagaaaggaaagtgagtcaagagaagtcgatgattcctacctgttggagtggcccagcagtgtaagcgtggttgttactgccccatccaccatgtccttcagtgccaccattctcttctcccctcccagtggcagtgaggccagatgctgctgctgtgcctgtaagagtgagactaatggaggcaacacaggctcccagggtgggaatcctcctcctagcacccccatcacagtgactggacatggcctggctgttcagagctcagagcagctcctgcatattatctaccaacgggtggataaggcagtgggtttggccgaagctgctctgggtcttgccagagccaacaatgagttgttaaaacgtctccaggaggaaatgggtgagctgagacaagggaaagtgtccacccctgatgaagacggggaaagccgggcacatagttccccacctgaggagcctgggcctctcaaggaaagtcccggggaagcctttaaggctctgtctgctgtggaagaggagtgtgacagcgtgggtagcggcgtgcaggtggtgattgaggagctgcggcagctgggagcagcctcagtggggcctgggcctttgggcttcccagcaactcagagggacatgcggctcccggggtgcacactggctgccagcgagggggcccccctgctcaatcc

SEQ ID NO: 21737 - DNA, 523 bp, Macaca Mulatta
aacatacatttcagctgatatagatgatgcaacatttttttaaggcattaaaattttcccaaatctgttaagttgaaaatatttaccagcagctctttagataccagagggattgtaataatgaatatttagtatttagtagcattaagctttattagaaaaaatatatttcatgttgcatagaagaaaataaacatgagaacactaataataaagcaattatataagtagcctgttttctcttttatttaacttattttagcaacccttcattgatgaagatcctgataaggaaaagaaaataaaggaacttgagttgctgcttatgtcagctgagaatgaagttagaagaaagcgaattccatcagtaagaaataagcttaagtgttatttgtattgttaaaatctttcatatatgctttttgtcatttttatcagctagaaagcatactcagtatgacggcagattttaatatggagtaaaaatggttttgttatttattgcatttgcaactttcaggtt

SEQ ID NO: 21738 - DNA, 121 bp, Macaca Mulatta
ggtgttcaagctggaatggagataattgagcgcatgctaaaagaaaagaacctcccagatttaaggggttctgagtctcttgaatttctaaaggttgattacgtaaactacaatttttcaa

SEQ ID NO: 21739 - DNA, 842 bp, Macaca Mulatta
  misc_feature (1)...(842): n = A,T,C or G
gcccctaagatttctgctggtaccagttgtgtaaaatgggaggaacaaacttcagaacaaatattcagactttaccgtgccattggaaatatnnnnnnnnnnnnnnnnnnnnnnnnnnnnnnnnnnnnnnnnnnnnnnnnnnnnnnnnnnnnnnnnnnnnnnnnnnnnnnnnnnnnnnnnnnnnnnnnnnnnnnnnnnnnnnnnnnnnnnnnnnnnnnnnnnnnnnnnnnnnnnnnnnnnnnnnnnnnnnnnggatagttggattggtgttcgatcagtgatgctcaagaaaacattaacggctactgacttctacaatggatatttgcacccctggtaccaaaaaaattcccaagctcaaccaagccaatgcagatttcagactctcagacttccaacaaagaagaagcagaacaaaactgttactatgtaacaatgcattgagtagttaggaagaagatggataaaaacctattacgtatttgtaatttattaaaaaccttatttacaaggaattatctggactttnnnnnnnnnnnnnnnnnnnagacagagtctcactctgttgcccaggctggaatgcagtagcacaatctcagctcactacaacctccgcctcccaggttcaagcaattctgctgcctcagcctcctgagtagctgggattacaggcacacaccaccacatccagctaattttttgtatttttagtagagaaggggtttcgccatgtttgccaggctggtcttgaactcctaaccttaagtgatccacctgcctcatcctcccaaagtgctacgattataagcatgagccaccgcgcccggcctggaattaactgg

SEQ ID NO: 21740 - DNA, 600 bp, Macaca Mulatta
  misc_feature (1)...(600): n = A,T,C or G
taggtcagtaggaggcgtcattcagaaatggctttcagcttgccccccgaccacatctctgtttcaggaccacttctacgagaggggatgctgccgtggctgcatcagtntcagccctttccctgccccgagacgtcccagagagcggctgggtgctcacagttcctgttaggccatcagaggaagatcaaagatcaaccctcccccatgggcctctgcctgccaggtgggctccctgcctgtctcccggcccccaagagctccacggactctgccaatagctgctttaaaggagggagggagttttctgatcctctggatatccctggggctggggctgtgggctgagccatgggagagccagcccagttccctgggggttgggggctgtgtccctccatccctgagtaaaaatacagcaactcctaactcagagtcaagggtcaatagtcagaaaaccttggtgcagcctgggacaggcgtagaggtctcagcagagctgcccaagagcaagacctgggatctagcagggaactatgcagtcacccctgagaggccgggctctcttcctgagctctgggcctagggtgggggtggttg

SEQ ID NO: 21741 - DNA, 684 bp, Macaca Mulatta
atcactgcttcctacgttgctggcattttacatgctactatccatacagtggctacatttagcctgtccttttgtagatccaatgaaattaggcatgtcttttgtgatattcctcctctccttgctatttcttgttctgacactcacacaaaccagcttctactcttctactttgtgggttctattgagatagtcactatcctgattgtcctgatctcctatggtttcattctgttggccattctgaagatgcattctgctgagggaaggcaaaaggcgttctctacatgtggctctcacctaactggagtgacaatttatcatggaacaattctcttcagttatatgagaccaagttccaggtatgcttcagaccatgacatcatagtgtcaatattttacacaattgtgattcccatgctgaatcccatcatctatagtttgaggaacaaagatgtaaaaaaggcaatgaaaaaaatgttgaaattggtttacacatgaagaatatttttaaaattgagtaaacctgaaaaaaatgttgagtgtcagagttcacatctctatattttaggtaaagtatttgcatatcaaagaatagtttcaaaaaagcattaagcagactgccaatgcagcattttcaaatttaaacaaattgcatgacatacatgccaattaatttgttcg

SEQ ID NO: 21742 - DNA, 814 bp, Macaca Mulatta
  misc_feature (1)...(814): n = A,T,C or G
ggggagaagcgtaggtgttctcaatggtaaggtcaccagcagcctcagaaacctccctcatttcttccaaacatctaattcaagcctcactacattaacgcatatgtcttccctaacaatttcatcttcctttgagtttcagcatatttaatttctattctaattaacactcccaaacttatgtactgttagtccattttgcattgctataaaggaatatctgagactgggtaatttataaagaaaagaggtttattttggctcactgttctgcagactgtacaataagcatggtgccagcatctgcctctggtgaggcctcaggaagctttcacttatgtcagaaggggaaggggaggcagtcgcatggtgagaaagggagcaagagagaggggaggagattccagctcnnnnnnnnnnnnnnnnnnctgagatagagcattgctgtgttgcccagggnnnnnnnnnnnnnnccnnnnnnnnnnnnnnnnnnnnnnnnnnnnnnnngttcaagcaattctcatgccctcagcctnnnnnnnnnnnnnnnnnnnnnnnnntgccaccacannnnnnnnnnnnnnnnnnnnnnnnnnnnnnncgtggggttttctccatgttggntcaaggctgttcttgaaactcccaaacctcaaggtgattcaacttgcgttcagccctttccaaagtggctgggaattacagaacatgaagcccactggcgcccggggcctggcccaaggctctttttttaaacaaccagcctcttcttaatggaaccgaaaccgaaagcaaagaaactccacttctcttt

SEQ ID NO: 21743 - DNA, 116 bp, Macaca Mulatta
gatggcggtagctgaggcgttaccgagaggccgagttgaaggcccttacgaagtgaaacattccgggaatcgccccctgcccgcttctcgtagtcctgggagcacagcagaagtgt

SEQ ID NO: 21744 - DNA, 892 bp, Macaca Mulatta
tactgccatggtggttgtgggctgcacatcccaccaaacctgccccttccagtccctggggctccccctaccccagcccagcccccttccttgctgccaggggcccagccctgctgtgctgctctcccagggaccatgaggcccctacatgtccgcaccacctcggatggaggatactctttcaagtatgaaacagtgcccaaccttctcacgcaacactgtgcttgtatctaaggggtctaaggggggtgggtcttccttcctaatcccatggctggtggctaagcccccaccatcatcagctgggaggaaaggcagagttgggaaatagatggcttccactcctccctcctttcacttctctgcctatgggttaccctccccatcccacttctgtctcaataaagaacacagtgcatacaacttggcatacgttctccagcttctccgacatggagttgggcccccaggagcatgggactgtgagatcccaggtcactcagccacacttgaccctggagacatgaagttcaagagctataactggatgtgtatcggtcgggaatctacgatgcttggggatggcacaatagtgctccaagctccttggagagccaccctggagacagagctggactcgtgcaagctgaaccagacatgtcaatcagggtgccttccctgcacacctaagggagactgctgcactcacgtgcccacatccaaggcagccataagtcccataagtcccctcccctgccattctttgccccagctgatgggcacttagcccaaggtcaggtgatttgtagcctggtcagagattgtgacctctggagccacactgagacaattgtctagagttggccagatcttggagtcacttgggaagctc

SEQ ID NO: 21745 - DNA, 163 bp, Macaca Mulatta
gactttccagtttaacccacattgcctcaccctggtccatcccactagtcaccactctttgttcccctcacttaccccttgctcttcaaagcccacacagtaggcacacaagtggacaaaaagaggctgctcatgtatgcaatcaacaaacatctctggattg

SEQ ID NO: 21746 - DNA, 463 bp, Macaca Mulatta
  misc_feature (1)...(463): n = A,T,C or G
gtctatatgagaaaccttctctctcagcccagccgggccccacggttcaggcaggagagaacgtgaccttgtcctgcagctcccagagctcgtttgacatttaccgtctatccagggatggggaggcccatggacttaggctccctgcagtgccgagggtcagtggaacattcaaggctgactttcctctgggccctgcaacccacggagggaactacagatgctttggctctttccgtgccctgccctatgtgtggtcacacccgagtgacccactgcccatttctgtcacaggtgaggaaannnnnnnnnnnnnnnnnnnnnnnnnnnnnnnnnnnnnnnnnnnnnnnnnnnnnnnnnnnnnnnnnnnnnnnnnnnnnnnnnnnnnnnnnnnnnnnnnnnnnnnnnnnnnnnnngatgctgctgtaatggaccaagagcctgcgggggacagaacagtgaa

SEQ ID NO: 21747 - DNA, 1680 bp, Macaca Mulatta
  misc_feature (1)...(1680): n = A,T,C or G
cttggttgcttcttaggcagtggtgaggcgtgttagaggcgtgcgtctccatgtgggtgtagtgtccggccacgggatttaggattagctctatagaaccaacgtgaagggacaacgtgcggcggagtgtcgaagcccacgaatttccatgagctcnnnnnnnnnnnnnnnnnnnnnnnnnnnnnnnnnnnnnnnnnnnnnnnnnnnnnnnnnnnnnnnnnnnnnnnnnnnnnnnnnnnnnnnnnnnnnnnnnnnnnnnnnnnnnnnnnnnnnnnnnnnnnnnnnnnnnnnnnnnnnnnnnnnnnnnnnnnnnnnnnnnnnnnnnnnnnnnnnnnnnnnnnnnnnnnnnnnnnnnnnnnnnnnnnnnnnnnnnnnnnnnnnnnnnnnnnnnnnnnnnnnnnnnnnnnnnnnnnnnnnnnnnnnnnnnnnnnnnnnnnnnnnnnnnnnnnnnnnnnnnnnnnnnnnnnnnnnnnnnnnnnnnnnnnnnnnnnnnnnnnnnnnnnnnnnnnnnnnnnnnnnnnnnnnnnnnnnnnnnnnnnnnnnnnnnnnnnnnnnnnnnnnnnnnnnnnnnnnnnnnnnnnnnnnnnnnnnnnnnnnnnnnnnnnnnnnnnnnnnnnnnnnnnnnnnnnnnnnnnnnnnnnnnnnnnnnnnnnnnnnnnnnnnggagacaagaatggaagggatatggaatatattcaagatgaagaattaaggttattttcacacaaagagctctcctcctgcaaaatctgggaagaggtggtgggtgaattacctgggagtcaagactgtagagtaaatctgcaaggaaaagacttccagttctcaggagatgctgcttcccatcaagcgtgggaaggagcatctacacagtgttttccaattgagaatttcctggacagtctacaagggtatgggcttaccgctttagaaaatcaacagtttccagcctggaaagctataagaccaatccccattcaaggatcttgggcaaaagcatttgtgaaccagtcaggggatgttcaagaaagatgtgaaaatctcaacaaaaaagacactgtatgtaaatgtaattgggatgattacagcttttgctggatgtcttgtcatgttgatcacagattccctgaaatagacaagccatgtgattgcaataaatgtagaaaagactgcattaaaaactctgtacttcatcacaataaccctggagagaatggcttgaaaagtaacgaatatggaaatggcttcagggacgattcagaccttcccccaaatccaagggtacctttgaaaaagaannnnnnnnnnnnnnnnnnnnnnnnnnnnnnnnnnnnnnnnnnnnnnnnnnnnnnnnnnnnnnnnnnnnnnnnnnnnnnnnnnnnnnnnnnnnnnnnnnnnnnnnnnnnnnnnnnnnnnnnnnnnnnnnnnnnnnnnnnnnnnnnnnnnnnnnnnnnnnnnnnnnnnnnnnnnnnnnnnnnnnnnnnnnnnnnnnnnnnnnnnnnnnnnnnnnnnnnnnnnnnnnnnnnnnnnnnnnnnnnnnnnnnnnnnnaaccctataaatgtgaggagtgtgggaagggctttggccgcagctcctgtcttcatgttcatcagagagtccacactggagagaagccctatacatgtgatgtgtgtgggaaaggcttcaggtacaactca

SEQ ID NO: 21748 - DNA, 264 bp, Macaca Mulatta
aggcatcaagctcaccgcatgaaggtcgtctcagtgacccccagctcagtggtcctggccatatgcggccatccttcgagccaccacccaccaccattgctgccgtgcccccctacatcgggcctgacacacctgcccttcggactttgagcgagtacgcccggccccatgtcatgtcgcccaccaaccgcaaccaccccttctacatgccccttaaccccacggaccccctgctggcctaccacatgcctggcctctacaacg

SEQ ID NO: 21749 - DNA, 2209 bp, Macaca Mulatta
  misc_feature (1)...(2209): n = A,T,C or G
cttccattattcaacagttatgaacaaggactatcaaatattttggccatcaccttcagatcctgtacgttttgaagtggatacttctcatgaaaaagtagaaagnnnnnnnnnnnnnnnnnnnnnnnnnnnnnnnnnnnnnnnnnnnnnnnnnnnnnnnnnnnnnnnnnnnnnnnnnnnnnnnnnnnnnnnnnnnnnnnnnnnnnnnnnnnnnnnnnnnnnnnnnnnnnnnnnnnnnnnnnnnnnnnnnnnnnnnnnnnnnnnnnnnnnnnnnnnnnnnnnnnnnnnnnnnnnnnnnnnnnnnnnnnnnnnnnnnnnnnnnnnnnnnnnnnnnnnnnnnnnnnnnnnnnnnnnnnnnnnnnnnnnnnnnnnnnnnnnnnnnnnnnnnnnnnnnnnnnnnnnnnnnnnnnnnnnnnnnnnnnnnnnnnnnnnnnnnnnnnnnnnnnnnnnnnnnnnnnnnnnnnnnnnnnnnnnnnnnnnnnnnnnnnnnnnnnnnnnnnnnnnnnnnnnnnnnnnnnnnnnnnnnnnnnnnnnnnnnnnnnnnnnnnnnnnnnnnnnnnnnnnnnnnnnnnnnnnnnnnnnnnnnnnnnnnnnnnnnnnnnnnnnnnnnnnnnnnnnnnnnnnnnnnnnnnnnnnnnnnnnnnnnnnnnnnnnnnnnnnnnnnnnnnnnnnnnnnnnnnnnnnnnnnnnnnnnnnnnnnnnnnnnnnnnnnnnnnnnnnnnnnnnnnnnnnnnnnnnnnnnnnnnnnnnnnnnnnnnnnnnnnnnnnnnnnnnnnnnnnnnnnnnnnnnnnnnnnnnnnnnnnnnnnnnnnnnnnnnnnnnnnnnnnnnnnnnnnnnnnnnnnnnnnnnnnnnnnnnnnnnnnnnnnnnnnnnnnnnnnnnnnnnnnnnnnnnnnnnnnnnnnnnnnnnnnnnnnnnnnnnnnnnnnnnnnnnnnnnnnnnnnnnnnnnnnnnnnnnnnnnnnnnnnnnnnnnnnnnnnnnnnnnnnnnnnnnnnnnnnnnnnnnnnnnnnnnnnnnnnnnnnnnnnnnnnnnnnnnnnnnnnnnnnnnnnnnnnnnnnnnnnnnnnnnnnnnnnnnnnnnnnnnnnnnnnnnnnnnnnnnnnnnnnnnnnnnnnnnnnnnnnnnnnnnnnnnnnnnnnnnnnnnnnnnnnnnnnnnnnnnnnnnnnnnnnnnnnnnnnnnnnnnnnnnnnnnnnnnnnnnnnnnnnnnnnnnnnnnnnnnnnnnnnnnnnnnnnnnnnnnnnnnnnnnnnnnnnnnnnnnnnnnnnnnnnnnnnnnnnnnnnnnnnnnnnnnnnnnnnnnnnnnnnnnnnnnnnnnnnnnnnnnnnnnnnnnnnnnnnnnnnnnnnnnnnnnnnnnnnnnnnnnnnnnnnnnnnnnnnnnnnnnnnnnnnnnnnnnnnnnnnnnnnnnnnnnnnnnnnnnnnnnnnnnnnnnnnnnnnnnnnnnnnnnnnnnnnnnnnnnnnnnnnnnnnnnnnnnnnnnnnnnnnnnnnnnnnnnnnnnnnnnnnnnnnnnnnnnnnnnnnnnnnnnnnnnnnnnnnnnnnnnnnnnnnnnnnnnnnnnnnnnnnnnnnnnnnnnnnnnnnnnnnnnnnnnnnnnnnnnnnnnnnnnnnnnnnnnnnnnnnnnnnnnnnnnnnnnnnnnnnnnnnnnnnnnnnnnnnnnnnnnnnnnnnnnnnnnnnnnnnnnnnnnnnnnnnnnnnnnnnnnnnnnnnnnnnnnnnnnnnnnnnnnnnnnnnnnnnnnnnnnnnnnnnnnnnnnnnnnnnnnnnnnnnnnnnnnnnnnnnnnnnnnnnnnnnnnnnnnnnnnnnnnnnnnnnnnnnnnnnnnnnnnnnnnnnnnnnnnnnnnnnnnnnnnnnnnnnnnnnnnnnnnnnnnnnnnnnnnnnnnnnnnnnnnnnnnnnnnnnnnnnnnnnnnnnnnnnnnnnnnnnnnnnnnnnnnnnnnnnnnnnnnnnnnnnnnnnnnnnnnnnnnnnnnnnnnnnnnnnnnnnnnnnnnnnnnnnnnnnnnnnnnnnnnnnnnnnnnnnnnnnnnnnnnnnnnnnnnnnnnnnnnnnnnnnnnnnnnnnnnnnnnnnnnnnnnnnnnnnnnnnnnnnnnnnnnaggtcacagactgtgattcagatgaagccaagagtatcagagatgtacctacctttctgggagccaaactggataagtaccacagtctaaatgaggagcttgatttcctgg

SEQ ID NO: 21750 - DNA, 665 bp, Macaca Mulatta
agcaatcatggctctgaaggagcgcattggctggagatacagcctcctcttcgtgggcctactacagttaaacattgtcatcttcggagcactgctcagacccatcatcatcagaggaccagggtcaccgaaaacagtcatccaggaaaatcggaaagaagcgcagtatatgcttgaaaatgagaaaacacgaacctcaatagactccattgactcaggagtagaactaactacctcacctaaaaatgtgcctagtcacactaacccggaactggagccgaaggctgacatgcagcaggtcctggtgaagaccagccccgggccaagtgaaaagaaagccccgctgttagacttctccattttgaaagagaaaagttttatttgttatgcattatttggtctcttcgcaacactgggattctttgcaccttccttgtacatcattcctctgggcattagtctgggcattgaccaggaccgcgctgcttttttattatctacgatggccattacagaagttttcgggaggatcggagctggttttgtcctcaacagagagcccatccgtaagatttacattgagctcatctgcgtcatcttattgactgtgtctctgtttgcctttacttttgctactgaattctggggtctaatgtcatgtagca

SEQ ID NO: 21751 - DNA, 492 bp, Macaca Mulatta
cttcctgggcgaggaggatttctccttgtcagccaccattggctctatcctcagggagctggacacctccatggatgagactgagccccctcagaatccagtggctcccctcggcctccagaatgaagtgccaccccagcctgatccagtcttcttagaggcgctgagctcccggtacttgggggactctggcctggatgacttctttctggacattgacacatctgcggtagaaaaggagcctgcgcgggccccaccagagcctcctcacaacctcttctgtgccccaggttcttgggagtggaatgaactggatcacatcatggaaataattctggggtcctaaaactgtgatggaggggatcctctcttgtgtcatcttctgtggcctggatccctgaatgcaactctgggtgtgtgtttttgtgggggctctaagcagcgactatggcctcctttgttcccatttcagggttccacaaaccgtcttgc

SEQ ID NO: 21752 - DNA, 667 bp, Macaca Mulatta
  misc_feature (1)...(667): n = A,T,C or G
ccagcgcctccctctttgaaagccagggatcgttatcattcatctaacctgctgggaagaagaaccagttgtccaggatccaaacctttctgcggccccaagtgtttgtggtnnnnnnnnnnnnnnnnnnnnnnnnnnnnnnnnnnnnnnnnnnnnnnnnnnnnnnnnnnnnnnnnnnnnnnnnnnnnnnnnnnnnnnnnnnnnnnnnnnnnnnnnnnnnnnnnnnnnnnnnnnnnnnnnnnnnnnnnnnnnnnnnnnnnnnnnnnnnnnnnnnnnnnnnnnnnnnnnnnnnnnnnnnnnnnnnnnnnnnnnnnnnnnnnnnnnnnnnnnnnnnnnnnnnnnnnnnnnnnnnnnnnnnnnnnnnnnnnnnnnnnnnnnnnnnnnnnnnnnnnnnnnnnnnnnnnnnnnnnnnnnnnnnnnnnnnnnnnnnnnnnnnnnnnnnnnnnnnnnnnnnnnnnnnnnnnnnnnnnnnnnnnnnnnnnnnnnnnnnnnnnnnnnnnnnnnnnnnnnnnnnnnnnnnnnnnnnnnnnnnnnnnnnnnnnnnnnnnnnnnnnnnnnnnnnnnnnnnnnnnnnnnnnnnnnnnnnnnnnnnnnnnnnnnnnnnnnnnnnnnnnnnnnnnnnnnnnnnnnnnnncatggctggttgatcatgtcttcgctgatgctg

SEQ ID NO: 21753 - DNA, 426 bp, Macaca Mulatta
  misc_feature (1)...(426): n = A,T,C or G
atgatggatccatgttcagttggagtccagcttcgtactacaaatgagtgccataaaacctactatactcgtcacacaggttntaagactttgcaagaattgtcatcaaatgatatgcttttacttcaacttagaactggaatgacactttctgggaacaatacaatttgctttcatcatgtaaaaatttacattgacagatttgaggatttacagaagtcgtgttgtgacccatttaacatacacaaaaaattagccaaaaaaaatttgcatgtaattgacttagatgatgccacttttctgagtgcaaaattcggaagacagcttgtacctggttggaagctttgtccaaaatgcacacagataatcaatggaagtgtggatgttgatactgaagaccgccagaaaaggaaacctgagtcagat

SEQ ID NO: 21754 - DNA, 555 bp, Macaca Mulatta
gcagtcctcacggatcacagccacactctagatcacacagtacaaatatgaacatcttagctcccacagtgatgatgatttctaaacacatagatggttctttaaatcagtgggcagtcacttttgctgataagtctgcctttaccactgttctaactgtatctcacaaatttagatattgcggtcatcgatttcacctcaatgacctggcatgtcattcagttttaccattgttattgacatcctctcatcataatgctctgttgactcctgaatcagattatcagtgggactcagacaataaattaagtagattaatggaccctgtaaaacatatgaaaggttcctcaaaacaacctcttagaaatgcagcaactcgtacatttcatgacccaaatgcgatctacagtgaacttattctgtggcgtgtagacccaataggacctttgtcatacactggaggagtatcagaattggctcgaattaactctttacatacctcagcgttctctaacgtggcttggcttccaactctcattcccagttactgtctag

SEQ ID NO: 21755 - DNA, 92 bp, Macaca Mulatta
aggaaggtgctgaataggctgaacttttcagtaccggatgacgtgatgcgcaagatcgcagagtgcgccccaggtgtggtggaactggtgct

SEQ ID NO: 21756 - DNA, 821 bp, Macaca Mulatta
  misc_feature (1)...(821): n = A,T,C or G
ggggctctttcccattttgcaagatggcgggtgaaaaagttgagaagccagatactaaagagaagaaacccgaagccaagaaggctgatgctggtggcaaggtgaaaaagggtaacctcaaggctaagaagcccaagaaggggaagccccattgcagccgcaaccctgtccttgtcagaggaattggcaggtattcccgatctgccatgtattccagaaaggccatgtacaagaggaagtactcagccgctaaatccaaggttgaaaagagaaagaaggagaaggttcttgcaactcttacaaaacaagttggtggtgacaagaacggcggtacccgggtggttaaacttcgcaaaatgcctagatattatcctactgaagatgtgcctcgaaagctgttgagccagggcaaaaaacccttctgtcagcacgtgagaaaactgcgagccagcattacccctgggaccattttgattatcctcactggacgccacaggggcaagagggtggtttttctgaagcagctggctagtggttttttacttgtgactggacctctggtcctcaatcgagttcctctacgaagaacacaccaganatttgtcattgccacctccaccaaaatcgatatgcgcagtgtccaactccccaaacctcaaatcgaatatttccgccccaggtgcccaaatttcccccaaaaacattctttaacccgaagcgctaaaccttccnnnnnnnnnnnnnnnnnnnngcgggaaaaccctcaaaaccccccgggaaagggtggaagattccttcccacccccggaaagcaacggcga

SEQ ID NO: 21757 - DNA, 655 bp, Macaca Mulatta
agtcaagaggttaaggggtagggccatgaggcctggacctatgctgcaggcaagggcttcatccctgctgccctaggcactctcttcccaaggccaggatgggcacctggggaggtcagttcaggaatatctagcagagacctcttaagcccccatcccagcaccccatcctgttgttcccagagctggtctcccatgagtgtgctacagccagatagccatggcccctcacccatctcacccacacacacaggcatccatatatcccagaggacttccaaatgaggccagactcagggtcatggggaatgtgctctcgcccctggaagggctttggggaagggggcaacatggcagaggctggaaggagcccccaaacctgttcccatgcccttctagccctgcgtttccactctgccttctcagagtgcccttactgcacccagaccaccggccaggagagaccttctctcccactccagcccctcactgcccttcaactagagctttcacctttttacatttcccttctgaaggacacaaatctgctttcctgcccatacactggcccaagggctcacctaacttgggagggaaggggctgttgttacaacgatgatctactgttagactgccattttgcacggtctccccc

SEQ ID NO: 21758 - DNA, 630 bp, Macaca Mulatta
cggacacagaagcttaaagttggggatcggattgtcagcattaacgggcaacctttggatgggctgtctcacgcggatgtggttaatctgctgaagaacgccttcgggcgcattatcctgcaggttgtagcagataccaacataagtgccatagcagctcagcttgaaaacatgtctacaggctaccaccttggttcacccactgctgaacaccatcgagaagacacagaaacacctccacctaagattattactttggagaaaggctctgcaggattggggtttagtattgtagggggttatggaagtccccatggagacctgccaatttatgtcaagactgtatttgcaaagggagccgctgcagatgacggccgattaaaacgaggggatcagattttagctgttaatggcgagagcctggaaggtgttactcacgagcaagcggtcgccattctcaaacaccagagagggactgtaaccttaactgtgctgtcgtgagcctcgggcctggtcacaagatagatgttgttgtttagaatatccacaggcagatgaagttctgagtgggtatgaaaagcaccctcaactaaaatgcaccttcattcttatttcttgtcctctctgctc

SEQ ID NO: 21759 - DNA, 580 bp, Macaca Mulatta
ttgtgcggaaagtggggaggtcattcttagggtgggtggaaggagctctgagggacagtaaacagactcgctgttctgaaaacaaaccaggagctgggcatgtggagaggccccatggtaatctctcctctgccgctttttcatgctttgcagcactttgcccatagggaggaagggggagtgccccagctctctgtatatggcgtggctggagaccctgtcccaggacctcagacctccagtcatcctgatccgaggaaaccaggaaaacgtgctcaccttttactgccagtaactccaggcttggccatccctgtccacggctctgggtgcgtgggatgagttggaactcggctgcctccagtccacagggatgagactcatattgtgttgcactttaagtggcagcatctgatgatctcaccgaaaaagatggtagattgccaaatctggctggactccacttcatgggacacattctctgggtcttgattttatgggctagagaaacagcagatggagctgcaaggaaaactctctaaaggatcctattccttttaaacactttcttttgattttg

SEQ ID NO: 21760 - DNA, 395 bp, Macaca Mulatta
  misc_feature (1)...(395): n = A,T,C or G
tggcacgttcgctcgtccatgacaccaagttctactgcctgaatgtataccaggtaaaaataagctccacacctgagctgggggcagcatcaagggtagaaggccatgttggccaaggagctccaggcctcatgggtaatatgaaccctgagggcggcgtgaaccacgagaattacatgaaccgctatggcggcatgatccacgagggcggcggtggaaaccaggggcctaggcagctgcagcagcccctggaggagccggcccaggcggccatggaggatccgcagcccgagaacatgcagccacgaattcggcgcaagaagttcacgccgttgcaggtgcaggagctggaaagtgttttccaacgcactcaataccctgatgtgcccacaagn

SEQ ID NO: 21761 - DNA, 537 bp, Macaca Mulatta
ttattgttccttgtgtatattttcaattgctcaataaagtctgtggtactgtttattaagaatacctgcattaagccaaacaatgatatttgtttcaatattttgtgatttatttttttcaaaagcaaaactaaacaaaaacgctcaagatcactgatggctatgacttataggggtggtaacactaatacaggaaacttgtaaaggtaatcacgacctcttttatcacttttctgggtgaacccttgagaaccactctctgttattgtaacagatctcactagccttgtcttgtgtttatattacatgaagtatttccactctatcatggacttgcatgtaccatttccctttgccctccccagttcttttctccatacaaaactgatggatcatggcgatttgctgcctgcactataatgtatgcaacttcagtgcaccagttgtgtgctgtactgagcacgagactattgtctctatcccgtacacccccttttattttaatgggatactcctaatttttaaatggaaagaaaa

SEQ ID NO: 21762 - DNA, 2034 bp, Macaca Mulatta
  misc_feature (1)...(2034): n = A,T,C or G
tgttgacgcaagctgctgtaaggcttgttagggggtccctgcgcaaaacctcctgggcagagtggggtcacagggaactgcgactgggtcaacttgctcctttcacagcgcctcacaaggacaagccattatctgatcaaagaagnnnnnnnnnnnnnnnnnnnnnnnnnnnnnnnnnnnnnnnnnnnnnnnnnnnnnnnnnnnnnnnnnnnnnnnnnnnnnnnnnnnnnnnnnnnnnnnnnnnnnnnnnnnnnnnnnnnnnnnnnnnnnnnnnnnnnnnnnnnnnnnnnnnnnnnnnnnnnnnnnnnnnnnnnnnnnnnnnnnnnnnnnnnnnnnnnnnnnnnnnnnnnnnnnnnnnnnnnnnnnnnnnnnnnnnnnnnnnnnnnnnnnnnnnnnnnnnnnnnnnnnnnnnnnnnnnnnnnnnnnnnnnnnnnnnnnnnnnnnnnnnnnnnnnnnnnnnnnnnnnnnnnnnnnnnnnnnnnnnnnnnnnnnnnnnnnnnnnnnnnnnnnnnnnnnnnnnnnnnnnnnnnnnnnnnnnnnnnnnnnnnnnnnnnnnnnnnnnnnnnnnnnnnnnnnnnnnnnnnnnnnnnnnnnnnnnnnnnnnnnnnnnnnnnnnnnnnnnnnnnnnnnnnnnnnnnnnnnnnnnnnnnnnnnnnnnnnnnnnnnnnnnnnnnnnnnnnnnnnnnnnnnnnnnnnnnnnnnnnnnnnnnnnnnnnnnnnnnnnnnnnnnnnnnnnnnnnnnnnnnnnnnnnnnnnnnnnnnnnnnnnnnnnnnnnnnnnnnnnnnnnnnnnnnnnnnnnnnnnnnnnnnnnnnnnnnnnnnnnnnnnnnnnnnnnnnnnnnnnnnnnnnnnnnnnnnnnnnnnnnnnnnnnnnnnnnnnnnnnnnnnnnnnnnnnnnnnnnnnnnnnnnnnnnnnnnnnnnnnnnnnnnnnnnnnnnnnnnnnnnnnnnnnnnnnnnnnnnnnnnnnnnnnnnnnnnnnnnnnnnnnnnnnnnnnnnnnnnnnnnnnnnnnnnnnnnnnnnnnnnnnnnnnnnnnnnnnnnnnnnnnnnnnnnnnnnnnnnnnnnnnnnnnnnnnnnnnnnnnnnnnnnnnnnnnnnnnnnnnnnnnnnnnnnnnnnnnnnnnnnnnnnnnnnnnnnnnnnnnnnnnnnnnnnnnnnnnnnnnnnnnnnnnnnnnnnnnnnnnnnnnnnnnnnnnnnnnnnnnnnnnnnnnnnnnnnnnnnnnnnnnnnnnnnnnnnnnnnnnnnnnnnnnnnnnnnnnnnnnnnnnnnnnnnnnnnnnnnnnnnnnnnnnnnnnnnnnnnnnnnnnnnnnnnnnnnnnnnnnnnnnnnnnnnnnnnnnnnnnnnnnnnnnnnnnnnnnnnnnnnnnnnnnnnnnnnnnnnnnnnnnnnnnnnnnnnnnnnnnnnnnnnnnnnnnnnnnnnnnnnnnnnnnnnnnnnnnnnnnnnnnnnnnnnnnnnnnnnnnnnnnnnnnnnnnnnnnnnnnnnnnnnnnnnnnnnnnnnnnnnnnnnnnnnnnnnnnnnnnnnnnnnnnnnnnnnnnnnnnnnnnnnnnnnnnnnnnnnnnnnnnnnnnnnnnnnnnnnnnnnnnnnnnnnnnnnnnnnnnnnnnnnnnnnnnnnnnnnnnnnnnnnnnnnnnnnnnnnnnnnnnnnnnnnnnnnnnnnnnnnnnnnnnnnnnnnnnnnnnnnnnnnnnnnnnnnnnnnnnnnnnnnnnnnnnnnnnnnnnnnnnnnnnnnnnnnnnnnnnnnnnnnnnnnnnnnnnnnnnnnnnnnnnnnnnggaagtacttctgtttccggccatgaaacccgaagacaagaaagagaatgtagcaaccactgatacgctggaaagcacaacggttggcacttctgtctagaaaataataattgcaagttgtataactcaggcgtctttgcatttctgcgaaagatcaagtctgcaagggaattcttgtgtgctgctttccatttgacaccgcagttcggttcagccattagaagagagacaaggaattaaaattttctttttaatcct

SEQ ID NO: 21763 - DNA, 1454 bp, Macaca Mulatta
  misc_feature (1)...(1454): n = A,T,C or G
tcctcagtaatgttgccaattctcgggtggatctttgtccccatctacatcaagtcgggggtgnnnnnnnnnnnnnnnnnnnnnnnnnnnnnnnnnnnnnnnnnnnnnnnnnnnnnnnnnnnnnnnnnnnnnnnnnnnnnnnnnnnnnnnnnnnnnnnnnnnnnnnnnnnnnnnnnnnnnnnnnnnnnnnnnnnnnnnnnnnnnnnnnnnnnnnnnnnnnnnnnnnnnnnnnnnnnnnnnnnnnnnnnnnnnnnnnnnnnnnnnnnnnnnnnnnnnnnnnnnnnnnnnnnnnnnnnnnnnnnnnnnnnnnnnnnnnnnnnnnnnnnnnnnnnnnnnnnnnnnnnnnnnnnnnnnnnnnnnnnnnnnnnnnnnnnnnnnnnnnnnnnnnnnnnnnnnnnnnnnnnnnnnnnnnnnnnnnnnnnnnnnnnnnnnnnnnnnnnnnnnnnnnnnnnnnnnnnnnnnnnnnnnnnnnnnnnnnnnnnnnnnnnnnnnnnnnnnnnnnnnnnnnnnnnnnnnnnnnnnnnnnnnnnnnnnnnnnnnnnnnnnnnnnnnnnnnnnnnnnnnnnnnnnnnnnnnnnnnnnnnnnnnnnnnnnnnnnnnnnnnnnnnnnnnnnnnnnnnnnnnnnnnnnnnnnnnnnnnnnnnnnnnnnnnnnnnnnnnnnnnnnnnnnnnnnnnnnnnnnnnnnnnnnnnnnnnnnnnnnnnnnnnnnnnnnnnnnnnnnnnnnnnnnnnnnnnnnnnnnnnnnnnnnnnnnnnnnnnnnnnnnnnnnnnnnnnnnnnnnnnnnnnnnnnnnnnnnnnnnnnnnnnnnnnnnnnnnnnnnnnnnnnnnnnnnnnnnnnnnnnnnnnnnnnnnnnnnnnnnnnnnnnnnnnnnnnnnnnnnnnnnnnnnnnnnnnnnnnnnnnnnnnnnnnnnnnnnnnnnnnnnnnnnnnnnnnnnnnnnnnnnnnnnnnnnnnnnnnnnnnnnnnnnnnnnnnnnnnnnnnnnnnnnnnnnnnnnnnnnnnnnnnnnnnnnnnnnnnnnnnnnnnnnnnnnnnnnnnnnnnnnnnnnnnnnnnnnnnnnnnnnnnnnnnnnnnnnnnnnnnnnnnnnnnnnnnnnnnnnnnnnnnnnnnnnnnnnnnnnnnnnnnnnnnnnnnnnnnnnnnnnnnnnnnnnnnnnnnnnnnnnnnnnnnnnnnnnnnnnnnnnnnnnnnnnnnnnnnnnnnnnnnnnnnnnnnnnnnnnnnnnnnnnnnnnnnnnnnnnnnnnnnnnnnnnnnnnnnnnnnnnnnnnnnnnnnnnnnnnnnnnnnnnnnnnnnnnnnnnnnnnnnnnnnnnnnnnnnnnnnnnnnnnnnnnnnnnnnnnnnnnnnnnnntgtaccgcctgtgctgggttcttcggaacagtacagaggagcgaatcgatatagatgcagaagagaaaagtcaggaagaaacagatgatggtgttgaagaag

SEQ ID NO: 21764 - DNA, 625 bp, Macaca Mulatta
  misc_feature (1)...(625): n = A,T,C or G
cccggattttctaagaaaggtttcacctttttcttttcttgggggccgggcccnnnnnnnnnnnnnnnnnnnnnnnggggggcggggggcnnnnnnnnnnnnnnnnnnnnnnnnnnnggtttnnnnnnnnnnnnnnnnnnnccaaaaaatttatttggaaaaaccnnnnnnnnnnnnnnnnnnnggatttttttccaggaaactttttcaactacaaaccttgaatacgggaaagatgttccaaggacaagcattacagggatggataaaacccaaactgactaaatgtgttctcacaatataagctggcataaaaataaataaaattctctattatcacaatagcaacaataatgtacacataataatggtttatggatgaatattaactattctaattgtagttccaaaagaaaacagtttattttaaaagtctacatttaaaagtcaatgttttgtctggtttcccatagggctgttgctgattccagctttaaaatgtgaagtatccaccttgagtgcttagctcaaaattgtattggcactgggaaaaaataaatcattgcctttattttggagtaacacaaaaagactcactaacttcacatatagaaacttagttccc

SEQ ID NO: 21765 - DNA, 378 bp, Macaca Mulatta
ctcagagttagttctttgggccaggtcatagctgctactttaccatttgtccatgctctgggggtcatgacaagagaaggccctgtggttctggtggaacactaaattctgtggaccaggacccttgagtctgttcttatggagcaagggtatttgtgttcccaggtttgagagccccctgtttctagaaggttcccagaggccctgggctgctgtgattggaggctttggggagggcttcagtgggtctggtctgcttatgcagggtgctgtcctgctccttttactttgtctcctcagtcagggacatgtgcggccagaaggaggctagttctgtatctcctgtgtccaggaagaaccatcctgagctcttcatgt

SEQ ID NO: 21766 - DNA, 292 bp, Macaca Mulatta
gattcttaaaatgcaatattggtaaggcttgttccaatgccacatacttgcagctcccattctctgtgtcatcagtagtgtcctatgcaataaaattatttgcaggtctttaaatcattttaggaaaggatgatcaaaaataatacatccagcagtacaatgaaagtaaaccacaaaaaaaatacctcaggaaagaatagaaagaaagtctatctaatggcatgcctatatgagaagaatagcctagatatgaatatatggcatttgcagatttttatattagttgctttgt

SEQ ID NO: 21767 - DNA, 783 bp, Macaca Mulatta
ggggattttggattgtccctgacattctgggccccacgatgctctgcgtcaccagtacctatgaatgcctcgtcaggcctttactaagtacagtccatccagcgtctcctccccttctttgtactcgagaagatgttgaagtggcagagtctcccctccgtgttctggctgaaaccccagattcctttgaaaagcatattagaagcattttgcaacgtagagttgccaatccagcatttttgaaagcttctgaaaaggacctagcccctcctcctgaagaatgccttcagctcctcagcagagccacccaggtgttcagagagcagtacattctcaaacaggacttggccaaggaggagattcagcggagggtgaaattattatgtgaccaaaaaaagaaacaactagaagatctcaattattgtcgagaggagaggaaaagtctgcgggaaatggctgagcgtttagctgacaaatatgaggaagctaaagaaaacaagaggatatcatgaacaggatgaaaaaagtacttcacagtttttccctctgaacctcccagtttccctctggatagtgagccgagacatgaagaaaagaattaccgcctgaatacctggatcaaactttccaacatttggggccattggccttccaaacagtgtttacctatggaaaaaaggaacttattccagccaccccaaaaaaatgggaaaaaaaggttgtttgaaagttcctttccaaaaaacccccaccccattttatctctcctccaaaatgggccca

SEQ ID NO: 21768 - DNA, 696 bp, Macaca Mulatta
ccacttcatattacgggcgggatcggagccccctgcgtcgcgctacagccccagtccccactgttggagagggctacggttacgggcatgagagtgagttgtcccaagcttcagcagccgcgcggaattctctgtacgacatggcccggtatgagcgggagcagtatgccgatcgggcgcggtactcagccttttaaagcttgaggtgagaggggtggggtgttccctcttctggttttgccatccctcctgcagcctaaagggctccatttaggctgccctgcttgcttgcttttgcagggttagggtaaggttactagggtggctcacaggctagagagaagtcctacctgtttaactttaaaatatatagagttccttggccctcatggctatttttcagggcttctggtagcgagagtcaatttgattctatttgtgcctagaaaaataaagaatgatgtgctggtgaatcttgggtcacctatgtactatgctataattgaaccttacctgggaacccacacgttcaggctcaggtgttttgtttcttagagcctttgttaagtttcctaggtgtgcgacattcctaaggtcttcaagtttcctgttctgttttgtgctgtgtgaaagttctgatatgatccctgatgataaagtccataactgtagttaactggtcatcactgctcaggt

SEQ ID NO: 21769 - DNA, 300 bp, Macaca Mulatta
  misc_feature (1)...(300): n = A,T,C or G
ccaggtcctggtcatcctgatggatgtgttcacggatgtggagatcttctgtgacattctagaggcagccaacaagcgtggggtgttcgtttgtgtgctcctggaccagggaggtgtgaagctcttccaggagatgtgtgacaaaatccagatctctgacagtcacctcaagnagaacatttccatccggagtgtagaaggagaggtgtattgtgccaagtcaggcaggaaattcgctggccaaatccgggagaagttcatcatctcagactggagattcgtcctctctggatcttacag

SEQ ID NO: 21770 - DNA, 1354 bp, Macaca Mulatta
  misc_feature (1)...(1354): n = A,T,C or G
ctgataaacccagacaagatgataaagatgatctagatgtaacagagctcactaatgaagatcttttggatcagcttgtgaaatatggagtgaatcctggtcctattgnnnnnnnnnnnnnnnnnnnnnnnnnnnnnnnnnnnnnnnnnnnnnnnnnnnnnnnnnnnnnnnnnnnnnnnnnnnnnnnnnnnnnnnnnnnnnnnnnnnnnnnnnnnnnnnnnnnnnnnnnnnnnnnnnnnnnnnnnnnnnnnnnnnnnnnnnnnnnnnnnnnnnnnnnnnnnnnnnnnnnnnnnnnnnnnnnnnnnnnnnnnnnnnnnnnnnnnnnnnnnnnnnnnnnnnnnnnnnnnnnnnnnnnnnnnnnnnnnnnnnnnnnnnnnnnnnnnnnnnnnnnnnnnnnnnnnnnnnnnnnnnnnnnnnnnnnnnnnnnnnnnnnnnnnnnnnnnnnnnnnnnnnnnnnnnnnnnnnnnnnnnnnnnnnnnnnnnnnnnnnnnnnnnnnnnnnnnnnnnnnnnnnnnnnnnnnnnnnnnnnnnnnnnnnnnnnnnnnnnnnnnnnnnnnnnnnnnnnnnnnnnnnnnnnnnnnnnnnnnnnnnnnnnnnnnnnnnnnnnnnnnnnnnnnnnnnnnnnnnnnnnnnnnnnnnnnnnnnaaagaaaccaccactgcttgctataaagacatagtagaaaatatttgcggtagagaaaaaagtggaattcaaccgttatgtcctgagaggtcccatatttcagatcagtcgcctctctccagtaaaaggaaagcactagaagagtctgagagctcaaaactaatttctccgccacttgcccaggcaatcagagattatgtcaattctctgttggtccagggtgggacaggtagtttgcctggaacttctaactctacacccccactggatgtagaaaacatacagaagagaattgatcaatctaagtttcaagaaactgaattcctgtctcctccacgaaaagtccctagactgagtgagaagtcagtggaggaaagggattcaggttccgttgtggcatttcagaacatacctggatccgaacttttgccgtcttcttttgccaaaactgttgtctctcattcactcactaccttaggtctagaagtgtctaagcagtcacagcatgataaaatagatgcctcagaactatcttttcccttccatgaatctattttaaaagtaattgaagaagaatggcagcaagttgacaggcagctgccttcactggcatgcagatatccagtttcttccaaggaggcaacacggttattatcagttccaaaagtagatgatgaaatcctagggtttatttctgaagccactccac

SEQ ID NO: 21771 - DNA, 916 bp, Macaca Mulatta
  misc_feature (1)...(916): n = A,T,C or G
ggcaggtagaaagtttccatccaattaaaaagaggtttatcttttctgaataaagtcttcagtgacgaaatactatatatggtgaatagtaacatgagtaagattttaatgggaagttctgttaaaagnnnnnnnnnnnnnnnnnnaattgagctgatgagagaaagactcaggatgctgaaagtaatataagcacactgacacagctatataatgctaataatgttttttaagtttaattttacatttttgtgacatccagagatgctgagaattaggggaaattggaggttttatttaagaagatgaatgatctctctccttccaagagattttagggttgtttaaatcagatgtattaatctttaggcctcgatgaaaagggtgcgatactcaaatatatctttctccaaagaagctgtcttacctggtgcagtgaaaagccgacgaaagagggaataatgcccctgttcgcgggctcaattataactaatcgacccaccctcccgcttctttgcacgggacacacaggcctgagactccaaactcatcttcttactcaagacaccctgcatattccccccttcccaacaaactttaaactaatccgccctccccttatccacaattagagaccgggtctttgggcatttcgaaccaccttcaccaatacttgcccgcgaggtctgcacactaccgtggggcaaaattagttaccgcccagaccgtaccctcctttcactcccctgcccccggaagcgcgtatgttcgccctgcagattcccgcggtatccactgcacgcggcctcctcttcccttacacccttcgggactgccccccagtcacacctgtgacgtctacgcgcctcacacgcgctcccgcgggtaatccgatgcgtgcgggccgtgaccggtc

SEQ ID NO: 21772 - DNA, 1312 bp, Macaca Mulatta
  misc_feature (1)...(1312): n = A,T,C or G
catgaagagcaccatgcagccaaaaccctggggattggcaaagccatcgccgtcttaacctctggcggagatgnnnnnnnnnnnnnnnnnnnnnnnnnnnnnnnnnnnnnnnnnnnnnnnnnnnnnnnnnnnnnnnnnnnnnnnnnnnnnnnnnnnnnnnnnnnnnnnnnnnnnnnnnnnnnnnnnnnnnnnnnnnnnnnnnnnnnnnnnnnnnnnnnnnnnnnnnnnnnnnnnnnnnnnnnnnnnnnnnnnnnnnnnnnnnnnnnnnnnnnnnnnnnnnnnnnnnnnnnnnnnnnnnnnnnnnnnnnnnnnnnnnnnnnnnnnnnnnnnnnnnnnnnnnnnnnnnnnnnnnnnnnnnnnnnnnnnnnnnnnnnnnnnnnnnnnnnnnnnnnnnnnnnnnnnnnnnnnnnnnnnnnnnnnnnnnnnnnnnnnnnnnnnnnnnnnnnnnnnnnnnnnnnnnnnnnnnnnnnnnnnnnnnnnnnnnnnnnnnnnnnnnnnnnnnnnnnnnnnnnnnnnnnnnnnnnnnnnnnnnnnnnnnnnnnnnnnnnnnnnnnnnnnnnnnnnnnnnnnnnnnnnnnnnnnnnnnnnnnnnnnnnnnnnnnnnnnnnnnnnnnnnnnnnnnnnnnnnnnnnnnnnnnnnnnnnnnnnnnnnnnnnnnnnnnnnnnnnnnnnnnnnnnnnnnnnnnnnnnnnnnnnnnnnnnnnnnnnnnnnnnnnnnnnnnnnnnnnnnnnnnnnnnnnnnnnnnnnnnnnnnnnnnnnnnnnnnnnnnnnnnnnnnnnnnnnnnnnnnnnnnnnnnnnnnnnnnnnnnnnnnnnnnnnnnnnnnnnnnnnnnnnnnnnnnnnnnnnnnnnnnnnnnnnnnnnnnnnnnnnnnnnnnnnnnnnnnnnnnnnnnnnnnnnnnnnnnnnnnnnnnnnnnnnnnnnnnnnnnnnnnnnnnnnnnnnnnnnnnnnnnnnnnnnnnnnnnnnnnnnnnnnnnnnnnnnnnnnnnnnnnnnnnnnnnnnnnnnnnnnnnnnnnnnnnnnnngagcttcatgaacaactgggaggtatacaagcttctagctcatgtcagacccccggtatctaagnnnnnnnnnnnnnnnnnnnnnnnnnnnnnnnnnnnnnnnnnnnnnnnnnnnnnnnnnnnnnnnnnnnnnnnnnnnnnnnnnnnnnnnnnnnnnnnnnnnnnnnnnnnnnnnnnnnnnnnnnnnnnnnnnnnnnnnnnnnnnnnnnnnncagatagaggaagctggctggagctatgttgggggctggactggccaaggtggctctaaacttgggactaaaag

SEQ ID NO: 21773 - DNA, 112 bp, Macaca Mulatta
  misc_feature (1)...(112): n = A,T,C or G
ttccgccacaagagtgataaccaggtgaataaccgccagtctcaggtgctgatcaatggaannnnnnnnnnnnnnnnnnnnnnnnngtctgtgttggtgatattatcaagct

SEQ ID NO: 21774 - DNA, 1375 bp, Macaca Mulatta
  misc_feature (1)...(1375): n = A,T,C or G
caagccagagattgcccaagtcggcgccaagtaacaggaagctcagggcccaagcctcctggttgtcctgtttgcccttgtgcgtgccaacccgcctgccaatgtcacctggatcgaccaggatgggccagtgactgtcaacacctctgacttcctggtgctggatgcacagaactacccctggctcaccaaccatacagtacagctgcagctccgcagcctggcgcacaacctctcggtggtggccaccaatgatgtgggtgtcaccagtgcttcacttccagccccannnnnnnnnnnnnnnnnnnnnnnnnnnnnnnnnnnnnnnnnnnnnnnnnnnnnnnnnnnnnnnnnnnnnnnnnnnnnnnnnnnnnnnnnnnnnnnnnnnnnnnnnnnnnnnnnnnnnnnnnnnnnnnnnnnnnnnnnnnnnnnnnnnnnnnnnnnnnnnnnnnnnnnnnnnnnnnnnnnnnnnnnnnnnnnnnnnnnnnnnnnnnnnnnnnnnnnnnnaggtttcatccgcctcccaatgctgggctatatctatcgagtgtccagcgtgagcagtgatgagatctggctttgagccgagggcgagacaggagtattctcttggcctctgggcaccctcccattccttcaaggcatcctctgcctagctgtgtcaccaacgtgaagaggtcatgccactgccacttttgcttgccctcctggctggggtgccctctatgtcatgcatgtgatgcatttcactgggctgtaacccacagggacacaggtatctttggcaaggctaccaattggacctaagcccctcatgctgactcagggcgggccctgcatgtgatgactgggcccttccagagggagctctttggccaggggtgttcagatgtcatccagcatccaagtgtatcatggcccgctgtatgcccaccccagtactccacagcaccttgtacagtaggcatgggggcgtgcctgtgtgggggacagggagggccctgcatggattttcctccttcctatgctatgtatccttgttccctcaggtaaaattgaggaccctgctagctatatagaaccaaattgccctttgtacaggaaccaacccctggcccaggggcactggccaagcacaagtcttttttgctgcacgcctctctgctcttctctgccccttccttcccccctcctccagagaattctaggttacatgttggaccttctctactacttcgctgggcactagacttttctattggcctgtgccaccgctcagtattagcacaagtcagggaggaagaggcaggcgatgagtctagtagcacccaggatggcttgtagctatgcatcattttattacagtgttagcact

SEQ ID NO: 21775 - DNA, 991 bp, Macaca Mulatta
  misc_feature (1)...(991): n = A,T,C or G
cgcgcccggcaggaaagggcgggcctgcgctgccgcccaagctcgctccagccgtccgactctgggctgggaccgcgcgtgaccggcgccgcgagcgagaggcaggagcgcgcgccccggccagtgaagggctcggggatggactgcggctcggtcggcggccagaggacccagcgcctgcccggccatcggcggcttctgttcttgcccgcgggcctcagcggaagaccgggaggcagcgaaacctcagcacgccgctgcctctctgcgctctgcgacggtctgggggcgctgcgccctcgcgccccggcgacccgcggctgcgtgtcacgtgcctcgccgctactcctcctcctgctagtgccctccccgcgcttggccgccgcagccccgcgccggcagctcggggactgggagcgctcgcgcctcgggtatgccgcacccccggccgggcgcagcggcgcatggaggtgcccactgggcnnnnncgggcgtcgccggtgccgccggcgcccttccccagtgcanaggcccggcgcctgcacttgtttcctgcangagagnnnnnnnnnnnnnnnnnnnnnnnnnnnnnnnnnnnnnnnnnnnnnnnnnnnnnnnnnnnnnnnnnnnnnnnnnnnnnnnnnnnnnnnnnnnnnnnnnnnnnnnnnnnnnnnnnnnnnnnnnnctcactctttcgcccaggctggacatgcagtggtgcagtcctgcctactgcaaccgccggctcctgggttcaaatgattctcgtgcctcagcctgccgagtagctgggactacaggcatgtgccaccacgcccggctaatttttttggtatttttagtagagacggagtttcaccatgttggccagtctggtctcaaactcctgacctcaagtgatccacccgcctcggcctccaaaagtgctgggataacaggggtgagccactgtgtccagccgccaaaactaattatgtttaaacatgaactc

SEQ ID NO: 21776 - DNA, 1261 bp, Macaca Mulatta
  misc_feature (1)...(1261): n = A,T,C or G
tggaggaaggaggaggcggcgtacggagtctggtcccgggcgggccggtgttactggtcctctgcggcctcctggaggcgtctcgcggcggcctagccctccctcaactcagcgatgacatccctttccgagtcaattggcccggcaccgagttctctctgcccacaactggagttttgtataaagaagataattatgtcatcatgacaactgcacataaagaaaaatataaatgcatacttccccttgtgacaagtggggatgaggnnnnnnnnnnnnnnnnnnnnnnnnnnnnnnnnnnnnnnnnnnnnnnnnnnnnnnnnnnnnnnnnnnnnnnnnnnnnnnnnttgagtcttattggacttatgaagtatgtcacggaaaacacattcggcagtaccatgaagagaaagaaactggtcagnagaaaataaatattcacgagtactaccttgggaatatgttggccaagaaccttctatttgaaaaagnnnnnnnnnnnnnnnnnnnnnnnnnnnnnnnnnnnnnnnnnnnnnnnnnnnnnnnnnnnnnnnnnnnnnnnnnnnnnnnnnnnnnnnnnnnnnnnnnnnnnnnnnnnnnnnnnnnnnnnnnnnnnnnnnnnnnnnnnnnnnnnnnnnnnnnnnnnnnnnnnnnnnnnnnnnnnnnnnnnnnnnnnnnnnnnnnnnnnnnnnnnnnnnnnnnnnnnnnnnnnnnnnnnnnnnnnnnnnnnnnnnnnnnnnnnnnnnnnnnnnnnnnnnnnnnnnnnnnnnnnnnnnnnnnnnnnnnnnnnnnnnnnnnnnnnnnnnnnnnnnnnnnnnnnnnnnnnnnnnnnnnnnnnnnnnnnnnnnnnnnnnnnnnnnnnnnnnnnnnnnnnnnnnnnnnnnnnnnnnnnnnnnnnnnnnnnnnnnggaagatttgcaatcaacaaaagaagagagatttccagcgatccacaagtccattggtattggctctcagccaatcctcactgttgggacaacccacatatccaaagtaacagatgaccagctcataaaagagtttcatagtnnnnnnnnnnnnnnnnnnnnggtgttggttggtggaaatatgaattctgctatggcaaatatgtacatcaataccatgaggnaggacaaggatagtgggaaaacctctgtggttgtcgggacatggaaccaagaagagcatattgaatgggctaagaagaatactgctagagcttatcatcttcaagatgatggtacccagacagtcaggn

SEQ ID NO: 21777 - DNA, 508 bp, Macaca Mulatta
  misc_feature (1)...(508): n = A,T,C or G
cttccctttactcagtggaagccccttcaaaaccagccaggactagtgaaccacggctcaaaaggcaaaagaagacaaaagctccccaggatgtagaaatgaaggaccttgaagatgagagctaaacctcttccagtagaagattctcaactggagccagccttcagactcagtggttgttttagaggacgttgacaaaagcagtgccccttttcactctccagatttcctcctacctaatggcctactgacctcccctaccgggatgtctttgggagggaagaaggtacagaagaaagattggagaagggcctctctagcagtcaactccatttgtaataaagccctagcactctgagatgtgtgtgattaaatggtagaatggggatgggtcatganaaggttgctgagtatggaaacaagacagtgaggaagcagtacctacagagcttccttgagcaaatgcagcaagatgccagcttctgccctccaagagtggtggtgcctg

SEQ ID NO: 21778 - DNA, 110 bp, Macaca Mulatta
catatgtgacctatcaagacattcatagcattcaggccttccatgaacagattgtcattgcagttaaagctccagcagaaaccagattggatgttccagctcccagagaa

SEQ ID NO: 21779 - DNA, 360 bp, Macaca Mulatta
gtttctctaattctccccttccttataataaaataccttgttttcactttttccccaggttgtagcagataccaacataagtgccatagcagctcagcttgaaaacatgtctacaggctaccaccttggttcacccactgctgaacaccatcgagaagacacagagtgagtatttcagatgcagagggcctattatgcatgtgggcaaagctcagaagaacttttccagatactcaagtgcactctaaaggagaggaggccaaagcacccatgactttttctaaattctagggaatccttatttctcacaaggcttaattccaccatatgaatgcttgaaagaccactgttgcagggcct

SEQ ID NO: 21780 - DNA, 212 bp, Macaca Mulatta
  misc_feature (1)...(212): n = A,T,C or G
cagtcacctgtgtacctttgtactttctacagtgaaagttgcgacaggacctccctttctcaataaatttgtccgtggtggagaaaatcagcatgaatactacaggccaagnnnnagatgcaaagcagccatactctggaagcctggtgcaccattttctattgaggaggtagaagtggccccaccaaaggcaaaggaagttcgcataaagg

SEQ ID NO: 21781 - DNA, 1898 bp, Macaca Mulatta
  misc_feature (1)...(1898): n = A,T,C or G
aaagataagagggaaaatttgatgaaagccctgttttcaaagagatgcctgcagcatgcagccagaggcaagttgacgttaactatagttcccctggcctatccgtttacatgtgaggtagtttcttttnnnnnnnnnnnnnnnnnnnnnnnnnnnnnnnnnnnnnnnnnnnnnnnnnnnnnnnnnnnnnnnnnnnnnnnnnnnnnnnnnnnnnnnnnnnnnnnnnnnnnnnnnnnnnnnnnnnnnnnnnnnnnnnnnnnnnnnnnnnnnnnnnnnnnnnnnnnnnnnnnnnnnnnnnnnnnnnnnnnnnnnnnnnnnnnnnnnnnnnnnnnnnnnnnnnnnnnnnnnnnnnnnnnnnnnnnnnnnnnnnnnnnnnnnnnnnnnnnnnnnnnnnnnnnnnnnnnnnnnnnnnnnnnnnnnnnnnnnnnnnnnnnnnnnnnnnnnnnnnnnnnnnnnnnnnnnnnnnnnnnnnnnnnnnnnnnnnnnnnnnnnnnnnnnnnnnnnnnnnnnnnnnnnnnnnnnnnnnnnnnnnnnnnnnnnnnnnnnnnnnnnnnnnnnnnnnnnnnnnnnnnnnnnnnnnnnnnnnnnnnnnnnnnnnnnnnnnnnnnnnnnnnnnnnnnnnnnnnnnnnnnnnnnnnnnnnnnngggccaatgcaggagaccatctatgacttctggaggatggtgtggcatgaaaacactgcaagcatcatcatggtgaccaatcttgtggaagtgggaagggtnnnnnnnnnnnnnnnnnnnnnnnnnnnnnnnnnnnnnnnnnnnnnnnnnnnnnnnnnnnnnnnnnnnnnnnnnnnnnnnnnnnnnnnnnnnnnnnnnnnnnnnnnnnnnnnnnnnnnnnnnnnnnnnnnnnnnnnnnnnnnnnnnnnnnnnnnnnnnnnnnnnnnnnnnnnnnnnnnnnnnnnnnnnnnnnnnnnnnnnnnnnnnnnnnnnnnnnnnnnnnnnnnnnnnnnnnnnnnnnnnnnnnnnnnnnnnnnnnnnnnnnnnnnnnnnnnnnnnnnnnnnnnnnnnnnnnnnnnnnnnnnnnnnnnnnnnnnnnnnnnnnnnnnnnnnnnnnnnnnnnnnnnnnnnnnnnnnnnnnnnnnnnnnnnnnnnnnnnnnnnnnnnnnnnnnnnnnnnnnnnnnnnnnnnnnnnnnnnnnnnnnnnnnnnnnnnnnnnnnnnnnnnnnnnnnnnnnnnnnnnnnnnnnnnnnnnnnnnnnnnnnnnnnnnnnnnnnnnnnnnnnnnnnnnnnnnnnnnnnnnnnnnnnnnnnnnnnnnnnnnnnnnnnnnnnnnnnnnnnnnnnnnnnnnnnnnnnnnnnnnnnnnnnnnnnnnnnnnnnnnnnnnnnnnnnnnnnnnnnnnnnnnnnnnnnnnnnnnnnnnnnnnnnnnnnnnnnnnnnnnnnnnnnnnnnnnnnnnnnnnnnnnnnnnnnnnnnnnnnnnnnnnnnnnnnnnnnnnnnnnnnnnnnnnnnnnnnnnnnnnnnnnnnnnnnnnnnnnnnnnnnnnnnnnnnnnnnnnnnnnnnnnnnnnnnnnnnnnnnnnnnnnnnnnnnnnnnnnnnnnnnnnnnnnnnnnnnnnnnnnnnnnnnnnnnnnnnnnnnnnnnnnnnnnnnnnnnnnnnnnnnnnnnnnnnnnnnnnnnnnnnnnnnnnnnnnnnnnnnnnnnnnnnnnnnnnnnnnnnnnnnnnnnnnnnnnnnnnnnnnnnnnnnnnnnnnnnnnnnnnnnnnnnncccaagacggatatcggatggtgcagcaattccagttcctgggctggccgatgtacagggacacaccagtgtccaagcgctccttcttgaagctcattcgccaggtggacaaatggcaagaggagtacaacggaggggaaggccgcactgttgtgcactgcttg

SEQ ID NO: 21782 - DNA, 580 bp, Macaca Mulatta
aattgcatcatttggtaatttcctaccaaaaaccaagatggctaagatgattggcgaggtaatgacaatgttttatcctgctggccactcgtttgttgtcattctggggaacagcaaactgaagcagacatttgtagagacgctccggtgtgagtctggccacctgaagcctggatccaagggacccattttctcttagagtaacagagggcctggggtggagcccgtgagccttttgcctggctcaagactacgggattcttcctgaccctcccatgataccagttccataacatcactaggagagaaaccctgactgctttgcccctggtccctgaggacctcttccaaggtgaaagccatgcttctcacgacctctgtctgtatgatggttgcggaagtggggagggtgcaggagtagtagtgttttggaaatgacaatgttgtaagaacactctcactataaacacacggtgctgtattttaatgatcatcagctccacacaatgagtctgattactagtttcaacttaaattagatactaacagtgataaacataaaattacatagtagacttga

SEQ ID NO: 21783 - DNA, 763 bp, Macaca Mulatta
ttgaatcctggcctggaatttgggcagatatagcacttttaaaactgtgcatctcaaactttaatcacatactctagtatcagaggagtgtgaaccttcagagatacatggttaaaagctaaaggcatagctccggctacaacttttctttgtttacaaatgtgtaaaatcttgatgcaaaaattccacccaaatttctgaacaaaattaatattcagtattacatctagcctatagattctcttactcttggtgtaatgacagtatcccagtttaggaaactgttttaaaatcttgtctcttggttgtggctgaggctttgggaaggccagagccccctttgccaccacacctagggtgtcagctccaagcctgggcctgagggtttgacggggagcgggtgagctagatcctgatcccagtggtcagtggccagatcctgggctgccggccagaaccctggctttgtgagtggctgcagcttggctctgctccagcccacagtggctaaaggggcgggtagagagcatgtagggagcgtgtacgtggctttgtgtccttggctcctccagactctcacatgtgcgggcaccatatacttctgctgcccttgtgccccaatcattgcacaaacagaaacagctctgacagggaagggactgctagagtcaggaaccccagggcctggaaggaaggtatggctctcagagtgacctggggtctattctgtcccctctggacctgtttccctggcaatgctgtg

SEQ ID NO: 21784 - DNA, 1758 bp, Macaca Mulatta
  misc_feature (1)...(1758): n = A,T,C or G
gcctccccaggaggggctggaggtcagggcctggtgggctctgcagactcattagttcagcacaatgtgctcttacattcaagaaacagggcacagggctgctcgctggcactggaggccaaaagaaggtgagggcaagtgagatgcagggacctcttctcacagctgtgccaacaagcaccaacaggagaccccacttccacaccagaaaaggggggatggtgcacaagatccagnnnnnnnnnnnnnnnnnnnnnnnnnnnnnnnnnnnnnnnnnnnnnnnnnnnnnnnnnnnnnnnnnnnnnnnnnnnnnnnnnnnnnnnnnnnnnnnnnnnnnnnnnnnnnnnnnnnnnnnnnnnnnnnnnnnnnnnnnnnnnnnnnnnnnnnnnnnnnnnnnnnnnnnnnnnnnnnnnnnnnnnnnnnnnnnnnnnnnnnnnnnnnnnnnnnnnnnnnnnnnnnnnnnnnnnnnnnnnnnnnnnnnnnnnnnnnnnnnnnnnnnnnnnnnnnnnnnnnnnnnnnnnnnnnnnnnnnnnnnnnnnnnnnnnnnnnnnnnnnnnnnnnnnnnnnnnnnnnnnnnnnnnnnnnnnnnnnnnnnnnnnnnnnnnnnnnnnnnnnnnnnnnnnnnnnnnnnnnnnnnnnnnnnnnnnnnnnnnnnnnnnnnnnnnnnnnnnnnnnnctgttatcacttaaagggaacagaaaaggtgcaactaaaactagccttcctttagcttgggcccaagtccccacccctgatgctaacttgcagtactaccctcagtaaggtgtccagcttctcaaagcctcaattctctcacctgtcaatgaagagggctgtcctaagtagctttcagagtctcttctaccctacaaacgttgttttctgttagaaacaaaagaaacatcttgcaaaatcttcgtgagtacttatatcccgtatttctctccatactcttctcatgcgtgatctgctgactcccaaacttcttgccaaagtactcctttatcctgagatgttagtgtgcctcaccaccaccaccgccctctgggttccccccactccctctgtgctctcaatctgcctgccttcattgggcaccatgttctggaagattgatagggctttaggtattcaggtagttcaatgagccattttcttcccaggtagctcattccttggggcataatcccccgtttcctccttccccttttctcacataatcattgtttcagtcaatttaagctaagttcagcaatggtaacaaatgaccccaaatctatagtggcttacaatagccaagagctattcttgctcatattcatgtgcatggcaggttggcaaagcctgttccacatcctcctcatcccagaactgagaagtcccatctgatggaggaagaaccaacggcagagccatgtgatggatcctcaagcttctgcttgagccaagtccatgtcacttccgttcacatagtatgagctaaagcaagtcacacaggcaagcctgctgtcagtaggacagaaggtnnnnnnnnnnnnnnnnnnnnnnnnnnnnnnnnnnnnnnnnnnnnnnnnnnnnnnaccttccagtgcggatacaagagcagggccaagaggagatagatctggattcactcccagctccataattctaggcaaattctttcaactctgagccttggcttcccttctataatataggctaagagtacccacctcctgcagggaggttgggagagttgggtgaaatttcataaa

SEQ ID NO: 21785 - DNA, 403 bp, Macaca Mulatta
tcattccctttctctaatgaattagagtacaggattggggctgaatgatgtgagtgccaagctctttttgaagctcttatatgaaggaacatgcattacaactttcctaatcgctgcttccctcacttccagattgtgagatgtgtcagaacttcttcattgacagctgtgctgctcatgggccccctacatttataaaggacagtgcagtggaaaaggggcatcctaaccgttcagccctaagtctgcccccggggctgagaattgggccatcaggcatccctcaggccgggcttggagtatggaatgaggcatctgatctgccgctgggtctgcactttggcccctatgagggccgaattacacaggacgaagaggcagccaacaatggatactcttggct

SEQ ID NO: 21786 - DNA, 577 bp, Macaca Mulatta
gggcgtgtgcaggagtttgacagtggcctgctgcactggcggattgttgcgggggacaccactgagcatatccagacccacttcgaaagcaagacagagctgctgccttcccggcctcatgcaccctgcccaccagccccccggaagcatgtgacaacagcagagggtacgccagggacaacagaccaggagggacccccacctgatggacctccagaaaaacggatcacagccactatggatgacatgttgtctactcggtctagcaccttgaccgaggatggagctaagagttcagaggccatcaaggagagcagcaagtttccatttggcattagcccagcacagagccaccggaatatcaagatcctagaggacgaaccccacagtaaggatgagaccccactgtgtacccttctggactggcaggattctcttgccaagcgctgtgtctgtgtctccaataccattcgaagcctgtcatttgtgccaggcaatgactttgagatgtccaaacacccagggctgctgctcatcctgggcaagctgatcctgctgcaccacaagcacccagaac

SEQ ID NO: 21787 - DNA, 481 bp, Macaca Mulatta
ggatggagttctggtggatgaatttggattgccacagatccctgcttcatagatttgcatcattcaagtatatcttgtaaaacaaacacgtattacgggactaggaaatatttatctttccaaatttaccataacagatgtaggtttctttcctttctttgaaggaaagtttaattacattgctcttttattttttccattaagagactcattgcttgggaaatgctttctttgtactaaaatttgattcctttttttcttaagaaaaacaaactcagtttaaaagtatctttagctcgtatgacttgttttcattcaataataataatttgaaataaaactaaagaaatggaatcgtaaaaatctatgacagtgtaactctacagtctcaaaatgacctgataaattgataagacaaagatgagattattggggctattcatattatgattcagaatcattttctattgtggtattatag

SEQ ID NO: 21788 - DNA, 184 bp, Macaca Mulatta
tgatgttctaatcatgtcagataaagatgatattgagactccactgctaactgaagcagcccccatccttgaagatggaaactgtgagccagccaagaattctgagtttgttgaccaaggtgccaagccagagagtaaatcagaacctgtagtttccactcggaaaagaccagagaccaaacct

SEQ ID NO: 21789 - DNA, 801 bp, Macaca Mulatta
  misc_feature (1)...(801): n = A,T,C or G
agcctttttatgctgtcctggacaaccccagcttctccctgatgggcatcctgctgcggatcgccagggggacgngtctctccatccccatcacctccaacacgttgctctattttcacccccatcccgaagacattaagttccacttgtaccttgtccccagcgacgccttgcnnnnnnnnnnnnnnnnnnnnnnnnnnnnnnnnnnnnnnnnnnnnnnnnnnnnnnnnnnnnnnnnnnnnnnnnnnnnnnnnnnnnnnnnnnnnnnnnnnnnnnnnnnnnnnnnnnnnnnnnnnnnnnnnnnnggagttgaaattgtcctaccggagccctggagaaatccagcccttctctaaattctatgctgggcagatgaaggaacccattcaacttgaaattactgaaaaaagacatgagattctggtctggaagactgtggtgaagccagnnnnnnnnnnnnnnnnnnnnnnnnnnnnnnnnnnnnnnnnnnccaggtgcagcctttgtgagggagaaccatcggcgactccaagccaggattggggacctgaaaggggtgctcgatgatctccaagacaatgaggttctcagtgagaatgagaaggagctggtggagcaggcaaagacacggcagagcaagaccgacgccctgctgagcatggtggagaagaaaggggaccgggccctggagctgctcttcagaagccttagtgaaagggacccttacctcgtgtcctatcttagacagcagagttgtaaagggagtcagtccgagagtgtggaagagagaatccagcgttc

SEQ ID NO: 21790 - DNA, 864 bp, Macaca Mulatta
gtttcactggcccctcctttttatcacagtcagtgaggagaaaaacatacatgaatacatggagctgttagataatttaccagattgtttacatttaaacagatgccatattcaagtacttaaatctaaacccctttggttaaaagtatacagttaactcttatttacgagtagtaaaagaaaacacagaccatatattcacacatatgtattcacacaccacacacatataatttcgtgtacaatgtttgaatgttccagactttggagtttaaacataaatatacataagtttattttctcaaatcttactttgatgtggaaaattttcttcttgattgatgagtaaggagaaagtgtttatctggcatagagaaaagggacggatagcaaaagggaatatgatgatactataacattactttcactaattgtcttcaacctcattttggttttacagatttggcctctgagtgattttggatttttacgtgccagccctaatggccacagattttctgatgattagtaatcatttattcttttgacttgattattgtctccttttcatgtgaatttattactcccgttgaaaccatgtactaataaactatttgctattcagttttagttgttttttattgttaaatgtaaagaatattcaacacacattctgttagttcaaaatatatagatgaaaatgtaacccaaaaaggtcatctaaattttatgatacaaaaatactttgggagggggaacctggatgactacctcacttttgaattcttgttcttataggtgtaatgaaactaatctattcttcttaaatatgcctcatactttagcagctacattacaagtcag

SEQ ID NO: 21791 - DNA, 865 bp, Macaca Mulatta
  misc_feature (1)...(865): n = A,T,C or G
agtttgttagctgcctgcgagntgttttttaagaaagcagaagcaccatcatttgcacactccttatagatcacacaccttaaccctgactttttttgctccagtttttcagaagaagtgaagtcaagatgaagaaccatttgcttttctggggagtcctggccatttttgttaaggctgttcatgtaaaagctcaagaaggtgaaaggattgttcttgttgacaacaaatgtaagtgtgcccggattacttccaggatcatccgttcttccgaagatcctaatgaggacattgtggagagaaacatccgaattattgttcctctgaacaacagggagaatatttctgatcccacctcaccattgagaaccaaatttgtgtaccatttgtctgacctctgtaaaaaatgtgatcctacagaagtggagctggataatcagatagttactgctacccagagcaatatctgtgatgaagacagtgctacagagacctgctacacttatgacagaaacaagtgctacacagctgtggtcccactcacatatggtggtgagaccaaaatggtgcaaacagccttaaccccagattcctgctatcctgactaatttaagtcattgctgactgcatagctctttttcttgagaggctctccattttgattcagaaagttagcatattgattaccaatgaatttgaaaccagggtttttattatagttttttctcttcggatgatgtaaaaccaactccttgccaccaaaataattaaaatagtcacattgttatctttattaggtaatcacttcttaattatatattcacactctaagtatcaaaatctgccaattatcatgctcacctga

SEQ ID NO: 21792 - DNA, 794 bp, Macaca Mulatta
  misc_feature (1)...(794): n = A,T,C or G
ggggcttttcgctgctgcggccgcagccatgagtatgctcaggcttcagaagaggctcgcctctagtgtcctccgctgtggcaagaagaaggtctggttagaccccaatgagaccaatgaaatcgccaatgccaactcccgtcagcagatccgaaagctgatcaaagatgggctgatcatccgcaagcctgtgacggtccattcccgggcgcgatgccggaaaaataccttggcccgccggaagggcaggcacatgggcataggtaagcggaagggtacagccaatgcccgaatgccagagaaggtcacgtggatgaggagaatgaggattctgcgccggctgcttagaagataccgtgagtctaagaagattgatcgccacatgtatcacagcctatacctgaaggtgaaggggaatgtgttcaaaaacaagcgtattctcatggaacacatccacaagctgaaggcagacaaggcccgcaagaagctcctggctgaccaggctgaggcccgcaggtctaagaccaaggaagcacgcaagcgccgtgaagagcgcctccaggccaagaaggaggagatcatcaagactttgtccaaggaggaagagaccaagaaataaaagctcccctctttgtctgtacatactggcctccgtgactacatagatcagccattaaaataaaacaagcctttatcnnnnnnnnnnnnnnnnnnnnnnnnnnnnnnnnnnnnnnnnnnnnnnnnnnnnnnnnnnnnnnnnnnnnnnnnnnnnnnnnnnnnncgtttacaacgtc

SEQ ID NO: 21793 - DNA, 4127 bp, Macaca Mulatta
  misc_feature (1)...(4127): n = A,T,C or G
aggattccacaggtcacataccagagaggttttccctcagctgctctcaactttgtaatcttgtgaagaagctgacaagcttggnnnnnnnnnnnnnnnnnnnnnnnnnnnnnnnnnnnnnnnnnnnnnnnnnnnnnnnnnnnnnnnnnnnnnnnnnnnnnnnnnnnnnnnnnnnnnnnnnnnnnnnnnnnnnnnnnnnnnnnnnnnnnnnnnnnnnnnnnnnnnnnnnnnnnnnnnnnnnnnnnnnnnnnnnnnnnnnnnnnnnnnnnnnnnnnnnnnnnnnnnnnnnnnnnnnnnnnnnnnnnnnnnnnnnnnnnnnnnnnnnnnnnnnnnnnnnnnnnnnnnnnnnnnnnnnnnnnnnnnnnnnnnnnnnnnnnnnnnnnnnnnnnnnnnnnnnnnnnnnnnnnnnnnnnnnnnnnnnnnnnnnnnnnnnnnnnnnnnnnnnnnnnnnnnnnnnnnnnnnnnnnnnnnnnnnnnnnnnnnnnnnnnnnnnnnnnnnnnnnnnnnnnnnnnnnnnnnnnnnnnnnnnnnnnnnnnnnnnnnnnnnnnnnnnnnnnnnnnnnnnnnnnnnnnnnnnnnnnnnnnnnnnnnnnnnnnnnnnnnnnnnnnnnnnnnnnnnnnnnnnnnnnnnnnnnnnnnnnnnnnnnnnnnnnnnnnnnnnnnnnnnnnnnnnnnnnnnnnnnnnnnnnnnnnnnnnnnnnnnnnnnnnnnnnnnnnnnnnnnnnnnnnnnnnnnnnnnnnnnnnnnnnnnnnnnnnnnnnnnnnnnnnnnnnnnnnnnnnnnnnnnnnnnnnnnnnnnnnnnnnnnnnnnnnnnnnnnnnnnnnnnnnnnnnnnnnnnnnnnnnnnnnnnnnnnnnnnnnnnnnnnnnnnnnnnnnnnnnnnnnnnnnnnnnnnnnnnnnnnnnnnnnnnnnnnnnnnnnnnnnnnnnnnnnnnnnnnnnnnnnnnnnnnnnnnnnnnnnnnnnnnnnnnnnnnnnnnnnnnnnnnnnnnnnnnnnnnnnnnnnnnnnnnnnnnnnnnnnnnnnnnnnnnnnnnnnnnnnnnnnnnnnnnnnnnnnnnnnnnnnnnnnnnnnnnnnnnnnnnnnnnnnnnnnnnnnnnnnnnnnnnnnnnnnnnnnnnnnnnnnnnnnnnnnnnnnnnnnnnnnnnnnnnnnnnnnnnnnnnnnnnnnnnnnnnnnnnnnnnnnnnnnnnnnnnnnnnnnnnnnnnnnnnnnnnnnnnnnnnnnnnnnnnnnnnnnnnnnnnnnnnnnnnnnnnnnnnnnnnnnnnnnnnnnnnnnnnnnnnnnnnnnnnnnnnnnnnnnnnnnnnnnnnnnnnnnnnnnnnnnnnnnnnnnnnnnnnnnnnnnnnnnnnnnnnnnnnnnnnnnnnnnnnnnnnnnnnnnnnnnnnnnnnnnnnnnnnnnnnnnnnnnnnnnnnnnnnnnnnnnnnnnnnnnnnnnnnnnnnnnnnnnnnnnnnnnnnnnnnnnnnnnnnnnnnnnnnnnnnnnnnnnnnnnnnnnnnnnnnnnnnnnnnnnnnnnnnnnnnnnnnnnnnnnnnnnnnnnnnnnnnnnnnnnnnnnnnnnnnnnnnnnnnnnnnnnnnnnnnnnnnnnnnnnnnnnnnnnnnnnnnnnnnnnnnnnnnnnnnnnnnnnnnnnnnnnnnnnnnnnnnnnnnnnnnnnnnnnnnnnnnnnnnnnnnnnnnnnnnnnnnnnnnnnnnnnnnnnnnnnnnnnnnnnnnnnnnnnnnnnnnnnnnnnnnnnnnnnnnnnnnnnnnnnnnnnnnnnnnnnnnnnnnnnnnnnnnnnnnnnnnnnnnnnnnnnnnnnnnnnnnnnnnnnnnnnnnnnnnnnnnnnnnnnnnnnnnnnnnnnnnnnnnnnnnnnnnnnnnnnnnnnnnnnnnnnnnnnnnnnnnnnnnnnnnnnnnnnnnnnnnnnnnnnnnnnnnnnnnnnnnnnnnnnnnnnnnnnnnnnnnnnnnnnnnnnnnnnnnnnnnnnnnnnnnnnnnnnnnnnnnnnnnnnnnnnnnnnnnnnnnnnnnnnnnnnnnnnnnnnnnnnnnnnnnnnnnnnnnnnnnnnnnnnnnnnnnnnnnnnnnnnnnnnnnnnnnnnnnnnnnnnnnnnnnnnnnnnnnnnnnnnnnnnnnnnnnnnnnnnnnnnnnnnnnnnnnnnnnnnnnnnnnnnnnnnnnnnnnnnnnnnnnnnnnnnnnnnnnnnnnnnnnnnnnnnnnnnnnnnnnnnnnnnnnnnnnnnnnnnnnnnnatgaattggttctaccatccactgtatccaggcacagtggtctttcaggtaattgctgttgacaatgacactggcatgaatgcagaggttcgttatagcattgtaggagaaaacacaagagatctgtttgaaatcaacgaaacaacaggcaacataataatgaaggagaaatgtgatgttacagaccttggtttacacagagtgttggtcaaagctaatgacttaggacaacctgattctctcttcagtgttgtaactgtcaatctgtttgtgaatgagtcagtgaccaatgctacactgattaatgaactgctacacaaaagcactgaagcaccagtgaccccaaatactgagatagctgatgcatcctnnnnnnnnnnnnnnnnnnnnnnnnnnnnnnnnnnnnnnnnnnnnnnnnnnnnnnnnnnnnnnnnnnnnnnnnnnnnnnnnnnnnnnnnnnnnnnnnnnnnnnnnnnnnnnnnnnnnnnnnnnnnnnnnnnnnnnnnnnnnnnnnnnnnnnnnnnnnnnnnnnnnnnnnnnnnnnnnnnnnnnnnnnnnnnnnnnnnnnnnnnnnnnnnnnnnnnnnnnnnnnnnnnnnnnnnnnnnnnnnnnnnnnnnnnnnnnnnnnnnnnnnnnnnnnnnnnnnnnnnnnnnnnnnnnnnnnnnnnnnnnnnnnnnnnnnnnnnnnnnnnnnnnnnnnnnnnnnnnnnnnnnnnnnnnnnnnnnnnnnnnnnnnnnnnnnnnnnnnnnnnnnnnnnnnnnnnnnnnnnnnnnnnnnnnnnnnnnnnnnnnnnnnnnnnnnnnnnnnnnnnnnnnnnnnnnnnnnnnnnnnnnnnnnnnnnnnnnnnnnnnnnnnnnnnnnnnnnnnnnnnnnnnnnnnnnnnnnnnnnnnnnnnnnnnnnnnnnnnnnnnnnnnnnnnnnnnnnnnnnnnnnnnnnnnnnnnnnnnnnnnnnnnnnnnnnnnnnnnnnnnnnnnnnnnnnnnnnnnnnnnnnnnnnnnnnnnnnnnnnnnnnnnnnnnnnnnnnnnnnnnnnnnnnnnnnnnnnnnnnnnnnnnnnnnnnnnnnnnnnnnnnnnnnnnnnnnnnnnnnnnnnnnnnnnnnnnnnnnnnnnnnnnnnnnnnnnnnnnnnnnnnnnnnnnnnnnnnnnnnnnnnnnnnnnnnnnnnnnnatgtcctagtgaaccttgtggtttctttagctgtaatctggcaatggaaatttaaaatttatggaagagacagtgcagtgcaataacagaatactctcatgctgtttctctgtttgctctgaatcaacagctgtgatgtaatataaggctgtcttggggtatacacttatggttaatatatcaaagaagaaacatgcaattacttgccctgtctgattgttgaataattaaaacattatctccggaagtttggaagtgagctgaactatccaagctactctctgaaaggtatccagggcaagagactttttttaagaccccaaacaaacaaaagacaaaaccaaaacactctggttcagtgttttgaaaatattcactaacataatattgctgagaaaataatttttattacccaccactctgggtaaaagttgaatgggccgggcgcggtggctcacgcctgtaatcccagcactttgggaggccgagacgggcagatcacgaggtcagatcgagaccatcctggctaacacggtgaaaccccgtctctactgaaaaagtacaaaaaactagccgggcgcggtggcgggcgcctgtagtcccagctactcaggaggctgaggcaggagaatggcgtgaacccaggaggcggagcttgcagtgagctgagatccggccactgcactccagcctgggcgccagagaaagattctgtctcaaaaagaaaa

SEQ ID NO: 21794 - DNA, 129 bp, Macaca Mulatta
ggtgaagagatcagcgtggtccccagtcggtggctggatgccagcctgtcccccgtcatcctgggcgtccagggtggaagccaatgcctgtcatgtggggcgggacaggagccgactctaacactagag

SEQ ID NO: 21795 - DNA, 796 bp, Macaca Mulatta
cttctttctccggcttgcatctctgtgcaagaggaaagctttcacatgaaagtgtcccttggtaacggcgaaatgggcgtctctgcccatttgcagccttgtaaggcaggaaccacacgcttttttaccagcaatacacacagttcggtggtactgcaaggcttgatcagcttagaatagaaggattgctttgtgatgtgactctggtaccaggtgatggagatgaaatcttccctgttcacagagctatgatggcgtctgctagtgattatttcaaagctatgttcacaggtggaatgaaagaacaagatctgatgtgcattaagcttcatggggtgaacaaggttggtctgaagaaaatcattgattttatttatactgcaaaactttctcttaatatggactatcttcaggacacacttgaagctgctagttttttacaaatattacccgttttggatttctgtaaagtatttcttatatcaggagtctctttagataactgtgttgaggttggacgaattgctaacacctacaatctcatagaagtggataaatatgttaataatttcatcctgaagaactttcctgctttattgagtactggggagtttctaaaactcccttttgaacggcttgcctttgtgctttccagtaatagtcttaagcactgtaccgaactcgaactctttaaggcagcctgtcgctggctaaagttggaagaccctcggatggattatgctgcaaaattaatgaagaatattcgattcccactgatgacaccacaggatctcat

SEQ ID NO: 21796 - DNA, 279 bp, Macaca Mulatta
ataacacatcgtaagcttttattcatatatatacagggtattaagaattagaggatgctgggctctgttcttagcttggaagattctatttaattgaagctctctgttcagaaagcaataactttgtctcgttcctgttgggctgaaccctaaggtgagtgtgcagtacagtgtgtgtgggtgaagtggagatttggaattgaactctctgcctgtaaatgttccccaaataattgttgtgtgtatgataagtgtataataaaagtattcttgttagaa

SEQ ID NO: 21797 - DNA, 1248 bp, Macaca Mulatta
  misc_feature (1)...(1248): n = A,T,C or G
gtttggttggggctgaatgttttcctgtttgtggatgccttcctgaaatatgagacggccgacagatactactacacaagaaaaatccttgggnnnnnnnnnnnnnnnnnnnnnnnnnnnnnnnnnnnnnnnnnnnnnnnnnnnnnnnnnnnnnnnnnnnnnnnnnnnnnnnnnnnnnnnnnnnnnnnnnnnnnnnnnnnnnnnnnnnnnnnnnnnnnnnnnnnnnnnnnnnnnnnnnnnnnnnnnnnnnnnnnnnnnnnnnnnnnnnnnnnnnnnnnnnnnnnnnnnnnnnnnnnnnnnnnnnnnnnnnnnnnnnnnnnnnnnnnnnnnnnnnnnnnnnnnnnnnnnnnnnnnnnnnnnnnnnnnnnnnnnnnnnnnnnnnnnnnnnnnnnnnnnnnnnnnnnnnnnnnnnnnnnnnnnnnnnnnnnnnnnnnnnnnnnnnnnnnnnnnnnnnnnnnnnnnnnnnnnnnnnnnnnnnnnnnnnnnnnnnnnnnnnnnnnnnnnnnnnnnnnnnnnnnnnnnnnnnnnnnnnnnnnnnnnnnnnnnnnnnnnnnnnnnnnnnnnnnnnnnnnnnnnnnnnnnnnnnnnnnnnnnnnnnnnnnnnnnnnnnnnnnnnnnnnnnnnnnnnnnnnnnnnnnnnnnnnnnnnnnnnnnnnnnnnnnnnnnnnnnnnnnnnnnnnnnnnnnnnnnnnnnnnnnnnnnnnnnnnnnnnnnnnnnnnnnnnnnnnnnnnnnnnnnnnnnnnnnnnnnnnnnnnnnnnnnnnnnnnnnnnnnnnnnnnnnnnnnnnnnnnnnnnnnnnnnnnnnnnnnnnnnnnnnnnnnnnnnnnnnnnnnnnnnnnnnnnnnnnnnnnnnnnnnnnnnnnnnnnnnnnnnnnnnnnnnnnnnnnnnnnnnnnnnnnnnnnnnnnnnnnnnnnnnnnnnnnnnnnnnnnnnnnnnnnnnnnnnnnnnnnnnnnnnnnnnnnnnnnnnnnnnnnnnnnnnnnnnnnnnnnnnnnnnnnnnnnnnnnnnnnnnnnnnnnnnnnnnnnnnnnnnnnnnnnnnnnnnnnnnnnnnnnnnnnnnnnnnnnnnnnnnnnnnnnnnccaggattgaagtggatggtccctttggcacagccagtgaggatgttttccagtatgaagtggctgtgctggttggagcaggaattggggtcaccccctttgcttctatcttgaaatccatctggtacaaattccagggtgcagaccacaacctcaaaacaaaaaa

SEQ ID NO: 21798 - DNA, 88 bp, Macaca Mulatta
gatgaggtcattgggcaggtcctgagcacactcaagtctgaagatgtcccgtacacagcggccctcacagcggtccgcccttccaggg

SEQ ID NO: 21799 - DNA, 467 bp, Macaca Mulatta
  misc_feature (1)...(467): n = A,T,C or G
cttcagataaaccagtcgatcattttctgtaactcctctcagcgagttgaattactagccaagaagatttctcaactgggttattcttgcttctatattcatgctaaaatgaggcaggnnnnnnnnnnnnnnnnnnnnnnnnnnnnnnnnnnnnnnnnnnnnnnnnnnnnnnnnnnnnnnnnnnnnnnnnnnnnnnnnnnnnnnnnnnnnnnnnnnnnnnnnnnnnnnnnnnnnnnnnnnnnnnnnnnnnnnnnnnnnnnnnnnnnnnnnnnnnnnnnnnnnaggtcgctttggtcatcttggcttagccatcaacttgatcacatatgatgatcgcttcaacctgaaaagtattgaggagcagctgggaacagaaattaaacctattccaagcaacattgataagagcctgtatgtggcagaataccacagcgagcctgtagaagatgagaaaccttaacaagcat

SEQ ID NO: 21800 - DNA, 179 bp, Macaca Mulatta
aggagcgagcccagggcgtggtgctgaaagtgctcacaaacttcaagagcagcgagattgagcaggctgtgcagtcactggacagaaacggtgttgacttgttaatgaagtacatttataaaggctttgagaagcccacagaaaatagcagtgcagtgttactccagtggcacgaaaag

SEQ ID NO: 21801 - DNA, 715 bp, Macaca Mulatta
gggctctgtggagagctttagccttgcaaggaggcgctgggaggcattgccagccatgcccactgcccgctgctcctgctctagtctgcaggctgggccccggctgtttgttattgggggtgtggcccagggccccagtcaagccgtggaggcactgtgtctgcgtgatggggtctgaaggcctggtgggagctgtccactggagcagctcattgccagaggcagctatttctatggctccttttgctgctgaggacactcactgtggctctgtgggatgagagaggcacaggggtgagcacttgagacactgccttggggccttgggttaggggagcctttgcctttagtgcaggacacacatatgcttacacctacctttatcaccattctttcatgaatcatgcctagctccatccttgccctgggacctactaggccttccatccaactgggaaatggggagaaggaaagctggcctcatgttcttcaggatcagttcctatctggagttgaccaggcccaccccagttgccattcctgaaaaatcccagatgccaggctgcctttagggtccctgtagacccaggagagttgagagggtgggggacacagagagaatagagaggatgtgggacctgccagagggccagagcgcaggagttcaagcagaggaatgctggctatgggccctctacactgctggtgtatgacc

SEQ ID NO: 21802 - DNA, 821 bp, Macaca Mulatta
gggggcaaggtcccaggcccgctccttccctccgttcaggaaactgccagggacagtcaacagggaccaccctcttgtcaggacaactgcctgctgctagggtctgttgccaaggtcaacccatcaccaggaactgtcactggggacaagtccgtgttcccaagggcagcccttctcttctgctgtttaattccagactggtggtgggacccaggcaaccccctctcccacccccgccgacttctcccctctttccccagcctcgtgcctctgtccctcaccaaggtgcggacagtgctgcaccctcaacataggccatgtggggagtgactgcccctgcctcagggtcattctcccaccatagcgagggcactcgccttctgccttctggttcctcacccctgggaccagccaggaacctctcagagctgaagcaggccctgggggcaggagtgccagatgacaggcgcaggagccctccctccccacccccaccctctaactccagctgccactccatctccagctgctctcaatggctttcaaggtgtgttgttcagggacagccaccgccttgagtctggccaaggaggtgattaaacagctcagcttctctcactgcctctgggtgtctttgctttcctgaccaaagcctctctgcccaagcccatgtcctctcccttggttctggtctcctgcatctcacgtttccactctgccccagcctccaagctcttgaagagctgtgtcacattgagagcttccctgacccagtctcatttccctgtgacagtgacctccagtgtgctgggttgaccaat

SEQ ID NO: 21803 - DNA, 792 bp, Macaca Mulatta
  misc_feature (1)...(792): n = A,T,C or G
gggagtgtggcaaagctttctctcggaagtcccaccttataccacatcaaaggacacatacaggtgagaaaccctacggatgcagtgaatgtaggaaggccttctctcagaaatcacagctggttaatcatcagagaattcatacaggagagaagccttatcaatgcattgaatgtgggaaagctttttcacagaagtcacagctcatcaatcatcagagaactcatacagtaaaaaaatcctagaaatacagttaatagtagtctttgacagatcatcttggacttcagaaaatgcaattatgataacatttttagacagtcacattgtgttatgtgtctgcactccttgagggtgagaactctaaatgagatggtgtatggaaagctgatcttaattcagagtgaacctatgaatgcagtgcatctcaacaacttttcaaaccatagtgaagccttacagagtagaacattcacagcaaagaagaatcgtgtgaatatcaaaaagccttccagaagtcaagtctccaaagctattaaaacatattcccactggagatgagggaaaaccccatgaatgcaagaaaatgaaggcaannnnnnnnnnnnnnnnnnnnnttccattgttacataaggaaaatgccccttaaggaaatgaaagttctattgaaaactactcaaataatggggaaaagttggcaaccaaagttaaacccaaaccctaatttttgggaaatttttgggaaaaaatattccttattttattgggaaagaaaacccttacccaattttt

SEQ ID NO: 21804 - DNA, 366 bp, Macaca Mulatta
ttagagaaccctgatgtgttgacctggataaagtacaaaggtggaagagggaatgagttatgttgttaaaatctcaggctattctgttaatgttcctgctactatgaactcaaaccgtttttcccccccttttgactctgtttatcttcctctcatgtggcataaaagtagctctgtcgttaacttgtacaacattgccatctgctgttgagaattggtaggtactgcttctgagaacctggctgcggatccttagcataggcagcaaaggttgagaaagtctatctgtagtattacatatactaagtcacagaggatgcatccaagtagagaaaataatatgtgggttaagatccatcctgaaac

SEQ ID NO: 21805 - DNA, 2495 bp, Macaca Mulatta
  misc_feature (1)...(2495): n = A,T,C or G
gcgggagctgcttcgggccttctgcgcgtgaacgccttatggctccaggtttgtttttctgcccccgcagcctgagtgggagggctcccggcatttccgcgtcggggtagaggacgtggaggnnnnnnnnnnnnnnnnnnnnnnnnnnnnnnnnnnnnnnnnnnnnnnnnnnnnnnnnnnnnnnnnnnnnnnnnnnnnnnnnnnnnnnnnnnnnnnnnnnnnnnnnnnnnnnnnnnnnnnnnnnnnnnnnnnnnnnnnnnnnnnnnnnnnnnnnnnnnnnnnnnnnnnnnnnnnnnnnnnnnnnnnnnnnnnnnnnnnnnnnnnnnnnnnnnnnnnnnnnnnnnnnnnnnnnnnnnnnnnnnnnnnnnnnnnnnnnnnnnnnnnnnnnnnnnnnnnnnnnnnnnnnnnnnnnnnnnnnnnnnnnnnnnnnnnnnnnnnnnnnnnnnnnnnnnnnnnnnnnnnnnnnnnnnnnnnnnnnnnnnnnnnnnnnnnnnnnnnnnnnnnnnnnnnnnnnnnnnnnnnnnnnnnnnnnnnnnnnnnnnnnnnnnnnnnnnnnnnnnnnnnnnnnnnnnnnnnnnnnnnnnnnnnnnnnnnnnnnnnnnnnnnnnnnnnnnnnnnnnnnnnnnnnnnnnnnnnnnnnnnnnnnnnnnnnnnnnnnnnnnnnnnnnnnnnnnnnnnnnnnnnnnnnnnnnnnnnnnnnnnnnnnnnnnnnnnnnnnnnnnnnnnnnnnnnnnnnnnnnnnnnnnnnnnnnnnnnnnnnnnnnnnnnnnnnnnnnnnnnnnnnnnnnnnnnnnnnnnnnnnnnnnnnnnnnnnnnnnnnnnnnnnnnnnnnnnnnnnnnnnnnnnnnnnnnnnnnnnnnnnnnnnnnnnnnnnnnnnnnnnnnnnnnnnnnnnnnnnnnnnnnnnnnnnnnnnnnnnnnnnnnnnnnnnnnnnnnnnnnnnnnnnnnnnnnnnnnnnnnnnnnnnnnnnnnnnnnnnnnnnnnnnnnnnnnnnnnnnnnnnnnnnnnnnnnnnnnnnnnnnnnnnnnnnnnnnnnnnnnnnnnnnnnnnnnnnnnnnnnnnnnnnnnnnnnnnnnnnnnnnnnnnnnnnnnnnnnnnnnnnnnnnnnnnnnnnnnnnnnnnnnnnnnnnnnnnnnnnnnnnnnnnnnnnnnnnnnnnnnnnnnnnnnnnnnnnnnnnnnnnnnnnnnnnnnnnnnnnnnnnnnnnnnnnnnnnnnnnnnnnnnnnnnnnnnnnnnnnnnnnnnnnnnnnnnnnnnnnnnnnnnnnnnnnnnnnnnnnnnnnnnnnnnnnnnnnnnnnnnnnnnnnnnnnnnnnnnnnnnnnnnnnnnnnnnnnnnnnnnnnnnnnnnnnnnnnnnnnnnnnnnnnnnnnnnnnnnnnnnnnnnnnnnnnnnnnnnnnnnnnnnnnnnnnnnnnnnnnnnnnnnnnnnnnnnnnnnnnnnnnnnnnnnnnnnnnnnnnnnnnnnnnnnnnnnnnnnnnnnnnnnnnnnnnnnnnnnnnnnnnnnnnnnnnnnnnnnnnnnnnnnnnnnnnnnnnnnnnnnnnnnnnnnnnnnnnnnnnnnnnnnnnnnnnnnnnnnnnnnnnnnnnnnnnnnnnnnnnnnnnnnnnnnnnnnnnnnnnnnnnnnnnnnnnnnnnnnnnnatgtattcagtgtggagaatttttctgctactactcaagtttcacagaacatctgagaagacatacaggggagaaacctttcagatgtaatgaatgtgggaaaaccttctatcagaagtcgaccctaattgttccccagagaactcatataagacagaaatcctacgaatgtaatgaatgtggaaaatcattctgtgtgaagtcaaaactcattgcacatcatagcacacacacaggggagaaaccctatgaatgtaatgtttgtggaaaatcattccatattaagtcaaaactaactgtacgtcagagaacacgcttggggtgaaaccctagagttgtagtaagtgagggaaattactctgggtgaagtcagaactttgtagaacagagaacataaagagtgagagaaatctgttaatataatgataatgagaacacccttgccctgaagtcaattcttacagtatagaagaaaacttaaagagggaaaaaacaatgtgaagataatggaatgcaggaaaacattattctggaatttggaccatacattatattataaaactgaaagtggaaaaaattattggtgattgaatataggaaacattttgctcaatgtcacacctcagtaaacatcagagagttcatacagggttaaatgtggctcagcatccctaggttgagaagggacacatttttctgctactccagtttcacagaacatctgaaaagacacacaggagagaaaccttttgggtgtaatgaatgtgggaaagcctttcgtcagaagtcagccctaattgttcaccacagaacgcatataagacagaaaccctatggatataatgaatgtggaaaa

SEQ ID NO: 21806 - DNA, 413 bp, Macaca Mulatta
  misc_feature (1)...(413): n = A,T,C or G
aagaggaacatgagaaatgtccgaaacacaggttttggaattttagtttagtgtatttcctcgaagtcatatttcattctctgatgatttgttttcttattntccggtgtctcctcagacatttcgcattgcaccctcaatgtgcatcactaaaccagaagttgattttgcaacagaagtatttcgttctgccttaacccaacacatggaaagaagagctaagtaacattctcagaaataaaactacaagtctcaagaatttgccacttatgttcaagggtgaatttgaagaatttcagaaccactggtatccagagaacacctgcagctctccataggagctgtagaagacatggttgactgcctaccaaccatatttgttagcagagcccctattatcttgagaactccat

SEQ ID NO: 21807 - DNA, 2902 bp, Macaca Mulatta
  misc_feature (1)...(2902): n = A,T,C or G
tctttagtggatgtgaagtcagaagttcctgtgggcctggagcccatctcacctttagacctaaggacagacctcaggatgatgatgcccgtggtggaccctgttgtccgtgagaagcaattgcagcaggaattacttcttatccagcagcagcaacaaatccagaagcagctcctgatagcagagtttcagaagcagcatgagaacttgacacggcagcaccaggctcagcttcaggagcatatcaaggnaggaacttctagccataaaacagcaacaagaactcctagaaaaggagcagaaactggagcagcagaggcaagaacaggaagtagagaggcatcgcagagaacagcagcttcctcctctcagaggcaaagatagaggacgagaaagngggcagtggcaagtacagaagtaaagcagaagcttcaagaattcctattgagtaaatcagcaacgaaagacactccaactaatggaaaaaatcattccgtgagccgccatcccaagctctggtacacgnggctgcccaccacacatcattggatcaaagctctccacctcttagtggaacgtctccatcctacaagtatacattaccaggagcacaagatgcaaaggatgatttcccccttcgaaaaactgnnnnnnnnnnnnnnnnnnnnnnnnnnnnnnnnnnnnnnnnnnnnnnnnnnnnnnnnnnnnnnnnnnnnnnnnnnnnnnnnnnnnnnnnnnnnnnnnnnnnnnnnnnnnnnnnnnnnnnnnnnnnnnnnncagaatcctcagtcagtagcagttctccaggctctggtcccagttcaccaaacaacgggccaactggaagtgttactgaaaatgagacttcagttttgccccctacgcctcatgcnnnnnnnnnnnnnnnnnnnnnnnnnnnnnnnnnnnnnnnnnnnnnnnnnnnnnnnnnnnnnnnnnnnnnnnnnnnnnnnnnnnnnnnnnnnnnnnnnnnnnnnnnnnnnnnnnnnnnnnnnnnnnnnnnnnnnnnnnnnnnnnnnnnnnnnnnnnnnnnnnnnnnnnnnnnnnnnnnnnnnnnnnnnnnnnnnnnnnnnnnnnnnnnnnnnnnnnnnnnnnnnnnnnnnnnnnnnnnnnnnnnnnnnnnnnnnnnnnnnnnnnnnnnnnnnnnnnnnnnnnnnnnnnnnnnnnnnnnnnnnnnnnnnnnnnnnnnnnnnnnnnnnnnnnnnnnnnnnnnnnnnnnnnnnnnnnnnnnnnnnnnnnnnnnnnnnnnnnnnnnnnnnnnnnnnnnnnnnnnnnnnnnnnnnnnnnnnnnnnnnnnnnnnnnnnnncccctgaaccgaacccagtctgcacctttgcctcagagcactttggctcagctggtcattcaacagcaacaccagcaattcttggagaagcagaaacaataccagcagcaaatccacatgaacaaannnnnnnnnnnnnnnnnnnnnnnnnnnnnnnnnnnnnnnnnnnnnnnnnnnnnnnnnnnnnnnnnnnnnnnnnnnnnnnnnnnnnnnnnnnnnnnnnnnnnnnnnnnnnnnnnnnnnnnnnnnnnnnnnnnnnnnnnnnnnnnnnnnnnnnnnnnnnnnnnnnnnnnnnnnnnnnnnnnnnnnnnnnnnnnnnnnnnnnnnnnnnnnnnnnnnnnnnnnnnnnnnnnnnnnnnnnnnnnnnnnnnnnnnnnnnnnnngcaacagcccttcctggaacccccgcacacacgtgcgctctctgtgcgccaagcgccgctggctgctgttggcatggatggattagagaaacaccgtcttgtctccaggactcactcttcccctgctgcctctgttttacctcacccagcaatggaccgccccctccagcctggctctgcaactggnggaattgcctatgaccccttgatgctgaaacaccagtgcgtttgtggcaattccaccacccaccctggaacatgctggacgaatacagagtatctggtcacgactgcaagaaactgggctgctaaataaatgtgagnagcgaattcaaggtcgaaaagccagcctggaggaaatacagcttgttcattctgaacatcactcactgttgtatggcaccaaccccctggacggacagaagctggaccccaggatactcctaggtnnnnnnnnnnnnnnnnnnnnnnnnnnnnnnnnnnnnnnnnnnnnnnnnnnnnnnnnnnnnnnnnnnnnnnnnnnnnnnnnnnnnnnnnnnnnnnnnnnnnnnnnnnnnnnnnnnnnnnnnnnnnnnnnnnnnnnnnnnnnnnnnnnnnnnnnnnnggggttctgcttttttaattcagttgcaattaccgccaaatacttgagagaccaactaaatataagcaagatattgattgtagatctggnnnnnnnnnnnnnnnnnnnnnnnnnnnnnnnnnnnnnnnnnaggttggaacacgccttggagaacggtacaatatcaatattgcctggagaggcggccttgatcctcccatgggagatgttcactaccttgannnnnncaggaccatcgtgaagcctgtggccaaagagtttgatccagatatggtcttagtatccgctggattcgatgcattggaaggccacacccctcctctaggagggtacaaagtgacagcaaaatgtngttttggtcatttgacgaagcaattgatgacgttggctgatggacgtgtggtgttggctctagaaggaggacatgatctcacagccatctgtgacgcatcagaagcctgtgtaaatgcgcttctaggaaatgagnagctggagccgcttgcagaagatattctccaccaaagcccgaatatgaatgctgttatttctttacagaagatcattgaaattcaaagtatgtctttaaagtt

SEQ ID NO: 21808 - DNA, 979 bp, Macaca Mulatta
  misc_feature (1)...(979): n = A,T,C or G
ggaaggggttctacttgtcttgacaccatacaggtggcttgagaagatgtcctttgaagacccagtatagtttctgtgccctgcagcagcccaagtgctttaaagccgtttcaagctgtatagtttgnnnnncatcccagtggagtgccaaggggataagtgtttcaaggcaaccttttctgcactttgctgagaaaagcaaagggccttctatgaaggacaaaacttgcagaattgggggtgtgggagagcaaaaacatactgtagatcttcaaagagcatctccacaacccacagccttcttcccaatagtggtaactctgcatgtttacagcatagcatgtgtgcagtctttggctattactggtgtattatttgggggagggagggatggggaggnnnnnnnnnnnnnnnnnnnnnnnnnnnnnnnnnnnnnnnnnnnnnnnnnnnnagcatcactttgattaacatttggggcctgataggggaaatggtgaagcaatggaaaagaacagacaactaatgatttgcttctatgtccagaatattttaccttnnnnnnnnnnnnnnnnnnnnntcattggcaccataaataaggactgtgagagactgtttaaaagctgtgaatgtctgaaacctataagccaaggtgttccctgcctaaacttattgctgttcccacaaaggactaagccagttcataagttaccaaagttgccattttggagatggaaattgatgaggagggaggaaagtcttttattggagagtatacagtacaagcagatcattctgtctcagaggtgctaataaaattagaagaccctttcttttccagtaacgaagttataaatatcagcttgttcatccaagccactggctgaggtgttagggaagaggaagagggtggtagaggagataagacagtagggaaagacaagggcccgtgctcttagtggggaaacctcttggagccgtt

SEQ ID NO: 21809 - DNA, 1200 bp, Macaca Mulatta
ggagcctggggcggccggccaggaaccacccgttgaggtgtcttctctttagggatggtgaggttggaaaaaggctcctgtaaccctcctccaggatgaaccatctgccagaagacatggagaacgctctcaccgggagccagagctcccatgcttctctgcgcaacatccattccatcaaccccacacaactcatggccaggattgagtcctatgaaggaagggaaaagaaaggcatatctgatgtcaggaggactttctgtttgtttgtcacctttgacctcttatttgtaacgttactgtggataatagagttaaatgtgaatggaggcattgagaacacattagagaaggaggtgatgcagtatgactactattcttcgtattttgatatatttcttttggcagtttttcgatttaaagtgttaatacttgcatatgctgtgtgcagattgcgccactggtgggcaatagcgttgacaacggcagtgaccagtgcctttttactagcaaaaatgatcctttcaaagcttttctctcaaggggcttttggctatgtgctgcccatcatttctttcatccttgcctggattgagacatggttccctggatttcaaagtgtttcctccaagaagccgaaaaaagaaaacagactcctgatagttcaggatgcttcagaagagggcagcacttatacctggtggtctttctgatggtcagttttattcccctcctgaatctgaagcaggatctgaagaagctgaagaaaaacaggacagcgagaaaccacttttagaactatgagtactacttttgttaaatgtgaaaaaccctcacagaaagtcatcgaggcaaaaagaggccggcaatcgagtctccctgttgacagtaaagttgaaatggtgacgtccactgctggctttattgaacagctaataaagatttatttattgtaatacctcacagacattgtaccatatccatgcacatttagtcacctgcctgtggccggtaaggtaatgtcatgattcatcctctcttcagtgagactgagtctgatgtgttaacgaataggtgaagaaagtcttgtgctggattcctaatcaacagacttcatatattgaaatatcacttttgtagtcagcaagatacctttatatttcagttcacagaatggaaatgaaaagtatcatgtctcag

SEQ ID NO: 21810 - DNA, 288 bp, Macaca Mulatta
  misc_feature (1)...(288): n = A,T,C or G
gctattcacgaaaggcagcagctctagagttcttaaaccgatttgaagaagctaagcgaacctatgaggagggcttaaaacacgaggcaaataaccctcaactgaaagaaggtttacagaatatggaggccaggttggcagncagagagaaaattcatgaaccctttcaacatgcccaatctgtatcagaagttggagagtgatcccaggacaaggacactactcagtgatcctacctaccgagagttgatagagcagctgcgaaacaagccctccgacctgggcacg

SEQ ID NO: 21811 - DNA, 769 bp, Macaca Mulatta
gactttgtcatttttgtctttagaaaagatccgaaggatggtacaaccccggtgctgaaacccagtagagaaacctgtcgcaggacacagatctagggctagcttgaaagagcctgaggactgcctttcactgaattcgaattcagcgttgtcctttcttcttagtatttgctgcgtaattgagagcagctcacaccgatgtcctggtagccttctgcattccctgttgtcttcctgcttctccatcagtagctgcacaacttgcccagattgacacactcttctcacttcactcgccccatctgagaaggagcttgtgttcagttagagtcgtcgaaaaatccctgatccttcaagatcagtcagtcagacagcaacattataattaaaaataagaaattaagactttaaattaaacatttggtagagtcatcataaaacaccagaccacttagactcaggctgaaccatactttttctattcttattttccatccttgttcctcacggctcaatgaatgggctcatatcatgacagaagggatttttaaaagttagtatttaaggaaacttcttaggtggaagatagtaaagttcttattgtcagtgaactttgttagcaccagaaaactcttattgatgcttttaatgcattgcctgccttcaggttttcttcttaccccacccctcaataatgtttggtgaattgtaattctagtaaaacatgtcataccattggttttcctaaattatcagctttctttcatta

SEQ ID NO: 21812 - DNA, 814 bp, Macaca Mulatta
  misc_feature (1)...(814): n = A,T,C or G
gggctctttcccatcttgcaagatggcgggtgaaaaagttgagaagccagatactaaagagaagaaacccgaagccaagaaggctgatgctggtggcaaggtgaaaaagggtaacctcaaggctaagaagcccaagaaggggaggccccattgcagccgcaaccctgtccttgtcagaggaattggcaggtattcccgatctgccatgtattccagaaaggccatgtacaagaggaagtactcagccgctaaatccaggnnnnnnnnnnnnnnnnnnnngaaggttcgtgcaactcttacaagaccagttggtggtgacaagaacggcggtacccggggtgggtgaacttcgcaaaatgcctagatattatcctactgaagatgtgcctcgaaggctgttgaggcacggcagggaaccctgcagtcagcacgtgagaaaagtgcgagcccagcgttaccccgcgggaccggtctggtcgtcctgggggagggcccgggggcaaagaagggggggttgacggaaaccagctggcgcaatggcctgggggaccttgtgaagtggaacctcgtgggcctgcgaggtgaagggccccgtggcagagagaaggacccggaaaattttggcgtttgcggcgccgccaccgaagaatggcggagttcacgcggtcgtcggaggaatgcgcgagaacgatcgcggtagccgcgggccgctcggttgggacgaaaagagaagaganactgtccgccggaaaggccggataagggcaagagaaagaggaggaagagactcggcgcgcacacacgacggagaagc

SEQ ID NO: 21813 - DNA, 1098 bp, Macaca Mulatta
  misc_feature (1)...(1098): n = A,T,C or G
cacccggatcgggcgccttagggactgggttcatctggggctctcgggggctgtgcgagtgctgatctgctccgtttgtgcaatatgcgcctgtgtctggcagagccgctgtgagacgagacaatcctgccccgccgccgggataatcaagagttttggccggacctttgagcatacaccgagagagtgaggagccagacgacaagcacacactatggcgctgaaacggattaataaggaacttagtgatttggcccgtgaccctccagcacaatgttctgcaggtccagttggggatgatatgtttcattggcaagccacaattatgggacctaatgacagcccatatcaaggcggtgtattctttttgacaattcattttcctacagactaccccttcaaaccacctaaggttgcatttacaacaagaatttatcatccaaatattaacagtaatggcagcatttgtctcgatattctaagatcacagtggtcgcctgctttaacaatttctaaagttcttttatccatttgttcactgctatgtgatccaaacccagatgaccccctagtgccagagattgcacggatctataaaacagacagagataagtacaacagaatatctcgggaatggactcagaagtatgccatgtgatgctaccttaaagtcagaataacctgcattatagctggaataaactttaaattactgttccttttttgattttcttatccggctgctcccctgtcagacctcatcttttttaattttatttttggtttacctccctccattcattcacatgctcatctgagaagacttaagttcttccagctttggacaataactgcttttaaaaactgtaaagtaatttccagaaaaacaatttgccccaagaacttccaatnnnnnnnnnnnnnnnnnnnnagcatgttgtatttatgatgggccaatggtgcttcaacttctaaaccttgggttaatgagaaactacagaaccactttcccgccaacggcctcctagacaagggccgngaaaaaaaatcccatccctcnaagaggggggtaaaggggaagatatgggcaatgcgcct

SEQ ID NO: 21814 - DNA, 4154 bp, Macaca Mulatta
  misc_feature (1)...(4154): n = A,T,C or G
ggcgacatcccagagagacgcggtggcggcggcagcgccagccccctcctcccccgggaagtcgaccgggcttgaggccgagccccagacgtcccgcgtagcccggaggcgccgccgatggtgcctggctgtcctgcccccannnnnnnnnnnnnnnnnnnnnnnnnnnnnnnnnnnnnnnnnnnnnnnnnnnnnnnnnnnnnnnnnnnnnnnnnnnnnnnnnnnnnnnnnnnnnnnnnnnnnnnnnnnnnnnnnnnnnnnnnnnnnnnnnnnnnnnnnnnnnnnnnnnnnnnnnnnnnnnnnnnnnnnnnnnnnnnnnnnnnnnnnnnnnnnnnnnnnnnnnnnnnnnnnnnnnnnnnnnnnnnnnnnnnnnnnnnnnnnnnnnnnnnnnnnnnnnnnnnnnnnnnnnnnnnnnnnnnnnnnggcccacagtatggcagcctggagcgggcctggggtgccataatgacggaggcagacaaggtgagcgagctgcaccaggaggtgaagaacaacctgctgaatgaggacctggagaaggtgaagaactggcagaaggacgcctatcacaagcagatcatgggtggcttcaaggagacaaaggaggctgaagatggcttccgcaaggcccagaagccttgggccaagaagatgaannnnnnnnnnnnnnnnnnnnnnnnnnnnnnnnnnnnnnnnnnnnnnnnnnnnnnnnnnnnnnnnnnnnnnnnnnnnnnnnnnnnnnnnnnnnnnnnnnnnnnnnnnnnnnnnnnnnnnnnnnnnnnnnnnnnnnnnnnnnnnnnnnnnnnnnnnnnnnnnnnnnnnnnnnnnnnnnnnnnnnnnnnnnnnnnnnnnnnnnnnnnnnnnnnnnnnnnnnnnnnnnnnnnnnnnnnnnnnnnnnnnnnnnnnnnnnnnnnnnnnnnnnnnnnnnnnnnnnnnnnnnnnnnnnnnnnnnnnnnnnnnnnnnnnnnnnnnnnnnnnnnnnnnnnnnnnnnnnnnnnnnnnnnnnnnnnnnnnnnnnnnnnnnnnnnnnnnnnnnnnnnnnnnnnnnnnnnnnnnnnnnnnnnnnnnnnnnnnnnnnnnnnnnnnnnnnnnnnnnnnnnnnnnnnnnnnnaggagtggaacccagacctccctcacaccaccaccaagaaggagaaacagtccaagaaggcagagggagtggcgctgaccaatgccactggggcagtagagtccacatcccaggctggggaccgaggcannnnnnnnnnnnnnnnnnnnnnnnnnnnnnnnnnnnnnnnnnnnnnnnnnnnnnnnnnnnnnnnnnnnnnnnnnnnnnnnnnnnnnnnnnnnnnnnnnnnnnnnnnnnnnnnnnnnnnnnnnnnnnnnnnnnnnnnnnnnnnnnnnnnnnnnnnnnnnnnnnnnnnnnnnnnnnnnnnnnnnnnnnnnnnnnnnnnnnnnnnnnnnnnnnnnnnnnnnnnnnnnnnnnnnnnnnnnnnnnnnnnnnnnnnnnnnnnnnnnnnnnnnnnnnnnnnnnnnnnnnnnnnnnnnnnnnnnnnnnnnnnnnnnnnnnnnnnnnnnnnnnnnnnnnnnnnnnnnnnnnnnnnnnnnnnnnnnnnnnnnnnnnnnnnnnnnnnnnnnnnnnnnnnnnnnnnnnnnnnnnnnnnnnnnnnnnnnnnnnnnnnnnnnnnnnnnnnnnnnnnnnnnnnnnnnnnnnnnnnnnnnnnnnnnnnnnnnnnnnnnnnnnnnnnnnnnnnnnnnnnnnnnnnccagggtaggtaacaggcttaggacttagcccaacatcacaacatctgctctttaggttccaccaaagagactcctgagccctgagagatgtctcctgacccttccaccctgcctcactccttctgtcccactccactccaggctgccggcacctgccccattccctggcctggtttcctaaccttttcttcctcccctgccctgcttcccttcctccaccaccctgccctcaaaggcctcctctccagaccccagggagggaggcttccccatctttagtcttccactctaccctggggagcatcctctactcctagctgcgtcccttgggcccagtgggactggaggaggaacagtcaccctcctccccgctggaggttcccaggggtcccccagacatgaaagaggggtgagctggaggaagtcatggtgtcactggggtacaggagggtgaatgaagggcatgcaggctctcagcccgggttgtgccagccctcccagccccaggcccatctgagggaccaagaccctgttacccaggcccttctttccagccatcagcactttgagcatcggctcttcagcagatccaaaccccctcagcaacttgcagaggacctgtcccttctcataagtcccctggcctagggtggggacccccaaactgatggcaaagccagcaacagtagcagcctcctcctatttgctggggaggaggtcatcttgtccccctggccccccacgctccctccatgtccatccaaaaaccatacaatcactgggttccacatcagcctccatgaggccaagccttgtacctgcaaagctcttggcctaaccatctctcctcttctctgacctgcctggnnnnnnnnnnnnnnnnnnnnnnnnnnnnnnnnnnnnnnnnnnnnnnnnnnnnnnnnnnnnnnnnnnnnnnnnnnnnnnnnnnnnnnnnnnnnnnnnnnnnnnnnnnnnnnnnnnnnnnnnnnnnnnnnnnnnnnnnnnnnnnnnnnnnnnnnnnnnnnnnnnnnnnnnnnnnnnnnnnnnnnnnnnnnnnnnnnnnnnnnnnnnnnnnnnnnnnnnnnnnnnnnnnnnnnnnnnnnnnnnnnnnnnnnnnnnnnnnnnnnnnnnnnnnnnnnnnnnnnnnnnnnnnnnnnnnnnnnnnnnnnnnnnnnnnnnnnnnnnnnnnnnnnnnnnnnnnnnnnnnnnnnnnnnnnnnnnnnnnnnnnnnnnnnnnnnnnnnnnnnnnnnnnnnnnnnnnnnnnnnnnnnnnnnnnnnnnnnnnnnnnnnnnnnnnnnnnnnnnnnnnnnnnnnnnnnnnnnnnnnnnnnnnnnnnnnnnnnnnnnnnnnnnnnnnnnnnnnnnnnnnnnnnnnnnnnnnnnnnnnnnnnnnnnnnnnnnnnnnnnnnnnnnnnnnnnnnnnnnnnnnnnnnnnnnnnnnnnnnnnnnnnnnnnnnnnnnnnnnnnnnnnnnnnnnnnnnnnnnnnnnnnnnnnnnnnnnnnnnnnnnnnnnnnnnnnnnnnnnnnnnnnnnnnnnnnnnnnnnnnnnnnnnnnnnnnnnnnnnnnnnnnnnnnnnnnnnnnnnnnnnnnnnnnnnnnnnnnnnnnnnnnnnnnnnnnnnnnnnnnnnnnnnnnnnnngcctgcgatgtgtcctgggctcctcagcgcctgaagcaagcttttggaagcctgcagtcctcccagctccagcgcagaagtccagcctttccccaggcaggagctggggtagggggcgtctgtccctcatcacttaccttggaaaggtgggaagctggcgatctgcatcttggggcctgggctccccctctctgtgccagcagcttcccagcacctgcggaggggctgcagccccagctggactccaccctgtccctcttagcactccagctgcccactccaggacagggactcgaaaccccctccatcctgagcagccacctccagggccctgtttgggaccgactcaatcagtccccaggctcctcagggctccagagcaggagggtctcctacnnnnnnnnnnnnnnnnnnnnnnnnnnnnnnnnnnnnnnnnnnnnnnnnnnnnnnnnnnnnnnnnnnnnnnnnnnnnnnnnnnnnnnnnnnnnnnnnnnnnnnnnnnnnnnnnnnnnnnnnnnnnnnnnnnnnnnnnnnnnnnnnnnnnnnnnnnnnnnnnnnnnnnnnnnnnnnnnnnnnnnnnnnnnttaaccaccattcttcggactggttctgtaaggaaccggggctgccccaccacctgccgtctgccgccctaggcttcctgaccccattagttccgacacttgtgaaactctgagaagtgctgtggtctcaacaatgcacctgttttgtacatgattgtgtaatttaaaggtatataaataca

SEQ ID NO: 21815 - DNA, 81 bp, Macaca Mulatta
cttccccagcctggcgcctcgttacagggagtccaacaccgctggcaacgacgttttccacaagttctccgcgttcatcaa

SEQ ID NO: 21816 - DNA, 232 bp, Macaca Mulatta
agaggtgactggcccttctcagatggacacccgaagtggccacctgctgcagccaccagacccagggcttaccagctcctttggccatctggatgaccctggcctggccaggtggacccctggcaaggaggagtccctcaacttatgtcactgtgcagagctcacctgcaggacccaggaggtctgtgccttccctgcgatgccacaggcccccattgacggcaggatcgct

SEQ ID NO: 21817 - DNA, 766 bp, Macaca Mulatta
  misc_feature (1)...(766): n = A,T,C or G
ggacatacagatggtttacttgttagcagatgcccttcaaatatattttccgtttgcagcacaacaccattgcctggaggcttccaaatctagcaaaacaaaatattaaatgacttcacctgcgcagtccttggtttcagtggatggatacctgtgggctcttgtaatgtgtgtggtaatatttggagctttatagcctgtattccttgggagaaaaagatgggaattggagtaaaaaatgtgtcaagacaacccatttctgctttcttatgtagcatctgcaaagccgattcatgtactgatgccagtcagctagagcaatgtaggtttcttaaatttaaattatgactacactttattactacactttcagaaaagaaacatgttgaaaacatggcatacctgcaggagttgaaatgacagtgtggtcagaggatgtgtttgggagaagctagtgtttgctgggcaccgcgctaagtgctttgggagcaagaacttcctaccttccagtttaaacactagtggtattgtcagccgctcacacctgagatggacttagagcaaggttctaagagctctgaaagaagtgctctgttcgatgcagactggcaacatcctccttgataaaagcagaanagcaaagaggtaattgtagttgaatcaagttaatagggaaggttggtagtaaatgctgttagtgtgacatgattctgaaatccagagctcagaactaactgcaaaatgtaccatgaaactaacaatttct

SEQ ID NO: 21818 - DNA, 297 bp, Macaca Mulatta
ttaatgaatgccatgacccttcgatcagtggctgtgatcataactgcacagacaccttaaccagtttctattgttcctgtcgtcctggttacaagcttatgtctgacaagcggacttgtgttgatattgatgaatgcacagagacgccttttgtctgtagccagaagtgtgagaatgtaataggctcctacatctgtaagtgtgccccaggctacctccgagaaccagatggaaagacctgccggcaaaacagtaacatcgaaccctatctcatttttagcaaccgaaactatttga

SEQ ID NO: 21819 - DNA, 787 bp, Macaca Mulatta
  misc_feature (1)...(787): n = A,T,C or G
ggggggggagggatagcattaggagaaatacctaatgtaaatgacaagttgatgggtgcagcaaaccagcatggcacatgtgtacctatgtaacaaacctgcacattgtgcacatgtaccctagaacttaaagtatannnnnnnnnnnnnnnnnnnncctttcacctcccgccatgattctaaggcattcctagccttagaactgtaagtccaatgacacctctttttcttcccagtcttgggtatgtctttaacagcagcatgaaaatgatgcacacacacagaagtatatctttacagtttggctgtaaatttcgtttgcctggccaaaacaaaaagaacacattttattataaggttcacaggctttnnnnnnnnnnnnnnnnnncagttattcaacataagaattccttttcagacaaagttctacaaagtctatttctcacaagtaggactttggcaaggactgtgcaactgacaactcgaagtcatttattccgtggtgagaaaccggagtacagatcttttgggttaccagttaggggatgatccatgtgttttgataatcaccttggtggtgattaggctaaaaggtctcctatgaaaaccactaacttcccccttcataggatgcaccgaaacccttatcactgcatggatgaaggctaagtcaaggcaccgaaaccctttaccctgcctggatgaaggccaagttcagaatttaataacatggggccagaaacctttaaaattctatttccacctccttgaagtatccgggtccaga

SEQ ID NO: 21820 - DNA, 375 bp, Macaca Mulatta
ttattaaatgtaaaagaaaaataagattttttgtgaaaattatggcttatttaagttattaatttaaagagagttaatttgaaactctttcaaaactgttcctttctgttttgttaaaatctcaatctaaacccctgcctgtacctcaaacagttttctactgttggtaaattcctataatataaaaagtgctatacagaactaaagttctccttcctgcctattccattataactccttcagaaaacccctcccagacaagacagttctgctcttttcttggggatttgatgtaagtaaagcgcccagacccaaaaagtagtacctacgaaggatattaataaacagagctttaaaattttttgtagctttaaa

SEQ ID NO: 21821 - DNA, 2121 bp, Macaca Mulatta
  misc_feature (1)...(2121): n = A,T,C or G
agaaattaatgatcctaaggaaatatgtgtgggttcttctgccacatcctaccaaagccagcagaaacagagtggtgataatgggtcaggtggtcactgtgcacacccaagagaagacagagaagatcggggccccagnnnnnnnnnnnnnnnnnnnnnnnnnnnnnnnnnnnnnnnnnnnnnnnnnnnnnnnnnnnnnnnnnnnnnnnnnnnnnnnnnnnnnnnnnnnnnnnnnnnnnnnnnnnnnnnnnnnnnnnnnnnnnnnnnnnnnnnnnnnnnnnnnnnnnnnnnnnnnnnnnnnnagaaaatcgaaaacttggaggcgcaaaccgagttgcgttgcctcttcttgcaagtgaacttgctccataagatcgagaacctggaagctctgcagaaactggatgctcttaacctcagcaacaattacatcaagaccattgaaaacctctncctgcctcccagtcctgaacacactgcagatggcccacaatcacctggagaccgtggaggacattcagcatctacgagagtgtttgacgctttgtgtccttgacctttcacacaacaagctgagtgaccctgagatcctgagcattctggaaagcatgcccgatttgngcgtgtactgaatttgatgggaaacccggttatcagacacattcctaattatagaaagacagtcactgtacgactaaagcacttaacatacctggatgatagaccagtgtttccaaaggacagnnnnnnnnnnnnnnnnnnnnnnnnnnnnnnnnnnnnnnnnnnnnnnnnnnnnnnnnnnnnnnnnnnnnnnnnnnnnnnnnnnnnnnnnnnnnnnnnnnnnnnnnnnnnnnnnnnnnnnnnnnnnnnnnnnnnnnnnnnnnnnnnnnnnnnnnnnnnnnnnnnnnnnnnnnnnnngacatcttcagacgatggcgagaacgtgcctgccagtgaggaaggcaaggaggagcctcccggggacagagaaacaaggcagaagatggagctatttgttaaggaaagctttgaggccaaggatgagctctgcccagaaaagccaagtggaggagaggagctgcctgtggaggttaaaagagaggatggagatcgagagccagagggaaccctcccagctgagaccccactactgtcgccacctgtggaggttaaaggagaggacggagatcaagagccagaggggaccctcccagttgaggccccactactgtcgccgcctgtggaggttaaaggagaggaccgagatcaagagccagaggggaccctcccagttgaggccccactactgtcgccgcctgtggaggttaaaggagaggaccgagatcaagagccagaggggaccctcccagttgaggtcccactactgtcgccgcctgtggaggttaaaggagaggaccgagatcaagagccagaggggaccctcccagttgaggccccaccaccgccgcccctcggagctgccggggaagnnnnnnnnnnnnnnnnnnnnnnnnnnnnnnnnnngactccccaggctgtggccgctgagggtggattcgttacaggacctgatgggatgagaatggaagatttagaaaccgttagactggagacaaaggagacattctgcatcgatgnnnnnnnnnnnnnnnnnnnnnnnnnnnnnnnnnnnnnnnnnnnnnnnnnnnnnnnnnnnnnnnnnnnnnnnnnnnnnnnnnnnnnnnnnnnnnnnnnnnnnnnnnnnnnnnnnnnnnnnnnnnnnnnnnnnnnnnnnnnnnnnnnnnnnnnnnnnnnnnnnnnnnnnnnnnnnnnnnnnnnnnnnnnnnnnnnnnnnnnnnnnnnnnnnnnnnnnnnnnnnnnnnnnnnnnnnnnnnnnnnnnnnnnnnnnnnnnnnnnnnnnnnnnnnnnnnnnnnnnnnnnnnnnnnnnnnnnnnnnnnnnnnnnnnnnnnnnnnnnnnnnnnnnnnnnnnnnnnnnnnnnnnnnnnnnnnnnnnnnnnnnnnnnnnnnnnnnnnnnnnnnnnnnnnnnnnnnnnnnnnnnnnnnnnnnnnnnnnnnnnnncagtgccgactgagagcgccaccacaccctcagagacgtgtgtcggagtgcccagcccagc

SEQ ID NO: 21822 - DNA, 521 bp, Macaca Mulatta
agtcaatgacttattatttaaataatctttttttctttggactgctgttaataggtggctacagtttcagaaaagtcacgtataatggagttggagaaagacctagcattgagagtacaggaagtagctgagctccgaagaaggctagagtccaataagcctgctggggatgtggacatgtcactttcccttttgcaagagataagctctttgcaagaaaagttagaagtcacccgtactgaccaccagagagaaataacttctctgaaggagcattttggagcccgggaagaaactcatcagaaggagataaaagctctgtatactgccacggaaaagctttccaaagagaacgagtcattgaaaagcaagctggagcatgccaacaaagagaactcagatgtgatagctctatggaagtccaaactggagactgccattgcgtcccaccagcaggcgatggaagaactgaaggtatctttcagcaaagggcttgggacagagacggcgagaatttgctg

SEQ ID NO: 21823 - DNA, 208 bp, Macaca Mulatta
ttccagtttggcaccaactggcccgtgtacatgaccaagccggatggtacctatgttgtcatgacggtccaggagctgctgccctcctcctttgggcctgaggacctgcagaagacccagtgacagccagagaacgcccaccgcctgtgacagccacctggagaacttcataaagatgtctcacagccctggggacacctgcccagtg

SEQ ID NO: 21824 - DNA, 347 bp, Macaca Mulatta
tgtaggagaaatgttataacatcatcccacctggctttctccattaacatctgctcatctctgccctcagggagccatggagctggttgaacaataccagacagtacgcggagagccttgcattgtgttcaccacctcgctcgtttttattcaaaatgattccagaaaatcagtgtgaccatctggtcttggagaaacttcactgaggtcccaaatgtcttcagtacccagatgaatccttataactctattgaaaatacatttaaaaagtagttattgatcatgtactgtgatcctggtcccaagccccgcgctgtcatttccctccttcaaggagttaacggttt

SEQ ID NO: 21825 - DNA, 1184 bp, Macaca Mulatta
  misc_feature (1)...(1184): n = A,T,C or G
actggcggccgaggtagaggcagtggcgcttgagttggtcgggggcagcggcannnnnnnnnnnnnnnnnnnnnnnnnnnnnnnnnnnnnnnnnnnnnnnnnnnnnnnnnnnnnnnnnnnnnnnnnnnnnnnnnnnnnnnnnnnnnnnnnnnnnnnnnnnnnnnnnnnnnnnnnnnnnnnnnnnnnnnnnnnnnnnnnnnnnnnnnnnnnnnnnnnnnnnnnnnnnnnnnnnnnnnnnnnnnnnnnnnnnnnnnnnnnnnnnnnnnnnnnnnnnnnnnnnnnnnnnnnnnnnnnnnnnnnnnnnnnnnnnnnnnnnnnnnnnnnnnnnnnnnnnnnnnnnnnnnnnnnnnnnnnnnnnnnnnnnnnnnnnnnnnnnnnnnnnnnnnnnnnnnnnnnnnnnnctggaaagaaagcggttaaagcagttctgtgggtctcagcagatggactcagagttgtggatgaaaaaactaaggnnggacctcatagttgaccagacgatagagaaagtttctttctgtgccccagataggaactttgatagagccttttcttacatatgtcgtgatggcaccactcgtcgctggatctgtcactgcttcatggctgtcaaggacacagnnnnnnnnnnnnnnnnnnnnnnnnnnnnnnnnnnnncagcctgtttagagcgcaagcagaagcgggagaaggaatgtggagtgactgctacttttgatgctagtcgaaccacttttacaagagaaggatcattccgtgtcacaacagccactgaacaagcagaaagagaggagatcatgaaacaaatgcaagatgccaataaaggtnnnnnnnnnnnnnnnnnnnnnnnnnnnnnnnnnnnnnnnnnnnnnnnnnnnnnnnnnnnnnnnnnnnnnnnnnnnnnnnnnnnnnnnnnnnnnnnnnnnnnnnnnnnnnnnnnnnnnnnnnnnnnnnnnnnnnnnnnnnnnnnnnnnnnnnnnnnnnnnnnnnnnnnnnaatggcttcaaaaatatgtactccattctagtaagctacctgaggaatcagagtgcggtgnaagaagctgcagagacatctcttacccgcttccttccatcctgagatacctttttaattcggatgcatctgatctctatgagaagcaaatgaagcaagtacctgcatcttaaagaaagcagcacagg

SEQ ID NO: 21826 - DNA, 230 bp, Macaca Mulatta
  misc_feature (1)...(230): n = A,T,C or G
atcatagtcctccagtccagatgtgtcatcagatgtttgcctggaaactgagtgacattacctttanccagagttccaggggagcagagctagaaagggaatcaaggtgagattgtccttagagaagtagatttgctagacctttactcatatagtcatatcactatttcttgtcaatatgatgattgaggtaattatacgaagttatcgcaggtctaaatgccaaatat

SEQ ID NO: 21827 - DNA, 273 bp, Macaca Mulatta
  misc_feature (1)...(273): n = A,T,C or G
tcctgaagcacctacagggaaaactggagcaggaggctttcgtgctggtgtcctcggggcagacggaggtgctggagcagttgaaggngccctgcagatggacatcaccagcctgtacaacctcaagttccagccgcccgccctgggcccggaacctgcctcccagacccccgagggcagcccggtacacggctccgggccttccaaggacagctttggggagctgagccgggccaccatccggctgctggaggaactggaccgggaacggtg

SEQ ID NO: 21828 - DNA, 544 bp, Macaca Mulatta
gggtggggccccctgacccaggcagtgcagcacagcccaagaccctgcagcccctagcagcagtgagccgccctctgccttcaggaccccgcactgataatgggctgaggagatgcagacccttcccaccacgtgtggggacacattctgagtgggggtcccagtggccactgtggctggccatgtgtcctgagtggcaagggacactaggaggctcccggaagggacattgggaggatgagtgctgagtgacagagccaccaacctgtgacaggtgctgccccagctttgttccgttctcctgtgtgggcaggtgtggggggtggtctagctgagtccatcccacctgcttcctcacgtgagccccctctgccccagtgaggtgttctgccgggatggaaaggtgcttcgggagggggagagactgaccctgccgcggctggctgacacctacgagacgctggccatcgagggtgcccaggccttctacaatggcagcctcacggcccagattgtgaaggacatccaggcagccggtgagtgg

SEQ ID NO: 21829 - DNA, 239 bp, Macaca Mulatta
aggtttgccgagaatttcagcgtggaaattgtacccgtggggagaatgattgccgctatgctcaccctactgatgcttccatgattgaagcgagtgataatactgtgacaatctgcatggattacatcaaaggtcgatgctcgcgggagaaatgcaagtactttcatcctcctgcacacttgcaagccaaactcaaggcagctcatcatcagatgaaccattcagctgcctctgccatg

SEQ ID NO: 21830 - DNA, 1730 bp, Macaca Mulatta
  misc_feature (1)...(1730): n = A,T,C or G
ncaggaagagctggagaagaaaaggctggagcagcagctgctcatcctgcggaacaaggagaagagcaaagagagnnnnnnnnnnnnnnnnnnnnnnnnnnnnnnnnnnnnnnnnnnnnnnnnnnnnnnnnnnnnnnnnnnnnnnnnnnnnnnnnnnnnnnnnnnnnnnnnnnnnnnnnnnnnnnnnnnnnnnnnnnnnnnnnnnnnnnnnnnnnnnnnnnnnnnnnnnnnnnnnnnnnnnnnnnnnnnnnnnnnnnnnnnnnnnnnnnnnnnnnnnnnnnnnnnnnnnnnnnnnnnnnnnnnnnnnnnnnnnnnnnnnnnnnnnnnnnnnnnnnnnnnnnnnnnnnnnnnnnnnnnnnnnnnnnnnnnnnnnnnnnnnnnnnnnnnnnnnnnnnnnnnnnnnnnnnnnnnnnnnnnnnnnnnnnnnnnnnnnnnnnnnnnnnnnnnnnnnnnnnnnnnnnnnnnnnnnnnnnnnnnnnnnnnnnnnnnnnnnnnnnnnnnnnnnnnnnnnnnnnnnnnnnnnnnnnnnnnnnnnnnnnnnnnnnnnnnnnnnnnnnnnnnnnnnnnnnnnnnnnnnnnnnnnnnnnnnnnnnnnnnnnnnnnnnnnnnnnnnnnnnnnnnnnnnnnnnnnnnnnnnnnnnnnnnnnnnnnnnnnnnnnnnnnnnnnnnnnnnnnnnnnnnnnnnnnnnnnnnnnnnnnnnnnnnnnnnnnnnnnnnnnnnnnnnnnnnnnnnnnnnnnnnnnnnnnnnnnnnnnnnnnnnnnnnnnnnnnnnnnnnnnnnnnnnnnnnnnnnnnnnnnnnnnnnnnnnnnnnnnnnnnnnnnnnnnnnnnnnnnnnnnnnnnnnnnnnnnnnnnnnnnnnnnnnnnnnnnnnnnnnnnnnnnnnnnnnnnnnnnnnnnnnnnnnnnnnnnnnnnnnnnnnnnnnnnnnnnnnnnnnnnnnnnnnnnnnnnnnnnnnnnnnnnnnnnnnnnnnnnnnnnnnnnnnnnnnnnnnnnnnnnnnnnnnnnnnnnnnnnnnnnnnnnnnnnnnnnnnnnnnnnnnnnnnnnnnnnnnnnnnnnnnnnnnnnnnnnnnnnnnnnnnnnnnnnnnnnnnnnnnnnnnnnnnnnnnnnnnnnnnnnnnnnnnnnnnnnnnnnnnnnnnnnnnnnnnnnnnnnnnnnnnnnnnnnnnnnnnnnnnnnnnnnnnnnnnnnnnnnnnnnnnnnnnnnnnnnnnnnnnnnnnnnnnnnnnnnnnnnnnnnnnnnnnnnnnnnnnnnnnnnnnnnnnnnnnnnnnnnnnnnnnnnnnnnnnnnnnnnnnnnnnnnnnnnnnnnnnnnnnnnnnnnnnnnnnnnnnnnnnnnnnnnnnnnnnnnnnnnnnnnnnnnnnnnnnnnnnnnnnnnnnnnnnnnnnnnnnnnnnnnnnnnnnnnnnnnnnnnnnnnnnnnnnnnnnnnnnnnnnnnnnnnnnnnnnnnnnnnnnnnnnnnnnnnnnnnnnnnnnnnnnnnnnnnnnnnnnnnnnnnnnnnnnnnnnnnnnnnnnnnnnnnnnnnnnnnnnnnnnnnnnnnnnnnnnnnnnnnnnnnnnnnnnnnnnnnnnnnnnnnnnnnnnnnnnnnnnncaggtgtggtctacgacacgttcatgctgaagcaccagtgcatgtgcgggaacacacacgtgcaccctgagcatgctggccggatccagagcatctggtcccggctgcaggagacaggcctgcttagcaagtgcga

SEQ ID NO: 21831 - DNA, 1294 bp, Macaca Mulatta
  misc_feature (1)...(1294): n = A,T,C or G
gggagttggtctgttactcggtggtggtggactctacggaagccgttttcgcttcacttttactggctctagagcgctttccccctggcgggtgggagtgcagggacgaaggtgcgagatgagcactatgttcgcagacactctcctcatcgtttttatctctgtgtgcacggctttgctcgcagaaggcataacctgggtcctggtttacagaacagacaagtacaagagactgaaggcagaagtggaaaaacagagtnnnnnnnnnnnnnnnnnnnnnnnnnnaataacagagtcagctggtcgacaacagaaaaagaaaatagagagacaagaagagaaactgaagaataacaacagagatctatcaatggttcgaatgaaatccatgtttgcgattggcttttgttttactgccctaatgggaatgttcaattctatatttgatggtagagtggtggcaaagcttccttttacccctctttcttacatccaaggactgtctcatcgaaatctgctgggagatgataccacagactgttccttcattttcctgtatattctctgtactatgtcaattcgacagaacattcagaagattctcggccttgccccttcacgagccgccaccaagcaggcaggtggatttcttggcccaccacctccttctgggaagttctcctgaactcaagcagaactctttagtttctatcattctttctagacacacgcacatcagactggcaaatgtttttcagcaagagccacaggtagccttactacttgggccctctttctagtttcgaattaatttctaggccttttgggtatgaattagagtgaaaatgggccacccagccaaaccttgatagtggccttttgggtcctagatgatttttatcaaataagtggattgattagttaagttcaggtgatatttatgtaatgaaaagcaaatagcatccttcttgtttcatttacataagtattttctgtgggaccgactctcaaggccctgtgtatgccctgcgagttgctctctaagcgcatttagagatttagaagaaaaatttagtttgtataacccttaattgtaactgtttgttttgttgttgttttatttcaagccaaatatatgacataagatcaataaagaggccaaatttttagctattttatgtacaaggagagatctgtttcattttgttttgccatatttctagatgtaagttttagcatgggccaggaaggactaaaataaagtttttaannnnnnnnnnnnnnnnnnnnnnnc

SEQ ID NO: 21832 - DNA, 528 bp, Macaca Mulatta
atatgacacattattcacagaccatgattttgtcatttacatataatttccttaacaatgaacatgtaacttctctcacaagagtactctttactttgtaatcatatacaatgtcaactttttagatgtttcaccactcttttgcaaataaagcatcttttctgctctgttgcatgcctactctaatttcttttgcccatatatgagtatctccagaatgtctacaaatagtttttgtagcaaatgaaacatttcttcaaataagcctttcgtttcaaataaaacttgtctcaaaacatgcttttaccctgttgcctgtaggatctcaatttgcaagactgcatatgaccatgtttagcatgcttggaaaaagggtttatatttccaaagatctgttgtatgcacttttattatagaattctattatccaaatttccagacctcaacaatttagtgattccaacattttcttttactacctaaattatgacatcgaaacatgactaataaagagaaaatctagtctca

SEQ ID NO: 21833 - DNA, 774 bp, Macaca Mulatta
atgataatcctcctgggaaatagcctcctcattatcatcaccatcttggattctcgcctccatactcccatgtattcctttcttggaaacctctcattcttggacatctgttacacatcctcatccattcctccaatgcttattatatttatgtctgagagaaaatccatctccttcattggctgtgctctgcagatggttgtgtcccttggcttgggctccactgagtgtgtcctcctggctgtgatggcctatgaccactatgtggccatctgcaacccactgaggtactccatcatcatgaacggagtgctgtatgtgcaaatggctgcatggtcctggatcataggctgtctgacctccctattgcacacagttctgacaatgatgttgcctttctgtgggaataatgtcattgatcatattacctgtgaaattttggcccttctaaaacttgtttgttcaatatcaccatcaatgtgcttatcatgacagtgacgaatattgtttcactggtgattcttctactgctaattttcatctcctatgtgtttattctctcttccatcctgagaattaattgtgctgagggaagaaagaaagccttctctacctgttcagcgcactcgattgcggccatcttattctacggttcagccctttttatgtgcgtgaaaccccagtcaaagaacactaatacatctgatgagattattgggctgtcttatgaagcggtaagcccaatgttaaatcccatcatttatagcctcagga

SEQ ID NO: 21834 - DNA, 836 bp, Macaca Mulatta
tcatgtgcaaaacctaaaactataattaatgaaatcatagttcaggagaattatgcttatttgtgatttttttatgacttgttaatcacacgtcagtaagagttgctcatttagccttgattctgccgagttaccagtgaagagcaacaaccccactgctttctctcccactgaaggaaacgctagaattcaagcgggtgtgagttataccaaaaaggacaattttaactacacttctgtcttggaaaatacttgattagtgtgttcctttactacataactgctactctaatggaatcagaagtatttcttaataaggctctactttcctatatatattatttagaataacatgattgattcaagaaaataaaattgccctcctcctccctccaggtattcatctatatcattgtctcacctctctgtggtggatttacatggccaagctgtgtgaagaaataagaaaaagttatcattaaccaaggatatgagagaacaaggagttaaaagcaatccatgtgactcaagcctttcacatactgacagatggtatctgccagtctcttcaaccctcttctcactttttaaaatcttgttccatgcctccaggtttacctttgtcttatcaaccagtttattcccgtgaacttcagattgaaccattcattgcagcagtagccttaaaatggcttttgtttatttctttggtttgtttactagtgtcatctatttagagcaacatttttgtttttaattgcacaaagctgtcgccactagtcttatgagctatctactaaaactgtggagaaattttgtatgtgcacacagaagta

SEQ ID NO: 21835 - DNA, 447 bp, Macaca Mulatta
tgtatccaaagaggtaatcagctttaactttcagaattcgtgaatcttggtttggtggcatgaatgaaagcttatgtaaccccaccagtaactcatttggggtgcccttgaaatattaaagtttggtcctcaataaatatgtcctgtggtgattaatcagttagcgcttagtagtcagcaattggagacaggtgagataattatcaggcgtagatgagagctagcgataagaactatggctgtggtggttgttgcgctgggaaataggaacagtcctggcctttgttttcaaagtcaagatttagattggacagaactgagaaaggggtcaaacagggtcataagaggtgagtaacctgtacacagagctgtttgattggctgtttcaccatgtccatcacctttgtcctatagcttgcctagctacaagaaaacttaccgtaaagc

SEQ ID NO: 21836 - DNA, 348 bp, Macaca Mulatta
cacgttcgaaactgattaaaatactcgtcggtcccccagcggatagtgagttggaacagtgccaagttgcagcggttatcagtttgaatttgtccgggcagcgcccacccttcctgtctgcatcctgattagttgctgtatccaggaagtccacggccggtttgggtgcgccaaaggaattcaaaccccgcctttatttggcctgccttaacaaactcagtaaactgtcagtttgtgtttctcattctttagtattttatcgctttcgggaaggagattgatttcttctcagttttcattggatacagcgattttttaaaaaagggaccctttatggcaacataatca

SEQ ID NO: 21837 - DNA, 5066 bp, Macaca Mulatta
  misc_feature (1)...(5066): n = A,T,C or G
tgccacagccagggcggctggaactctctccttctctccctccatccttccacttcccctggtcggccccgccgtcaggccgggttccccttccctgccgtcatcaggttccccttctcccttcttggcactttcctttcgaaccatccttctggacaaactttgatggagaatttcacaccactctggaaaaatgccggttatgaaaggatacggcgccgcaaaacaccttcctgnnnnnnnnnnnnnnnnnnnnnnnnnnnnnnnnnnnnnnnnnnnnnnnnnnnnnnnnnnnnnnnnnnnnnnnnnnnnnnnnnnnnnnnnnnnnnnnnnnnnnnnnnnnnnnnnnnnnnnnnnnnnnnnnnnnnnnnnnnnnnnnnnnnnnnnnnnnnnnnnnnnnnnnnnnnnnnnnnnnnnnnnnnnnnnnnnnnnnnnnnnnnnnnnnnnnnnnnnnnnnnnnnnnnnnnnnnnnnnnnnnnnnnnnnnnnnnnnnnnnnnnnnnnnnnnnnnnnnnnnnnnnnnnnnnnnnnnnnnnnnnnnnnnnnnnnnnnnnnnnnnnnnnnnnnnnnnnnnnnnnnnnnnnnnnnnnnnnnnnnnnnnnnnnnnnnnnnnnnnnnnnnnnnnnnnnnnnnnnnnnnnnnnnnnnnnnnnnnnnnnnnnnnnnnnnnnnnnnnnnnnnnnnnnnnnnnnnnnnnnnnnnnnnnnnnnnnnnnnnnnnnnnnnnnnnnnnnnnnnnnnnnnnnnnnnnnnnnnnnnnnnnnnnnnnnnnnnnnnnnnnnnnnnnnnnnnnnnnnnnnnnnnnnnnnnnnnnnnnnnnnnnnnnnnnnnnnnnnnnnnnnnnnnnnnnnnnnnnnnnnnnnnnnnnnnnnnnnnnnnnnnnnnnnnnnnnnnnnnnnnnnnnnnnnnnnnnnnnnnnnnnnnnnnnnnnnnnnnnnnnnnnnnnnnnnnnnnnnnnnnnnnnnnnnnnnnnnnnnnnnnnnnnnnnnnnnnnnnnnnnnnnnnnnnnnnnnnnnnnnnnnnnnnnnnnnnnnnnnnnnnnnnnnnnnnnnnnnnnnnnnnnnnnnnnnnnnnnnnnnnnnnnnnnnnnnnnnnnnnnnnnnnnnnnnnnnnnnnnnnnnnnnnnnnnnnnnnnnnnnnnnnnnnnnnnnnnnnnnnnnnnnnnnnnnnnnnnnnnnnnnnnnnnnnnnnnnnnnnnnnnnnnnnnnnnnnnnnnnnnnnnnnnnnnnnnnnnnnnnnnnnnnnnnnnnnnnnnnnnnnnnnnnnnnnnnnnnnnnnnnnnnnnnnnnnnnnnnnnnnnnnnnnnnnnnnnnnnnnnnnnnnnnnnnnnnnnnnnnnnnnnnnnnnnnnnnnnnnnnnnnnnnnnnnnnnnnnnnnnnnnnnnnnnnnnnnnnnnnnnnnnnnnnnnnnnnnnnnnnnnnnnnnnnnnnnnnnnnnnnnnnnnnnnnnnnnnnnnnnnnnnnnnnnnnnnnnnnnnnnnnnnnnnnnnnnnnnnnnnnnnnnnnnnnnnnnnnnnnnnnnnnnnnnnnnnnnnnnnnnnnnnnnnnnnnnnnnnnnnnnnnnnnnnngccttgatgcacgcccttggtgttgggaaacgtgacagcaatcatacagaggatgtactccagatggtccctctatcacactagaactaaggatctgaaagattttatccgtgtccatcacctgccccaacaactcaagcagaggatgctcgaatattttcaaacaacctggtcagtcaacaatggaatagattcaaatgagnnnnnnnnnnnnnnnnnnnnnnnnnnnnnnnnnnnnnnnnnnnnnnnnnnnnnnnnnnnnnnnnnnnnnnnnnnnnnnnnnnnnnnnnnnnnnnnnnnnnnnnnnnnnnnnnnnnnnnnnnnnnnnnnnnnnnnnnnnnnnnnnnnnnnnnnnnnnnnnnnnnnnnnnnnnnnnnnnnnnnnnnnnnnnnnnnnnnnnnnnnnnnnnnnnnnnnnnnnnnnnnnnnnnnnnnnnnnnnnnnnnnnnnnnnnnnnnnnnnnnnnnnnnnnnnnnnnnnnnnnnnnnnnnnnnnnnnnnnnnnnnnnnnnnnnnnnnnnnnnnnnnnnnnnnnnnnnnnnnnnnnnnnnnnnnnnnnnnnnnnnnnnnnnnnnnnnnnnnnnnnnnnnnnnnnnnnnnnnnnnnnnnnnnnnnnnnnnnnnnnnnnnnnnnnnnnnnnnnnnnnnnnnnnnnnnnnnnnnnnnnnnnnnnnnnnnnnnnnnnnnnnnnnnnnnnnnnnnnnnnnnnnnnnnnnnnnnnnnnnnnnnnnnnnnnnnnnnnnnnnnnnnnnnnnnnnnnnnnnnnnnnnnnnnnnnnnnnnnnnnnnnnnnnnnnnnnnnnnnnnnnctctctcccatctgcacaaggggatcttcttcacgcaacaagaaggtggaaagcagtaaaacctacctgggcttaagcgtaaagcaactggcctcgggaacggtgccctttcactcacctatcagagtctgcaggtcaaattcccccaaaaccaagcaggaaattgacccccccaaccataataaaaggaaagagaagaacttgaaattgcaactttcaactttgaataatgctggacccccagacctcagtccaaggnnnnnnnnnnnnnnnnnnnnnnnnnnnnnnnnnnnnnnnnnnnnnnnnnnnnnnnnnnnnnnnnnnnnnnnnnnnnnnnnnnnnnnnnnnnnnnnnnnnnnnnnagatccagagattggagctgctgttctcttcatcaaagcagaggagaccaagcagcagataaacaaactcaacagtgaggtannnnnnnnnnnnnnnnnnnnnnnnnnnnnnnnnnnnnnnnnnnnnnnnnnnnnnnnnnnnnnnnnnnnnnnnnnnnnnnnnnnnnnnnnnnnnnnnnnnnnnnnnnnnnnnnnnnnnnnnnnnnnnnnnnnnnnnnnnnnnnnnnnnnnnnnnnnnnnnnnnnnnnnnnnnnnnnnnnnnnnnnnnnnnnnnnnnnnnnnnnnnnnnnnnnnnnnnnnnnnnnnnnnnnnnnnnnnnnnnnnnnnnnnnnnnnnnnnnnnnnnnnnnnnnnnnnnnnnnnnnnnnnnnnnnnnnnnnnnnnnnnnnnnnnnnnnnnnnnnnnnnnnnnnnnnnnnnnnnnnnnnnnnnnnnnnnnnnnnnnnnnnnnnnnnnnnnnnnnnnnnnnnnnnnnnnnnnnnnnnnnnnnnnnnnnnnnnnnnnnnnnnnnnnnnnnnnnnnnnnnnnnnnnnnnnnnnnnnnnnnnnnnnnnnnnnnnnnnnnnnnnnnnnnnnnnnnnnnnnnnnnnnnnnnnnnnnnnnnnnnnnnnnnnnnnnnnnnnnnnnnnnnnnnnnnnnnnnnnnnnnnnnnnnnnnnnnnnnnnnnnnnnnnnnnnnnnnnnnnnnnnnnnnnnnnnnnnnnnnnnnnnnnnnnnnnnnnnnnnnnnnnnnnnnnnnnnnnnnnnnnnnnnnnnnnnnnnnnnnnnnnnnnnnnnnnnnnnnnnnnnnnnnnnnnnnnnnnnnnnnnnnnnnnnnnnnnnnnnnnnnnnnnnnnnnnnnnnnnnnnnnnnnnnnnnnnnnnnnnnnnnnnnnnnnnnnnnnnnnnnnnnnnnnnnnnnnnnnnnnnnnnnnnnnnnnnnnnnnnnnnnnnnnnnnnnnnnnnnnnnnnnnnnnnnnnnnnnnnnnnnnnnnnnnnnnnnnnnnnnnnnnnnnnnnnnnnnnnnnnnnnnnnnnnnnnnnnnnnnnnnnnnnnnnnnnnnnnnnnnnnnnnnnnnnnnnnnnnnnnnnnnnnnnnnnnnnnnnnnnnnnnnnnnnnnnnnnnnnnnnnnnnnnnnnnnnnnnnnnnnnnnnnnnnnnnnnnnnnnnnnnnnnnnnnnnnnnnnnnnnnnnnnnnnnnnnnnnnnnnnnnnnnnnnnnnnnnnnnnnnnnnnnnnnnnnnnnnnnnnnnnnnnnnnnnnnnnnnnnnnnnnnnnnnnnnnnnnnnnnnnnnnnnnnnnnnnnnnnnnnnnnnnnnnnnnnnnnnnnnnnnnnnnnnnnnnnnnnnnnnnnnnnnnnnnnnnnnnnnnnnnnnnnnnnnnnnnnnnnnnnnnnnnnnnnnnnnnnnnnnnnnnnnnnnnnnnnnnnnnnnnnnnnnnnnnnnnnnnnnnnnnnnnnnnnnnnnnnnnnnnnnnnnnnnnnnnnnnnnnnnnnnnnnnnnnnnnnnnnnnnnnnnnnnnnnnnnnnnnnnnnnnnnnnnnnnnnnnnnnnnnnnnnnnnnnnnttccaaaagaatcccccatttttctctgcatgtagttgcaaacaaatgtattctcatgcttctggattataaaagaaaagtgaagtcatattttgttgatgaaataaaaacatggactgagtgtcaactacatgagctttggcatggggtagacaggctccatctaggctctgccgactcatgtcaatgacctgattcaaggtcgttgtgccagcagaaatgtctgtcctctaggcatcatattttgtggctcaagaattcaaaatgggtctgtggacatagggcaattttggactcaaagtgagggagaaaacctgggtgtgtcctttcccagtgcttttcttttacaagaggtagtagaccagtggaaatccccaaatggagccaagacttctgagctgtaacttgtgggagtaataccagcttgcagtgggtcagcactttaccttttttctttaaggctccacaacgctatgcagtgcagttgttttcattcctatttttcatcaatctcaggggaagccccagagattacacagtcaggaatgctaacacagtctagaatccgtaatgttccctacatctctcactaacaggcaaattcagatgctgggattggcaatgatttaagcaccttcacttaagttttatgttatgttttagaacagttatggtgtaattgtcttggacattttgggaagacatattgggttcacattctggagttctctattttccaccacaaagaataaacaatctgagaattgtatcattaaaagtatctaaacacaccaaga

SEQ ID NO: 21838 - DNA, 858 bp, Macaca Mulatta
  misc_feature (1)...(858): n = A,T,C or G
aggttcaggcagaggtgaagaagatgtggagtcggtggaatctctctgtggactggaaaaggaccccgccatgtggcagccgcagatgcggctcagtgctcaccaccgtgacgcacagcaccagcagccagtcacaggtggcggccagcacacgcatggtgcttatctctggcaaagctgccaagattgccagcagacagcctgacagccacatcaccttacccggctacgtctggagtaactcagagctggactgcctgccacactctttccatgaggagaccaaggaaggtagtgggaggcagggagatgatcttctaatggagaagtcttccaggcctatggaatttaacccagacactaaaggatgccaaggggaaactgaggatgttctctgaatggacatttgtggctgactttcatgggctggtccaatggctnnnnnnnnnnnnnggcttggctgatattcctatgcttgaactcaaaggctgaaaattcagagttaaggtgtaacttaaagtttttaggctccatgaatcggctcctgtaaatacgaaagacatgaaaaggcaagtgtcaacggagtagtttattaccttctcttggcatcaagttttccactaaattaatgtatggtattttctctgtgattgttcatgttttttctgctacttttgggtagaaaaaagtttcaattgcttggtggtagctttctctcgtatatatcaccctaaatataatgaagatcatttagtgtgtatcagtttccttttaggaactagtattctcttatttcttactttaatgtacttctatcattgcatttattttgcctgtgcataggggcaattaggatct

SEQ ID NO: 21839 - DNA, 228 bp, Macaca Mulatta
  misc_feature (1)...(228): n = A,T,C or G
ggggagatcttggtgcagatgtctgacacccagcggcacctgaactctgacctggaggtggtggtnnngtgcagacattccatggagacctgctgcagcacatggagaagaacaccaagctggacatgcagttcatcaaagngacagccgccagcactatgagctcgagtaccgccaccgagcggccaacctggagaagtgcatgtctgagctgtggcgcatggagcg

SEQ ID NO: 21840 - DNA, 201 bp, Macaca Mulatta
tcctaaaactgtggaatgaatcacttagacatgtgaccctgcagcagtttgcttctgttgtccactgattatcagcctatgtgcctgacactggtcttgcagtacaactggacgccaaaacaaggtggaggatgtccggaatgaagatgttttcacctcactgtataacagagacagccaataaatctacaatttgatttc

SEQ ID NO: 21841 - DNA, 809 bp, Macaca Mulatta
ggggcactgctcagtcccgctctgtggggttggcacggttgcagactattcggtccctttggttctcttagtcccgagcgctcgcccactgcagcttcctttcccgtgcagatatggcctctggcaccaccaccaccgccgtgaagattggaataattggtggaacaggcctggatgatccagaaattttagaaggaagaactgaaaaatatgtggatactccatttggcaagccatctgatgccttaattttggggaagataaaaaatgttgattgcgtccttcttgcaaggcatggaaggcagcacaccatcatgccttcaaaggtcaactaccaggcgaacatctgggctttgaaggaagagggctgtacacatgtcatagtgaccacagcctgtggctccttgagggaggagattcagcccggtgatattgtcattattgatcaattcattgacaggaccactatgagacctcagtccttctatgatggaagtcattcttgtgccagaggagtgtgccatattccaatggctgagccgttttgccccaaaacgagagaggttcttatagagactgctaagaagctaggactccggtgccactccaaggggacaatggtcacaatcgagggacctcgttttagctcccgggcagaaagcttcatgttccgcacctggggggcggatgtaatcaacatgaccacagttccagaggtggttcttgctaaggacgctggaatctgttacgcaagtatcgacatggcggacggattatgactgctggaacgagcatgaagaagcagctcg

SEQ ID NO: 21842 - DNA, 629 bp, Macaca Mulatta
agtgaaatggtgaaaaatcagacaacggtcacagagttcctcctgctgggatttctcctggacccaaggattcagatgctcctctttgggctcttctccctgttttatgtcttcaccctactggggaatgggactatcctggggctcatctcactggactccagactccacacccccatgtacttcttcctctcacacctggctgtcatcaacatcacctatgcctgcaacacggtgcctcagatgctggtgaacctcctgcatccagccaagcccatctcttttgctggctgcatgatgcagacctttctgtttttgagttttggacatagcgaatgtctcctgctggtggtgatgtcctacgatcgttatgtggccatttgccaccctctccaatataccgtcatcatgacctggagagtctgcatcaccctggccatcacttcttggacatgtggctccctcctggctctggtccatgtggttctcatcctaagactgcccttctgtgggcctcatgaaatcaaccacttcttttgtgaaatcctgtctgtcctcaggctggcctgtgctgacacctggctcaaccaagtggtcatctttgcagcctgtgtgttcatcctggtggg

SEQ ID NO: 21843 - DNA, 529 bp, Macaca Mulatta
  misc_feature (1)...(529): n = A,T,C or G
gagaaggcagtgagcgagcaggcggcaggcacggtccgtgcggagcaggcaagcgagcgggaagacgcagctaccttcctcaccagccagcccacagcagtttgttccctttctcgggagtgcgccaatgcctgggccgacccaaaccctgtnnnnnnnnnnnnnnnnnnnnnnnnnnnnnnnnnnnnnnnnnnnnnnnnnnnnnnnnnnnnnnnnnnnnnnnnnnnnnnnnnnnnnnnnnnnnnngttggggaatggcagtcaatgtgtattctacctcgataacccaagagactatgagcagacatgacatcattgcatgggttaatgacatagtatctttaaactacacaaaagtggaacagctttgttcaggncaggagcggcctattgccagttcatggacatgctcttccctggctgcattagtttgaagaaagtaaaatttcaagcaaagctggaacatgagtatattcacaattttaaacttctgcaagcatcatttaagcgaatgaacgttgataaggta

SEQ ID NO: 21844 - DNA, 260 bp, Macaca Mulatta
  misc_feature (1)...(260): n = A,T,C or G
agatctggaagaaatatggaggtgagcctcgtgagacgggttcttaacctgccccaaaggttttgggagaacgacaacagccaaaagtgtctgcaggacgctgagtgatttatgtcaaggatccttgcattcaccatgtgccaatgacttattttactccatgacctgccagcaccaagaaatccagaatcccgatcaaaaannnnnaggagactggtattccagaaaatggatgatgcagaattgaaacaagaaaaata

SEQ ID NO: 21845 - DNA, 874 bp, Macaca Mulatta
gggggacccccagccagagagaccaccaaacagagcccccaaaagacagacacctctgccagctggacagccgggtggacccctaagttagacagatgtaaacagatctccagctgaacagatacacagacttctcagaccctacccctatcccccaggtgggctggctggctgaaaagaccgtctggccagacagactcctaagcaaccagatggactgccagacagacagacatcagccacatggaggtcctgacatcccggccagccggccggacgctcagcttgatgggtgaaccgcagttggttggtcagaacgggatcctgcagattgggggagaggatccgcccggaggagggcatagtctccagctagtcggacggagtggagccccggggaaagtgagggccctaaggggaaaccccgaagcaaaaaggaacggccgaaaggcgaaaatggacgccggtgagtgcgtggacgaaagggcctccgcgaagcaagcctgggggacctgagaagagatgagggagagcgtgagcgcgtgggaggacgtatgggaaaaacgggagggagggccaacggggtgggggcggaagctcacatacaggaggcgcgcaggaagagggagaggcgagaaacgcagggagagcggcaggaaagaccgaggaggagcagccgaaggagggcaaggcgggggcggaaaacggagaaaaggagagggcggcgcgggagaaaagcgtgaaagaagggagtcagcacgagggcgcccaagaaagacgggaggtgaggcaggagcgaaggacagacaggaggcacggagcgaacggagaccaagcaagaggagaagagaagggagggaaaaagaaggacaga

SEQ ID NO: 21846 - DNA, 187 bp, Macaca Mulatta
atggagcctacccagcctgcagaggacctcatcctgacccagctgccccctgcctcagaacttggggaccctgaagacccgggagaggaggccgcagatggctcagacactgtggtcctcagtctcttcccctgcacccccgagcctgtgaatcccgaaccggatgccagtgtttcctcgccacagg

SEQ ID NO: 21847 - DNA, 2544 bp, Macaca Mulatta
  misc_feature (1)...(2544): n = A,T,C or G
aatctgcggcagtgtaggaagtggaaaaacctctctcatttcagccattttaggccannnnnnnnnnnnnnnnnnnnnnnnnnnnnnnnnnnnnnnnnnnnnnnnnnnnnnnnnnnnnnnnnnnnnnnnnnnnnnnnnnnnnnnnnnnnnnnnnnnnnnnnnnnnnnnnnnnnnnnnnnnnnnnnnnnnnnnnnnnnnnnnnnnnnnnnnnnnnnnnnnnnnnnnnnnnnnnnnnnnnnnnnnnnnnnnnnnnnnnnnnnnnnnnnnnnnnnnnnnnnnnnnnnnnnnnnnnnnnnnnnnnnnnnnnnnnnnnnnnnnnnnnnnnnnnnnnnnnnnnnnnnnnnnnnnnnnnnnnnnnnnnnnnnnnnnnnnnnnnnnnnnnnnnnnnnnnnnnnnnnnnnnnnnnnnnnnnnnnnnnnnnnnnnnnnnnnnnnnnnnnnnnnnnnnnnnnnnnnnnnnnnnnnnnnnnnnnnnnnnnnnnnnnnnnnnnnnnnnnnnnnnnnnnnnnnnnnnnnnnnnnnnnnnnnnnnnnnnnnnnnnnnnnnnnnnnnnnnnnnnnnnnnnnnnnnnnnnnnnnnnnnnnnnnnnnnnnnnnnnnnnnnnnnnnnnnnnnnnnnnnnnnnnnnnnnnnnnnnnnnnnnnnnnnnnnnnnnnnnnnnnnnnnnnnnnnnnnnnnnnnnnnnnnnnnnnnnnnnnnnnnnnnnnnnnnnnnnnnnnnnnnnnnnnnnnnnnnnnnnnnnnnnnnnnnnnnnnnnnnnnnnnnnnnnnnnnnnnnnnnnnnnnnnnnnnnnnnnnnnnnnnnnnnnnnnnnnnnnnnnnnnnnnnnnnnnnnnnnnnnnnnnnnnnnnnnnnnnnnnnnnnnnnnnnnnnnnnnnnnnnnnnnnnnnnnnnnnnnnnnnnnnnnnnnnnnnnnnnnnnnnnnnnnnnnnnnnnnnnnnnnnnnnnnnnnnnnnnnnnnnnnnnnnnnnnnnnnnnnnnnnnnnnnnnnnnnnnnnnnnnnnnnnnnnnnnnnnnnnnnnnnnnnnnnnnnnnnnnnnnnnnnnnnnnnnnnnnnnnnnnnnnnnnnnnnnnnnnnnnnnnnnnnnnnnnnnnnnnnnnnnnnnnnnnnnnnnnnnnnnnnnnnnnnnnnnnnnnnnnnnnnnnnnnnnnnnnnnnnnnnnnnnnnnnnnnnnnnnnnnnnnnnnnnnnnnnnnnnnnnnnnnnnnnnnnnnnnnnnnnnnnnnnnnnnnnnnnnnnnnnnnnnnnnnnnnnnnnnnnnnnnnnnnnnnnnnnnnnnnnnnnnnnnnnnnnnnnnnnnnnnnnnnnnnnnnnnnnnnnnnnnnnnnnnnnnnnnnnnnnnnnnnnnnnnnnnnnnnnnnnnnnnnnnnnnnnnnnnnnnnnnnnnnnnnnnnnnnnnnnnnnnnnnnnnnnnnnnnnnnnnnnnnnnnnnnnnnnnnnnnnnnnnnnnnnnnnnnnnnnnnnnnnnnnnnnnnnnnnnnnnnnnnnnnnnnnnnnnnnnnnnnnnnnnnnnnnnnnnnnnnnnnnnnnnnnnnnnnnnnnnnnnnnnnnnnnnnnnnnnnnnnnnnnnnnnnnnnnnnnnnnnnnnnnnnnnnnnnnnnnnnnnnnnnnnnnnnnnnnnnnnnnnnnnnnnnnnnnnnnnnnnnnagttaacggggctgttccagtttacggtcagactggcatccgagacagaagctcgattcacctcggtggagaggatcaatcactacattaagnnnnnnnnnnnnnnnnnnnnnnnnnnnnnnnnnnnnnnnnnnnnnnnnnnnnnnnnnnnnnnnnnnnnnnnnnnnnnnnnnnnnnnnnnnnnnnnnnnnnnnnnnnnnnnnnnnnnnnnnnnnnnnnnnnnnnnnnnnnnnnnnnnnnnnnnnnnnnnnnnnnnnnnnnnnnnnnnnnnnnnnnnnnnnnnnnnnnnnnnnnnnnnnnnnnnnnnnnnnnnnnnnnnnnnnnnnnnnnnnnnnnnnnnnnnnnnnnnnnnnnnnnnnnnnnnnnnnnnnnnnnnnnnnnnnnnnnnnnnnnnnnnnnnnnnnnnnnnnnnnnnnnnnnnnnnnnnnnnnnnnnnnnnnnnnnnnnnnnnnnnnnnnnnnnnnnnnnnnnnnnnnnnnnnnnnnnnnnnnnnnnnnnnnnnnnnnnnnnnnnnnnnnnnnnnnnnnnnnnnnnnnnnnnnnnnnnnnnnnnnnnnnnnnnnnnnnnnnnnnnnnnnnnnnnnnnnnnnnnnnnnnnnnnnnnnnnnnnnnnnnnnnnnnnnnnnnnnnnnnnnnnnnnnnnnnnnnnnnnnnnnnnnnnnnnnnnnnnnnnnnnnnnnnnnnnnnnnnnnnnnnnnnnnnnnnnnnnnnnnnnnnnnnnnnnnnnnnnnnnnnnnnnnnnnnnnnnnnnnnnnnnnnnnnnnnnnnnnnnnnnnnnnnnnnnnnnnnnnnnnnnnnnnnnnnnnnagtttgacaccccatcggtccttctgtcctatgacagttcccgattctatgccatgtttgctgctgcagacattaggtcgctgtcaagggctga

SEQ ID NO: 21848 - DNA, 2051 bp, Macaca Mulatta
  misc_feature (1)...(2051): n = A,T,C or G
tgacttcaccagtactggtggacatacgagaagacgtgacctgccctatctgcctggagctcctaacagaacccctgagcatagactgtggccacagcttctgccaagcctgcatcacaccgaatagcagggaatcaatgattggtcaagaaggggaaagaagctgccctgtgtgccagaccagctaccagccagggaacctgcggcctaatcggcatctggccaacatagtgaggcggctcagagaggtggtgttgggccctgggaagcagctgaaagcagttctttgtgcagaccatggagaaaaactgcagctcttctgtcaggagcatgggaaggtcatttgctggctttgtgagcggtctcaggagcaccgtggtcaccacacgttcctcgtggaggaggttgcccaggagtaccaggnnnnnnnnnnnnnnnnnnnnnnnnnnnnnnnnnnnnnnnnnnnnnnnnnnnnnnnnnnnnnnnnnnnnnnnnnnnnnnnnnnnnnnnnnnnnnnnnnnnnnnnnnnnnnnnnnnnnnnnatggagcccgagagacacaggatccagacagagtttaatcagctgcgaaacatcctagacagagtggagcagcgagagctgaaaaagctggaagaggaagagaagaaggggctacgaattatagaagaggctgagaatgatctggtccaccagaaccagtcactgcgagagctcatcttggatctggagcgtcgatgtcaggggtcaacaatggagctgcttcagnnnnnnnnnnnnnnnnnnnnnnnnnnnnnnnnnnnnnnnnnnnnnnnnnnnnnnnnnnnnnnnnnnnnnnnnnnnnnnnnnnnnnnnnnnnnnnnnnnnnnnnnnnnnnnnnnnnnnnnnnnnnnnnnnnnnnnnnnnnnnnnnnnnnnnnnnnnnngacgtgaccctgaatccacacacagctaatttaaatcttgtcctggctaaaaaccggagacaggtgaggtttgtgggagctaaagtatctggaccttcccgtctggaaaagcattatgactgtagtgtcctgggctcccagcacttctcctccggaaagcattactgtgaggtagatgtggccaagaagactgcctggatcctgagggtatgcagcaattcagtgggacctacattctctttcaaacggtatgctcaaaatcacaatgcnnnnnnnnnnnnnnnnnnnnnnnnnnnnnnnnnnnnnnnnnnnnnnnnnnnnnnnnnnnnnnnnnnnnnnnnnnnnnnnnnnnnnnnnnnnnnnnnnnnnnnnnnnnnnnnnnnnnnnnnnnnnnnnnnnnnnnnnnnattatgagtctggcaccgtttccttttataatgtcacaaaccatggcttccccatctacactttctctaaatattactttcccactactctttgtccatattttaatccttgcaactgtgtaattcctatgaccctgcgtcgtccaagctcttgaatagtcttctgttcccacccacttctgataagtaccctgaggcttatcagcatgtgattctcccttctgannnnnnnnnnnnnnnnnnnnnnnnnnnnnnnnnnnnnnnnnnnnnnnnnnnnnnnnnnnnnnnnnnnnnnnnnttgagatggaatctcgctctgttgcccaggctggagtgcagtggcgcaatctcagctcactgcaacgtctgcctcctgggttcaagcgaacctcctgcctcagcatcccaagtagctgggattacaggctcccaccaccatgcccaactaatttttgtatttttgtagagatagggtttcaccgtgttggccaggctgatctcgaactcctgaccacaagtgatccacccacctcgatctcccaaagtgctgggattacagatgtgagccactgcacccagccaattctttcgttttaaacatttactcagtactaggatgcacccagtggtgaaagtaggcatctttgtctgatgacaggtcttgacgtggatagggggcgctttcattattttgccgttaagcatagtatttgatgcagg

SEQ ID NO: 21849 - DNA, 816 bp, Macaca Mulatta
  misc_feature (1)...(816): n = A,T,C or G
gtgggtgtgtacactggcactgagctgcagtaggatttttccttggatagtctggtctggagctgggacagcagctgctgctgtggaaaggccagctggcaagatgatggaagaaatctccattatggtagcctatgacgcccatgttttcagccagctgcacgatgaagacttcctcactagtctggtggccatcagcaagcccaggtctatggtannnnnnnnnnnnnnnnnnnnnnnnnnnnnnnnnnnnnnnnnnnnnnnnnnnnnnnnnnnnnnnnnnnnnnnnnnnnnnnnnnnnnnnnagtttgtatatttgtaggtaactccagcctgttgcatttatactgggaatcttcataagaagctgagagaaagagaggggaaaaagaaagtggctttctactttnnnnnnnnnnnnnnnnnnnnnnnggcaaagtactgttttatctgtgcatggtcatatccacaaagacttttagcaggtgaactgttccaagactgacacaaggatgtttcaaacttgctctatctgtagcaaatgttaaaaataccaactcacttggaaggaaaaataaaaatcacaaagnnnnnnnnnnnnnnnnnnnnnnnnnnnnnnnnnnnnnnnnnnnnnnnnnnnnnnnnnnnnnnnnnnnnnnnnnnnnnnnnnnnnnnnnnnnnnnnnnnnnnnnnnnnncaggcagaagacaaggcagatgtgttgaataaggaactcctcttaaccaaacagaggctggtggagactgaagaggagaagaggaagcaagaggaagagactgcccaggtaaaaggaat

SEQ ID NO: 21850 - DNA, 666 bp, Macaca Mulatta
  misc_feature (1)...(666): n = A,T,C or G
acatggttcagtggcctggtggccgaatcctgcatcgccatgagctagacaccttccttgcacaggcagtgtctacccagctttatgaaccagatcgactccaagaactcaagnagattgagaaactggatgcccgagggatccagcttgctgccctcttcatgagtggagtcgacacagctctgtttgctaatgatgcctgtggccagccagtcccttgggagcattgctgtccatggatttactttgatggcaagctgttccagagcaagctaattaaagcaggccgagagcgagtatctctggttgagctctgtgatggccagnnnnnnnnnnnnnnnnnnnnnnnnnnnnnnnnnnnnnnnnnnnnnnnnnnnnnnnnnnnnnnnnnnnnnnnnnnnnnnnnnnnnnnnnnnnnnnnnnnnnnnnnnnnnnnnnnnnnnnnnnnnnnnnnnnnnnnnnnnnnnnnnnnnnnnnnnnnnnnnnnnnnnnnnnnnnnnnnnnnnnnnnnnnnnnnnnnnnnnaggtctccatccaatcccaccccaaggaggaaaactggagattgctggaatggttgtgggccagtgggctggcagcagatcctccaggggccgaggatccttcggcatgcaagtggtttctgtcggtgggccaggaaagggg

SEQ ID NO: 21851 - DNA, 492 bp, Macaca Mulatta
  misc_feature (1)...(492): n = A,T,C or G
cagaaccaggaaatatgttcctctggaatggaccccaatagcgatgacaactccagaaatttatttgtgaaggatttaccgnnnnnnnnnnnnnnnnnnnnnnnnnnnnnnnnnnnnnnnnnnnnnnnnnnnnnnnnagatcagatacctactattcctcaagaaacactgggatttgattttggttcaggtgaagctaagtccactgataatgtcttacctagaactgtatctgtccgtcgcagtttaaagaaacattgtaacagtgtatgtcagtttgatagcttggatgattttgaaaccagtcatttggcggggaagtcttttgaattcgaaagagttggatttttagacccactagtaaacatgcctgaaaatgtacaatacaatgtttgtcaatggagcaaggaccaagctaacttatcactttcaaagctgattcatccagaaacgtttactaaaacaaaagaagacattttagaatctaaatct

SEQ ID NO: 21852 - DNA, 1274 bp, Macaca Mulatta
  misc_feature (1)...(1274): n = A,T,C or G
ttaagaactcacaggtacttttccagccacccagatacgagagatcattaaaacagnnnnnnnnnnnnnnnnnnnnnnnnnnnnnnnnnnnnnnnnnnnnnnnnnnnnnnnnnnnnnnnnnnnnnnnnnnnnnnnnnnnnnnnnnnnnnnnnnnnnnnnnnnnnnnnnnnnnnnnnnnnnnnnnnnnnnnnnnnnnnnnnnnnnnnnnnnnnnnnnnnnnnnnnnnnnnnnnnnnnnnnnnnnnnnnnnnnnnnnnnnnnnnnnnnnnnnnnnnnnnnnnnnnnnnnnnnnnnnnnnnnnnnnnnnnnnnnnnnnnnnnnnnnnnnnnnnnnnnnnnnnnnnnnnnnnnnnnnnnnnnnnnnnnnnnnnnnnnnnnnnnnnnnnnnnnnnnnnnnnnnnnnnnnnnnnnnnnnnnnnnnnnnnnnnnnnnnnnnnnnnnnnnnnnnnnnnnnnnnnnnnnnnnnnnnnnnnnnnnnnnnnnnnnnnnnnnnnnnnnnnnnnnnnnnnnnnnnnnnnnnnnnnnnnnnnnnnnnnnnnnnnnnnnnnnnnnnnnnnnnnnnnnnnnnnnnnnnnnnnnnnnnnnnnnnnnnnnttattttcaaaggtaaatttgttaatggcacctctcatgtcttcactgaatgtggcctgaccctaaactcaagtgctgaactctgtgaatatctggataacagagaccaagaagccttctattgtgtgaagcctcaacacatgccctgtgaggctctgacccacatgaccacccggaatagagagatatcttatcttacagacaaggaaaagagccttttccacaggtnnnaggtccaaagtgggagttgaaatgatgaaggatcagaaacacattgatgtcgctaattgtaacnnnnnnnnnnnnnnnnnnnnnnnnnnnnnnnnnnnnnnnnnnnnnnnnnnnnnnnnnnnnnnnnnnnnnnnnnnnnnnnnnaacaacattttgcaacccggttcagttagacacaattaagataaacggctgtttgaaaggcaaactcatttacctcctgggagattctacgctacgtcagtggatctactacttacccaaagttgtaaaaancactaaagttttttgatcttcatgaaactggaatttttaagaaacatttgcttctggatgcagaaagacacactcagattcaatggaaaaaacataactatcccttcgtcactttgcagctctactctctgatagatcatgattatatccctcgggaaattgaccggctatcagg

SEQ ID NO: 21853 - DNA, 649 bp, Macaca Mulatta
  misc_feature (1)...(649): n = A,T,C or G
cgcgcggcgctggggcgcgcgctgcgagcatgcgtgccagtgccagcatggcacgtgccacccgcggagcggcgcgtgccgctgtgagcccggctggtggggcgcgcagtgcgccagcgcgtgctactgcagcgccacgtcgcgctgcgacccacagaccggcgcctgcctgtgccacgcaggctggtggggccgcagctgcaacaaccagtgcgcctgcaactcgtctccctgcgagcagcagagcggccgctgtcagtgccgcgagcgtacgttcggcgcgcgctgcgatcgctactgccagtgcttccgcggccgctgccaccctgtggacggcacgtgtgcctgcgagccgggctaccgcggcaagtactgtcgcgagccgtgccccgccggcttctacggcttgggctgtcgccgccggtnggtgtggccagtgtaagggccagcagccgtgcacggtagccgagggccgctgcttgacgtgcgagcccggctggaacggaaccaagtgcgaccagccttgcgccaccggtttctatggcgagggctgcagccaccgctgtccgccgtgccgcgacgggcatgcctgtaaccatgtcaccggcaagtgtacgcgctgcaacgcgggctggatcggcgaccggtg

SEQ ID NO: 21854 - DNA, 1624 bp, Macaca Mulatta
  misc_feature (1)...(1624): n = A,T,C or G
aggctgggaagcggcgccatattggcgtcggccgcgctgtattgtcataaatagagccggttttgtggtgttttcactactcggttggatgcctgagacatagtaagtgggannnnnnnnnnnnnnnnnnnnnnnnnnnnnnnnnnnnnnnnnnnnnnnnnnnnnnnnnnnnnnnnnnnnnnnnnnnnnnnnnnnnnnnnnnnnnnnnnnnnnnnnnnnnnnnnnnnnnnnnnnnnnnnnnnnnnnnnnnnnnnnnnnnnnnnnnnnnnnnnnnnnnnnnnnnnnnnnnnnnnnnnnnnnnnnnnnnnnnnnnnnnnnnnnnnnnnnnnnnnnnnnnnnnnnnnnnnnnnnnnnnnnnnnnnnnnnnnnnnnnnnnnnnnnnnnnnnnnnnnnnnnnnnnnnnnnnnnnnnnnnnnnnnnnnnnnnnnnnnnnnnnnnnnnnnnnnnnnnnnnnnnnnnnnnnnnnnnnnnnnnnagaacctcccaccttctgttgtggctactgttggtggtaaaattttcacatttggatcctataggcttggagtacacaccaaagnnnnnnnnnnnnnnnnnnnnnnnnnnnnnnnnnnnnnnnnnnnnnnnnnnnnnnnnnnnnnnnnnnnnnngaaaaattgaaacatcaagatggcattagaaacttaagannnnnnnnnnnnnnnnnnnnnnnnnnnnnnnnnnnnnnnnnnnnnnnnnnnnnnnnnnnnnnnnnnnnnnnnnnnnnnnnnnnnnnnnnnnnnnnnnnnnnnnnnnnnnnnnnnnnnnnnnnnnnnnnnnnnnnnnnnnnnnnnnnnnnnnnnnnnnnnnnnnnnnnnnnnnnnnnnnnnnnnnnnnnnnnnnnnnnnnnnnnnnnnnnnnnnnnnnnnnnnnnnnnnnnnnnnnnnnnnnnnnnnnnnnnnnnnnnnnnnnnnnnnnnnnnnnnnnnnnnnnnnnnnnnnnnnnnnnnnnnnnnnnnnnnnnnnnnnnnnnnnnnnnnnnnnnnnnnnnnnnnnnnnnnnnnnnnnnnnnnnnnnnnnnnnnnnnnnnnnnnnnnnnnnnnnnnnnnnnnnnnnnnnnnnnnnnnnnnnnnnnnnnnnnnnnnnnnnnnnnnnnnnnnnnnnnnnnnnnnnnnnnnnnnnnnnnnnnnnnnnnnnnnnnnnnnnnnnnnnnnnnnnnnnnnnnnnnnnnnnnnnnnnnnnnnnnnnnnnnnnnnnnnnnnnnnnnnnnnnnnnnnnnnnnnnnnnnnnnnnnnnnnnnnnnnnnnnnnnnnnnnnnnnnnnnnnnnnnnnnnnnnnnnnnnnnnnnnnnnnnnnnnnnnnnnnnnnnnnnnnnnnnnnnnnnnnnnnnnnnnnnnnnnnnnnnnnnnnnnnnnnnnnnnnnnnnnnnnnnnnnnnnnnnnnnnnnnnnnnnnnnnnnnnnnnnnnnnnnnnnnnnnnnnnnnnnnnnnnnnnnnnnnnnnnnnnnnnnnnnnnnnnnnnnnnnnnnnnnnnnnnnnnnnnnnnnnnnnnnnnnnnncaacaattacgtatcaatgtggttccttgggataatttttcggagagtagaaaatgcagaaagtgtcaacatagacttgacatatgatatacagtcatttactgataca

SEQ ID NO: 21855 - DNA, 504 bp, Macaca Mulatta
  misc_feature (1)...(504): n = A,T,C or G
agacctggagaccgttacgacggcatggtnggttggtttcagtgctgatgaaacttgggactctgcaatagatacatggagcccatcggaatggcagatggcttatgaaccacaggnnnnnnnnnnnnnnnnnnnnnnnnnnnnnnnnnnnnnnnnnnnnnnnnnnnnnnnnnnnnnnnnnnnnnnnnnnnnnnnnnnnnnnnnnnnnnnnnnnnnnnnnnnnnnnnnnnnnnnnnnnnnnnnnnnnnnnnnnnnnnnnnnnnnnnnnnnnnnnnnnnnnnnnnnnnnnnnnnnnnnnnnnnnnnnnnnnnnnnnnnnnnnnnnnnnnnnnnnnnnnnnnnnnnnnnnnnnnnnnnnnnnnnnnnnnnnnnnnnnnnnnnnnagtgtgaagcagtatgcagatgttgaaggattctaatgcaagatnnnnnnnnnnnnnatagtgtgaagcagtattctggaaagtttttctaagactagtgaagaactgaaggagtcctgcat

SEQ ID NO: 21856 - DNA, 689 bp, Macaca Mulatta
gctgtccctagcacaggccagggtgtcttgggactcgaatccctgggttgggccggccggcagcggggctttcggaggaagcgggtggttttccccgtcatccatatctccccagtatgggaatggcggtcgcgcactctgggggtggcgtcgttctctttccctgcttgggggtggcttttttcagcggagaaagaggatcccgagacgccccgggcattcgtagccggccgggctacacttgggctaggatcagtgttcaacgggttcagaaatcaccgtgtccttggcatcacctccctccccacctcctctcccaccacacagcaggagacacagtgactggaaggttttcaaggaggactgcattgcccctattgaaacaaactgtccgacaaaccctttctcggacgtgtgacagagagacggtcatgatgtgacatatgagtagacatgcgtttaatgggcgctgtgattgctgcattcgtgcgcaatgaatggtccaggccatttgtgtccagtagccgcacaagctgcagggtctcatgtttggagaaggagggcctctccgccgtccaccttgctggagtacaggcgaccctgggcggtaaccctctgcgccatcagaaatgtggtgctctgagtagccacagatttccatctgcatctccgataccatttccctctac

SEQ ID NO: 21857 - DNA, 473 bp, Macaca Mulatta
agactttgagggacatttcattaaatataattactgattctttagaggttactcatttatggtgcaattgcttctgtttgctaatgctgctttgcaaataaaacttgctgccgaccacccacgggcataaaatcaagtgcatttcagcattgcctaaagagctctgacaccacttttcatgttaagatcttcatttagctcctttactgggatttattggatgctgtcaaaaaataaatttacactggatatgccaagggtttggacctcagataaatgcattttgtggaattgatttcttgaaaccaccctactgtctgcaaaccttcctccatagccatatctagagtgatctctcgctgtgctaagagcaagcctccttcgcatttcttccactgccatcagcaggtaactgtgctgactgctgccaagatgcactgtagtgagtggcatagagaatgaggacagagacc

SEQ ID NO: 21858 - DNA, 756 bp, Macaca Mulatta
  misc_feature (1)...(756): n = A,T,C or G
tggtggccgcgctgcacctgtgcatcgctctgggctacgccaattttagcctcaaccccgtgctctacgccttccttgacgagaacttcaagcgctgcttccgccagctctgccgcaagccctgtggccgcccggaccccagcagcttcagccgcgcccgcgaagccacggcccgcgagcgggtcactgcctgcaccccgtccgacggtcccggcggtggcgccgccgcctgaccaggcggtccggcccccagcacgctcctccctagtgaccctgcggccacatgagtcccagtgggaggcgcgagccatgatgtggaatggggcagtagaaggtcggaggcttgggatcgccagatggggcctctgttttggagacgaggccgggccgcgagatgggcatggggtgggcctctggtttggggcgaggcagagggcagatcaatagcacggggcctctgggctgggtgccccgtccacggctctaggtggggcgggaaagccagtgactccaggggaggagctggacctgtggctctggaactgagtccctaaacaggggatctccagggaggcggggcttcatccttgagacagcctcggtttctagcctggagccggactgttggagttgggcgtccggacccaggacccaggaagggcagtggtggggacagttgcttgaaaactgagctgncagactgggtctctctgtagtagggaggagcctcctgtgaggggagaccagagacaggac

SEQ ID NO: 21859 - DNA, 433 bp, Macaca Mulatta
ttgttttaagttttcaaatatcttgagaaatagtagactgtatgttgaaaattgtactgaaataaagtagaaaattgttacgtaccatatttgtaactatcaacttttaaaaaaaacttttaacgtttttgttacatgcattgtaattctgctttgtctataagatacggtcaagtacagctctgtgaaagttctgattctcttccttccctgtttgtcaatgttttattctgaagtaaacgttagctctacatataaatcctggaacagaaattgtttatagagattacactaattattttaactgtatacatctgtttaatttgaacacactacattgtatggtgactaatttttgaagtataccacagacaaaaggttgttactttggtaaactaagctagtttaacacttgagcaaatgcttaagaagg

SEQ ID NO: 21860 - DNA, 833 bp, Macaca Mulatta
ggggcctttcccttcggcgcgccactgaagatcctggtgtcgccatgggccgccgccccgcccgttgttaccggtattgtaagaacaagccgtacccaaagtctcgcttctgccgaggtgtccctgatgccaagattcgcatctttgacctggggcggaagaaggcaaaagtggatgagtttccgctctgtggccacatggtgtcagatgaatatgagcagctgtcctctgaagccctggaggctgcccgaatttgtgccaataagtacatggtaaaaagttgtggcaaggatggcttccatatccgggtgcggctccaccccttccacgtcatccgcatcaacaagatgttgtcctgtgctggggccgacaggctccaaacgggcatgcgaggtgcttttggaaagccccagggcactgtggccagggttcacattggccaagttatcatgtccatccgcaccaagctgcagaacaaggagcatgtgattgaggccctgcgcagggccaagttcaagtttcctggccgccagaagatccacatctcaaagaagtggggcttcaccaaattcaatgctgatgaatttgaagacatggtggctgaaaagcggctccatcccaagattggctgtgggggtcaaggtacattcccccaatcgtgggtccctcctgggaacaaaatgggcgggggcccctggcacctccattgagaggggccttttccaaataatggctggcgcccgccaactcttaaataagctccctcccaaagtaaaaatttctgaacccctttccctgggggtccacgcccgagagagaataagaagtaaaaa

SEQ ID NO: 21861 - DNA, 808 bp, Macaca Mulatta
  misc_feature (1)...(808): n = A,T,C or G
ggggcagttcggcggtcccgcgggtctgtctcttgcttcaacagtgtttggacggaacagatccggggactctttcttccagcctccgaccgccctccgatttcctctccacttgcaacctccgggaccatcttctcggccatctcctgcttctgggacctgccagcaccgtttttgtggttagctccgtcttgcccgacaacatgagctcccagatcgtcagaattatcccacgacgtgaangcagcccgtcacagcctggtcaatatgtacctgcaaggcctnctacacctacntcttctctgggctttctatttccacccgcaatgatgtggcctcttgaaaagggcttgagcccaactccttcccccaaattggccaaagaaaaaaccccaagggctaacaagccttccccgtgaaaaattgcaaaaacaccggtnnnnnnnnnnnnnnnnnnnnnnnnnnnnnnaggttcaaaaaaacccccccttaaaaaatnnnnnnnnnnnnnnnnnnnnnngattcccttaaaaacccccccttgggccccctggaaaaaaaaaaacggtattcgggcccctttttgggaatattattgccccccgggggttttcccccccaaagagaacccccccctttttgggggatctcccgggggaaaacccctcttctctgtaaaaaagaaaagagaggagcccccccctcccnnnnnnnnnnnnnnnnnnnacccttttaaacaaacctttcgaacaaaatgggcggcgcccccccaccaaagaaggggtggggtggggagggaagaaataaa

SEQ ID NO: 21862 - DNA, 133 bp, Macaca Mulatta
  misc_feature (1)...(133): n = A,T,C or G
tggattcctcctcttcttcctccgcggcgggtttgggtgcagtggacccgcagttgcagcatttcatcgaggtagaaactcaaaagcagcgcttccagcagctggtgcaccagatgactgaactttgttgggn

SEQ ID NO: 21863 - DNA, 119 bp, Macaca Mulatta
gcctgactgcctactttggccttcttgaaatctgtggtgtgaagggtggagaaacagtgatggttaatgcagcagctggagctgtgggctctgttgtggggcagattgcaaagctcaag

SEQ ID NO: 21864 - DNA, 1050 bp, Macaca Mulatta
  misc_feature (1)...(1050): n = A,T,C or G
agtgtcaacagcatctccaccctggagcctgtgagccggtgccagcgcctgagcgagctgtacctgcggaggaaccgtatccccagcctggctgagctcttctacctgaaggggctgccgcgtctcagggtgctgtggctggccgagaacccgtgctgcggcaccagcccccaccgctaccgcatgaccgtgctgcgcaccctgccgcgcctacagaagctggacaaccaggnnnnnnnnnnnnnnnnnnnnnnnnnnnnnnnnnnnnnnnnnnnnnnnnnnnnnnnnnnnnnnnnnnnnnnnnnnnnnnnnnnnnnnnnnnnnnnnnnnnnnnnnnnnnnnnnnnnnnnnnnnnnnnnnnnnnnnnnnnnnnnnnnnnnnnnnnnnnnnnnnnnnnnnnnnccagcagcgcccagggtgaacttggcctaaagcccccttcccgggaccagtttccttccttctcacccagagatgcttcgagcagccacaggagcagggtgagtgacgggctgctaggcggccactgctgcctctgcccactgcacagaaatcgtggggagggaggatggagcctcacagggccncgtggggagggaggatggagcctcacagggccttgaagagctgtgccccagggggaagctgcgtgtgtgggtctgcgaatgcgcatagacgtgtcacacgtgccccgcacggagctgtcctggcccctcagcctctcctggtctcctggtctgtggaatgtgggcccaggccctgctgggctgagggcaacaggagtcacgtgggagaagcgccacacgtgttcacaagcggggctcctcctctgctcagattctcnnnnnnnnnnaacgtcctgactgccatcctgctgctgctgcgggagctggacgcagaggggctggaggccgtgcagctgactgtcggcagccggctgcaggccctgcgtcgggagcaggtgcaggagcacgccgagtgaccacaggacctgagcgccgctccaccgtccacggggaccccagtgtcttccccagcccccaggagctg

SEQ ID NO: 21865 - DNA, 148 bp, Macaca Mulatta
ctctgctgggagcccaaggaagactcgaccacccagcctggggctggatagcgcccagaccagggactgctgtggaaggaactctagttgagttggggcagggatggatggggttctggaagaaggggcagggagcgtggacaggagc

SEQ ID NO: 21866 - DNA, 2627 bp, Macaca Mulatta
  misc_feature (1)...(2627): n = A,T,C or G
ggacacagtgtcatctaaggtagagccaacagcagcagctgccgtcacattgtttctgaggaaatcaagtccacctgcattgtctgcagccctggtggctaagggcaccagcagcagccctttggccgtggcctcaggaccagctaagagcagttcagtgactactctggctaaaaatggcacaaacaaggctgcatctggcccaaagaggacaccaggggcagtccatacagccttcccgttcacgccaacctacatgtatgcaagaacaggacataccacaagcacacatacagccatgcaaggaaacatgggcactgcctctggcctgttgtctacaacttacctccccaggaaaccacaagccatgcacactggcctcccaaaccccaccaacccggagatgcccagagcatccacgccacgcccactgacagtcacggcggcactgacatccattacagcctcggtgaaggccacccggttgccaccgttgcgagcagaaaacacggatgctgcccttcctgccgcatcggctgcagtggtcacttctggcaaaatggcatccaacctggagtgtcagatgtccagcaagctcctggtgaagacannnnnnnnnnnnnnnnnnnnnnnnnnnnnnnnnnnnnnnnnnnnnnnnnnnnnnnnnnnnnnnnnnnnnnnnnnnnnnnnnnnnnnnnnnnnnnnnnnnnnnnnnnnnnnnnnnnngtggacattctggaatattctcataatgtcannnnnnnnnnnnnnnnnnnnnnnnnnnnnnnnnnnnnnnnnnnnnnnnnnnnnnnnnnnnnnnnnnnnnnnnnnnnnnnnnnnnnnnnnnnnnnnnnnnnnnnnnnnnnnnnnnnnnnnnnnnnnnnnnnnnnnnnnnnnnnnnnnnnnnnnnnnnnnnnnnnnnnnnnnnnnnnnnnnnnnnnnnnnnnnnnnnnnnnnnnnnnnnnnnnnnnnnnnnnnnnnnnnnnnnnnnnnnnnnnnnnnnnnnnnnnnnnnnnnnnnnnnnnnnnnnnnnnnnnnnnnnnnnnnnnnnnnnnnnnnnnnnnnnnnnnnnnnnnnnnnnnnnnnnnnnnnnnnnnnnnnnnnnnnnnnnnnnnnnnnnnnnnnnnnnnnnnnnnnnnnnnnnnnnnnnnnnnnnnnnnnnnnnnnnnnnnnnnnnnnnnnnnnnnnnnnnnnnnnnnnnnnnnnnnnnnnnnnnnnnnnnnnnnnnnnnnnnnnnnnnnnnnnnnnnnnnnnnnnnnnnnnnnnnnnnnnnnnnnnnnnnnnnnnnnnnnnnnnnnnnnnnnnnnnnnnnnnnnnnnnnnnnnnnnnnnnnnnnnnnnnnnnnnnnnnnnnnnnnnnnnnnnnnnnnnnnnnnnnnnnnnnnnnnnnnnnnnnnnnnnnnnnnnnnnnnnnnnnnnnnnnnnnnnnnnnnnnnnnnnnnnnnnnnnnnnnnnnnnnnnnnnnnnnnnnnnnnnnnnnnnnnnnnnnnnnnnnnnnnnnnnnnnnnnnnnnnnnnnnnnnnnnnnnnnnnnnnnnnnnnnnnnnnnnnnnnnnnnnnnnnnnnnnnnnnnnnnnnnnnnnnnnnnnnnnnnnnnnnnnnnnnnnnnnnnnnnnnnnnnnnnnnnnnnnnnnnnnnnnnnnnnnnnnnnnnnnnnnnnnnnnnnnnnnnnnnnnnnnnnnnnnnnnnnnnnnnnnnnnnnnnnnnnnnnnnnnnnnnnnnnnnnnnnnnnnnnnnnnnnnnnnnnnnnnnnnnnnnnnnnnnnnnnnnnnnnnnnnnnnnnnnnnnnnnnnnnnnnnnnnnnnnnnnnnnnnnnnnnnnnnnnnnnnnnnnnnnnnnnnnnnnnnnnnnnnnnnnnnnnnnnnnnnnnnnnnnnnnnnnnnnnnnnnnnnnnnnnnnnnnnnnnnnnnnnnnnnnnnnnnnnnnnnnnnnnnnnnnnnnnnnnnnnnnnnnnnnnnnnnnnnnnnnnnnnnnngcaggtcgcccagtgagaatggctctgtcatcagcaacgaatcaggaaagcccagctcagggagacgctcaccccagaatgtaatggcacagcagaaagtgacaaaggaggaggcaaggaagagaaatgtgccggcgagtgatgaagaggggggagcagttctatttgacaactccagcaaggtggccgctgaaccctttgacacatcttctgggtctgtgcagctcattgccataaaacccacagccctccccgtggtgccccccacctcggacaggagccaggagtcatcggcagtcctcaacggcgaggtgannnnnnnnnnnnnnnnnnnnnnnnnnnnnnnnnnnnnnnnnnnnnnnnnnnnnnnnnnnnnnnnnnnnnnnnnnnnnnnnnnnnnnnnnnnnnnnnnnnnnnnnnnnnnnnnnnnnnnnnnnnnnnnnnnnnnnnnnnnnnnnnnnnnnnnnnnnnnnnnnnnnnnnnnnnnnnnnnnnnnnnnnnnnnnnnnnnnnnnnnnnnnnnnnnncaggcaacagatgaagaactctgtctaccgaagccggcagtctctgaacagcccgagtccaggggaaaccgagatggaccttctggtgactcgggagcgaccccggcgtggaatccgcaacagcggat

SEQ ID NO: 21867 - DNA, 765 bp, Macaca Mulatta
ggtgtgaagaaaatccagtttaaattacatgaaagctatggcaatcctttaagagttgttactaaacctccatatgaaattactgaaacaggatggggtgaattcgaaataatcatcaaaatatttttcattgaccctaatgaaagacctgtaaccctgtatcatttgctaaagctgtttcaatcagataccaatgcaatgctggggaaaaagacagtggtttcagagttctatgatgaaatgatatttcaagacccaacagcaatgatgcaacaattattgacaacatctcgtcagctaacattaggagcctataagcatgaaacagaatttgcagagcttgaagtgaaaaccagagaaaaattagaagctgctaagaaaaaaacaagctttgagattgcagagcttaaggagagattaaaagcaagtcgtgaaactataaattgtttaaaaaatgaaatcagaaaacctgaagaagatgaccaagcaaaagacatataaacagttctcatgagaacttggtagtaagctaaactgaaaataaggtgggcttcactggagaaatggacttactgcaaatgctatgacgtttcttagaggaacttcatatatagctgttgaccatgaatttctcagcaataggaatttgtactatttaagcaatctttaatggaaagtacatgtgtaaagaatggatgcatatacatttttaccattttacccaacccattttaaggaaaattcaatgaatattagcgcaatttc

SEQ ID NO: 21868 - DNA, 113 bp, Macaca Mulatta
agggccaagggctggaaacttcacctgcctcaccaacaacattctcaggatcgattgccactggtctgccccagagcttggccagggctccagcccctggcttctcttcacca

SEQ ID NO: 21869 - DNA, 786 bp, Macaca Mulatta
  misc_feature (1)...(786): n = A,T,C or G
ggttgacctggaaaccctttcagcacaaacctcattacaggtggaaatagaacccacccgaattacctattgctacctcggaattgctgaggtcaggactctgcagcagtgcttatttttacatttccaagcaaataccaaaaccttcagcaaagattgggttggtattaatgggtttttgtctcagaactgtattgtggatcccggagtttctcccaaatccatctacatcaaatttgtagaagtagagagggattttctttctgcaggctctttagttgagtgcctggaaaaagccattggataccccttaaaatttaacaactgaatgtcatccttcataaggatttgggctcttagctccttcttctctactctcttcccattacctggaccacccctcatccagatgccaccatcagactcttcatggaaaccctttcttcagttgggccagtacgacttctaaggaatcatagtagacttgggccagaaaaaaacagacctcacctgaaaatgctcattttgagcaagcaagatatatagcgaacttgcatggtgggtcagctannnnnnnnnnnnnnnnnnnnnnncaatttttaaatgggattttagaagccctaatataaaacaaatgttaggtacatttccataattgggacaaaaactttataacttttgaagtttccatatgnaaaatttgaaaaaaatttggtatatttttttttccacaaaatggtttttccattttttttacacccatcccccccgatgggtcctcacaat

SEQ ID NO: 21870 - DNA, 103 bp, Macaca Mulatta
ctctgagaagcaagcggcggagatactctttcgaatgcactgacgggtcctcctttgtggacgaggttgagaaggtggtgaagtgcggctgtacgaggtgtgc

SEQ ID NO: 21871 - DNA, 185 bp, Macaca Mulatta
aggcgcatgccaagcctactggagtatttgagttacaactgtaacttcatggggatcctggcaggcccactttgctcttacaaagactacattactttcattgaaggcagatcttaccatatgacacaagctggtgaaaatggaaaagaagagacacagtatgaaagaacagagccatctccaaa

SEQ ID NO: 21872 - DNA, 1621 bp, Macaca Mulatta
  misc_feature (1)...(1621): n = A,T,C or G
gaaaatataagacaaaagtttgtagcagatctacggaaagagtttgcaggaaaaggcctcacgtttcncatagnnnnnnnnnnnnnnnnnnnnnnnnnnnnnnnnnnnnnnnnnnnnnnnnnnnnnnnnnnnnnnnnnnnnnnnnnnnnnnnnnnnnnnnnnnnnnnnnnnnnnnnnnnnnnnnnnnnnnnnnnnnnnnnnnnnnnnnnnnnnnnnnnnnnnnnnnnnnnnnnnnnnnnnnnnnnnnnnnnnnnnnnnnnnnnnnnnnnnnnnnnnnnnnnnnnnnnnnnnnnnnnnnnnnnnnnnnnnnnnnnnnnnnnnnnnnnnnnnnnnnnnnnnnnnnnnnnnnnnnnnnnnnnnnnnnnnnnnnnnnnnnnnnnnnnnnnnnnnnnnnnnnnnnnnnnnnnnnnnnnnnnnnnnnnnnnnnnnnnnnnnnnnnnnnnnnnnnnnnnnnnnnnnnnnnnnnnnnnnnnnnnnnnnnnnnnnnnnnnnnnnnnnnnnnnnnnnnnnnnnnnnnnnnnnnnnnnnnnnnnnnnnnnnnnnnnnnnnnnnnnnnnnnnnnnnnnnnnnnnnnnnnnnnnnnnnnnnnnnnnnnnnnnnnnnnnnnnnnnnnnnnnnnnnnnnnnnnnnnnnnnnnnnnnnnnnnnnnnnnnnnnnnnnnnnnnnnnnnnnnnnnnnnnnnntggacccctgcatcagcaccaacagtgggggtttggtattgagaaacaatgacaggccatctgcagtgacccaccccaggacgaaatttacaaacacctggaacgaagctcccgcctgcatgtcaccttgatggggactgtgagcagggcagtgttatgcccagtgactagacgcactctgcgttttcccgtgtgaggctgaggcctgctggacagatggctggccgagtgggagcagaccctagggagtttgcacctcagctgggccggannnnnnnnnnnnnnnnnnnnnnnnnnnnnnnnnnnnnnnnnnnnnnnnnnnnnnnnnnnnnnnnnnnnnnnnnnnnnnnnnagctgggccggagagttgatgctggcaaaacagtcnnnnnnnnnnnnnnnnnnnnncccaggtccagagaaaccaatgtgggatgtcagacttcatcaaaacgaccttctggttggccctggctggcttcccagaggcgttcgcctctagtttctcagggatcgagcaagagcctggccagggaacaggaagaggagccgctctcctatctgcgcccacccaggccctcacccagactttacaaccgagggggccgagtgcagctgcagccaggtccgcgtccctcactctttccaccttctgcacgttctttgtgaaactggaaggatcccaggcttcagccagaacacggtggaagagaactttcctaggaaaacggttcatgtgtcacttttcaggatgtgaaaacgctgggacccatagaccctccattgcttggtgctggggctgtgtggcctcactgggcactgaatctggngccaggggggccccgactgccctgcactcctgcctcccagcccacagccaggcgctttcatcacagctcaacctggttccctccaaacctcccagccactcgggcttg

SEQ ID NO: 21873 - DNA, 775 bp, Macaca Mulatta
ggaatgttgcaaaccagaacacaaagctacctgcagttcgtctgaagaggatgactgcatctctttgtccaaggccagcagctttgcagatatgatgggtatcctgaaggactttcaccgaatgaaacagagccaagatctgaaccggagttcattgaaggaggaggaccctgctgtgcttatctctgaggtcttacgaaggaagtttgctctaaaggaagaagatatcagtagaaaaggaaactgacaaccctcagctctgcaaactcagtctcatgctcctggaataccttcaatagctgccttcctcaccacagatgtttctgcctctaaaggagaaatcttctgcaacagtcttgctaacaagctagagctcggactgaaagagaagagctggattatatgtttcccagacttcaaaccctggcagaagctaaggcttgtgatttgacctgagacatttgtttcaggtaatcgtatagaatgaagtatctcagtttaaagggtaagagagaagttgtttctggtttttccttgcccctgtgtgaaaacaggtctgaaatgactgactgacttcactgcattagaccctataactggtctcacaagacactttgtgcccagctgtcactcactctcagcagcttccttgcagcagagcagggctgaagggaaggggctataaatgtttgtatacacgttcacagggcatggaaaattttatgctgctccatcataaacctacaccaatggcccaggcaatcacccctcctcc

SEQ ID NO: 21874 - DNA, 400 bp, Macaca Mulatta
atcactttggcttactgcacaggcttttaatttgctttatacattttcttttactattctttttttcctttctggaggcatcacatgctggtgctgtgtctttatgaatgtttaaccatttcatggtggaagaattttatatttatgcagttgtacaattttatttttttctgcaagaaaaagtgtaatgtatgaaataaaccaaagtcacttgtttgaaaataaatctttattttgaactttataaaaagcaatgcagtaccccatagactggtgttaaatgttgtctacagtgcaaaatccatgttctaacatatgtaataattgccaggagtacagtgctcttgttgatcttgtattcagtcaggttaaaacaatggacaataaaagaatgaacaca

SEQ ID NO: 21875 - DNA, 2579 bp, Macaca Mulatta
  misc_feature (1)...(2579): n = A,T,C or G
gctagtgaagacatggaaccagtaaatatggagagcatgggnnnnnnnnnnnnnnnnnnnnnnnnnnnnnnnnnnnnnnnnnnnnnnnnnnnnnnnnnnnnnnnnnnnnnnnnnnnnnnnnnnnnnnnnnnnnnnnnnnnnnnnnnnnnnnnnnnnnnnnnnnnnnnnnnnnnnnnnnnnnnnnnnnnnnnnnnnnnnnnnnnnnnnnnnnnnnnnnnnaggaatatcctggaaatgagcttctgcttgtttatgacaaagacttcaaatatggacttaacttttatcttattggaactgaagagggcaaagaaaactatttaaannnnnnnnnnnnnnnnnnnnnnnnnnnnnnnnnnnnnnnnnnnnnnnnnnnnnnnnnnnnnnnnnnnnnnnnnnnnnnnnnnnnnnnnnnnnnnnnnnnnnnnnnnnnnnnnnnnnnnnnnnnnnnnnnnnnnnnnnnnnnnnnnnnnnnnnnnnnnnnnnnnnnnnnnnnnnnnnnnnnnnnnnnnnnnnnnnnnnnnnnnnnnnnnnnnnnnnnnnnnnnnnnnnnnnnnnnnnnnnnnnnnnnnnnnnnnnnnnnnnnnnnnnnnnnnnnnnnnnnnnnnnnnnnnnnnnnnnnnnnnnnnnnnnnnnnnnnnnnnnnnnnnnnnnnnnnnnnnnnnnnnnnnnnnnnnnnnnnnnnnnnnnnnnnnnnnnnnnnnnnnnnnnnnnnnnnnnnnnnnnnnnnnnnnnnnnnnnnnnnnnnnnnnnnnnnnnnnnnnnnnnnnnnnnnnnnnnnnnnnnnnnnnnnnnnnnnnnnnnnnnnnnnnnnnnnnnnnnnnnnnnnnnnnnnnnnnnnnnnnnnnnnnnnnnnnnnnnnnnnnnnnnnnnnnnnnnnnnnnnnnnnnnnnnnnnnnnnnnnnnnnnnnnnnnnnnnnnnnnnnnnnnnnnnnnnnnnnnnnnnnnnnnnnnnnnnnnnnnnnnnnnnnnnnnnnnnnnnnnnnnnnnnnnnnnnnnnnnnnnnnnnnnnnnnnnnnnnnnnnnnnnnnnnnnnnnnnnnnnnnnnnnnnnnnnnnnnnnnnnnnnnnnnnnnnnnngattgtcatgtgggatatcaccgcacatgcagatcgcatagaaaacattaagggaggtggtagtagaagtaaaaaagccacactgaagnnnnnnnnnnnnnnnnnnnnnnnnnnnnnnnnnnnnnnnnnnnnnnnnnnnnnnnnnnnnnnnnnnnnnnnnnnnnnnnnnnnnnnnnnnnnnnnnnnnnnnnnnnnnnnnnnnnnnnnnnnnnnnnnnnnnnnnnnnnnnnnnnnnnnnnnnnnnnnnnnnnnnnnnnnnnnnnnnnnnnnnnnnnnnnnnnnnnnnnnnnnnnnnnnnnnnnnnnnnnnnnnnnnnnnnnnnnnnnnnnnnnnnnnnnnnnnnnnnnnnnnnnnnnnnnnnnnnnnnnnnnnnnnnnnnnnnnnnnnnnnnnnnnnnnnnnnnnnnnnnnnnnnnnnnnnnnnnnnnnnnnnnnnnnnnnnnnnnnnnnnnnnnnnnnnnnnnnnnnnnnnnnnnnnnnnnnnnnnnnnnnnnnnnnnnnnnnnnnnnnnnnnnnnnnnnnnnnnnnnnnnnnnnnnnnnnnnnnnnnnnnnnnnnnnnnnnnnnnnnnnnnnnnnnnnnnnnnnnnnnnnnnnnnnnnnnnnnnnnnnnnnnnnnnnnnnnnnnnnnnnnnnnnnnnnnnnnnnnnnnnnnnnnnnnnnnnnnnnnnnnnnnnnnnnnnnnnnnnnnnnnnnnnnnnnnnnnnnnnnnnnnnnnnnnnaaagaagccagtgaacctccacacctttcatgacggaattgtccacactattcagagatcacctttctacgatgacattattctcacggttgggggttggaacgtggccatatggaaagaaagtgttatgnctggacctctccttcagtcatgctgtgcaccaaaaaggtacacctcaggcnnnnnnnnnnnnnnnnnnnnnnnnnnnnnnnnnnnnnnnnnnnnnnnnnnnnnnnnnnnnnnnnnnnnnnnnnnnnnnnnnnnnnnnnnnnnnnnnnnnnnnnnnnnnnnnnnnnnnnnnnnnnnnnnnnnnnnnnnnnnnnnnnnnnnnnnnnnnnnnnnnnnnnnnnnnnnnnnnnnnnnnnnnnnnnnnnnnnnnnnnnnnnnnnnnnnnnnnnnnnnnnnnnnnnnnnnnnnnnnnnnnnnnnnnnnnnnnnnnnnnnnnnnnnnnnnnnnnnnnnnnnnnnnnnnnnnnnnnnnnnnnnnnnnnnnnnnnnnnnnnnnnnnnnnnnnnnnnnnnnnnnnnnnnnnnnnnnnnnnnnnnnnnnnaaatatatcagaagtcaaaagaacaaatggaggctgaattaaaaatggactatgagagttatctggaactggaaaagaccgttcttatcaaccttggcctaatcaaagtcacagagaaggggtcatacttggatgtgatgtaaaaaagcttcctgaaggggtgttttggggactttttctctctatttgttttttttatgtcaagtgaactggcaagctgaacatatatata

SEQ ID NO: 21876 - DNA, 779 bp, Macaca Mulatta
ggagttggctttgtgggacacagctgggcaggaagattatgatcgcctgaggcccctctcctacccagataccgatgttatactgatgtgtttttccatcgacagccctgatagtttagaaaacatcccagaaaagtggaccccggaagtcaagcatttctgtcccaacgtgcccatcatcctggttgggaataagaaggatcttcggaatgatgagcacacaaggcgggagctagccaagatgaagcaggagccggtgaaacctgaagaaggcagagatatggcaaacaggattggtgcttttgggtacatggagtgttcagcaaagaccaaagatggagtgagagaggtttttgaaatggctacgagagctgctctgcaagctagacgtgggaagaaaaaatctgggtgccttgtcttgtgaaaccttgctgcaagcacagcccttatgcggttaattttgaagtgctgtttattaatcttagtgtatgattactggcctttttcatttatctataatttaccctaagattacaaatccagaagtcatcttggctacccagtattttagaaagccaaactatggattatttaaatgaatgtcccaaccccggtcctgggcccaccccaggggcccctttttgaacacttggcttctaaacaagcccctttcttcttggaaaattcccaaccctggaacaaccacccaagggcggcctaaaattttccagagggaaattttttcctttaaaaacttttcctttgggcccttctcctta

SEQ ID NO: 21877 - DNA, 3098 bp, Macaca Mulatta
  misc_feature (1)...(3098): n = A,T,C or G
atgttccagtggaaaacttctttgtgaaatgcaatggcgcactcattaacagcagtgacacagtgcagcatggagctgtttatagtttggaacccagactttgtggtggaaaaggaggnnnnnnnnnnnnnnnnnnnnnnnnnnnnnnnnnnnnnnnnnnnnnnnnnnnnnnnnnnnnnnnnnnnnnnnnnnnnnnnnnnnnnnnnnnnnnnnnnnnnnnnnnnnnnnnnnnnnnnnnnnnnnnnnnnnnnnnnnnnnnnnnnnnnnnnnnnnnnnnnnnnnnnnnnnnnnnnnnnnnnnnnnnnnnatcagtgagaatcggaaacgacaatggcctgccaaatctaaaacagacagaggagccagtgcgggaaagaggaggtgcttctggtnnnnnnnnnnnnnnnnnnnnnnnnnnnnnnnnnnnnnnnnnnnnnnnnnnnnnnnnnnnnnnnnnnnnnnnnnnnnnnnnnnnnnnnnnnnnnnnnnnnnnnnnnnnnnnnnnnnnnnnnnnnnnnnnnnnnnnnnnnnnnnnnnnnnnnnnnnnnnnnnnnnnnnnnnnnnnnnnnnnnnnnnnnnnnnnnnnnnnnnnnnnnnnnnnnnnnnnnnnnnnnnnnnnnnnnnnnnnnnnnnnnnnnnnnnnnnnnnnnnnnnnnnnnnnnnnnnnnnnnnnnnnnnnnnnnnnnnnnnnnnnnnnnnnnnnnnnnnnnnnnnnnnnnnnnnnnnnnnnnnnnnnnnnnnnnnnnnnnnnnnnnnnnnnnnnnnnnnnnnnnnnnnnnnnnnnnnnnnnnnnnnnnnnnnnnnnnnnnnnnnnnnnnnnnnnnnnnnnnnnnnnnnnnnnnnnnnnnnnnnnnnnnnnnnnnnnnnnnnnnnnnnnnnnnnnnnnnnnnnnnnnnnnnnnnnnnnnnnnnnnnnnnnnnnnnnnnnnnnnnnnnnnnnnnnnnnnnnnnnnnnnnnnnnnnnnnnnnnnnnnnnnnnnnnngactgaaatgtgggggcactctgcaggagcgggcagcaagactcttctctgtcagaggactacctaaggagcaaattgacccggctttatttgccaagcctttgaaagggaagaaaaaatgagtgtcatcagagctgattcctattgctttatagtgtctaccatttataacctgcataatgtggactcttgaccagtattcctgttgatattaaaagctaactttttagtaacccaattctaactatcccttttccttgttaggtctgtagagttaacgtctgaaaccatctgggccttaaattttctttgtctagttttctataatgtacttaataaatatagggctattcacattttttggtttgatctcatgtcatttaggtaatgaatctatccaaggaatctatccttttgacccaggttatcaaatttgtagacaagtttatttataatggtcccttcttacccatttaatgtctataggggctgtgttgataatttccttttcattatgatactggtaatttcnnnnnnnnnnnnnnnnnnnnnnnnnnnnnnnnnnnnnnnnnnnnnnnnnnnnnnnnnnnnnnnnnnnnnnnnnnnnnnnnnnnnnnnnnnnnnnnnnnnnnnnnnnnnnnnnnnnnnnnnnnnntcttggctcactgcaagctccgcctcctgggttcacgccattctcctgcctcagcctcccaagtagctgggtccacaggtgcccaccaccatgctcagctaattttttgtatttttagtagagacaggtttcactgtgttagacagcatggtctcgatnnnnnnnnnnnnnnnnnnnnnnnnnnnnnnnnnnnnnnnnnnnnnnnnnnnnnnnnnnnnnnnnnnnnnnnnnnnnnnnnnnnnnnnnnnnnnnnnnnnnnnnnnnnnnnnnnnnnnnnnnnnnnnnnnnnnnnnnnnnnnnnnnnnnnnnnnnnnnnnnnnnnnnnnnnnnnnnnnnnnnnnnnnnnnnnnnnnnnnnnnnnnnnnnnnnnnnnnnnnnnnnnnnnnnnnnnnnnnnnnnnnnnnnnnnnnnnnnnnnnnnnnnnnnnnnnnnnnnnnnnnnnnnnnnnnnnnnnnnnnnnnnnnnnnnnnnnnnnnnnnnnnnnnnnnnnnnnnnnnnnnnnnnnnnnnnnnnnnnnnnnnnnnnnnnnnnnnnnnnnnnnnnnnnnnnnnnnnnnnnnnnnnnnnnnnnnnnnnnnnnnnnnnnnnnnnnnnnnnnnnnnnnnnnnnnnnnnnnnnnnnnnnnnnnnnnnnnnnnnnnnnnnnnnnnnnnnnnnnnnnnnnnnnnnnnnnnnnnnnnnnnnnnnnnnnnnnnnnnnnnnnnnnnnnnnnnnnnnnnnnnnnnnnnnnnnnnnnnnnnnnnnnnnnnnnnnnnnnnnnnnnnnnnnnnnnnnnnnnnnnnnnnnnnnnnnnnnnnnnnnnnnnnnnnnnnnnnnnnnnnnnnnnnnnnnnnnnnnnnnncatggattatcaaaagtgggttgtctgattagcaaacatttgtnnnnnnnnnnnnnnnnnnnnnttgttgctgatttctacttttaattccattgaggtcagaaaatatcctctttatgatttcaatcctcttagttttattgagacttgttttatgacccaatatattgtctgttatggtgaatgtaccacatacagtttaaaagaatgcatattttaggccaggtgtggtggctcatgcctgtaatcnnnnnnnnnnnnnnnnnnnnnnnnnnnnnnnnnnnnnnnnnntttgggaggctgaggtgggaggatcattttgagaccagcctgggcaacgtatagcgagaccatgtctctaaaaaaaagaatatataatttgaattgttgggttaatatgttctgtaatatcgattagattaagtggttgataatactgttcagatcttctatgtctttactgatttttttgtttatttctatcaggtgctgagaaaggatgttaaaatcttcaattacgattgtggaattgtccatttctnnnnnnnnnnnnnnnnnnnnnnnnnnnnnnnnnnnnttatgtcttcctaatgtattgactattttatcattatgaaatttc

SEQ ID NO: 21878 - DNA, 337 bp, Macaca Mulatta
  misc_feature (1)...(337): n = A,T,C or G
gatgatattctaaggctgcctcttctcttctcattttagannnnnnnnnnnnnnnnnnnnnnnnnnnnnnnnnnnnnnnnnnnnnnnnnnnnnnnnnnnnnnnnnnnnnnnnnnnnnnnnnnnnnnnnnnnnnnnnnnnnnnnnnnnnnnnnnnnnnnnnnnnnnnnnnnnatggtccagtagtctatgcagcatatttaaaaatggagcacagtgacgaaaatattcaattctggatggcctgtgaaacctataagaagattgcctcacggtggagcagaacttctagggcaaagaagctctataagatttacatccagccacagtcccctagaga

SEQ ID NO: 21879 - DNA, 719 bp, Macaca Mulatta
ggtggctgcttcaaacccagagctcatttttaaggagcaaattgacatttttgaaggaataaaggacagccaagctcagcggatggcagaaaatctaggcttcgttgggcctttgaaaagccaggctgcagatcaaattacgaagctgtataatctcttcctaaaaattgatgctactcaggtggaagtgaatccctttggtgaaactccagaaggacaagttgtctgttttgatgccaagataaacttcgatgacaacgcagaattccgacaaaaagacatatttgctatggacgacaaatccgagaatgagcccattgaaaatgaagctgccaaatatgatctaaaatacataggactagatgggaacattgcctgctttgtgaatggtgctgggctagccatggctacttgtgatatcattttccttaatggtgggaagccagccaacttcttggatcttggaggtggcgtaaaggaagctcaagtatatcaagcattcaaattgctcacagctgatcctaaggttgaagccatccttgtcaatatttttggtggtatcgtcaactgtgccatcattgccaatgggatcaccaaagcctgccgggagctagaactcaaggtgcccctggtggtccggcttgaaggaaccaacgtccaagaggcccagaagatactcagcaacagcggactccccattacttcagccgttgacctgg

SEQ ID NO: 21880 - DNA, 2176 bp, Macaca Mulatta
  misc_feature (1)...(2176): n = A,T,C or G
gcagcggctgtacagcatggacctgcggagctcccacaaggccaagggcaaggagaagctctgcttctccctgacgtgcccactcggcagcgggagccccgagggggtggtcaaggcgggggcacctgagctggtggacaagggccccttggtgcccaccctgcccttcccgctccgcaagccccgaaaggcccacaagtacctgcggctctcacgcaagaagttcccgccccgcgggcccaacctggagagccacagccatcgacgggagctcttcctgcaggagccaccggccccagacgtcctgcaggcggccggcgagtgggagcctgctgcgcagccccccgaagaggagnnnnnnnnnnnnnnnnnnnnnnnnnnnnnnnnnnnnnnnnnnnnnnnnnnnnnnnnnnnnnnnnnnnnnnnnnnnnnnnnnnnnnnnnnnnnnnnnnnnnnnnnnnnnnnnnnnnnnnnnnnnnnnnnnnnnnnnnnnnnnnnnnnnnnnnnnnnnnnnnnnnnnnnnnnnnnnnnnnnnnnnnnnnnnnnnnnnnnnnnnnnnnnnnnnnnnnnnnnnnnnnnnnnnnnnnnnnnnnnnnnnnnnnnnnnnnnnnnnnnnnnnnnnnnnnnnnnnnnnnnnnnnnnnnnnnnnnnnnnnnnnnnnnnnnnnnnnnnnnnnnnnnnnnnnnnnnnnnnnnnnnnnnnnnnnnnnnnnnnnnnnnnnnnnnnnnnnnnnnnnnnnnnnnnnnnnnnnnnnnnnnnnnnnnnnnnnnnnnnnnnnnnnnnnnnnnnnnnnnnnnnnnnnnnnnnnnnnnnnnnnnnnnnnnnnnnnnnnnnnnnnnnnnnnnnnnnnnnnnnnnnnnnnnnnnnnnnnnnnnnnnnnnnnnnnnnnnnnnnnnnnnnnnnnnnnnnnnnnnnnnnnnnnnnnnnnnnnnnnnnnnnnnnnnnnnnnnnnnnnnnnnnnnnnnnnnnnnnnnnnnnnnnnnnnnnnnnnnnnnnnnnnnnnnnnnnnnnnnnnnnnnnnnnnnnnnnnnnnnnnnnnnnnnnnnnnnnnnnnnnnnnnnnnnnnnnnnnnnnnnnnnnnnnnnnnnnnnnnnnnnnnnnnnnnnnnnnnnnnnnnnnnnnnnnnnnnnnnnnnnnnnnnnnnnnnnnnnnnnnnnnnnnnnnnnnnnnnnnnnnnnnnnnnnnnnnnnnnnnnnnnnnnnnnnnnnnnnnnnnnnnnnnnnnnnnnnnnnnnnnnnnnnnnnnnnnnnnnnnnnnnnnnnnnnnnnnnnnnnnnnnnnnnnnnnnnnnnnnnnnnnnnnnnnnnnnnnnnnnnnnnnnnnnnnnnnnnnnnnnnnnnnnnnnnnnnnnnnnnnnnnnnnnnnnnnnnnnnnnnnnnnnnnnnnnnnnnnnnnnnnnnnnnnnnnnnnnnnnnnnnnnnnnnnnnnnnnnnnnnnnnnnnnnnnnnnnnnnnnnnnnnnnnnnnnnnnnnnnnnnnnnnnnnnnnnnnnnnnnnnnnnnnnnnnnnnnnnnnnnnnnnnnnnnnnnnnnnnnnnnnnnnnnnnnnnngggttcttgttctttctgactcaggtgacttttcagcccttccaattcccctctttctctgccctcccctccaactcagccagtccaggtgtgggcggtcagggagggagggggtgtcccaccacgttctcagggcagcccttggctcctaagccccttcctccttccattctgcatcccctccccatccaacctaaatgccacagctggggctgagctgtgtttctgtggagggacctctgccacgcctctctgaggtcaggctgcgctgtgtgatgggcaggctttgccccagcccaccccctggcaaggtgcacttgttttgtggcttgtacaaggtgtcctgggggccagtggcttccctgccagtgaggagtgacttctccctctcttccagttctgtaggggagaaaaagccagattggggggcccgagggaggcgtggaaaaggctggcttccctggttttccttggctgtcagagtcagggtgacacacaccaagagtggagtgtggtcggcgagtttgaaacccgcctgccctccccgcagctctgctgagggtcctcaggaagtcacagagtctacggaggcgaggagagggtgattctttccccagatcccttcttc

SEQ ID NO: 21881 - DNA, 302 bp, Macaca Mulatta
tttggctgttactatgttaaaattgaattatgggcatgtaattttgccatctttgtattttcacaaattttgtgtaatctacctcaaatgattaatccaagtattggttaacaatatgttggcgtctcttattcagcaagcttacagactcttcaaagtcttagtcaaagactaatccaggttagattgaccggttcactgctcacttgcaaccttatcaaagggtttcaaagggaaagtaaaataaacctgtttatggatatggagtgcatcttgtatgtgccgaatattgataggatgat

SEQ ID NO: 21882 - DNA, 645 bp, Macaca Mulatta
gggtccaccaaaatatactaaatctgttctgaaaaagggagataaaaccaactttcccaaaaagggagatgttgttcattgctggtatacaggaacactacaagatgggactgtttttgatactaatattcaaacaagtgcaaagaagaagaaaaatgccaagcctttaagttttaaggtcggagtagcaaagttatcagaggatgggatgaagccctcttgactatgagtaaaggagagagggctcgactggagattgaaccagaatgggcttatggaaagaaagcacagcctgatgccaaaattccaccaaattcaaaactcatgtttgaagtggaattagtggatattgactgaaatagttcagctctaaggatattagcaacaatgataaaacttggccttgaagaaacttacataactagttagaacttgttactattgtaaaggaagagtcaactggaaaattcaaggagttaataaaatttgtttacttgatcccagcttttgagagatgtaatcccttatgaatccctgaagtctaaaatactttcctacagctgtgtaaaatactggtgaaggagaactttttccttttacctcatgttgtaaactaagtggctcaataaaaatttatccactgtc

SEQ ID NO: 21883 - DNA, 1385 bp, Macaca Mulatta
  misc_feature (1)...(1385): n = A,T,C or G
ggttgatgagaaagctctgaagcacataacagaaatgggcttcagtaaggaagcatccaggcaagatcttatggataatgccaacaacttagaagcagcattgaacgtgcttcttacaagcaataaacagaaacctatgatgggtcctcctctgagaggtnnnnnnnnnnnnnnnnnnnnnnnnnnnnnnnnnnnnnnnnnnnnnnnnnnnnnnnnnnnnnnnnnnnnnnnnnnnnnnnnnnnnnnnnnnnnnnnnnnnnnnnnnnnnnnnnnnnnnnnnnnnnnnnnnnnnnnnnnnnnnnnnnnnnnnnnnnnnnnnnnnnnnnnnnnnnnnnnnnnnnnnnnnnnnnnnnnnnnnnnnnnnnnnnnnnnnnnnnnnnnnnnnnnnnnnnnnnnnnnnnnnnnnnnnnnnnnnnnnnnnnnnnnnnnnnnnnnnnnnnnnnnnnnnnnnnnnnnnnnnnnnnnnnnnnnnnnnnnnnnnnnnnnnnnnnnnnnnnnnnnnnnnnnnnnnnnnnnnnnnnnnnnnnnnnnnnnnnnnnnnnnnnnnnnnnnnnnnnnnnnnnnnnnnnnnnnnnnnnnnnnnnnnnnnnnnnnnnnnnnnnnnnnnnnnnnnnnnnnnnnnnnnnnnnnnnnnnnnnnnnnnnnnnnnnnnnnnnnnnnnnnnnnnnnnnnnnnnnnnnnnnnnnnnnnnnnnnnnnnnnnnnnnnnnnnnnnnnnnnnnnnnnnnnnnnnnnnnnnnnnnnnnnnnnnnnnnnnnnnnnnnnnnnnnnnnnnnnnnnnnnnnnnnnnnnnnnnnnnnnnnnnnnnnnnnnnnnnnnnnnnnnnnnnnnnnnnnnnnnnnnnnnnnnnnnnnnnnnnnnnnnnnnnnnnnnnnnnnnnnnnnnnnnnnnnnnnnnnnnnnnnnnnnnnnnnnnnnnnnnnnnnnnnnnnnnnnnnnnnnnnnnnnnnnnnnnnnnnnnnnnnnnnnnnnnnnnnnnnnnnnnnnnnnnnnnnnnnnnnnnnnnnnnnnnnnnnnnnnnnnnnnnnnnnnnnnnnnnnnnnnnnnnnnnnnnnnnnnnnnnnnnnnnnnnnnnnnnnnnnnnnnnnnnnnnnnnnnnnnnnnnnnnnnnnnnnnnnnnnnnnnnnnnnnnnnnnnnnnnnnnnnnnnnnnnnnnnnnnnnnnnnnnnnnnnnnnnnnnnnnnnnnnnnnnnnnnnnnnnnnnnnnnnnnnnnnnnnnnnnnnnnnnnnnnnnnnnnnnnnnnnnnnnnnnnnnnnnnnnggaggaagaaggcacctacgaccaaactctggagttccgtaggggaggtgatggccagccaagaagatccactcggccaactcaacaattttaccagccaccccgggctcggaactaatacgaaaa

SEQ ID NO: 21884 - DNA, 91 bp, Macaca Mulatta
aggttggacttgttggaataatcctgatacatttctacaatggccactgctcagctttctcactccatcacaatacacaaagcatctaagg

SEQ ID NO: 21885 - DNA, 983 bp, Macaca Mulatta
ggtatgggtcttagttgtgtttgattcactccagagttcagtgctcatatgtatctgctcattttgacaaagtgcctcatgcaaccaggccctctctctgcggcagagtccttagtggaggggtttacctggaacattagcagttaccacagaatacagaagagcaggtgactgtgctgtgcagctctctaaatgggaattctcagataggaagcaacagcttcagaaatagctcaaaatgaatgggaaatgtgaattgcagctgcaggttttaccaccacctcagagtcccaggaccttgagtgtcgttagtcactttattgaaggttttagacccaaagcagctttgtctctatcacatcagcaatttcagaaccaaaagggaggctatctgtaggcccagagctgcactctcacgaacctttgtttttctccacaaagtatctaacacaaccaatgtgcagactgattggcccagtcattggtttccgagagaggaggtctgcatgtgatttgctaattatcactagggccaaggtgggatttgtaaagctttacaataatcgttctggatggagtcctgggaggtccttggcagaactcagttaaatctttgaagaatatttgtagttatcttagaagatagcatggaagggtgaggattccaaaaacattttgttttttaaatatcccctggtaacacttgggtctcttgggtgcctgtggggttagcaaccaagttctccccaaggcagaaattcaatcagagcttcagtttgcattttggatgtgtgaattacagcaatccccttttccaaacctaaaatccgtttttctcatccaactctggaataaccggttgctgtgtcctaaccttcttaactgccagaggctccaggcgatctggtttaggggaacacccctagcagcctgccggggaataacattctggccgtttctgaacctgtccccagcagaaacca

SEQ ID NO: 21886 - DNA, 1059 bp, Macaca Mulatta
  misc_feature (1)...(1059): n = A,T,C or G
tgcctggcggcgcagtagcgcgggaggcggcgaagggcgcaggagcatcgcttggaaggggacaagggaacgccacgggccaaatgtctgggagagagccgagccttttcccggaccctcgccgagggcgaccgtgatgcggcagaaccggccggagcgactcgccgccaccgctgtctgcgctctcggagaccccagcgcccnnnnnnnnnnnnnnnnnnnnnnnnnnnnnnnnnnnnnnnnnnnnnnnnnnnnnnnnnnnnnnnnnnnnnnnnnnnnnnnnnnnnnnnnnnnnnnnnnnnnnnnnnnnnnnnnnnnnnnnnnnnnnnnnnnnnnnnnnnnnnnnnnnnnnnnnnnnnnnnnnnnnnnnnnnnnnnnnnnnnnnnnnnnnnnnnnnnnnnnnnnnnnnnnnnnnnnnnnnnnnnnnnnnnnnnnnnnnnnnnnnnnnnnnnnnnnnnnnnnnnnnnnnnnnnnnnnnnnnnnnnnnnnnnnnnnnnnnnnnnnnnnnnnnnnnnnnnnnnnnnnnnnnnnnnnnnnnnnnnnnnnnnnnnnnnnnnnnnnnnnnnnnnnnnnnnnnnnnnnnnnnnnnnnnnnnnnnnnnnnnnnnnnnnnnnnnnnnnnnnnnnnnnnnnnnnnnnnnnnnnnnnnnnnnnnnnnnnnnnnnnnnnnnnnnnnnnnnnnnnnnnnnnnnnnnnnnnnnnnnnnnnnnnnnnnnnnnnnnnnnnnnnnnnnnnnnnnnnnnnnnnnnnnnnnnnnnnnnnnnnnnnnnnnnnnnnnnnnnnnnnnnnnnnnnnnnnnnnnnnnnnnnnnnnnnnnnnnnnnnnnnnnnnnnnnnnnnnnnnnnnnnnnnnnnnnnnnnnnnnnnnnnnnnnnnnnnnnnnnnnnnnnnnnnnnnnnnnnnnnnnnnnnnnnnnnnnnnnnnnnnnnnnnnnnnnnnnnnnnnnnnnnnnnnnnnnnnnnnnnnatgcaatctccctcctttgtcaagtgaatacactaaagatgttggatccaaaagtcatttagtgacagctaaccccagcataattcggcaaaggt

SEQ ID NO: 21887 - DNA, 459 bp, Macaca Mulatta
ccggagtcggagggcggggagctaggaggagggagctcgagagttgtggagactactgactaggagaagtcgcagcccgctcaggcccgcgtcttcccgctccccgtcttcctctctcacacacctactccgccctccaccccagcccccgcgctcgctccttctctcgcccggggttcctgccggtagctctccgggtcttggcgcggcgggggcgccccgggggtgccctcgccctcccgttgcgggcgggcgggcggtatgtggcgcctggtgcccccgaagctgggccgcctgtcccgctccctgaagctggcggcgctgggcagcctgttggtgctgatggtgttgcactcgccgtcgctgctcgcctcttggcagcgcaacgagctgaccgaccggcgcttcctgcagctcaataagtgcccgggcgtgcttcggcacgagctggtgccgccg

SEQ ID NO: 21888 - DNA, 142 bp, Macaca Mulatta
ccacgcccacctccactccagggacgactgggatcctcacagggccgaccaccactgccaccataactgtggccactggctccacggccatcccctcctccactccagggatgacctcgatcctcacagagccaaccactac

SEQ ID NO: 21889 - DNA, 1125 bp, Macaca Mulatta
atgggggattacgggtttggagtgctagtgcaaagcaatactgggaataaatctgcttttccagtcagattccatccacatctgcagcctccacaccatcaccaaaatgccacccccagccctgctgcttttataaataataacacagctgccaatggcagcagtgctgggtcagcgtggctttttcctgctccagctacccataacattcaggatgagatcttggggtcagaaaaagcaaaaagtcagcaacaggaacagcaagaccctttagaaaagcagcagctttcccccagtccaggtcaggaagctggaatactgcctgaaaccgagaaggcaaaatcagaagaaaatcaaggggacaattcttcggaaaatggcaatgggaaggagaaaataagaatcgaatctccagtgttgacagggtttgactatcaagaagccactgggctgggtacttcaacccaacccttgacatctagtgcatcgtctcttactggtttcagcaactggtcagcagcgatagcgccttcctcctctacaataatcaatgaagatgcaagtttctttcaccagggaggggtccctgctgcttcggctaataacggtgctctgttgtttcaaaattttccccatcatgtcagccctggctttggaggcagcttctctcctcagatcgggcctctctcacagcaccacccacatcaccctcatttccagcatcatcacagccagcatcagcagcaaaggaggtctcctgccagtccccatcccccacccttcacacatagaaatgctgcttttaaccagctgcctcatttggcgaataatcttaacaaacccccgtctccatggagcagttaccagagtccgtcaccaacaccctcctcttcctggagcccgggcggtggtggatatggtggctggggaggttcccaaggccgagatcaccgcagagggctgaatggtggaataacgcccctgaactccatctcgcctttgaagaaaaattttgcaagcaatcatattcagctccagaagtatgctcgccccagctctgcctttgcacctaaatcctggatggaagatagcttgaacagggctgacaacatttttccttttccg

SEQ ID NO: 21890 - DNA, 640 bp, Macaca Mulatta
agcatggtggggctgggagggcccaggctgccgcggccacttcatgctgctgtaagaaggtatctgtgactgggtgagtcgtaaagagcagaaatgttccgcttacagctctggagtctgggaagtccaagaccagggccccagcagatttggtgtctgggaaggactgctctctgcttccaagacggctccttgttactgtgtcctctcatagcagaaggtggaagggcaaaaggggcctggccagtcagacagccctttcataaggctctaatcctacccttgaaggtggaacccttacggcctaaccctcctgaaggccttacctctggaccctgttgcactggggattcagtctcaatatggatttcggaggaacacagacattggaaccacggcagcaccatcactcccaggctgagacgccacctgggctctctgcccagagcatctcctccctggccctggagacacacagaagaaggagagaagggctgttctgaaggaatcgcaagatcgagtggactctcacctgggagagggcacctgcagcctggctggccccagggatcgaagggcacggagcgtgtggctgggtgcctatcaccttcttccaacagtttaccctgggcacccagcc

SEQ ID NO: 21891 - DNA, 553 bp, Macaca Mulatta
aggcacgacggctccgatccctgcgtggacgtgctgttcggtgggcttggtggagagacgggcaggaggggacagcaaacagcccgcgcgcccctaagccccagcactgccgtccctccctatctgactcgtttgtttcttccccaggagacgggcatcgcctgattatgcgcggcgctcatctcaccgctgtggaaatgctcactgccttcgcttcccatatccgggccagggacgcggcgggcagcgcggacaatccgggcgctgatactagtcgctgacagcgtcagagagaccaacaagatgattttagcgtggactaggacacttaacctaagaagagtttcacttaatcattcaaatcactatctggagggccgcggagcgcaaaataaaatgtaaaaccctgctaccacaatgtttctggaacaagactagatcagggaggtgtctggatgaacctggatttatttcactttcttactatcatcacttattgcttaacccttttgaatttggcttctggcttctcctaccactcactcaaggtact

SEQ ID NO: 21892 - DNA, 3311 bp, Macaca Mulatta
  misc_feature (1)...(3311): n = A,T,C or G
aggttggccacaggacctgacgctgcaggatggacgagtgccctgagcctctgcagcaggacagagggccggtgctggtccgacggcagcgcccagcaccccagggtctgtgtgagatgctgaaggccaggctgtggcggagctgctcgtgcagcgtgctgtgcgcccgggcgctggagcaggacctgctcccccnnnnnnnnnnnnnnnnnnnnnnnnnnnnnnnnnnnnnnnnnnnnnnnnnnnnnnnnnnnnnnnnnnnnnnnnnnnnnnnnnnnnnnnnnnnnnnnnnnnnnnnnnnnnnnnnnnnnnnnnnnnnnnnnnnnnnnnnnnnnnnnnnnnnnnnnnnnnnnnnnnnnnnnnnnnnnnnnnnnnnnnnnnnnnnnnnnnnnnnnnnnnnnnnnnnnnnnnnnnnnnnnnnnnnnnnnnnnnnnnnnnnnnnnnnnnnnnnnnnnnnnnnnnnnnnnnnnnnnnnnnnnnnnnnnnnnnnnnnnnnnnnnnnnnnnnnnnnnnnnnnnnnnnnnnnnnnnnnnnnnnnnnnnnnnnnnnnnnnnnnnnnnnnnnnnnnnnnnnnnnnnnnnnnnnnnnnnnnnnnnnnnnnnncaggtcctcatgggcgtcctccggctgggcttcgtgtctgcctacctctcacagccattgctcgacggctttgctatgggggcctccgtgaccatcctgacctcgcagctcaagcacctgctgggtgtgcggatcccgcggcaccaggggcccggcatggtggtcctcacatggctaagcctgctgcgcagcgctgggcaggccaacgtgtgtgacgtggtcaccagcacggtgtgcctggcggtgctgctagctgcgaaggagctctcagaccgctaccgacgccgcctgcgggtgcccctgcccacggagctgctggtcatcgtggtggccacactcgtgtcccacttcgggcagctccacaggcgctttggctccagcgtggccggcgaaaggcccacgggtttcatgcctcctcaggtcccggagnnnnnnnnnnnnnnnnnnnnnnnnnnnnnnnnnnnnnnnnnnnnnnnnnnnnnnnnnnnnnnnnnnnnnnnnnnnnnnnnnnnnnnnnnnnnnnnnnnnnnnnnnnnnnnnnnnnnnnnnnnnnnnnnnnnnnnnnnnnnnnnnnnnnnnnnnnnnnnnnnnnnnnnnnnnnnnnnnnnnnnnnnnnnnnnnnnnnnnnnnnnnnnnnnnnnnnnnnnnnnnnnnnnnnnnnnnnnnnnnnnnnnnnnnnnnnnnnnnnnnnnnnnnnnnnnnnnnnnnnnnnnnnnnnnnnnnnnnnnnnnnnnnnnnnnnnnnnnnnnnnnnnnnnnnnnnnnnnnnnnnnnnnnnnnnnnnnnnnnnnnnnnnnnnnnnnnnnnnnnnnnnnnnnnnnnnnnnnnnnnnnnnnnnnnnnnnnnnnnnnnnnnnnnnnnnnnnnnnnnnnnnnnnnnnnnnnnnnnnnnnnnnnnnnnnnnnnnnnnnnnnnnnnnnnnnnnnnnnnnnnnnnnnnnnnnnnnnnnnnnnnnnnnnnnnnnnnnnnnnnnnnnnnnnnnnnnnnnnnnnnnnnnnnnnnnnnnnnnnnnnnnnnnnnnnnnnngtccccgagcccggcgtgcgggtgttccgctttggcgggccgctgtactacgccaacaaggatttcttcctgcggtcactctacagcctcacagggctggacgcggggtgtgtggctgccaggaggaaggagcagggctcagagtgggaggtcggcgacggaggccctgcccagggcaaggacctgggcgcggttagcagcagggctgtgctggcgcctgcggcggccggcttccacacagtggtcatcgactgtgccccgctgctgttcctggacacaaaaaaacgtgaccacgctgcaggacctgcgccgagactatggggccctgggcatcagcctgctgctggcctgctgcagcccccctgtgagagatgctctgagcagaggaggcttccttggggagggccctggggacgtggctgaggaggagcagctgtttctcagtgtgcacaatgccgtgcagacagcacgagcccgccacagaaagctggaggccactgacgcccacccgtagcagggccaggccnnnnnnnnnnnnnnnnnnnnnnnnnnnnnnnnnnnnnnnnnnnnnnnnnnnnnnnnnnnnnnnnnnnnnnnnnnnnnnnnnnnnnnnnnnnnnnnnnnnnnnnnnnnnnnnnnnnnnnnnnnnnnnnnnnnnnnnnnnnnnnnnnnnnnnnnnnnnnnnnnnnnnnnnnnnnnnnnnnnnnnnnnnnnnnnnnnnnnnnnnnnnnnnnnnnnnnnnnnnnnnnnnnnnnnnnnnnnnnnnnnnnnnnnnnnnnnnnnnnnnnnnnnnnnnnnnnnnnnnnnnnnnnnnnnnnnnnnnnnnnnnnnnnnnnnnnnnnnnnnnnnnnnnnnnnnnnnnnnnnnnnnnnnnnnnnnnnnnnnnnnnnnnnnnnnnnnnnnnnnnnnnnnnnnnnnnnnnnnnnnnnnnnnnnnnnnnnnnnnnnnnnnnnnnnnnnnnnnnnnnnnnnnnnnnnnnnnnnnnnnnnnnnnnnnnnnnnnnnnnnnnnnnnnnnnnnnnnnnnnnnnnnnnnnnnnnnnnnnnnnnnnnnnnnnnnnnnnnnnnnnnnnnnnnnnnnnnnnnnnnnnnnnnnnnnnnnnnnnnnnnnnnnnnnnnnnnnnnnnnnnnnnnnnnnnnnnnnnnnnnnnnnnnnnnnnnnnnnnnnnnnnnnnnnnnnnnnnnnnnnnnnnnnnnnnnnnnnnnnnnnnnnnnnnnnnnnnnnnnnnnnnnnnnnnnnnnnnnnnnnnnnnnnnnnnnnnnnnnnnnnnnnnnnnnnnnnnnnnnnnnnnnnnnnnnnnnnnnnnnnnnnnnnnnnnnnnnnnnnnnnnnnnnnnnnnnnnnnnnnnnnnnnnnnnnnnnnnnnnnnnnnnnnnnnnnnnnnnnnnnnnnnnnnnnnnnnnnnnnnnnnnnnnnnnnnnnnnnnnnnnnnnnnnnnnnnnnnnnnnnnnnnnnnnnnnnnnnnnnnnnnnnnnnnnnnnnnnnnnnnnnnnnnnnnnnnnnnnnnnnnnncagcctggctgtgtggcagcggggggctggggacagcaaaggggcggctcagtcccgaggctcagcatggctggcagcgcggcccacacacacgttcaagcccaggactgcccgggcgcgggattcaggcgctgcgcgtgcgctcagtgactaataaaatgacccttagggcca

SEQ ID NO: 21893 - DNA, 243 bp, Macaca Mulatta
tatgagtaatttttttggctccttctcctccactctagtacttccaccctcagtaaggaatggaaacctgtcccgtctgggatgtgaaatgccctctgctttttcccccacattgtttggggctcccagcacctcagccacattgcatgctggattttcattgtcattgttgcaaatgaaatggaacagacatttgacatgcccacttatgcaggacctgatctatgccttcccgggaactga

SEQ ID NO: 21894 - DNA, 913 bp, Macaca Mulatta
  misc_feature (1)...(913): n = A,T,C or G
ggggctctttcccatcttgcaagatggcgggtgaaaaagttgagaagccagatactaaagagaagaaacccgaagccaagaaggctgatgctggtggcaaggtgaaaaagggtaacctcaaggctaagaagcccaagaaggggaagccccattgcagccgcaaccctgtccttgtcagaggaattggcaggtattcccgatccgccatgtattccagaaaggccatgtacaagaggaagtactcagccgctaaatcccagnnnnnnnnnnnnnnnnnnnngaaggttcttgcaactcttacaaaaaccagttggtggtgacaagaacggcagtacccgggaggttaaaacttcgcaaaatgactaaatattatcctactgaagatgtgcccttaaagctgttgaaccacggcaaaaaacccttcattcaatcaagtaaaaaaaactgccagccaacctttaaccccggagaccattttgattatcctacactggaaacccacaagggtacaaaaggtagggtttttctgtaaaccaccttggctaagtggacatgtttatatgctgaactgggaccatcggggtcctcaaatacgaaatttccctacaaagaaggaaacaatatcaaaattttttttgagtatgcatcccctaaacctataattctataaaccacacaatcgtgctaatactaccacaaaaatatcattagaggaatggcctatgctttctaggattataacaaatcccttgccgtaaaaccctcttaaacttaaggaaaggcgcaaggaactttttgacacatgctttatcaaatcaataaaaatgacattaatttcacacaaaagactgctctcatataatattgttcttcctaaaaaattttggggttactacttacccaattatatgta

SEQ ID NO: 21895 - DNA, 539 bp, Macaca Mulatta
tggatgtacgtgtgcacttttccttccgctttcaggtccaagacggccgctggcatcagacactcttcaccttccggacccaagacccccaacagctgcccatcgtcagtgtggacaacctccctcctgcctcatcagggaagcagtaccgcctggaagttggacctgcgtgcttcctctgacctctgacctcttggcccctctaggcctcatggaggagggaagaggaagaggcaaggggagggtaccgaggggcagatagctccaggagaggcagctcccctgcccaagagtccttgggcagaccccagctgttgtctgcccggtagaagtgggtgggggtaggaggggatagggtatccttgggaacaatggatcccagcttagccccaaagaccaaccaaagagccagccagagcaagctggacctgcaacctgcctgagccccatggcctctcagctctgcggccatccccttccctccccagcttcctgcccaaagagcccccacattcaagccaacttgagggaagggggca

SEQ ID NO: 21896 - DNA, 584 bp, Macaca Mulatta
  misc_feature (1)...(584): n = A,T,C or G
ggcactgaattgaatctacaaaagtgaaccatctcagacctttactgatactacaacttttgttttctggtggccaaaataccaaaatgcttattgtatttatggattaaaaactgctcataaaaacctgtgttattactcctactcttgaagatgacaatattctacgtggtcaaatatttggactcattcaggacttagacatttcagtgtacttgattttttaatttaactctttttcacagccatgctaagggtaaaaatgaataaatttctgtttgtcttccttttcgatgnnnnnnnnnnnnnnnnnnnnnnnnnnnnnnnnnnnnnnnnnnnnnnnnnnnnnnnnnnnnnnnnnnnnnnnnnnnnnnnnnnnnnnnnnnnnnnnnnnnnnnnnnnnnnnnnnnnnnnnnnnnnnnnnnnnnnnnnnnnnnnnnnnnnnnnnnnnnnnnnnnnnnnnnnnnnnnnnnnnnnnnnnnnnnnnnnnnnnnnnnnnnnnnnnnnnnnnnnnnnnnnnnnnnnnnnnnnnnnnnnnnnnnnnnnnnnnnnnnnnnnnnnnnnnnnnnnnnnnnnnnnnnnnn

SEQ ID NO: 21897 - DNA, 821 bp, Macaca Mulatta
gcatcaaactacctcaccacggagtacgagatctcaaaatggaacaggatgcccgggggcgctatctgctgttcaatggccagaggcccagcgatggtccagtccagacaggccagagaagagagccacgtcctaccaggatgcccttggtccagtgtgcctcctcttcgccgagggcagaggacctcgcagaagacggtggaagccgcctgtatggccgggcccctgggaggcacacctggcccctgctgctggctgcactcgcctgccttgtcactctgctgcattggaacatccgcagatagaagtttcagaaagttgtatttttccaaaccaggattccttgctattgacagattttctttaccgaaagaaaagacatttattcttttgatgcacttgaatgccagagaactgtccttcttttttttcctctccctccctcctgcccctgagtcatgaacagcaaggagtgtttgaagtttctgctttgaactccgtccagcctgatccctggcctgagcaacttcacaacagtaattgcactttaagacagccgagagttttggacgagcatgtttggtagcagggatgaaagctaaggccctcttatttttttctcttaattattattatatttctgacttaaacttagaagaaacaactatcaagctacagtttttcctgccattttcctgtggttgcagcctgtcttcctttgaaattgtttcactctctgagttttatatgctggaatccaatgcagagttggtttgggactgtgatcaagacaccttttattaataaagaagagacacagg

SEQ ID NO: 21898 - DNA, 259 bp, Macaca Mulatta
  misc_feature (1)...(259): n = A,T,C or G
gatgctgcgtccttgaagaaggcctatgagttgatcaaatcggccaacctagggaaatcggagtttgacccctcagagagcttcagcccagacctgtttgttctgtgtgcagagcaggccctnnagatggggcagccagaggtgagcgaggactgcatccaaatgtacttcaaggtgaaggcgcccatcacccagtttctgggccgagcgcacctgtgcagggcccagatgtgtgccccaaagtcggcagaaaacctgg

SEQ ID NO: 21899 - DNA, 580 bp, Macaca Mulatta
gtccccttagctgctctgacctacaaatgcacgcgagaccagtggacggtgtattgccgggtcatccgagaaaagaacctctgccaggacatgcggtggtaccagcgctgctgccagacctgcagggacttctatgcaaacaagatgcgccagccaccgccaagctcgtgacgcgcagccccgggggtcgctcaaggctcagactcgaggtctgaaagccgcccacccccaagcgtatcagccttgcggccatgcccccacaaggctaccacaagaatacaactgcatagaacatgagtgtggacttgacgtttgccattaaagcttctgtacttaatatattgttaacagccactggatggctttctacagtgaggaaaaagtaggcatgagtcacaaaataactttaatttctaggattccaggtacctcgaaggggagcacctctggcagacaaccgtcaagagagagacatcatttagtgttcctgtcttggctcgctttcgacatttgaattcccagtgcttggtataacatggaggaaacatccccaaaacgagacatgttagaagaggcttta

SEQ ID NO: 21900 - DNA, 1148 bp, Macaca Mulatta
  misc_feature (1)...(1148): n = A,T,C or G
aggaagctgcttccaagcttaaaaactaagaagcctcgagaacttgtgctagtgattggaacaggcattagtgctgcagttgcgcctcaagttccagccctcaaatcctggaaggggttaattcaggctttactggatgctgccattgattttgatctgttagaagatgaggagagcaaaaagtttcagaaatgtctccatgaagacaagaaccttgtccatgttgcccatgacctcatccagaagctctctccnnnnnnnnnnnnnnnnnnnnnnnnnnnnnnnnnnnnnnnnnnnnnnnnnnnnnnnnnnnnnnnnnnnnnnnnnnnnnnnnnnnnnnnnnnnnnnnnnnnnnnnnnnnnnnnnnnnnnnnnnnnnnnnnnnnnnnnnnnnnnnnnnnnnnnnnnnnnnnnnnnnngaactgtatgcagcagatctggggaaacagcttgaatcccttgaccttactgatgannnnnnnnnnnnnnnnnnnnnnnnnnnnnnnnnnnnnnnnnnnnnnnnnnnnnnnnnnnnnnnnnnnnnnnnnnnnnnnnnnnnnnnnnnnnnnnnnnnnnnnnnnnnnnnnnnnnnnnnnnnnnnnnnnnnnnngagagagattcagaaactttacgaaaacaagtcatttctcttcctgggctgtggctggactgtggatgacaccactttccaggcccttttcctggaggctgtcaagcataaatctgacctagaacatttcatgctggttcggagaggagacgtagatgagttcaaaaagcttcgagaaaacatgctggacaaggggattaaagtcatctcctatggaaatgactatgccgatcttccagaatatttcaagcgactgacatgtgagatctacacaaggggtagatcagnnnnnnnnnnnnnnnnnnnnnnnnnnnnnnnnnnnnnnnnnnnnnnnnnnnnnnnnnnaggctgtagtacatgagcgagctagagaaatcaccaccgttagaccaagctgtaaggccctaccacggacagtgtttaacaaataaacttacaagaacccaacacaactcccagaaagtaacaatagtcagaggttgaagggcggggtagaagaggggggaatgttccagcatagtccttcataccacctggtt

SEQ ID NO: 21901 - DNA, 757 bp, Macaca Mulatta
  misc_feature (1)...(757): n = A,T,C or G
gttaaaagaggaatcctttacagaaatcaaaatttcctgtgggttgttcccgtataccaagtaaaactaaattttgataatagaaaccacagcgatcgganggcaatctgcctctataaggtacaaaactggcacagaggacaccatattatacacagtaaaaatgctgtaagtttaaattacattgtacagggctagggatccctgttcttcccagacagccatattaaatgaaagccactacagtgaactcttaattacataaaacatatccattatctgattgccctttaggaagtatactgaagatgcaagtttttttcatctggagttctgcctgaccaagaattaagcctataaatctatcttgccattcaagcagagagcactagacaaactgaagcacaaaaacaaataagcaaaacttatacaaacagcatgggggtgagggacttaaaagtagacatgctacacctaatgtcaagaagcagcttggtttcctttgccagatatccttgtgaccacatggattgtagattcaatggtcctacacagggtatctaaaatgtcatgttgctgcatatgactaaagagtcctctggaatggccacaactgagagacaaagcaacctcggggtcctgggagggcaaaggttggccatcacagcttctcaagtcagctaagtcagacagaactgcagagatagaagtagaagggaactcagattcttcctcagctagggtagaatccttggcc

SEQ ID NO: 21902 - DNA, 4274 bp, Macaca Mulatta
  misc_feature (1)...(4274): n = A,T,C or G
tcggagccgtctccaggagcccttagagaccgagtcccggcggcgacggcggggcagcgcaccagcaggcgattcattccacttaaaacctgaaaacattggaccacacaaagtcttactgnnnnnnnnnnnnnnnnnnnnnnnnnnnnnnnnnnnnnnnnnnnnnnnnnnnnnnnnnnnnnnnnnnnnnnnnnnnnnnnnnnnnnnnnnnnnnnnnnnnnnnnnnnnnnnnnnnnnnnnnnnnnnnnnnnnnnnnnnnnnnnnnnnnnnnnnnnnnnnnnnnnnnnnnnnnnnnnnnnnnnnnnnnnnnnnnnnnnnnnnnnnnnnnnnnnnnnnnnnnnnnnnnnnnnnnnnnnnnnnnnnnnnnnnnnnnnnnnnnnnnnnnnnnnnnnnnnnnnnnnnnnnnnnnnnnnnnnnnnnnnnnnnnnnnnnnnnnnnnnnnnnnnnnnnnnnnnnnnnnnnnnnnnnnnnnnnnnnnnnnnnnnnnnnnnnnnnnnnnnnnnnnnnnnnnnnnnnnnnnnnnnnnnnnnnnnnnnnnnnnnnnnnnnnnnnnnnnnnnnnnnnnnnnnnnnnnnnnnnnnnnnnnnnnnnnnnnnnnnnnnnnnnnnnnnnnnnnnnnnnnnnnnnnnnnnnnnnnnnnnnnnnnnnnnnnnnnnnnnnnnnnnnnnnnnnnnnnnnnnnnnnnnnnnnnnnnnnnnnnnnnnnnnnnnnnnnnnnnnnnnnnnnnnnnnnnnnnnnnnnnnnnnnnnnnnnnnnnnnnnnnnnnnnnnnnnnnnnnnnnnnnnnnnnnnnnnnnnnnnnnnnnnnnnnnnnnnnnnnnnnnnnnnnnnnnnnnnnnnnnnnnnnnnnnnnnnnnnnnnnnnnnnnnnnnnnnnnnnnnnnnnnnnnnnnnnnnnnnnnnnnnnnnnnnnnnnnnnnnnnnnnnnnnnnnnnnnnnnnnnnnnnnnnnnnnnnnnnnnnnnnnnnnnnnnnnnnnnnnnnnnnnnnnnnnnnnnnnnnnnnnnnnnnnnnnnnnnnnnnnnnnnnnnnnnnnnnnnnnnnnnnnnnnnnnnnnnnnnnnnnnnnnnnnnnnnnnnnnnnnnnnnnnnnnnnnnnnnnnntccttcaataatatgagacattaatttacaaggacccttttgggcttcaatgatgctgagtctggaaaaagggaggagacccttgggaggaccccatgcagctgtgctcccagggctcatgttctctactggattagggataggcacctctgaaatctccaccctgatcattggaatgaaacggagtgaacatgagcccagctgagagaggagcaggaatgtgtgaaaaccagctgctctccttgtcccagcgttgtgattgagccctctgtcttgctctttctgccttccctgtatctttcctatcttaccagagcatctgtttgcttaattaataccaccttccccagccgcaggtgtgtggaacacggtgagnnnnnnnnnnnnnnnnnaaaaatgcaaagttgtcaggatgcttaagctcttttcagatatctgcagtttcatccctactttgttcatacaccatccaagaggcctataggctacccaagagagccttggattcagtggtaccctccttgggcccaagggcttcagcaactgtgtatggagttccttgattttcctttggtcccaaatacagccctcacacccttggaatttccgggtgtgggggtagccccaaaaggaggaatctcctatggccaataaggtatcttgactttatcaaagtagaagagagagtcacttcgcagtcaaatcatacacacggcctttgatattttaattcatctttagttcgttaaagtaactactaannnnnnnnnnnnnnnnnnnnnnnnnnnnnnnnnnnnnnnnnnnnnnnnnnnnnnnnnnnnnnnnnnnnnnnnnnnnnnnnnnnnnnnnnnnnnnnnnnnnnnnnnnnnnnnnnnnnnnnnnnnnnnnnnnnnnnnnnnnnnnnnnnnnnnnnnnnnnnnnnnnnnnnnnnnnnnnnnnnnnnnnnnnnnnnnnnnnnnnnnnnnnnnnnnnnnnnnnnnnnnnnnnnnnnnnnnnnnnnnnnnnnnnngccatgtgaaaatcacggcactgcccttagccttgtgtcatctgctttttcgttctgcaatatgcccagttcccaaatcaattgtaagtacctgtttaggagagagaaagattttacctctcaaagggtgagattggaaatttacactaaaaagacaactttacatttaatgcttcacttaatgaaacattctttttttataagtctatttttctactcagtttcagaacactaatctgattttcactctgatttttaacgtttctttaaatatttataatgtagcttctttcaaaatattttcatgaaaaattacttttattataccattatgtgcacgttattggtagcaggcatagtttattatttagtactgaaacatgctcttttacctaacggtaaacaagtatgttttgatatatatctgttaatatgcttatagtggtaagaaatggacttgaggtcgcaggagatttcattttctttgccctggtcaaatacaataaaggccatgagtataaatatgtaacttcctaaccaggtgtagggcatgttcatgaatatcaaatcttttgatgctggacccaagaggggaaaaattgtagctaaatgttgatttacttataactagacgtctgtgtgagaaaatatatgtatacgtatatatgatatgcagaagtcacttttatttatcaggctttattctccttacaaagccacagtttaactgtctgcagcagttggtttatgttaatgatagacaaatacccagggtttgttattttttaaaagctaccacntgtaatgatatactttctcacgtatatacaagcgacttcttggcttcattnnnnnnnnnnnnnnnnnnnnnnnnnnnnnnnnnnnnnnnnnnnnnnnnnnnnnnnnnnnnnnnnnnnnnnnnnnnnnnnnnnnnnnnnnnnnnnnnnnnnnnnnnnnnnnnnnnnnnnnnnnnnnnnnnnnnnnnnnnnnnnnnnnnnnnnnnnnnnnnnnnnnnnnnnnnnnnnnnnnnnnnnnnnnnnnnnnnnnnnnnnnnnnnnnnnnnnnnnnnnnnnnnnnnnnnnnnnnnnnnnnnnnnnnnnnnnnnnnnnnnnnnnnnnnnnnnnnnnnnnnnnnnnnnnnnnnnnnnnnnnnnnnnnnnnnnnnnnnnnnnnnnnnnnnnnnnnnnnnnnnnnnnnnnnnnnnnnnnnnnnnnnnnnnnnnnnnnnnnnnnnnnnnnnnnnnnnnnnnnnnnnnnnnnnnnnnnnnnnnnnnnnnnnnnnnnnnnnnnnnnnnnnnnnnnnnnnnnnnnnnnnnnnnnnnnnnnnnnnnnnnnnnnnnnnnnnnnnnnnnnnnnnnnnnnnnnnnnnnnnnnnnnnnnnnnnnnnnnnnnnnnnnnnnnnnnnnnnnnnnnnnnnnnnnnnnnnnnnnnnnnnnnnnnnnnnnnnnnnnnnnnnnnnnnnnnnnnnnnnnnnnnnnnnnnnnnnnnnnnnnnnnnnnnnnnnnnnnnnnnnnnnnnnnnnnnnnnnnnnnnnnnnnnnnnnnnnnnnnnnnnnnnnnnnnnnnnnnnnnnnnnnnnnnnnnnnnnnnnnnnnnnnnnnnnnnnnnnnnnnnnnnnnnnnnnnnnnnnnnnnnnnnnnnnnnnnnnnnnnnnnnnnnnnnnnnnnnnnnnnnnnnnnnnnnnnnnnnnnnnnnnnnnnnnnnnnnnnnnnnnnnnnnnnnnnnnnnnnnnnnnnnnnnnnnnnnnnnnnnnnnnnnnnnnnnnnnnnnnnnnnnnnnnnnnnnnnnnnnnnnnnnnnnnnnnnnnnnnnnnnnnnnnnnnnnnnnnnnnnnnnnnnnnnnnnnnnnnnnnnnnnnnnnnnnnnnnnnnnnnnnnnnnnnnnnnnnnnnnnnnnnnnnnnnnnnnnnnnnnnnnnnnnnnnnnnngccatgtacttacaaacacatattctcttgatgtctcagtaaatttgcatttgatatatcattgatgagattttgttgttatataatattcttcggctactcatctgtccagcatcttattaaccataacactgtgatcattgtttggaaatatgtcctatggaaagaataaaaggatttacttcacagctagcatgttcacagatttgaaagaagtttcattaaaagcgccattgctttct

SEQ ID NO: 21903 - DNA, 931 bp, Macaca Mulatta
gaggctgagcggggccctgacggccgtagcttcgttattgccaccactcggcagcgcctcttccagttcataggccgagcagcagagggggctgaggcccagggtttctcagggctctttgcagcttacacggaccacccacccccattccgtgagtttcccagcaacctgggctacagtgagctggccttctacactcccaagctgcgctccgcaccccgggcctttgcctggatgatgggggatggtgtgctgtatggggcattggactgtggacgccctgactctctgctgagcgaggagcgagtctgggagtacccagagggggtagggcctggggccagcccacccctagccatcgtcttgacccagttccacttcctgctgctgctggcagaccgggtggaggcagtgtgcacactgaccgggcaggtggtgctgcgggatcacttcctggagaaatttgggccgctgaagcacatggtgaaggactcctccacaggccagctgtgggcctacactgagcgggctgtcttccgctaccatgtgcaacgggaggcccgagatgtctggcgcacctatctggacatgaaccgcttcgatctggccaaagagtattgccgagagcggcccgactgcctggacacggtcctggcccgggaggccgatttctgctttcgccagcgtcgctacctggagagcgcacgctgctatgccctgacccagagctactttgaggagattgccctcaagttcctggaagcccgacaggaggaggctctggctgagttcctgcagcgaaaactggccagtttgaaggcagccgagcgtacccaggctacactgctgaccacctggctgacagagctctacctgagccggcttggggctctacagggtgacccagaggccctgaccctctaccgagaaa

SEQ ID NO: 21904 - DNA, 641 bp, Macaca Mulatta
  misc_feature (1)...(641): n = A,T,C or G
ttagaagagtgggtgaaaaaattaagaatggcgggggcgggggaggattctttgcaaagagtgaagacgaatcataaaaatggggagagacgaaagttaatagttcaatattgttttttattatatatgtttgatatattagattttgtctttattgtagttttttgnnnnnnnnnnnnnnnnnnnnnnnnnnnnnngattgatctgatgtctcttttatttataacaatgttaaatggaattgtcttgtacctagacttaagtattacacattaaagtacaacaagctgtaaacttgggtttttgtgatacaggaaatggtttccatctgtgttttggtcctctgatttcacatataacaacctagtactttattagtttaaaaagaaattgaggttgttcaaagtttaagcaattcatcctctctgaacacacattgctattcccatcccacccccaatgcacagggccgcaacaccacgaattccgcccgttctctccagtgtgtgtaacagggtcacaagaattcgacagccagatgctccaagagggtggcccaaggctatagcccctccttcaatgttgaccttctgtgggtttaatccaagttctttaactattgcaacagagagggctgcccc

SEQ ID NO: 21905 - DNA, 485 bp, Macaca Mulatta
gaaatgtataacaaatacgtgtattctttccactcacagcatcgagtacacactattctcacggcagacctggttattgtgatgaagcgaggaaatattttagaatatgacactccagaaagcctcttggctcgggaagatggagtatttgcttcttttgttcgagcagacatgtgaaggagtgtcttaaaacaatacgtgtatttaaaataatgcagtcataacctaattaacgttaatggatcatcggcttgacctctgtaaagtggcatcttaaacttttacagatttttgcacaagaagttgacatttatttttcctgttttttaaaacagtttttcaaggtattattgcataatatgttcattattgatgtttttatagtgatcaagccactctacctttaagaataactaggttgtattaaaacatgtaagctactttaagtggtaaatcaatagctaaagttttctcataactttaag

SEQ ID NO: 21906 - DNA, 841 bp, Macaca Mulatta
  misc_feature (1)...(841): n = A,T,C or G
ggagactagaagtatttgtgggaggagtgacatgaagcatgagttatctgatttttttttgtagctgctaaatattttaagccttcatttgcaattcatgtaacagttgtgtcataaattacacaataaagcagtcctgttcnnnnnnnnnnnnnnnnnnggcttgtagaatttttaaaaaagtgatcttaggttttttcatgcggaatgcagatgggtgctatcagagcctctcccacaccactatagtgtaataatgttattattactctacactgaaacgtattcagagttagatgttattttagctttagttgttctttagaggctttcaaatgtaccgatgatactgtttcttgcactgattatataaacactccacagtgtttatattgggaagatattgggaaggaaatatatttgtaaaagatgaaggctgtannnnnnnnnnnnnnnnnnnnnnnctggttcacttaaattctttagaggatgggatgtatttttcttgctgaatgttcagtgctttttcccttttcatttgntggttctgggggccacactatgaaccttagcctacttggccaaacttttccccgatggatttgattgacaaattaaagggtggtgtactttgcccaagaccctgcaaaatattgtcttgcaggggtttccccctttgaaaccaaagcgtggnggggaccctttgccttttcccccaaaagacttggcgttcacttccaccctccgcgtgggcacataaattgggcaggggcctccaattttcctcttcgagcgtgagcgtttcaagagctcttcgaaggcttgaaatttggcgaagaac

SEQ ID NO: 21907 - DNA, 1006 bp, Macaca Mulatta
ggtagagtagcttaaaaagttgtcatagtttgaatagctcatatggagatgagtttgtatgctgtactatgcagcatttaaagttagtgggttttgtgatttttgtattgaatattgccatctgttacaaagtcaattaaaggtacgttttaatatttaaattattctatcttggagataaaatctatatgtgcaattcactggtatgcccattttattatgtaaacaagagatttggcatgacatgttctgttgatttcaggaaaaaatgtctttaatgctttttcatgaactaacacagtaattcctatactggattttaggtctctgaggaactgctggtgtttaggaactaaagtatgcatggaaccctaaattaccaagaaagcttaatactgacattcaatgcaaagaaattaagtggggaaaaaaatagaaagaaatcttgagcaatttggtaggatggcctatgaattcctttatacaaacactcccccccaaatattttagtttggtagaaatttcaaaaggggggatataaaatattttttaagccacattttaaacgcttaataaacagaagaaggggcccagaaatatacttttagtttgctctgcagagagtgtaatcaactttatccaccattatataaacgcactttatttctttggcccctacaggtaaaattttatattttcaccccccgatcttaaaaagatcaccatttaatggggaggaccgacccttgtgttccacaatatttgaccctaagcaccttttgagttattggcaacgccatatttttaaaactctatttggtttataatgacgcgatcgcaaaagcgtcactcctatagcctccaatttctttaagatggcaaattattataaagttcacttctaattattgcatcgctcttgtagtccccaacacaaaatattggggcaagattatccataaaattggctctcggaagacctggggttatttattactctccgaaa

SEQ ID NO: 21908 - DNA, 1282 bp, Macaca Mulatta
  misc_feature (1)...(1282): n = A,T,C or G
ggggacaaactagtaggtttgtcaagtttaatataaagcactgatgtaacttgctaggtaaacggaaggataagttctaactgcctactatccaatgtcagttaattggtgtcttccccctcatttgctctctgccctaaaacgtgtcccagatgccttcactggctgttttacttctatgttctgcttttcttcctctctttgttcccttcctgtctatccattgagcttatgaaatggaagagttaactgcatgcactagtgtttggagggtgttgtggtttgtctttctaattaggtgtatagcctattcactttcctagaataaatctcttaacctacatttgagtagtctccattttggcaactcctctagcagcttggtagcctagtacaggtnnnnnnnnnnnnnnnnnnnnnncaggaaggaggagtgaattttattaacatgtttgccaaatgtattgagatttggcctctgaagaacactttttcagtgttaagttgtctttaccttaagattgagaaatactttagaatattattaattttaagtcctgtcttcacgtccttttggaaaacttgtgttaccatgggtttggaaaaaggacaacaaaaggcttttcgtgtaaagataagatctctagctgtctctaaccctgtccttttttcacagcattttttctagttttgcttcattgcttatcattaggatagggtaagttaagtttgctatgctgctagcatcctaagatgatacctttgttgaaagaattgtgaatagcatgattcatttctagcagaggctgagtttaggacagcagcttccattgagaagtctttctgtgtcgtgaatagcattttaatgacctcttggctcacataagcaaacaacatagggacgtatctgctatgaaaatccacaaatttttcagatagtgccctaaaaacaattttatatgcctcactggttgttattcttaggttgtttccacacttgactttatcattgtttactactagtaaaaagcagcattgccaaataatccctaattttccactaaaaatataatgaaatgatgttaagctttttgaaaagtttaggttaaacctactgttgttagattaatgtatttgttgcttccctttatctggaatgtggcattagcttttttattttaaccctctttaattcttattcaattccatgacttaaggtttgagagctaaacactgggatttttggataacagactgacagttttgcataattataatcggc

SEQ ID NO: 21909 - DNA, 411 bp, Macaca Mulatta
  misc_feature (1)...(411): n = A,T,C or G
tgagtcgcgttggacccgtgcggagccagggaaacagcatcagcgagatccaggtaaaagtaatggctgctgtcgtctgcccggcgcaattgtgagtgacctttaccgctagtgcgcgccaccccacatgaacctgtagggttatgcccagtctacagacgaggaaaccaaggtccaaagaagttgagtcaccggcagagctgggattacatctaagatctctccagggggcgagaactgcagcggcatcatgatgatttatcatctccannnnnnnnnnnnnnnncctagacgcataaaaatcgcttctctgtagagtgggctcaatgagctcaatgtgattcaagttaaggaactgggccctaagtcaaatgcgcctaaacacaatttgcctctttattatttattcag

SEQ ID NO: 21910 - DNA, 801 bp, Macaca Mulatta
  misc_feature (1)...(801): n = A,T,C or G
gggaaaaccttcccaaaaggacatctcctggtggcttcaaatttactttctcccactctgccagtgctgctaatggaacaaacagtaaatctgtagtggctcagacaccgccagcaacttctaatggatcctcttccaaaaccacaaacttggctacgtcagtaacagccaccaagggaagtttggttggcttagtggattatccagatgatgaannnnnnnnnnnnnnnnnnnnnncatcccccaggaaaagacctcgtcttggctcataaaatatttattaggagaccctcaacatgtggtcttaaaatgctgcaactgttcaatgagctgtaaatccgaatcagaaggctttctcaatggaacttagaaaatatacaaggagtagcaaaagacactcaatatatcagctaagggagtttagttctaataaaaaaacaggcttcccaggaacttcattgcttgctagtaattaaaggatttgccttttaggctgtcaaaacaaacgttagtaaccagaaccctgcgagacagattctcaccaaggaaaaagtcccaggtttttgggaagggtttagggggaaggggaaaaaggttggaaataaataatggcagggttggctccctccgggggtatttgattctaaaaaaacaaatttttaaaaaaaacttctcaatttgtaaaaacttccaataaacacatttactcttggtaattaatgggggtgcctcggcccacaaagtattaataattcgttttaaaaatacaagtttgcgcccctcccttctttttataaaaan

SEQ ID NO: 21911 - DNA, 591 bp, Macaca Mulatta
tcaagtaatgagaatgctggattggggttgagaggaaaaatctaaataggaaaattgctgaatgtctttgacaattctctagtatgacaaggcaaatgaggtttcattcctcacagatctatgagtcaggtcaaaccaggagtgcacctatagtctggtctgatagtagaggtttgaccttcccattgtcatagactcatcacatggctaaggaagacagacctctcaaagtgatattgtaatctaggtgaaagacagtaggaatattggctgagattggcccaaacagctgagtcacccaaacaggtgacttctttatccaggtatgagtgaggaaatgaaccacaaactttgtgaccccaaaaccattattccttttagtactaaaattacccctatgtcttttctgacaagtaccctccaccctttgccactctttttatagcctactatttcccaattttatttctacagttagctccatttataagtagatatatttcttccattaagtcaattccttttttacttccttcctgatagacatggccaattcttttagtgaacacttatcaaaagagtcttctgatg

SEQ ID NO: 21912 - DNA, 389 bp, Macaca Mulatta
aaaccttatagtcagacatggccatatatgtttctgtacaaagctgtagttctttcttagtattatagttgccatgtttcttaaaatcaagtaaaaggacttatgagcttaaaaaaaagtgagtttgagagggaaatggaaaagtttccaaagtatttctagtaatttatttccacattgaattgtgtatatgctttatcttaaatataaaataaaagtttattaaaaacttttctcttgccttggacctgaatccctctttttaaagaagagtagcaaatactgctcagaaaagcagtgtatatatagagttgtatctaagtaagattccagtgtaatccaatttctgatctctgaaagtttttagctacaagatgttcaactcacag

SEQ ID NO: 21913 - DNA, 3268 bp, Macaca Mulatta
  misc_feature (1)...(3268): n = A,T,C or G
gaagccatacagcggtaccgctggaacctggctgagtggttcagcaggctgcccagggaggagcgccagtnnnnnnnnnnnnnnnnnnnnnnnnnnnnnnnnnnnnnnnnnnnnnnnnnnnnnnnnnnnnnnnnnnnnnnnnnnnnnnnnnnnnnnnnnnnnnnnnnnnnnnnnnnnnnnnnnnnnnnnnnnnnnnnnnnnnnnnnnnnnnnnnnnnnnnnnnnnnnnnnnnnnnnnnnnnnnnnnnnnnnnnnnnnnnnnnnnnnnnnnnnnnnnnnnnnnnnnnnnnnnnnnnnnnnnnnnnnnnnnnnnnnnnnnnnnnnnnnnnnnnnnnnnnnnnnnnnnnnnnnnnnnnnnnnnnnnnnnnnnnnnnnnnnnnnnnnnnnnnnnnnnnnnnnnnnnnnnnnnnnnnnnnnnnnnnnnnnnnnnnnnnnnnnnnnnnnnnnnnnnnnnnnnnnnnnnnnnnnnnnnnnnnnnnnnnnnnnnnnnnnnnnnnnnnnnnnnnnnnnnnnnnnnnnnnnnnnnnnnnnnnnnnnnnnnnnnnnnnnnnnnnnnnnnnnnnnnnnnnnnnnnnnnnnnnnnnnnnnnnnnnnnnnnnnnnnnnnnnnnnnnnnnnnnnnnnnnnnnnnnnnnnnnnnnnnnnnnnnnnnnnnnnnnnnnnnnnnnnnnnnnnnnnnnnnnnnnnnnnnnnnnnnnnnnnnnnnnnnnnnnnnnnnnnnnnnnnnnnnnnnnnnnnnnnnnnnnnnnnnnnnnnnnnnnnnnnnnnnnnnnnnnnnnnnnnnnnnnnnnnnnnnnnnnnnnnnnnnnnnnnnnnnnnnnnnnnnnnnnnnnnnnnnnnnnnnnnnnnnnnnnnnnnnnnnnnnnnnnnnnnnnnnnnnnnnnnnnnnnnnnnnnnnnnnnnnnnnnnnnnnnnnnnnnnnnnnnnnnnnnnnnnnnnnnnnnnnnnnnnnnnnnnnnnnnnnnnnnnnnnnnnnnnnnnnnnnnnnnnnnnnnnnnnnnnnnnnnnnnnnnnnnnnnnnnnnnnnnnnnnnnnnnnnnnnnnnnnnnnnnnnnnnnnnnnnnnnnnnnnnnnnnnnnnnnnnnnnnnnnnnnnnnnnnnnnnnnnnnnnnnnnnnnnnnnnnnnnnnnnnnnnnnnnnnnnnnnnnnnnnnnnnnnnnnnnnnnnnnnnnnnnnnnnnnnnnnnnnnnnnnnnnnnnnnnnnnnnnnnnnnnnnnnnnnnnnnnnnnnnnnnnnnnnnnnnnnnnnnnnnnnnnnnnnnnnnnnnnnnnnnnnnnnnnnnnnnnnnnnnnnnnnnnnnnnnnnnnnnnnnnnnnnnnnnnnnnnnnnnnnnnnnnnnnnnnnnnnnnnnnnnnnnnnnnnnnnnnnnnnnnnnnnnnnnnnnnnnnnnnnnnnnnnnnnnnnnnnnnnnnnnnnnnnnnnnnnnnnnnnnnnnnnnnnnnnnnnnnnnnnnnnnnnnnnnnnnnnnnnnnnnnnnnnnnnnnnnnnnnnnnnnnnnnnnnnnnnnnnnnnnnnnnnnnnnnnnnnnnnnnnnnnnnnnnnnnnnnnnnnnnnnnnnnnnnnnnnnnnnnnnnnnnnnnnnnnnnnnnnnnnnnnnnnnnnnnnnnnnnnnnnnnnnnnnnnnnnnnnnnnnnnnnnnnnnnnnnnnnnnnnnnnnnnnnnnnnnnnnnnnnnnnnnnnnnnnnnnnnnnnnnnnnnnnnnnnnnnnnnnnnnnnnnnnnnnnnnnnnnnnnnnnnnnnnnnnnnnnnnnnnnnnnnnnnnnnnnnnnnnnnnnnnnnnnnnnnnnnnnnnnnnnnnnnnnnnnnnnnnnnnnnnnnnnnnnnnnnnnnnnnnnnnnnnnnnnnnnnnnnnnnnnnnnnnnnnnnnnnnnnnnnnnnnnnnnnnnnnnnnnnnnnnnnnnnnnnnnnnnnnnnnnnnnnnnnnnnnnnnnnnnnnnnnnnnnnnnnnnnnnnnnnnnnnnnnnnnnnnnnnnnnnnnnnnnnnnnnnnnnnnnnnnnnnnnnnnnnnnnnnnnnnnnnnnnnnnnnnnnnnnnnnnnnnnnnnnnnnnnnnnnnnnnnnnnnnnnnnnnnnnnnnnnnnnnnnnnnnnnnnnnnnnnnnnnnnnnnnnnnnnnnnnnnnnnnnnnggctgtccaacaacccgctgatggcggcaggtgttgccctgctgatggaggggctggcaggaaacacctcagtgacacacctgtccctgctgcacaccggccttggggacgaaggtctggagctgctggctgcccagctggatcgcaaccggcagctgcaggagctgaacgtggcttacaatggtgctggtgacacagcggccctggccctggccagagctgcccgggagcacccttccctggaactgcnnnctctacttcaatgagctgagctcagagggccgccaggtcttgcgagacttggggggtgctgctgaaggtggtgcccgggtggtggtgtcactgacagaggggacggcggtgtcggaatactggtcactgatcctcagcgaagtccagcggaacctcaacagctgggaccgggcccgggtccagcgacaccttgagctcctcctgcgggatctggaagatagccggggtgctacccttaatccttggcgcaaggcccagctgctgcgagtggagggcgaggtgaggggcctcctagagcagctgggaggctctggaagctgagacactggcggcaggcacctaactatgtgaccactggccctaaacctcttccctctgtggcctcctggcttgcactgctccccctagaaagattccttcaggtctgggggcaaaggaatgggcacagctgtgccagttgccctcctagggcatgttcgatcaggaccgagtctggaatctccaagttaaagatggtgaatcaatgcttcgggcttggagatggaacatgcctcctctccattcatcaagaaggaccaaagcatgtggcatttggatggccagagtgccctgaagcaccaccaccaaccttgcctccccctcctctcaaggagcctctgattgtgccaccaaggggctcacatcttatgtctgccatgccaggggtgttgccatccagatgtgttggaaacttcccctcatgacttatgctcacctgtggacactgagggtgccctcgcattggtgctttctcctcatcctcatgccccctttgccacagtggtacgatggcttggtggccccgcgaggcagatgcacctgacttgctgctattaaaaagctgtgtgccttc

SEQ ID NO: 21914 - DNA, 803 bp, Macaca Mulatta
  misc_feature (1)...(803): n = A,T,C or G
gggaatttggtcttgctgtcccaggcgggatggtgccgctgtgccaggttgtagtattatattttgcaaaaagtgctgaaataacaggagttcgttcagagaccatttctgtgccacaagaaataaaagcgttgcagctgtggaaggagatagaaactcgacatcctggattggttgctgttagaaatcagataatatttgctgttcgtcaagaatatgtcgagcttggagatcagctcctcctgcttcaaccgggagacgaaattgccgttatcccccccattagtggaggatagtgcttttgagccgtctaggaaagatatagatgaagttgaagagaaatctaaagacgttataaactttactgctgagaaactttcagtagatgaagtctcacagttggtgatttctccgctctgtggtgcagtatctctatttgtagcttggttccagtgtcagaagcaagcataatcattgctgtgtcctcagcccacagagctgcatctcttgaagctgtgagctatgccattgatactttaaaagcccaggtgcccatatggaaaaaagaaatttttgaagagtcatcatcttgggaaaggaaacaagagggcttttggggtatcccaccattaatccctttactttttagagcccggcaatcttaactttggttaaactatggatctttggtccccatttttgaatttttttcccctccccctttagggaaagtttaactgaaaaccacgggcttccttatggtaaacaaaaagggggaannnnnnnnnnnnnnnnnnnnnaac

SEQ ID NO: 21915 - DNA, 1564 bp, Macaca Mulatta
  misc_feature (1)...(1564): n = A,T,C or G
tggcccagacactgcagatggagttccacaactaatggaacagcatcctggagtgcctcaatgagcagcggctacagggcctgtactgtgacgtgtcggtggtggtcaagggccatgccttcaaggcccaccgggccgtgctggctgccagcagctcctacttccgggacctgttcaacaacagccgcagcgccgtgatggagctgccggcggccgtgcttttttttctttccagcagatcctcagcttctgctacacggttcggctgagcatgaacgtgggtgaccagttcctgctcatgcacacggctggcttcctgcagatccaggagaccatgcgagaagggccccgcagttcttcnnnnnnnnnnnnnnnnnnnnnnnnnnnnnnnnnnnnnnnnnnnnnnnnnnnnnnnnnnnnnnnnnnnnnnnnnnnnnnnnnnnnnnnnnnnnnnnnnnnnnnnnnnnnnnnnnnnnnnnnnnnnnnnnnnnnnnnnnnnnnnnnnnnnnnnnnnnnnnnnnnnnnnnnnnnnnnnnnnnnnnnnnnnnnnnnnnnnnnnnnnnnnnnnnnnnnnnnnnnnnnnnnnnnnnnnnnnnnnnnnnnnnnnnnnnnnnnnnnnnnnnnnnnnnnnnnnnnnnnnnnnnnnnnnnnnnnnnnnnnnnnnnnnnnnnnnnnnnnnnnnnnnnnnnnnnnnnnnnnnnnnnnnnnnnnnnnnnnnnnnnnnnnnnnnnnnnnnnnnnnnnnnnnnnnnnnnnnnnnnnnnnnnnnnnnnnnnnnnnnnnnnnnnnnnnnnnnnnnnnnnnnnnnnnnnnnnnnnnnnnnnnnnnnnnnnnnnnnnnnnnnnnnnnnnnnnnnnnnnnnnnnnnnnnnnnnnnnnnnnnnnnnnnnnnnnnnnnnnnnnnnnnnnnnnnnnnnnnnnnnnnnnnnnnnnnnnnnnnnnnnnnnnnnnnnnnnnnnnnnnnnnnnnnnnnnnnnnnnnnnnnnnnnnnnnnnnnnnnnnnnnnnnnnnnnnnnnnnnnnnnnnnnnnnnnnnnnnnnnnnnnnnnnnnnnnnnnnnnnnnnnnnnnnnnnnnnnnnnnnnnnnnnnnnnnnnnnnnnnnnnnnnnnnnnnnnnnnnnnnnnnnnnnnnnnnnnnnnnnnnnnnnnnnnnnnnnnnnnnnnnnnnnnnnnnnnnnnnnnnnnnnnnnnnnnnnnnnnnnnnnnnnnnnnnnnnnnnnnnnnnnnnnnnnnnnnnnnnnnnnnnnnnnnnnnnnnnnnnnnnnnnnnnnnnnnnnnnnnnnnnnnnnnnnnnnnnnnnnnnnnnnnnnnnnnnnnnnnnnnnnnnnnnnnnnncagaactttgcccccaacttcaaggagagcgagatgaatgccatcgcggccgacatgtgcaccaatgcccgccgcgtcgtgcgcaagagctggatgcccaaggtcaaggtgctcaaggctgaggatgacgcctacaccaccttcatcagtgaaacgggcaagatcgagccggacatgatggctctggagcgtgggttcaagaccgccagccacgagggagaggcgggtccct

SEQ ID NO: 21916 - DNA, 376 bp, Macaca Mulatta
ggattccaacgctggcttcatcccacaattgccgtccctgcacactccacctctgaactgtaaaaaaaggaggaggtcacctggcttgtggaggggcttatttgagctgtatttgattgaaaactgcatgggctacttaatttgttttcttgggcacagttgtcagaaatgcctttctgtggaacccaaccgtaggcagggggaacattcttgtgtgggatgacagggcatttctcagtcaccccaaagtcccagttctccctttggggttgctactgctcttccctctgtaacctgggcagtatggatgtagttgtatcagtgccgtttaatagtactgaaagctggatggatacagaacagctttcctgctttt

SEQ ID NO: 21917 - DNA, 1006 bp, Macaca Mulatta
  misc_feature (1)...(1006): n = A,T,C or G
gtgttggtggcttcttgccagccatgaaacagattggcaacgtggcagccctgcctggaattgttcatnnnnnnnnnnnnnnnnnnnnnnnnnnnnnnnnnnnnnnnnnnnnnnnnnnnnnnnnnnnnnnnnnnnnnnnnnnnnnnnnnnnnnnnnnnnnnnnnnnnnnnnnnnnnnnnnnnnnnnnnnnnnnnnnnnnnnnnnnnnnnnnnnnnnnnnnnnnnnnnnnnnnnnnnnnnnnnnnnnnnnnnnnnnnnnnnnnnnnnnnnnnnnnnnnnnnnnnnnnnnnnnnnnnnnnnnnnnnnnnnnnnnnnnnnnnnnnnnngacttggaggaggccttggagatgggggtggactggtccttaagagaagggtatgcctgggctgaagacaaggagcactgcgaggagtatggaaggatgctgcaagctgaccccaataaggtttctgcaagggctaagaaaagaggccttcctcagnnnnnnnnnnnnnnnnnnnnnnnnnnnnnnnnnnnnnnnnnnnnnnnnnnnnnnnnnnnnnnnnnnnnnnnnnnnnnnnnnnnnnnnnnnnnnnnnnnnnnnnnnnnnnnnnnnnnnnnnnnnnnnnnnnnnnnnnnnnnnnnnnnnnnnnnnnnnnnnnnnnnnnnnnnnnnnnnnnnnnnnnnnnnnnnnnnnnnnnnnnnnnnnnnnnnnnnnnnnnnnnnnnnnnnnnnnnnnnnnnnnnnnnnnnnnnnnnnnnnnnnnnnnnnnnnnnnnnnnnnnnnnnnnnnnnnnnnnnnnnnnnnnnnnnnnnnnnnnnnnnnnnnnnnnnnnnnggcttttgccaaggtcttcaacacaacccctgatgacttggacctgcacgtgatctatgatgtttctcacaacattgccaaagtggagcagcatgtagtggacgggaaggagcggacactgttagtacacaggaagggatccacccgcgccttccctcctcaccatcccctcatagctgttgattaccaa

SEQ ID NO: 21918 - DNA, 932 bp, Macaca Mulatta
  misc_feature (1)...(932): n = A,T,C or G
agggaagcagagactttcaaggaacaaggaaannnnnnnnnnnnnnnnnnnnnnnnnnnnnnnnnnnnnnnnnnnnnnnnnnnnnnnnnnnnnnnnnnnnnnnnnnnnnnnnnnnnnnnnnnnnnnnnnnnnnnnnnnnnnnnnnnnnnnnnnnnnnnnnnnnnnnnnnnnnnnnnnnnnnnnnnnnnnnnnnnnnnnnnnnnnnnnnnnnnnnnnnnnnnnnnnnnnnnnnnnnnnnnnnnnnnnnnnnnnnnnnnnnnnnnnnnnnnnnnnnnnnnnnnnnnnnnnnnnnnnnnnnnnnnnnnnnnnnnnnnnnnnnnnnnnnnnagttcaagaatgctaatgcagtcatggaatatgagaaaatagcagaaacagattttgagaagcgagattttcggaaggnnnnnnnnnnnnnnnnnnnnnnnnnnnnnnnnnnnnnnnnnnnnnnnnnnnnnnnnnnnnnnnnnnnnnnnnnnnnnnnnnnnnnnnnnnnnnnnnnnnnnnnnnnnnnnnnnnnnnnnnnnnnnnnnnnnnnnnnnnnnnnnnnnnnnnnnnnnnnnnnnnnnnnnnnnnnnnnnnnnnnnnnnnnnnnnnnnnnnnnnnnnnnnnnnnnnnnnnnnnnnnnnnnnnnnnnnnnnnnnnnnnnnnnnnnnnnnnnnnnnnnnnnnnnnnnnnnnnnnnnnnnnnnnnnnnnnnnnnnnnnnnnnnnnnnnnnnnnnnnnnnnnnnnnnnnnnnnnnnnnnnnnnnnnnnnnnnnnnnnnnnnnnnnnnnnnnnnnnnnnnnnnnnnnnnnnnnnnnnnnnnnnnnnnnnnnnnnnnnnnnnnnnnnnnnnnnagcttaggaaactagatgatgcaatagaagactgcacaaatgcagtgaagcttgatgacacttacataaaagcctacttgagaagagcccagtg

SEQ ID NO: 21919 - DNA, 756 bp, Macaca Mulatta
atgatggagtgtgagatctcgctgaagaatccacgcacgaacttgccgatgaccagcacgatggagacatacagccccatgatcccgtagccagccaggaagccgaggctcggtgggctgactttgtcgctgaagatgaccatgggcagcaggttgcagtcggtccggcactcctgcagctcgatgacccaccattcaaggaagccggtggccccagcaccctgctccctccgcagctggatgcgcacgccgaggtagtcggcctcctcgttgggctgcagctgcttcacagggttggcttcgggcccattgggggcacggatgtacttggggaagagatttgggatgaccacagactggtccgaggtgccctcgagcaggctggccagctgccgccgttcagtgctgttgggggccagggccagcatgtgcttctcgttggcgtactccacggtgcctcccttggccaggtccctctggaagctccaggtgaagcgcagggtgatgtcagccgtgccgttgtagagctcccgcttcatctgggcgcggctgggtgggctgatgcgccacagcgccccggagctgccctcaatctgcgccgtgacgatgtcctcagggctgtactggctgatgaactgcatggccagtgggtgggggtcaaactgccgggacagctcctcgtaggcctgggccgtgaaggggatgatggacggctgctgggcgctcatgtgaacagcggctcgtagccgcccagct

SEQ ID NO: 21920 - DNA, 641 bp, Macaca Mulatta
  misc_feature (1)...(641): n = A,T,C or G
tgctacgaggtataccgcttgtctacagtccagccaaaggcccaattgcgactgtccaccttgtgtcttcaatgaagaagaacatacccaggaccctngttcaccaagcaggggctcaggaggcccaacctctgcagccatctcactttctcgatatttctgaggattggtctctttacgcagatgatatgattgggtccatgtgatcctcaggtttggggtctcctgaagatgctatttctagacttagtatatagtgtacaaatatctgacaaataagtgcccttgtggccctcatgtgagcactttggagaaagagcaacctatagcaacttcatgaattaagccttttgctatatttttatattcatgtgtaaacaaaactaaataaaattctgatcgcnnnnnnnnnnnnnnnnnnnnnnnnnnnnnnnnnnnnnnnnnnnnnnnnnnnnnnnnnnnnnnnnnnnnnnnnnnnnnnnnnnnnnnnnnnnnnnnnnnnnnnnnnnnnnnnnnnnnnnnnnnnnnnnnnnnnnnnnnnnnnnnnnnnnnnnnnnnnnnnnnnnnnnnnnnnnnnnnnnnnnnnnnnnnnnnnnnnnnnnnnnnnnnnnnnnnnnnnnnnnnnnnnnnnnnnnnnnncg

SEQ ID NO: 21921 - DNA, 684 bp, Macaca Mulatta
  misc_feature (1)...(684): n = A,T,C or G
gcggcctcatttgctgtcaagcttttcaaagcatggatggcagaaaaagatgccaactctgttacctcgtctttgagaaaagccaacttagacaagaggctgcttgnnnnnnnnnnnnnnnnnnnnnnnnnnnnnnnnnnnnnnnnnnnnnnnnnnnnnnnnnnnnnnnnnnnnnnnnnnnnnnnnnnnnnnnnnnnnnnnnnnnnnnnnnnnnnnnnnnnnnnnnnnnnnnnnnnnnnnnnnnnnnnnnnnnnnnnnnnnnnnnnnnnnnnnnggtggtgctttatgtcaaagaagaaatgaagaggaatgatcttccagaaacagcagtgattggtcttctgtggacctgtataatgaacgccgttgagtggaacaagaaggaagaacttgttgcagagcaggctctgaagcacctgaagnnnnnnnnnnnnnnnnnnnnnnnnnnnnnnnnnnnnnnnnnnnnnnnnnnnnnnnnnnnnnnnnnnnnnnnnnnnnnnnnnnnnnnnnnnnnnnnnnnnnnnnnnnnnnnnnnnnnnnnnnnnnnnnnnnnnnnnnnngctgatgttctgagcgaagaagcaatactgaaatggtataaggaagcacatgttgctaaaggcaaaagtgtttttcttgaccagatgaagaaatttgttgagtggttacaaaatgcagaagaag

SEQ ID NO: 21922 - DNA, 569 bp, Macaca Mulatta
  misc_feature (1)...(569): n = A,T,C or G
ggacgagggaaacagataaagaagaagcatcgaaagagcagtcagatagtgatgatgaagaaaagaagcatgaaaaattgaaaaaggcactgaatgcagaggaggcacgccttcttcatgtcaaggagaccatgcagattgatgagaggaagcggccttacaatagcatatatgaaactcgggaacctactgaagaggaaatggaggcatatagaatgaaacgtcagaggccagatgaccccatggcctctttccttggacagtagtaactagtcagatgaccatccaagatagatgcagctgatacattcttttcagcttcttattgatgattgtagataaaaaatccttgtttattcttcttgctgcctgactttaataaatatttcaggtgcctcacagtaagttcactcctttccatactgaagaagnnnnnnnnnnnnnnnnnnnncacgtgaagtatgcttttgggaacagaatttacaatcggattaagattttatttccagttttatgtgagtcatgtgtaaagaaagcttggctctctacctattaagagtgtctctcct

SEQ ID NO: 21923 - DNA, 652 bp, Macaca Mulatta
tgattcaaaacactctattgcaaatgcaaaattcttggaaacagcaaaacaagattctgaccagagctgggtcagtgatgtagttaaagtggatcttacccaatcaagtgttacaaatgcttcttcaggaaatgatcacttgaacatggaaaaagagaagtatgtctcttacatttctcctttaagtgcagtttctgtcatggaagataagctgcataagcgaagtccacctccagagaccttaaaatctaaacttaatacttcagtagatactcacaagataaaatccagtccgtcacctgaagttgttaaacccaaaataactcattctcctgattctgtaaagtctaaggccacttatgtgaacagccaagctactggtgaaagaagactggcaaataagatagaacatgagctgtcaagatgcagttttcatccaattcctactcgaagcagtacattagaaaatacaaagagtcctcttatcattgataaaaatgagcattttacagtttacagagatcctgcacttattgggtcagaaacaggagctaatcatatttcacctttcctaagccagcatccttttcctcttcactcctcatctcatagaacctgtttaaatccaggtacccatcatcttgccttaact

SEQ ID NO: 21924 - DNA, 262 bp, Macaca Mulatta
agaggcggaccctggactgattccatggttctacgtgggggaggggaccatcttacagtgcacagaggggtgcctgcaccaggctcctatggttctccacactgcaccaccatggaggtggggaaactgatgctcgcagaccagccgaacctcagccaggccacccctggacagagacaagcgccacctctgcctccccaacacctcaccactctggtggccaggactcagcagcctgactggccccagtcctgagagctgg

SEQ ID NO: 21925 - DNA, 4055 bp, Macaca Mulatta
  misc_feature (1)...(4055): n = A,T,C or G
tagagctttggaaggctgaatggactaaacatgaagagcttgaaagcgaagttcaggaagagtgannnnnnnnnnnnnnnnnnnnnnnnnnnnnnnnnnnnnnnnnnnnnnnnnnnnnnnnnnnnnnnnnnnnnnnnnnnnnnnnnnnnnnnnnnnnnnnnnnnnnnnnnnnnnnnnnnnnnnnnnnnnnnnnnnnttccatcttgctgctgcaaaaggacatgtggaatgcctcagggtcatggttacacatggtgtggatgtgacagcccaagatactaccggnnnnnnnnnnnnnnnnnnnnnnnnnnnnnnnnnnnnnnnnnnnnnnnnnnnnnnnnnnnnnnnnnnnnnnnnnnnnnnnnnnnnnnnnnnnnnnnnnnnnnnnnnnnnnnnnnnnnnnnagcggcacagggctgccttcaagctgtgcagattctctgcgaacataagagccccataaacctcanagatttggnnnnnnnnnnnnnnnnnnnnnnnnnnnnnnnnnnnnnnnnnnnnnnnnnnnnnnnnnnnnnnnnnnnnnnnnnnnnnnnnnnnnnnnnnnnnnnnnnnnnnnnnnnnnnnnnnnnnnnnnnnnnnnnnnnnnnnnnnnnnnnnnnnnnnnnnnnnnnnnnnnnnnnnnnnnnnnnnnnnnnnnnnnnnnnnnnnnnnnnnnnnnnnnnnnnnnnnnnnnnnnnnnnnnnnnnnnnnnnnnnnnnnnnnnnnnnnnnnnnnnnnnnnnnnnnnnnnnnnnnnnnnnnnnnnnnnnnnnnnnnnnnnnnnnnnnnnnnnnnnnnnnnnnnnnnnnnnnnnnnnnnnnnnnnnnnnnnnnnnnnnnnnnnnnnnnnnnnnnnnnnnnnnnnnnnnnnnnnnnnnnnnnnnnnnnnnnnnnnnnnnnnnnnnnnnnnnnnnnnnnnnnnnnnnnnnnnnnnnnnnnnnnnnnnnnnnnnnnnnnnnnnnnnnnnnnnnnnnnnnnnnnnnnnnnnnnnnnnnnnnnnnnnnnnnnnnnnnnnnnnnnnnnnnnnnnnnnnnnnnnnnnnnnnnnnnnnnnnnnnnnnnnnnnnnnnnnnnnnnnnnnnnnnnnnnnnnnnnnnnnnnnnnnnnnnnnnnnnnnnnnnnnnnnnnnnnnnnnnnnnnnnnnnnnnnnnnnnnnnnnnnnnnnnnnnnnnnnnnnnnnnnnnnnnnnnnnnnnnnnnnnnnnnnnnnnnnnnnnnnnnnnnnnnnnnnnnnnnnnnnnnnnnnnnnnnnnnnnnnnnnnnnnnnnnnnnnnnnnnnnnnnnnnnnnnnnnnnnnnnnnnnnnnnnnnnnnnnnnnnnnnnnnnnnnnnnnnnnnnnnnnnnnnnnnnnnnnnnnnnnnnnnnnnnnnnnnnnnnnnnnnnnnnnnnnnnnnnnnnnnnnnnnnnnnnnnnnnnnnnnnnnnnnnnnnnnnnnnnnnnnnnnnnnnnnnnnnnnnnnnnnnnnnnnnnnnnnnnnnnnnnnnnnnnnnnnnnnnnnnnnnnnnnnnnnnnnnnnnnnnnnnnnnnnnnnnnnnnnnnnnnnnnnnnnnnnnnnnnnnnnnnnnnnnnnnnnnnnnnnnnnnnnnnnnnnnnnnnnnnnnnnnnnnnnnnnnnnnnnnnnnnnnnnnnnnnnnnnnnnnnnnnnnnnnnnnnnnnnnnnnnnnnnnnnnnnnnnnnnnnnnnnnnnnnnnnnnnnnnnnnnnnnnnnnnnnnnnnnnnnnnnnnnnnnnnnnnnnnnnnnnnnnnnnnnnnnnnnnnnnnnnnnnnnnnnnnnnnnnnnnnnnnnnnnnnnnnnnnnnnnnnnnnnnnnnnnnnnnnnnnnnnnnnnnnnnnnnnnnnnnnnnnnnnnnnnnnnnnnnnnnnnnnnnnnnnnnnnnnnnnnnnnnnnnnnnnnnnnnnnnnnnnnnnnnnnnnnnnnnnnnnnnnnnnnnnnnnnnnnnnnnnnnnnnnnnnnnnnnnnnnnnnnnnnnnnnnnnnnnnnnnnnnnnnnnnnnnnnnnnnnnnnnnnnnnnnnnnnnnnnnnnnnnnnnnnnnnnnnnnnnnnnnnnnnnnnnnnnnnnnnnnnnnnnnnnnnnnnnnnnnnnnnnnnnnnnnnnnnnnnnnnnnnnnnnnnnnnnnnnnnnnnnnnnnnnnnnnnnnnnnnnnnnnnnnnnnnnnnnnnnnnnnnnnnnnnnnnnnnnnnnnnnnnnnnnnnnnnnnnnnnnnnnnnnnnnnnnnnnnnnnnnnnnnnnnnnnnnnnnnnnnnnnnnnnnnnnnnnnnnnnnnnnnnnnnnnnnnnnnnnnnnnnnnnnnnnnnnnnnnnnnnnnnnnnnnnnnnnnnnnnnnnnnnnnnnnnnnnnnnnnnnnnnnnnnnnnnnnnnnnnnnnnnnnnnnnnnnnnnnnnnnnnnnnnnnnnnnnnnnnnnnnnnnnnnnnnnnnnnnnnnnnnnnnnnnnnnnnnnnnnnnnnnnnnnnnnnnnnnnnnnnnnnnnnnnnnnnnnnnnnnnnnnnnnnnnnnnnnnnnnnnnnnnnnnnnnnnnnnnnnnnnnnnnnnnnnnnnnnnnnnnnnnnnnnnnnnnnnnnnnnnnnnnnnnnnnnnnnnnnnnnnnnnnnnnnnnnnnnnnnnnnnnnnnnnnnnnnnnnnnnnnnnnnnnnnnnnnnnnnnnnnnnnnnnnnnnnnnnnnnnnnnnnnnnnnnnnnnnnnnnnnnnnnnnnnnnnnnnnnnnnnnnnnnnnnnnnnnnnnnnnnnnnnnnnnnnnnnnnnnnnnnnnnnnnnnnnnnnnnnnnnnnnnnnnnnnnnnnnnnnnnnnnnnnnnnnnnnnnnnnnnnnnnnnnnnnnnnnnnnnnnnnnnnnnnnnnnnnnnnnnnnnnnnnnnnnnnnnnnnnnnnnnnnnnnnnnnnnnnnnnnnnnnnnnnnnnnnnnnnnnnnnnnnnnnnnnnnnnnnnnnnnnnnnnnnnnnnnnnnnnnnnnnnnnnnnnnnnnnnnnnnnnnnnnnnnnnnnnnnnnnnnnnnnnnnnnnnnnnnnnnnnnnnnnnnnnnnnnnnnnnnnnnnnnnnnnnnnnnnnnnnnnnnnnnnnnnnnnnnnnnnnnnnnnnnnnnnnnnnnnnnnnnnnnnnnnnnnnnnnnnnnnnnnnnnnnnnnnnnnnnnnnnnnnnnnnnnnnnnnnnnnnnnnnnnnnnnnnnnnnccagcagaggtgaaagttcccgtcatcccttcagattccagagctgggatcagccacgcccagaggtctggtcctgatgctggcaggggggccccctcctccatacctgaccggctgagtggcttcatcaccaccgagtgatgtactgaggcctcctgcagtgaatatgctccttccattgctgtacttgggcagtgccattcagcacatgagagctctttttgcctttggctttcaattccaaaacatgatttaatttctaactaaattagtatggcactagttatgaagtgtctgcttaaaaccctttatcatggtatcgtgtggatttacaaactctaattccatgttttcttcccatctgccttatatatctcatcaccgtgcttatcaatattcagtttgatgagcgctattaactaaaatatgaaacttaaaaacaaaagcaagttgtccttaaaagttctttttttaaagtaaattgttgacatattgcaaattttctatgcaaacttgcctcctgctgttatccgtgaagctcaggaaatccaaacatttgtgtttcaacaagggacagtaaactgtgtgtttacagccaaaagaaatgcctcatagttcttaacctcaatttttgtaaaagtatttttttctctgtaatatttttattggctcataaagatgttttcatatctaaacccctaaataagtgaaattacagattatattaacaaaatactttttaggtagccatgcttgagactttttaaaaatgtaactttttccttaaagttttcagctatagcaaaaggtagttatgtatgccagaccttctatgagctgccaccaacaccccagaactttcagccatggtgtcttcagaactgtagcgca

SEQ ID NO: 21926 - DNA, 352 bp, Macaca Mulatta
  misc_feature (1)...(352): n = A,T,C or G
gtaactgctgcaagaagggacagacactgctgcagagaacttgccacggtgtctcatgctgcggccggtggtgccaggctgcacgctccattctagggaagggnnnnnnnnnnnnnnnnnnnnnnnnnnnnnnnnnnnnnnnnnnnnnnnnnnnnnnnnnnnnnnnnnnnnnnnnnnnnnnnnnnnnnnnnnnnnnnnnnnnnnnnnnnnnnnnnnnnnnnnnnnnnnnnnnnnnnnnagggccaagggctggaaacttcacctgcctcaccaacaacattctcaggatcgattgccactggtctgccccagagcttggccagggctccagcccctggcttctcttcaccag

SEQ ID NO: 21927 - DNA, 715 bp, Macaca Mulatta
  misc_feature (1)...(715): n = A,T,C or G
ggaaggtcgaaacattttctgaatcaagaatctttaatgagctgaaaactaaaatgcttaatgtaaaagaatataaggagaaactcttgagtaccttgggcaagtttctagaagaccattttcctctgcctgatagaagtgnnnnnnnnnnnnnnnnnnnnnttcaagaatcaactgtacagctgataacactgcatgaaatgttagagattcttataaatagattatttgatgttccacatgatccatatgtcaaaattagtgattccttttggccaccttatgttgagctgctgctgcgtaatggaattgccttgagacatccagaagatccaactcgaataagattagaagctttccatcagtaaaaggatgttttcttttttcacacagtaaaaaaatcttatcattcaagggatattggaaccacaggactatttggataaaaaacattatttgcaaattaatgcacatagtccatcttccttttatcgctaaatggcatgtgctgccatctattattcatttttaaatgatcctttcttcagtcagtgctttggtgttttaaactatatggagaagaatgcaggtagataatattctaggcataaaacatttaataatacccttacctcatgcaatattcctttggaaaattctttgttggatttaatataattgctaaaggtttttcttaaaatgtgtaaaccaatat

SEQ ID NO: 21928 - DNA, 397 bp, Macaca Mulatta
tctggagaaggctgatggggttcctcaaacgctgcccgttcctaaagcaagtcttgcttggggtcacctcccacctggtggcagccagggaaaggggaaaggaagagggcactggaaatgcatagccagccacctaggggcatgaggaaggagacttcaggtggcccacaaagccctagctctgggtcaggggctgtggggggctgaggggaccagactgggtgcagggccttgggtgctgccaacctcctccccgctgggcttccgcagaactggaactctcacctcaggggccaccacatccctcctctctgcttctccccccagatcaaagggcaccctccacggttggcagggcctggctgagtgcctccagcacccttgtgccaccacaggc

SEQ ID NO: 21929 - DNA, 2733 bp, Macaca Mulatta
  misc_feature (1)...(2733): n = A,T,C or G
gcctcgccactcctgctatttgccaaccgccgggacgtacggctggtggacgctggcggagtcaagctggagtccaccattgtggtcagtggcctggaggatgcggccgcagtggacttccagttctccaagggagccgtgtactggacagatgtgagcgaggaggccatcaagcnnnnnnnnnnnnnnnnnnnnnnnnnnnnnnnnnnnnnnnnnnnnnnnnnnnnnnnnnnnnnnnnnnnnnnnnnnnnnnnnnnnnnnnnnnnnnnnnnnnnnnnnnnnnnnnnnnnnnnnnnnnnnnnnnnnnnnnnnnnnnnnnnnnnnnnnnnnnnnnnnnnnnnnnnnnnnnnnnnnnnnnnnnnnnnnnnnnnnnnnnnnnnnnnnnnnnnnnnnnnnnnnnnnnnnnnnnnnnnnnnnnnnnnnnnnnnnnnnnnnnnnnnnnnnnnnnnnnnnnnnnnnnnnnnnnnnnnnnnnnnnnnnnnnnnnnnnnnnnnnnnnnnnnnnnnnnnnnnnnnnnnnnnnnnnnnnnnnnnnnnnnnnnnnnnnnnnnnnnnnnnnnnnnnnnnnnnnnnnnnnnnnnnnnnnnnnnnnnnnnnnnnnnnnnnnnnnnnnnnnnnnnnnnnnnnnnnnnnnnnnnnnnnnnnnnnnnnnnnnnnnnnnnnnnnnnnnnnnnnnnnnnnnnnnnnnnnnnnnnnnnnnnnnnnnnnnnnnnnnnnnnnnnnnnnnnnnnnnnnnnnnnnnnnnnnnnnnnnnnnnnnnnnnnnnnnnnnnnnnnnnnnnnnnnnnnnnnnnccacactcgctgtgaggaggacaatggcggctgctcccacctgtgcctgctgtccccaagggagcctttctacacatgtgcctgtcccacgggtgtgcagctgcaggacaacggcaggacgtgtaaggcaggnnnnnnnnnnnnnnnnnnnnnnnnnnnnnnnnnnnnnnnnnnnnnnnnnnnnnnnnnnnnnnnnnnnnnnnnnnnnnnnnnnnnnnnnnnnnnnnnnnnnnnnnnnnnnnnnnnnnnnnnnnnnnnnnnnnnnnnnnnnnnnnnnnnnnnnnnnnnnnnnnnnnnnnnnnnnnnnnnnnnnnnnnnnnnnnnnnnnnnnnnnnnnnnnnnnnnnnnnnnnnnnnnnnnnnnnnnnnnnnnnnnnnnnnnnnnnnnnnnnnnnnnnnnnnnnnnnnnnnnnnnnnnnnnnnnnnnnnnnnnnnnnnnnnnnnnnnnnnnnnnnnnnnnnnnnnnnnnnnnnnnnnnnnnnnnnnnnnnnnnnnnnnnnnnnnnnnnnnnnnnnnnnnnnnnnnnnnnnnnnnnnnnnnnnnnnnnnnnnnnnnnnnnnnnnnnnnnnnnnnnnnnnnnnnnnnnnnnnnnnnnnnnnnnnnnnnnnnnnnnnnnnnnnnnnnnnnnnnnnnnnnnnnnnnnnnnnnnnnnnnnnnnnnnnnnnnnnnnnnnnnnnnnnnnnnnnnnnnnnnnnnnnnnnnnnnnnnnnnnnnnnnnnnnnnnnnnnnnnnnnnnnnnnnnnnnnnnnnnnnnnnnnnnnnnnnnnnnnnnnnnnnnnnnnnnnnnnnnnnnnnnnnnnnnnnnnnnnnnnnnnnnnnnnnnnnnnnnnnnnnnnnnnnnnnnnnnnnnnnnnnnnnnnnnnnnnnnnnnnnnnnnnnnnnnnnnnnnnnnnnnnnnnnnnnnnnnnnnnnnnnnngaaccaacccgtgtgcggacaggaacggggggtgcagccacctgtgcttcttcacgccccacgcaacccggtgtggctgccccatcggcctggagctgctgagtgacatgaagacctgcatcgtgcccgaggccttcttggtctttaccagcagagccgccatccacaggatctcccttgagaccaacaacaacgacgtggccatcccgctcacgggcgtcaaggaggcctcagccctggacttcgatgtgtccaacaaccacatctactggacagacgtcagcctgaagnnnnnnnnnnnnnnnnnnnnnnnnnnnnnnnnnnnnnnnnnnnnnnnnnnnnnnnnnnnnnnnnnnnnnnnnnnnnnnnnnnnnnnnnnnnnnnnnnnnnnnnnnnnnnnnnnnnnnnnnnnnnnnnnnnnnnnnnnnnnnnnnnnnnnnnnnnnnnnnnnnnnnnnnnnnnnnnnnnnnnnnnnnnnnnnnnnnnnnnnnnnnnnnnnnnnnnnnnnnnnnnnnnnnnnnnnnnnnnnnnnnnnnnnnnnnnnnnnnnnnnnnnnnnnnnnnnnnnnnnnnnnnnnnnnnnnnnnnnnnnnnnnnnnnnnnnnnnnnnnnnnnnnnnnnnnnnnnnnnnnnnnnnnnnnnnnnnnnnnnnnnnnnnnnnnnnnnnnnnnnnnnnnnnnnnnnnnnnnnnnnnnnnnnnnnggtcaggagcgggttgtgattgccgacgacctcccgcacccgttcggtctgacgcagtacagcgattatatctactggacggactggaatctgcacagcatcgagcgggctgacaagaccagcggccggaaccgcaccctcatccagggccacctggacttcgtgatggacatcctggtgttccactcctcccgccaggatggcctcaacgactgcatgcacaacaacgggcagtgcgggcagctgtgccttgccatccccggtggccaccgctgcggctgtgcctcacaccacaccctggaccccagcagccgcaactgcagc

SEQ ID NO: 21930 - DNA, 217 bp, Macaca Mulatta
  misc_feature (1)...(217): n = A,T,C or G
gaacatggaaggggtgctgacggacgcagactgcgagagcatctaccccgttgtgtatgcctctaatcgaggcctggcctctgctgcaggcgaatttctgtactggannnnttctaccctgagtgtgagataagaacgatgggtggaagagagcgacgccagagcccaggcgcccagaggactttcttccagcttctgctgtccttctttgtggaga

SEQ ID NO: 21931 - DNA, 518 bp, Macaca Mulatta
  misc_feature (1)...(518): n = A,T,C or G
gggtcaggggaggagatgactttgcttctgtgcacagccccgtcttccaggagccacgactcagaagaaaagggtgctcagacttttgttatacacatttgctttgtgtaaataaatgtttacaattttatatgaaagatggaataagcgctagagcttccaactgtatattttttacttttatagattttaaaactatggtcctttatatgtgtgtgttgggggctacgatgagtttcatggcaaacggttggcattgttaactttttattgtcatcaaaagtgcataaaagtcctattaatccccatattgttctactgcccttaactctggtatacaccaaaaagaaatctttactttccttgttttatcattataaaaataaagtattttgctagtatccaaaannnnnnnnnnnnnnnnnnnnnnnnncatgtcnnnnnnnnnnnnnnnnnnnnnnnnnnnnnnnnnnnnnnnnnnnnnnnnnnnnnnnnnnnnnnnnnnnnnnnnnnnnnnt

SEQ ID NO: 21932 - DNA, 118 bp, Macaca Mulatta
aggaccagaaaatctacatctacaccctcaagggcatgtgtcccttaaacacaccccaacgggccttggacactccagctgtcgtcacctgcttcttggccgtgcctgttattaaaaa

SEQ ID NO: 21933 - DNA, 249 bp, Macaca Mulatta
gtctgttcattgattttaatacctggcatgtatttatatttcagctgctgctgctttaactctcttggagctatatacaatattggacactctcaccttagacttagttctctgtttttcttccctctcggagatataacccagatttcttgtcacctctcctcatatctcaaactctaaaattctcccttttagttatattttcttatctttctactctcccactaaaaattaaggctgttgcacttc

SEQ ID NO: 21934 - DNA, 1053 bp, Macaca Mulatta
  misc_feature (1)...(1053): n = A,T,C or G
caagagcccgggacggtagcccagccccaaatgacaagaacaagaaccactgccagtttgcacggacttggtgtgtgttcttccccggggagatgggggctcatgtgcgtgtgccactcgaggctcccagtcgtccagcagaacgcggggttcagaaagggttccttccgctacttagcaaacactcagcatttaatttgcaaatgtttgctagggtcaccctctcagccaccccatgagggtcaccatgatcaccccaactctagaggctacagcagagctcaggacattcccccacagcctgcccctcagtgactacttccaaaggggagggtcctggaagcgcccacccaggcgccgcctctgtgcttgctccctgagctcagggatcgccgggtccaggtaactgacctgtgctccatgaggccctgtgggaacagtccaggctgatcctgccctgtggaggcctccgtgcactgggagatggactagggttgcagcagaggtggtcagggtggtggcccgcacagcaaggcagtcaaggccggctccctgggagaagcactggatcagtgaggtctgaggacaacaggccttccctaggggaaggagctgggagtgccaagtccccaggtgcacaggaggcttggctgctgagaggctgcagggtggaggggcctcggcctctgagtcatgtgtcctgtggtcactgaagggtgtcagcagagcacagggcatgaggacagagggaggggnnnnnnnnnnnnnggaggggaccccggggcaaggctggggggtcaggagctcagtgtccgctactcaacccagccaaaaccctcccagatgcctcctctcctgcctaggcaaagtccagcttggcaccccgtctggggcctgcctgtggtcagggccaagtgttccctcctccaggaaagccttcaccctcctcatgccctgtagtcaggaggccgccttccgtgaccctctgcatcgcctcaggtgtgaagccagacccacctgacatcctcacgcacaggcccagcagcacctgca

SEQ ID NO: 21935 - DNA, 3222 bp, Macaca Mulatta
  misc_feature (1)...(3222): n = A,T,C or G
ttttgtggttttccatgatgtctcaagcatggggtgatgataccctcagtagcttagatactaatgaagcagaaatgaaaccagaaaacatgagagaaaagttcttcagaagcttagcaatgttactggaaaacaaaaagtaataatactaagatattttctaaagcaaagtactgtcagttgataaaggaagtgaaagaagctaaagctaaggcgaaaaaggaatcagttgactaccgtcgcttggctagatttgatgttatccttgtacaaggaaatgagaagctaattgaggctgtaaatggagaaacagataaaatacggtattacttacacagtgaggacttattcgacattctgcataatacacatctcagcattggacatggtggacgtactcgcatggagaaagagttacaagcgaaatacaagaacatcacaaaagaagttataatgctatatctgaccctctgtaaaccatgccaacagaaaaattcaaaactcaagaaggttctaacatcaaaaccaattaaggaagttagttcaagatgccaagtagatcttatagacatgcagttgaatcctgatggggagtataaatttattatgcattatcaggatctccgtacaaagttaagttttttgcggtcattaaagtctaaaagacctacggaagttgcacatgctcttttagatatatttacaattattggagcacccagtgtcctacaatctgacagtgggagggaattttcaagccaggttgtcagtgaactcagtaatatttggccagaattgaaaattgtccatgggaagtctcagacctgccaaagccagagttctgtagaacaaactgaggatatccgaaagaggattttctcctggatgcaaactaacaactcatcacactgggctgaatttttgtggttcattcagatgacccaaaatcaaccctatcacagaagcatgcaacagactccatggaaagtacatttagctctgaagctaaactgggctnnnnnnnnnnnnnnnnnnnnnnnnnnnnnnnnnnnnnnnnnnnnnnnnnnnnnnnnnnnnnnnnnnnnnnnnnnnnnnnnnnnnnnnnnnnnnnnnnnnnnnnnnnnnnnnnnnnnnnnnnnnnnnnnnnnnnnnnnnnnnnnnnnnnnnnnnnnnnnnnnnnnnnnnnnnnnnnnnnnnnnnnnnnnnnnnnnnnnnnnnnnnnnnnnnnnnnnnnnnnnnnnnnnnnnnnnnnnnnnnnnnnnnnnnnnnnnnnnnnnnnnnnnnnnnnnnnnnnnnnnnnnnnnnnnnnnnnnnnnnnnnnnnnnnnnnnnnnnnnnnnnnnnnnnnnnnnnnnnnnnnnnnnnnnnnnnnnnnnnnnnnnnnnnnnnnnnnnnnnnnnnnnnnnnnnnnnnnnnnnnnnnnnnnnnnnnnnnnnnnnnnnnnnnnnnnnnnnnnnnnnnnnnnnnnnnnnnnnnnnnnnnnnnnnnnnnnnnnnnnnnnnnnnnnnnnnnnnnnnnnnnnnnnnnnnnnnnnnnnnnnnnnnnnnnnnnnnnnnnnnnnnnnnnnnnnnnnnnnnnnnnnnnnnnnnnnnnnnnnnnnnnnnnnnnnnnnnnnnnnnnnnnnnnnnnnnnnnnnnnnnnnnnnnnnnnnnnnnnnnnnnnnnnnnnnnnnnnnnnnnnnnnnnnnnnnnnnnnnnnnnnnnnnnnnnnnnnnnnnnnnnnnnnnnnnnnnnnnnnnnnnnnnnnnnnnnnnnnnnnnnnnnnnnnnnnnnnnnnnnnnnnnnnnnnnnnnnnnnnnnnnnnnnnnnnnnnnnnnnnnnnnnnnnnnnnnnnnnnnnnnnnnnnnnnnnnnnnnnnnnnnnnnnnnnnnnnnnnnnnnnnnnnnnnnnnnnnnnnnnnnnnnnnnnnnnnnnnnnnnnnnnnnnnnnnnnnnnnnnnnnnnnnnnnnnnnnnnnnnnnnnnnnnnnnnnnnnnnnnnnnnnnnnnnnnnnnnnnnnnnnnnnnnnnnnnnnnnnnnnnnnnnnnnnnnnnnnnnnnnnnnnnnnnnnnnnnnnnnnnnnnnnnnnnnnnnnnnnnnnnnnnnnnnnnnnnnnnnnnnnnnnnnnnnnnnnnnnnnnnnnnnnnnnnnnnnnnnnnnnnnnnnnnnnnnnnnnnnnnnnnnnnnnnnnnnnnnnnnnnnnnnnnnnnnnnnnnnnnnnnnnnnnnnnnnnnnnnnnnnnnnnnnnnnnnnnctctttgcctacaacacaactaagctcagaactatatgaagctgtaaagaattatattgttaacagatgtggtttggaatttaaattttgtgtaggagtatgttctgatggtgcagcttcaatgacaggaaaacattctgaagtggtaacccagattaaggaacttgcaccagaatgtaaaacaacacattgcttcattcatcgagaaagtcttgctatgaaaaaaatatcagctgaactaaatagtgtacttaatgatatagtaaaaattgtgaattacataaaatctaatgcattgaattcaagattattctctttattatgtgataatatggaagctgatcataagcaactgttactgcatgctgagatacggtggttatcacggggaaaagttctgtcaagaatgtttgaaatacgaaatgaactcttagtgtttctgcaaggcaagaaacccatttggtcccaactttttaaagatgtgaattggacagccagacttgcttatttgtctgatatcttcagtatttttaatgatcttaatgcttctatgcaagggaagaatgcaacttatttttcaatggcagataaagttgaaggacaaaaacaaaagttagaagcttggaaaaacagaatttctacagattgttatgacatgtttcataatttaacaacaattatcaatgaagtaggtaatgatcttgatattgcacatctgcgaacggttatcagtgaacatcttacaaatttgttagaatgttttgaattttattttccatcaaaagaagatccacgcataggaaatttatggatccaaaatccatttctttcatcaaaagataacttaaatttaactgtaactctacaggataagttgttgaagctggctaccgatgaaggattgaaatcagttttgaaacacagcatctcttccttcattttgataaaagctaaaaatgaatatcctgagcttgctgagattgctttaaaat

SEQ ID NO: 21936 - DNA, 353 bp, Macaca Mulatta
aactttgcagcttcccttcctgccccatttttcatgtcctgctgaaaaatgtgtgtgaagaattatttattttcgcgaaagcacatgtaataaatgctgcagcccagcctctgcccacttcgcatgtatgtgactgcccgcttgcttgcagaggctggtggctagggtctggccctgcctcggctgactagcgtctccacagctgcaggcctgcagggtctcccagcatcgcactcctgggcctggcatttggaacctgccaggttggcctaggaaccccccgctacagacacatgtgagcctgctgcattcctgcccacccccctgtctaggacccatccacatgcccccca

SEQ ID NO: 21937 - DNA, 212 bp, Macaca Mulatta
cagcagagagggctgactcagagtctgcacatggggtccacttccaagttcttccaactgggcatatgcctccgccactctctgactgtcctttgcctgtgccaaggtttctgggaagaacaggaagttcagggatggcggaaaatgtttggcagatcccctgagtccaaagccagggcacctgctcctgcctgagggcagagaggactggt

SEQ ID NO: 21938 - DNA, 598 bp, Macaca Mulatta
tgggagaggacgaggaggaggccctgcccctccaaacgtggcctcctatggacaccaagactcacagccttcctatcacccacacccagctccacagcaactctcggccccaaagccgcacctgcagccagtgcacctgcacccaccatcgccagaccttcagccagagttgcagacagagccagcgtggcagccggagccggagttccagccagagcccggctacccaccagaacccaaccggagcccacagctcatccggcctgcagagccagagtcccaacgccagcccaccaccaaagcgccacaaaaagaccatgaactcccaccactctcccacgcggcccaccatcctgcacagcagctgccccaagaacagaaagaacttggaaggcaagctgaacaagaaaaaaatggccaagaggatccagcaggtgtacaaaaccaagaagcggagctcaggtatcctttaaggaggtgggaagggccacagagcccacagatgatggggagcagaccttgggggcagtgagaggaaggctgcagccaggtcacagaggaaccacaggcaagaggtaagagggagaagagaaacaat

SEQ ID NO: 21939 - DNA, 689 bp, Macaca Mulatta
ggtctggcaaacacaccctttctgctttgccttcacaaaagtaatgtgttccctttcccatcccttgcctgatcctcagggagtcagcctgcttccatccatgggtgggaagacttcagcacaaagggaagactaattcttgtcaggcatttttgaaaagactgattatgtgtatcaaggtacagcatcgtagggttcccctaaacttgccctgtttttgtttttttagttggttatccccttactgagtggcctctactaagtggctgtgattaaatgtctgagcaaggatagggaaggggaatggttgagcctctggagctcattgtaaccaatcctgccagacctgtttggggcagcagggaacaaacctagataaggacctgtttggggcggtggggagcaaaatctcctttaccaaccaagcagttccttgttcacatcaacagaatggggctgtgataacttaggaggcagcaatccaatagtccttcagtgcattttagtttgtccccaaccgaccatcagtaggtagtgtcaagccagagactcagggcagtagataaaatgttcattttactgatgcactttagtttttggtctgttacctgttttccagaaatttgtggccttttaggcgggagttaggtgaccaaaccagtgacagcccaatccttgcgttttgtggc

SEQ ID NO: 21940 - DNA, 544 bp, Macaca Mulatta
cggtggagcagttctaccgctcactgcaggacacgtatcgggccgagcccacaggccccgatggcatcctgatggaggtggatctggtgcaggccaggctggagagaagcagcagcaagagcctggagcgggaactggccaccccagactgggcagaacggcagctggcccaaggaggcctggctgaggggctgctggctgccaaggagcaccggaggccacgtgagacacaagtgattgctatgctgggcaaagctggtcagggcaagagctattgggctggggcagtgagccgggcctgggcttgtggccggcttccccaatacgactttgtcttctctgtcccctgccactgcttgaaccgcccgggggatgtctaccgcctgcaggacctgctcttctccctgggcccacggccactcgtggcagccgatgaagttttcagccacatcgtgaagagacctgaccgcattctgctcatcctagacgcctttgaggagctggaagcgcaagacggctacctgcacagcacatgcggcccggc

SEQ ID NO: 21941 - DNA, 1762 bp, Macaca Mulatta
  misc_feature (1)...(1762): n = A,T,C or G
ggaggcagcagtaatgctaatgctagcaagcaaactgaagggtgacgatggtctcaaagggtcccggacagcagccacagcgtccgacacgactcggagggtttctgtgacagacaaattgcttgttaaagagattgcagaacttgaagctaatttaccttgtacatgtaaagtgcattttcctgatccaaataagcttcattgttttcagctaacagtaaccccagatgagggttactacatgggtggaaaatttcagtttgaaactgaagttcccgatgcatacaacatggtgcctcccaaagtgaaatacctgaccaagatctggcaccccagtatcacagagacaggggaaatatgtctgagtttactgagagaacattcaatggatggcagtggctgggctcccacaagaacattaaaggatgtcatttggggattaaactctttgtttactgatcttttgaattttgatgatccactgaatattgaagctgcagaacatcatttgcgggacaaggaggacttcccgaataaagtggatgactacatcaagcgttatgccagatgataaaaggggacgattgccaggcccatggactgtgttacagttttgtctctaacgtgaaacaggaagaaggtagcccccctctcccgtcctcatgctccctctcagtccccctggattgcccccagtcctggtgacaatgtttgccctgaaagaagaccatcttcatgactgctcattgtagatggagaattcaacataaatacagcaagaaaatgtgtttgggcttctgaagagttgtctgcttaccttaacatgtttacttttttgaacttgtactgtataggctgttggtgaaatttttaagaagttgtaatgaactcaaaattgaggccagagcttgctttcccttttcccaaacaaaattggttttctgcacaagcgatgctaatgatgtgttcagtgtaacttgcagattggcaataagatacccgctacaaactgtgattggatgcaaaatctcttagctttttcacgaatgttggccctgcctagatgttgtgaagcttcccagaatgcatagtcattcactgtagatctcttattgaaatgcgtattttatttaatgtaagtatattttggaacagatttgtaatttgtacaatttaatgctttaattattttttctattctcatttagtttgtattttcattgtatagaagcagacagaaagaagttgaggtccaagcaactaattgaaaaagaaaaatactaaaggaaaaatattgagaagggcaaaatctaattccacttttttgttcccaaaataggcgaaagggaaagaaatcctacaccnnnnnnnnnnnnnnnnnnnnnnnacctctagatggcccttatttccaagagggttgcccaagaaaatagttgtgggagccgaaagggaaaacactttttttttgggggaagcacccccccctagtctgtgtaaaagccacttagaaaatatcttgggggaatgtggaattcctcacaaaacccacccaaaaaaggggccatggggggaaatcatcccccattatggttaaaccaaatggtgactgtcctcccatacgaagtgtaatacccttggagggtctggggaaaaaccctggatctaacccctgcacaggtgaggggtcgcgcgcgagactccaacgacgcgcgaaacggggtcccaatggtatgaaaatagggggaaacacttttagacacca

SEQ ID NO: 21942 - DNA, 236 bp, Macaca Mulatta
  misc_feature (1)...(236): n = A,T,C or G
gggactatttttgcatatggacaaactggaacaggcaaaacttttaccatggaaggtgttcgagctgttcctgaacttagaggaataattcccaattcatttgctcacatatttggtcatattgcaaaagcagagggtgatacaagnagatttttggttcgagtgtcttatttggaaatatataatgaagaagttcgtgaccttttgggcaaggatcagacacaaaggttagaggt

SEQ ID NO: 21943 - DNA, 127 bp, Macaca Mulatta
cacaactatatgacatgtactctggaatcatgcagtatttgccaggaagacacaatcgcgtctactacttgatagaagagctcaaggacgtcaagcctccagggtcaagatcaacgaagcatccttt

SEQ ID NO: 21944 - DNA, 87 bp, Macaca Mulatta
gagtgatgacaggtgactgcacattcagtacagaagggacatgggatggggtggaaagatcatgagggccttgggtgacacactaga

SEQ ID NO: 21945 - DNA, 445 bp, Macaca Mulatta
gatataggcactggggcagctgaggaacatgaataagtcaagagcgttggctttggtagcctcctggcaggagcagcaatttgccacaggtccggacctctccctccacacagccacactgcctcatgcagtctgacccacccagtgagggtgcatttgaaccctggttatattctccatctgtttttaagctctgctttgtgatagagcttgtgactgccaaaaatcttgtgcacagtgatatgactgttttaggatcttaagggtaggattttatgaaaggtgagatcctttggaattgagttctttctcattgggtatgaaaatggatgtatatttagaatatatgcctcacgaggcaggaccatgtagatagattccatttgtttccttgacctggtataataaaaactgataaaagccgtgcagtacccagcatcttgga

SEQ ID NO: 21946 - DNA, 613 bp, Macaca Mulatta
agtggaaagtttcttttaagatggaattcataaaagggaaaatacagaagaaaaaaggtctcactccaacttgtgaatcagttcaggagttcagatattaatagtaacaatacaggaaaaaggggaactccaacgttgggattactgtctgaggcttgtagcaagtgctttctgtggaatgatcttgttttgctaacaaacggcttgctccgaatgaacagtagtaggttggtgcagttctcataacaatcagcagaacttatgatgacacaatccattaattccagctgcgtgcatagttcgcatttttaaaatgtaaaaatgcaagcaaaaacagctgtagcaaagaaagtgctcaaggaccaaagatttaacagataaaaatacccaattagaagagatatagtagaatatatgaagagatattatatttgttacacaccagtatacatcaaagtgcctgttgccttccgaaaatttgaagtggcaaaattattttatggtttaatgattattttattttatcagggactgcctcaagaagaaaataacatataagcttgtgaatggtggagaaaatgccctattttttcttgcaaatacttgtataaag

SEQ ID NO: 21947 - DNA, 646 bp, Macaca Mulatta
  misc_feature (1)...(646): n = A,T,C or G
atggcctggctctccttcacctgctgcatggcgtcagctgtcaccaccttcaacacgtacaccaggatggtgctggagttcaagtgcaagcatagtaagagcttcaaggaacccccgaactgccgaccacatcaccaccggtgtttccctcggcagctgtcaagtgcagcccccaccacgggttctttgaccggctaccaccagtatcataatcagcccatccactctgtctctgagggagtcgacttctactctgagctgcggaacaagggatttcaacgagaggccagccaggagctgaaagaagcagttaggtcatctgtagaggaagagcagtgttaggagttaagcgggtttggggagtaggcttgagccccaccttacacgtctgcggattatcaacatgtgcttaagccaacgtccgtctcttgagcatggtttttagaggctatgaataaggnaggctatgaataagggttatctttaagtcctaagggattcctgggtgccatggctctcttttcctctacagctccatctcatttcacccaccccacatctcacacatccagaattcccttttttactgatagcttctgtgccaagttctgggctaaaccatggagataaaagaggagtaaaatac

SEQ ID NO: 21948 - DNA, 79 bp, Macaca Mulatta
ggagtgactatgaagaaatgccgctgcagaacggccaggccattcgggccaagtacaaggaggagtcagacagtgactg

SEQ ID NO: 21949 - DNA, 660 bp, Macaca Mulatta
  misc_feature (1)...(660): n = A,T,C or G
gggcttcgagtcggtatgtctactaacaatatgtcggacccacggaggccgaacaaagtgcttaggtacaagcccccgcccagcgaatgtaacccggccttggacgacccgacgccggactacatgaacctgctgggcatgatcttcagcatgtgcggcctcatgcttaagctgaagtggtgtgcttgggtcgctgtctactgctccttcatcagctttgccaactctcggagctcggaggacacgaagcaaatgatgagtagcttcatgctgtccatctctgccgtggtgatgtcctatctgcagaatcctcagcccatgacgcccccgtggtgatatcagcctagaaaggtcacattttggaccctgtttatccactaggcctgggctttggctgctcaacctgctgccctcagctgccatcctggacttccctgaatgaggctgtctcagtgcctccagctggatggagggaacctggccctttcctagggaacaccctaggcctacccctcctgcctcctttcccctgcctgctgctgggggagatgctgtccatgttctaagggtattcatttgctttcttgttgtcgcctgttaataataaagtttttcactccnnnnnnnnnnnnnnnnnnnnnnnnnnnnnccttgtcggcc

SEQ ID NO: 21950 - DNA, 664 bp, Macaca Mulatta
  misc_feature (1)...(664): n = A,T,C or G
agaaaagtataaacagttatcaattagaatcttcttatatacaaatataacttgcagaaagttaagtctgaggaggctattctgggtactttttacagtcctttttagttctaagagtccatgatactgcatttttatggccagagagcaatcaattatgcacctggttgtctcaataggcagtaaaacctaatataaataaatggcaaattatctgccataaaaaaataagaaaaatttttgaaatgttaatttcaactccaatgaaacatatacctaattaaaacaattatttattccctgctagaatataaagggaacaacaagcttgagctgcaaggctcaagctttgagagcacagaaagatttttaaactaatcatgcattttaagtccaagaaatggagccagcccataatctcatgttggaattcccccaggcaaagttgggaaccacatcctgacatcgtctgcaatgtgatcttctgttatttggtatttttaagatgacgccaactcttctgtgcttagtttaggagtccttttaaggaaannnnnnnnnnnnnnnnnnnccacatttcacttctaagtcaatgttagaatcagcttctccctctttttcctcttcctcttcttctcttccaagtggctagtagcatcagcaa

SEQ ID NO: 21951 - DNA, 1094 bp, Macaca Mulatta
  misc_feature (1)...(1094): n = A,T,C or G
ggaaattnnnnnnnnnnnnnnnnnnnnnnnnnntttctctttgccatttcttcttcttctttttttaactgaaagctgaatccttccatttcttctgcacatctacttgcttaaattgtgggnnnnnnnnnnnnnnnnnnnttgatcagagcattgtgcaatacaatttcattaactccccctcccccgctccccccaaaatttgaaaatttttttcaacacccctacccctgtatggaagaaggcaccctttgtaagaaaccccaataaaaaatttggaaaataaaaccctggaaatttttgcccaccctggggggttttaaaatatttccccaaagagggaaatttttaaaccccccacccctccaagagggtnnnnnnnnnnnnnnnnnnnnnnnnnnnnnnnnnnnnnnnnnnnnnnnncacccccacattgtatggaggggccgcccccaccaggcagagacacaaaaaaaacacagagagactccaccgtgattattggtttatatagcgacgaagacaacaacaagaggggggcacagagcacaaacaaaatgattcccgcaagaaaacatataaccaaaaataatattttgcttgtggcggtccttatacacaaacaactttctttataaaaaaataaaacaaacaaagcgcgcaaagaaatnnnnnnnnnnnnnnnnnntagagagaacgggaagcaatcaattctctaaaataaagacaaacaaacgccgaagnaagaaccaagatataatgaattataataacgtcacgcccacacacaaaaaactaaaaatagagaaaaganagaaagcaatgataaatacacgggataaancgacacaagacacacccacccccacaacaaggagagagagaccagcgacatatataataacggcgcgcacatatacaaccacaaatatattatagtaacantaagcaccaccacaccacaccccctattgccgctagaagaccatacacaagagaaactaataaaatattaacacacaccgacggcacacagataataataaagacgaaggacaatataatacanaacgacacgtggggtctcacnggan

SEQ ID NO: 21952 - DNA, 143 bp, Macaca Mulatta
aggatcttctggtcgaccagaccatcgaaaaggtctccttttgtgctcctgaccgcaacctggacaaggctttctcctatatctgccgtgatgggaccacccgccgctggatctgccactgttttctggcactcaaggactcc

SEQ ID NO: 21953 - DNA, 581 bp, Macaca Mulatta
  misc_feature (1)...(581): n = A,T,C or G
ggacgagtacttggctgacctgtaccactttgttaccaaggaggactcctatgccaactatttcattnnctcctggagattcaagccgattaccatcgcaggtcactgagctctctggacacagccctggctgagctgagggagaaccatggccaagcannnnnnnnnnnnnnnnnnnnnnnnnnnnnnnnnnnnnnnnnnnnnnnnnnnnnnnnnnnnnnnnnnnnnnnnnnnnnnnnnnnnnnnnnnnnnnnnnnnnnnnnnnnnnnnnnnnnnnnnnnnnnnnnnnnnnnnnnnnnnnnnnnnnnnnnnnnnnnnnnnnnnnnnnnnnnnnnnnnnnnnnnnnnnnnnnnnnnnnnnnnnnnnnnnnnnnnnnnnnnnnnnnnnnnnnnnnnnnnnnnnnnnnnnnnnnnnnnnnnnnnnnnnnnnnnnnnnnnnnnnnnnnnnnnnnnnnnnnnnnnnnnnnnnnnnnnnnnnnnnnnnnnnnnnnnnnnnncagcctgaaggagccaggggcccggctgcaggccctccaagaagtgtgcagccgcctgccccccgagaacctcagcaacctcagg

SEQ ID NO: 21954 - DNA, 218 bp, Macaca Mulatta
  misc_feature (1)...(218): n = A,T,C or G
agggacgcactgcaggacggtggctctgcggtggatgcagccattgcagccctgttgtgtatggggctcatgaatgcccacagcatgggcatcgggggcggcctgttcctcaccatctacaacagcaccacnngaaaagctgaggtcatcaacgcccgcgaggtggcccccaggctggcctttgccagcatgttcaacagctcacagcagtcccagaa

SEQ ID NO: 21955 - DNA, 148 bp, Macaca Mulatta
ttctgacgtcatggtgagtgactgccgaagtaaggagcagatgagtgattgttcacatacccaaacttctccggtgtctggcttctggatattctctcaatgctgcttcctggatttctgcaatgaccctcaacacagagggcactat

SEQ ID NO: 21956 - DNA, 640 bp, Macaca Mulatta
aggccaccttgatatcacattttgcaggaagtggggcatttgaattagggcctggtcagaagttggccctaaatcacactacacttctctgtcttcatccccgtaggcccgttcctcccgccgtcagccctgctgccagaccctgacttcttctctggcaccgtgtccctgcccggcctggagccccctggcgggcctgacctcctggatgatggctttgcctacgaccctacggcccccacactcttcaccatgctggacctgctgcccccggcaccaccacatgctagcgctgttgtgtgcagtgccggagccgtggttggggagccccctggccctgaaccgctgacgctggactcgtaccaggccccgggccccggggatggaggcaccgccagcctcgtgggcagcaacatgttccccaatcagtaccgcgaggcggcctttgggggcggcctcctatccccagggcctgaagccacgtagccccgcgatgccagaggaggggcactgggtggggagggaggtggaggagctgtgcaatcccaaccaggatgtctagcacccccatccccttggcccttcctcatgcttctgaaatggacatattcaagccttggcgagaagctccgttgcacgg

SEQ ID NO: 21957 - DNA, 937 bp, Macaca Mulatta
  misc_feature (1)...(937): n = A,T,C or G
tgccttctatcaatgacacccacttctatccccacttctttctcctgctatgaataccaggactggaaactttacgtatgtggattgctttcccattctgtattgtgtacctgattgccattgtggggaatatgaccattctctttgtgatcaaaaccgaacacagtctacatcagcccatgttctacttactggccatgttgtctatgattgatctgggtctgtccacatccactaaccccaaaatgctaggaatcttctggttcaaactccaagagatgagctttgggagctgccttcttcagatgttctctattcacatgtttacaggcatggagactgttctgttggtggtcatggcttatgaccactttgttgccatctgcaaccctgtccagtacaccatgatcctcactaataaaaccatcagtatcctagcttctgtggttgttggaagaaatttagttcttgtaaccccatttgtgttactcattctgcatctgccattctgtgggcataacatcatacctcacacatactgtgagcacatgggtctggcccggttggcctgtggacctatcaagatcaacataatctatgggctcatggtgatttcttatattattgtggatgtgatcctaatttcttcttcctatgtgcttatccttcgagctgtttttcgccttctttctcaagatgtccgactgaaggccttcnnnnnnnnnnnnnnnnnnnnnnnnnnnnnnnnnnnnnnnnnnnnnnnnnnnnnnnnnnnnnnnnnnnnnnnnnnnnnnnnnnnnnnnnnnnnnnnnnnnnnnnnnnnnnnnnnnnnnnnnnnnnnnnnnnnnnnnncacctgcccttaaccctgtcatttatggagtcaggaccaagcagatccgagagcaagttgtgaaaatatttgtacagaaagaata

SEQ ID NO: 21958 - DNA, 753 bp, Macaca Mulatta
cctagtcccctccctagcctgccgcttccccctccccttgctcctggtggccaggagctttcttcaccccacacagctgaggtggagaatgaggtgagtagaaaaccaagagggatgattagggagactcctctctgcactcttcccttctcatggccccacactttctaggcctcgccacctcctgctcggcctctcccaggggaagccaggctggcgcccatctctgaaggtgaggcctctgaccactgaccttcccctgccattatccctactcactgtctctcctgtcactgctctcctttcctcatgccttcttcctcgtcgccctacagagggaaagccgcagcttgttgggcgtttccaagtgacttcatccaaggaaccagctgagcctcttcccctgcagccaacatcccccactctctccggttctccgaaaccttcaacccctcagcttacttcagagagctcagacacagaggacagtgctggagccgggccagagaccagggaagctctggctgagagcgaccgtgcagctgagggtctgggggctggagttgaggaggaaggagatgatgggaaggaaccccaagttgggggcagccccccacccctgagccatcccagcccagtgtggatgaactactcctacaacagcctgtgtctgagcagcgaggagtcagaaagcagtggggaagatgaggagttctgggctgagctgcagagtcttcggcagaagtgagtctg

SEQ ID NO: 21959 - DNA, 171 bp, Macaca Mulatta
  misc_feature (1)...(171): n = A,T,C or G
ggatgccctgaaggttgaccagggcccctcacaggacatcccaaagccatgggtgattccagcccccaaagggatcctgcagcacatctttggaaccagccaggtgttccaaagcatctgtgacgtanagccaaaggtcacggggttaacggtgcccctcanagtcaggga

SEQ ID NO: 21960 - DNA, 893 bp, Macaca Mulatta
aggtccatgaggatgcacacttattatccagagagtatggatctcacgtatgtttgtccagagggtgtgactctgtggaggagaacacttactggtaagtattgaactcttattgtattatgtctcagaaaaatatgtttagaaaatcagttgatttttagcagtgatgaaatctcttagtctgtgctggtttcttaacagtggacagtcccagatgttgaagtcagcacaacaagagaaaaacccaaatcctgataagacttgaggatttttcgaaaattaaatgcaaaatagttggggcaaatgttgctgcgggagtcaagactaagtaatacagtaagaagatatgaagttggagagcttctcatgttcttcttttgtataaagtttgcatacgtacaaaacccaggactttaatgactttaagagggggcagaattgcatctcttggaatttaacagactcatgtgaactggaatgtacattgtggccctcacaattgattttaatatttctttgcaaagtcctttctgtttctaaataaaagctgtgccttctgaaacctgtaagtgatgtatactggccacatcaaatcttttaaaagtgttttccaaacccaaaattgttagtgtggaacaaatgtttcttttgggaacactaaaacaaaggggtatgggaggattgatttcagagaccaattgctgcttctgctttatactctaacattcttaccctctttctctcagccaagaactcttatgatatgtaattggcttttggttgaaaaaacatgtaaaataatgtttttgtgtgtgatacaaaagtttagaataaaacaaaaacagccactctaatatgtgataggttttctggcaattaaccatagcacatag

SEQ ID NO: 21961 - DNA, 1065 bp, Macaca Mulatta
  misc_feature (1)...(1065): n = A,T,C or G
agataaactcatcctgaaagtcgctgttgttctcctactgagcaagaatggaggccccactggtgagtctggatgaagagtttgaggaccttcgaccctgctgctcggaggacccggaggagaaaccccggtgtttctatggttcatctccnnnnnnnnnnnnnnnnnnnnnnnnnnnnnnnnnnnnnnnnnnnnnnnnnnnnnnnnnnnnnnnnnnnnnnnnnnnnnnnnnnnnnnnnnnnnnnnnnnnnnnnnnnnnnnnnnnnnnnnnnnnnnnnnnnnnnnnnnnnnnnnnnnnnnnnnnnnnnnnnnnnnnnnnnnnnnnnnnnnnnnnnnnnnnnnnnnnnnnnnnnnnnnnnnnnnnnnnnnnnnnnnnnnnnnnnnnnnnnnnnnnnnnnnnnnnnnnnnnnnnnnnnnnnnnnnnnnnnnnnnnnnnnnnnnnnnnnnnnnnnnnnnnnnnnnnnnnnnnnnnnnnnnnnnnnnnnnnnnnnnnnnnnnnnnnnnnnnnnnnnnnnnnnnnnnnnnnnnnnnnnnnnnnnnnnnnnnnnnnnnnnnnnnnnnnnnnnnnnnnnnnnnnnnnnnnnnnnnnnnnnnnnnnnnnnnnnnnnnnnnnnnnnnnnnnnnnnnnnnnnnnnnnnnnnnnnnnnnnnnnnnnnnnnnnnnnnnnnnnnnnnnnnnnnnnnnnnnnnnnnnnnnnnnnnnnnnnnnnnnnnnnnnnnnnnnnnnnnnnnnnnnnnnnnnnnnnnnnnnnnnnnnnnnnnnnnnnnnnnnnnnnnnnnnnnnnnnnnnnnnnnnnnnnnnnnnnnnnnnnnnnnnnnnnnnnnnnnnnnnnnnnnnnnnnnnnnnnnnnnnnnnnnnnnnnnnnnnnnnnnnnnnnnnnnnnnnnnnnnnnnnnnnnnnnnnnnnnnnnnnnnnnnnnnnnnnnnnnnnnnnnnnnnnnnnnnnnnnnnnnnnnnnnnnnnnnnnnnnnnnnnnnnnnnnnnagcgcttcagcatggaaggcatctccaacattctgcagagtggcatccgccagacctttggctcctcaagaagtgacaaaca

SEQ ID NO: 21962 - DNA, 857 bp, Macaca Mulatta
tggcaggagctgcgactgccgtgtggtggtgcctgggcccgacagcggggctctgggcatcccaggtgactttggcccatctgcctgcattcccaccccctcgggcctggctggatcccgggcagagggaccttgctgctgtgtgactggaacattcccaaatgtcttgtgaatttgtaatcaaattggtctcatggggaaagacacttaattaagagactcaggcaagcgcagaggcagcccgtgtgtctctggcttagtctggaggcagcggggatgctgctgggagtccatggcacaggccacagcccctcaccttgccatggtggctggtagcacgcctgtcttgctctgccccatgccctgagcaggcatgagagctccatgtcccctagcgcaccctgagacggggctcacaagcgacggtcctgggtgcctcagggagctcactgagggtgtgcgaagttgaaagtggcaaggctgtcaggtagaggaaagaggtcaggtggctaggggaggactcagaggcctcctgcagggccaagcactgcagaaagggctgagctggaggttggcagggctgctccaggcaggtcagagcagggcagggggaggagaggagaaagggaggaagctgggctgtgtggtctccatagaggcattcagagtctacctgcagacagcgggagccccaggaaggtctgcacaactgtaccccaagcgcctcggcctcctctcagcttgctgaggaggcacactagagccgccttcctgacgggagcactctgtcccataaggagcggggagccaggcttgctggggccccacctgcacacccagccttaccctgcattctc

SEQ ID NO: 21963 - DNA, 458 bp, Macaca Mulatta
aagtgctgccctttatcatgtgatacaactggtgaacttacagatggaacagcccacactggccttctatgtgggttattacctctccatctgtctcagctatgccagcagcagcattaacccttttctctacatcctgctgagtggaaatttccagaaacgtctgcctcaaatccaaaggagagtgactgacaaggaaatcaaaaatataagaaacactctgaaatcacacttttaggaaagtacatggatcaccatgagtctagacatgattatcttactggtattattagaaagggcaggtgtaccgatatgtttatgcccatttttcttgtgtacttgtgactcttagcagcatggaacagaagtgtaaccatgcaaatgcaatgagtttaatatgctatcttgagcaaaatgtaaaatattaatctatattgtgggtagggaatgggatagtc

SEQ ID NO: 21964 - DNA, 560 bp, Macaca Mulatta
  misc_feature (1)...(560): n = A,T,C or G
aggtttatgatgctgcagtcaggtggttgaaatacgatgaacctaatcgccagccatttatggttgatatccttgctaaagtcaggtttcctcttatatcaaagaatttcttaagtaaaacggtacaagctgaaccacttattcaagacaatcctgaatgccttaagatggtgataagnnnnnnnnnnnnnnnnnnnnnnnnnnnnnnnnnnnnnnnnnnnnnnnnnnnnnnnnnnnnnnnnnnnnnnnnnnnnnnnnnnnnnnnnnnnnnnnnnnnnnnnnnnnnnnnnnnnnnnnnnnnnnnnnnnnnnnnnnnnggattatagctggacagacatccgctgcccctttgaaaaacgaagagatgcagcatgcgtgttttgggacaatgtagtatacattttgggaggctctcagcttttcccgataaagcgaatggactgctataatgtagtgaaggatagctggtattccaaactgggtcctccgacacctcgagacagccttgctgcatgtgctgcagaaggcaaaatttatacatctggaggttcagaagtagg

SEQ ID NO: 21965 - DNA, 826 bp, Macaca Mulatta
  misc_feature (1)...(826): n = A,T,C or G
ggaattataaactttactgaaaatccagccatgacaagagagctggtcagttgtaaagtaccatcagaattgatttccctttttaataaagaatgggatagagagattcttcttaatatccttaccctatttgagaatataaatgacaacataaaaaatgaagggcttgcatcatccaggaaagaattcagcagaagttcactttttttcttattcaaagagtctggagtttgtgttaagaaaatcaaagcactagcaaatcacaatgatctggtggtgaaagtaaaagtcctgaaagtattaaccaaactctaatttggagtctgtcccaaagagtattgaggtatttgcacttggtacgatgtgttttgtaaattctttgtttttcattgtgaatatatggtaaagagatcttttcagctgctattttggaataatgactatcatatatcataacagtgactgatgttggttttaatggttgggttgaggatgaaccattttaatgatgccaaatggaatattagtacttgtacacagaaagaatttattgatttgatcttattacctagattgagatatttttactctttcctctacctaaactgacaatgaattagttatacatcatgaaatagctacacttttaaaataggtttatatttggtaatccaaagacttgtgttccatcaataaaagttgtgtttttaagcaccannnnnnnannanaaanaannaaaaanancccttgtcgggcggccttggccctttcgaaaaccttttctagaaccttttctttggcccgcccggggcccaataaggtaac

SEQ ID NO: 21966 - DNA, 738 bp, Macaca Mulatta
  misc_feature (1)...(738): n = A,T,C or G
gccgcgcggccgcgggtgagccgcatggagccccgggcggcggacggctgcttcctgggcgacgtnnnnnnnnnnnnnnnnnnnnnnnnnnnnnnnnnnnnnnnnnnnnnnnnnnnnnnnnnnnnnnnnnnnnnnnnnnnnnnnnnnnnnnnnnnnnnnnnnnnnnnnnnnnnnnnnnnnnnnnnnnnnnnnnnnnnnnnnnnnnnnnnnnnnnnnnnnnnnnnnnnnnnnnnnnnnnnnnnnnnnnnnnnnnnnnnnnnnnnnnnnnnnnnnnnnnnnnnnnnnnnnnnnnnnnnnnnnnnnnnnnnnnnnnnnnnnnnnnnnnnnnnnnnnnnnnnnnnnnnnnnnnnnnnnnnnnnnnnnnnnnnnnnnnnnnnnnnnnnnnnnnnnnnnnnnnnnnnnnnngggagttccgaatgtgtgaggcttcttattgatgttggggccaatctggaagcgcacgattgccattttgggacccctctgcacgttgcctgtgcccgggagcatctggactgtgtcaaagtgctgctcaatgcaggncaggggccaacgtgaacgcggcaaagcttcatgagacggcccttcaccacgcggccaaggtcaagaatgttgacctcatcgagatgcttatcgagtttggcggcaacatctatgcccgggacaaccgtgggaagaagccgtctgactacacgtggagcagcagcgctcccgccaagtgcctggagtactacgaaa

SEQ ID NO: 21967 - DNA, 520 bp, Macaca Mulatta
  misc_feature (1)...(520): n = A,T,C or G
aggcagtttcagaggaaggggcaagtgtgcttgttcactgttcagatggctgggacaggactgctcaggtgtgctcggtggcaagcctgctgctggacccgcactaccggactctgaagggcttcatggnnnnnnnnnnnnnnnnnnnnnnnnnnnnnnnnnnnnnnnnnnnnnnnnnnnnnnnnnnnnnnnnnnnnnnnnnnnnnnnnnnnnnnnnnnnnnnnnnnnnnnnnnnnnnnnnnnnnnnnnnnnnnnnnnnnnnnnnnnnnnnnnnnnnnnnnnnnnnnnnnnnnnnnnnnnnnnnnnnnnnnnnnnnnnnnnnnnnnnnnnnnnnnnnnnnnnnnnnnnnnnnnnnnnnnnnnnnnnnnnnnnnnnnnnattcaagaaagaacatattcattatgggctcacctgtggaagaatcgggccgactacctgaatcctctgtttagagctgatcacagccagactcagggaacccttcatctccctacagcaccatgcaacttcatgtacaagt

SEQ ID NO: 21968 - DNA, 1655 bp, Macaca Mulatta
  misc_feature (1)...(1655): n = A,T,C or G
cgcccgggcacccggcgaaatcccccaggcagcccccggcaccgcgccgcgaccccctcgaccctgccaggggcgccgatttcgatcatgtctacagcggggtggtgaatctcagcaccgagaacatctactctttcaactacaccaggcaggccggccaggtnnnnnnnnnnnnnnnnnnnnnnnnnnnnnnnnnnnnnnnnnnnnnnnnnnnnnnnnnnnnnnnnnnnnnnnnnnnnnnnnnnnnnnnnnnnnnnnnnnnnnnnnnnnnnnnnnnnnnnnnnnnnnnnnnnnnnnnnnnnnnnnnnnnnnnnnnnnnnnnnnnnnnnnnnnnnnnnnnnnnnnnnnnnnnnnnnnnnnnnnnnnnnnnnnnnnnnnnnnnnnnnnnnnnnnnnnnnnnnnnnnnnnnnnnnnnnnnnnnnnnnnnnnnnnnnnnnnnnnnnnnnnnnnnnnnnnnnnnnnnnnnnnnnnnnnnnnnnnnnnnnnnnnnnnnnnnnnnnnnnnnnnnnnnnnnnnnnnnnnnnnnnnnnnnnnnnnnnnnnnnnnnnnnnnnnnnnnnnnnnnnnnnnnnnnnnnnnnnnnnnnnnnnnnnnnnnnnnnnnnnnnnnnnnnnnnnnnnnnnnnnnnnnnnnnnnnnnnnnnnnnnnnnnnnnnnnnnnnnnnnnnnnnnnnnnnnnnnnnnnnnnnnnnnnnnnnnnnnnnnnnnnnnnnnnnnnnnnnnnnnnnnnnnnnnnnnnnnnnnnnnnnnnnnnnnnnnnnnnnnnnnnnnnnnnnnnnnnnnnnnnnnnnnnnnnnnnnnnnnnnnnnnnnnnnnnnnnnnnnnnnnnnnnnnnnnnnnnnnnnnnnnnnnnnnnnnnnnnnnnnnnnnnnnnnnnnnnnnnnnnnnnnnnnnnnnnnnnnnnnnnnnnnnnnnnnnnnnnnnnnnnnnnnnnnnnnnnnnnnnnnnnnnnnnnnnnnnnnnnnnnnnnnnnnnnnnnnnnnnnnnnnnnnnnnnnnnnnnnnnnnnnnnnnnnnnnnnnnnnnnnnnnnnnnnnnnnnnnnnnnnnnnnnnnnnnnnnnnnnnnnnnnnnnnnnnnnnnnnnnnnnnnnnnnnnnnnnnnnnnnnnnnnnnnnnnnnnnnnnnnnnnnnnnnnnnnnnnnnnnnnnnnnnnnnnnnnnnnnnnnnnnnnnnnnnnnnnnnnnnnnnnnnnnnnnnnnnnnnnnnnnnnnnnnnnnnnnnnnnnnnnnnnnnnnnnnnnnnnnnnnnnnnnnnnnnnnnnnnnnnnnnnnnnnnnnnnnnnnnnnnnnnnnnnnnnnnnnnnnnnnnnnnnnnnnnnnnnnnnnnnnnnnnnnnnnnnnnnnnntggtaaatgtcactggcaaccaggacatctgttactacaacttcctctgtgctcaccccttgggcgtcctgagnnnnnnnnnnnnnnnnnnnnnnnnnnnnnnnnnnnnnnnnnnnnnnnnnnnnnnnnnnnnnnnnnnnnnnnnnnnnnnnnnnnnnnnnnnnnnnnnnnnnnnnnnnnnnnnnnnnnnnnnnnnnnnnnnnnnnnnnnnnnnnnnnnnnnnnnnnnnnnnnnnnnnnnnnnnnnnnnnnnnnnnnnnnnnnnnnnnnnnnnnnnnnnnccatgtctgccctaattattccaacttccaat

SEQ ID NO: 21969 - DNA, 152 bp, Macaca Mulatta
gatttttgtgcttggcacaaactgttgtggctgttcggggttaggtgacgtccagagcaccattgaacctcggagactggattctttaagtggcaagaaaatagccagcctcagctatgggagtggtccacacattgtccttgcaacaacag

SEQ ID NO: 21970 - DNA, 438 bp, Macaca Mulatta
agggctgggctcccaggctgcccatcccacttctaccctcactggcctccagtgggactcgctcctgccttgcccccaccttcccagtcccacaggccacccctggcttgggctaggttctgtaaagttacgtatttattgagcttttggttcttttataaagacttgtctagactccactgggaagagtcctttgctttggggtccagtgactcggggcacttgaattcagggtggcctctttgcgttcctgtgcccctccacatgccacggatgggccatggatagagcttcccgtgggaagcacctgggaagtaatggggggtggggtgccaccagaccaacatccccagacttccccacctccagccaccatcagaacctctccccaggtgccctcctgggattcagggctgaatctgcccagttcccacactg

SEQ ID NO: 21971 - DNA, 601 bp, Macaca Mulatta
  misc_feature (1)...(601): n = A,T,C or G
agaaaacgttgaagatccaggatgttgggcttgtgccgatgggtggtgtgatgcctggggctgtccctgctgcagcagcccaggagnnnnnnnnnnnnnnnnnnnnnnnnnnnnnnnnnnnnnnnnnnnnnnnnnnnnnnnnnnnnnnnnnnnnnnnnnnnnnnnnnnnnnnnnnnnnnnnnnnnnnnnnnnnnnnnnnnnnnnnnnnnnnnnnnnnnnnnnnnnnnnnnnnnnnnnnnnnnnnnnnnnnnnnnnnnnnnnnnnnnnnnnnnnnnnnnnnnnnnnnnnnnnnnnnnnnnnnnnnnnnnnnnnnnnnnnnnnnnnnnnnnnnnnnnnnnnnnnnnnnnnnnnnnnnnnnnnnnnnnnnnnnnnnnnnnnnnnnnnnnnnnnnnnnnnnnnnnnnnnnnnnnnnnnnnnnnnnnnnnnnnnnnnnnnnnnnnnnnnnnnnnnnnnnnnnnnnnnnnnnnnnnnnnnnnnnnnnnnnnnnnnnnnnnnnnnnnnnnaggggcggctgctgcctggtgacagcaccaggaggcccaccaggacgtgccaccagtgaatgtgcctctggtggctgctgagaaaaatacactgtgca

SEQ ID NO: 21972 - DNA, 4201 bp, Macaca Mulatta
  misc_feature (1)...(4201): n = A,T,C or G
gcagagtcgactggatgctcctgtaccaaggcatggtggtgctggctgccagccaggtgtggtggacctgggaggtggaagacgtcttccacaaagtgcaaaaaggggagaagcaggccatgaagaaatacggcaggannnnnnnnnnnnnnnnnnnnnnnnnnnnnnnnnnnnnnnnnnnnnnnnnnnnnnnnnnnnnnnnnnnnnnnnnnnnnnnnnnnnnnnnnnnnnnnnnnnnnnnnnnnnnnnnnnnnnnnnnnnnnnnnnnnnnnnnnnnnnnnnnnnnnnnnnnnnnnnnnnnnnnnnnnnnnnnnnnnnnnnnnnnnnnnnnnnnnnnnnnnnnnnnnnnnnnnnnnnnnnnnnnnnnnnnnnnnnnnnnnnnnnnnnnnnnnnnnnnnnnnnnnnnnnnnnnnnnnnnnnnnnnnnnnnnnnnnnnnnnnnnnnnnnnnnnnnnnnnnnnnnnnnnnnnnnnnnnnnnnnnnnnnnnnnnnnnnnnnnnnnnnnnnnnnnnnnnnnnnnnnnnnnnnnnnnnnnnnnnnnnnnnnnnnnnnnnnnnnnnnnnnnnnnnnnnnnnnnnnnnnnnnnnnnnnnnnnnnnnnnnnnnnnnnnnnnnnnnnnnnnnnnnnnnnnnnnnnnnnnnnnnnnnnnnnnnnnnnnnnnnnnnnnnnnnnnnnnnnnnnnnnnnnnnnnnnnnnnnnnnnnnnnnnnnnnnnnnnnnnnnnnnnnnnnnnnnnnnnnnnnnnnnnnnnnnnnnnnnnnnnnnnnnnnnnnnnnnnnnnnnnnnnnnnnnnnnnnnnnnnnnnnnnnnnnnnnnnnnnnnnnnnnnnnnnnnnnnnnnnnnnnnnnnnnnnnnnnnnnnnnnnnnnnnnnnnnnnnnnnnnnnnnnnnnnnnnnnnnnnnnnnnnnnnnnnnnnnnnnnnnnnnnnnnnnnnnnnnnnnnnnnnnnnnnnnnnnnnnnnnnnnnnagctggcccgggagcagctgtccaagcagtatcactatgattttggactcagagccctgaaatcggtgctggtcatggctggtgagctgaagagaggctcctctgaccttagggagnnnnnnnnnnnnnnnnnnnnnnnnnnnnnnnnnnnnnnnnnnnnnnnnnnnnnnnnnnnnnnnnnnnnnnnnnnnnnnnnnnnnnnnnnnnnnnnnnnnnnnnnnnnnnnnnnnnnnnnnnnnnnnnnnnnnnnnnnnnnnnnnnnnnnnnnnnnnnnnnnnnnnnnnnnnnnnnnnnnnnnnnnnnnnnnnnnnnnnnnnnnnnnnnnnnnnnnnnnnnnnnnnnnnnnnnnnnnnnnnnnnnnnnnnnnnnnnnnnnnnnnnnnnnnnnnnnnnnnnnnnnnnnnnnnnnnnnnnnnnnnnnnnnnnnnnnnnnnnnnnnnnnnnnnnnnnnnnnnnnnnnnnnnnnnnnnnnnnnnnnnnnnnnnnnnnnnnnnnnnnnnnnnnnnnnnnnnnnnnnnnnnnnnnnnnnnnnnnnnnnnnnnnnnnnnnnnnnnnnnnnnnnnnnnnnnnnnnnnnnnnnnnnnnnnnnnnnnnnnnnnnnnnnnnnnnnnnnnnnnnnnnnnnnnnnnnnnnnnnnnnnnnnnnnnnnnnnnnnnnnnnnnnnnnnnnnnnnnnnnnnnnnnnnnnnnnnnnnnnnnnnnnnnnnnnnnnnnnnnnnnnnnnnnnnnnnnnnnnnnnnnnnnnnnnnnnnnnnnnnnnnnnnnnnnnnnnnnnnnnnnnnnnnnnnnnnnnnnnnnnnnnnnnnnnnnnnnnnnnnnnnnnnnnnnnnnnnnnnnnnnnnnnnnnnnnnnnnnnnnnnnnnnnnnnnnnnnnnnnnnnnnnnnnnnnnnnnnnnnnnnnnnnnnnnnnnnnnnnnnnnnnnnnnnnnnnnnnnnnnnnnnnnnnnnnnnnnnnnnnnnnnnnnnnnnnnnnnnnnnnnnnnnnnnnnnnnnnnnnnnnnnnnnnnnnnnnnnnnnnnnnnnnnnnnnnnnnnnnnnnnnnnnnnnnnnnnnnnnnnnnnnnnnnnnnnnnnnnnnnnnnnnnnnnnnnnnnnnnnnnnnnnnnnnnnnnnnnnnnnnnnnnnnnnnnnnnnnnnnnnnnnnnnnnnnnnnnnnnnnnnnnnnnnnnnnnnnnnnnnnnnnnnnnnnnnnnnnnnnnnnnnnnnnnnnnnnnnnnnnnnnnnnnnnnnnnnnnnnnnnnnnnnnnnnnnnnnnnnnnnnnnnnnnnnnnnnnnnnnnnnnnnnnnnnnnnnnnnnnnnnnnnnnnnnnnnnnnnnnnnnnnnnnnnnnnnnnnnnnnnnnnnnnnnnnnnnnnnnnnnnnnnnnnnnnnnnnnnnnnnnnnnnnnnnnnnnnnnnnnnnnnnnnnnnnnnnnnnnnnnnnnnnnnnnnnnnnnnnnnnnnnnnnnnnnnnnnnnnnnnnnnnnnnnnnnnnnnnnnnnnnnnnnnnnnnnnnnnnnnnnnnnnnnnnnnnnnnnnnnnnnnnnnnnnnnnnnnnnnnnnnnnnnnnnnnnnnnnnnnnnnnnnnnnnnnnnnnnnnnnnnnnnnnnnnnnnnnnnnnnnnnnnnnnnnnnnnnnnnnnnnnnnnnnnnnnnnnnnnnnnnnnnnnnnnnnnnnnnnnnnnnnnnnnnnnnnnnnnnnnnnnnnnnnnnnnnnnnnnnnnnnnnnnnnnnnnnnnnnnnnnnnnnnnnnnnnnnnnnnnnnnnnnnnnnnnnnnnnnnnnnnnnnnnnnnnnnnnnnnnnnnnnnnnnnnnnnnnnnnnnnnnnnnnnnnnnnnnnnnnnnnnnnnnnnnnnnnnnnnnnnnnnnnnnnnnnnnnnnnnnnnnnnnnnnnnnnnnnnnnnnnnnnnnnnnnnnnnnnnnnnnnnnnnnnnnnnnnnnnnnnnnnnnnnnnnnnnnnnnnnnnnnnnnnnnnnnnnnnnnnnnnnnnnnnnnnnnnnnnnnnnnnnnnnnnnnnnnnnnnnnnnnnnnnnnnnnnnnnnnnnnnnnnnnnnnnnnnnnnnnnnnnnnnnnnnnnnnnnnnnnnnnnnnnnnnnnnnnnnnnnnnnnnnnnnnnnnnnnnnnnnnnnnnnnnnnnnnnnnnnnnnnnnnnnnnnnnnnnnnnnnnnnnnnnnnnnnnnnnnnnnnnnnnnnnnnnnnnnnnnnnnnnnnnnnnnnnnnnnnnnnnnnnnnnnnnnnnnnnnnnnnnnnnnnnnnnnnnnnnnnnnnnnnnnnnnnnnnnnnnnnnnnnnnnnnnnnnnnnnnnnnnnnnnnnnnnnnnnnnnnnnnnnnnnnnnnnnnnnnnnnnnnnnnnnnnnnnnnnnnnnnnnnnnnnnnnnnnnnnnnnnnnnnnnnnnnnnnnnnnnnnnnnnnnnnnnnnnnnnnnnnnnnnnnnnnnnnnnnnnnnnnnnnnnnnnnnnnnnnnnnnnnnnnnnnnnnnnnnnnnnnnnnnnnnnnnnnnnnnnnnnnnnnnnnnnnnnnnnnnnnnnnnnnnnnnnnnnnnnnnnnnnnnnnnnnnnnnnnnnnnnnnnnnnnnnnnnnnnnnnnnnnnnnnnnnnnnnnnnnnnnnnnnnnnnnnnnnnnnnnnnnnnnnnnnnnnnnnnnnnnnnnnnnnnnnnnnnnnnnnnnnnnnnnnnnnnnnnnnnnnnnnnnnnnnnnnnnnnnnnnnnnnnnnnnnnnnnnnnnnnnnnnnnnnnnnnnnnnnnnnnnnnnnnnnnnnnnnnnnnnnnnnnnnnnnnnnnnnnnnnnnnnnnnnnnnnnnnnnnnnnnnnnnnnnnnnnnnnnnnnnnnnnnnnnnnnnnnnnnnnnnnnnnnnnnnnnnnnnnnnnnnnnnnnnnnnnnnnnnnnnnnnnnnnnnnnnnnnnnnnnnnnnnnnnnnnnnnnnnnnnnnnnnnnnnnnnnnnnnnnnnnnnnnnnnnnnnnnnnnnnnnnnnnnnnnnnnnnnnnnnnnnnnnnnnnnnnnnnnnnnnnnnnnnnnnnnnnnnnnnnnnnnnnnnnnnnnnnnnnnnnnnnnnnnnnnnnnnnnnnnnnnnnnnnnnnnnnnnnnnnnnnnnnnnnnnagctcagtgcaagcgtctggacgggggactggacaagctgaaggaggccaccatccagctggacgagctgaaccagaagctggccgagcagaagatcgtgctggccgagaagtccgccgcctgcgaggccttgctggaggagatcgccgtcaacaccgctgtag

SEQ ID NO: 21973 - DNA, 196 bp, Macaca Mulatta
tttacccatcatccccccgtggatccttttagtaaaaaccctttcaatttccaaaatatcactgcctaagtgtttcagggtgcagggacgagggaccctcttcttggcccccatgagggcccatccatcactgccatcgtggttgccaggagcaagaggtgctgggatggcagaaggcggcctctggttggtatgc

SEQ ID NO: 21974 - DNA, 718 bp, Macaca Mulatta
aggtacctggcatatacagatcctgggctttcctctcagaccaaaccgaggaatataccaactagttagagccactgtggtttaccgccatcatctccaactatctcgcttcaatctctcgtgccatgtggagccctgggtgcagaaaagcccaaccaagcactttccttcctcagaaggagatttgccaaaatcttccctgatgtctaatgcttggaaagagatggatatcacacaacatgttcagcaaagattctggaataacaagggacgcaggatcctacgactccgttttatgtgtcagcagcaaaaatatagtgatggtcttgagctctggcatggcacttcgtccttggacattgccttcttgttactgtatttcaatgatactcataaaagcattcagaaggctaaacttcttcccaggggcatggaggagttcatggaaagggaatcttttcttctccggagaacccgacaagcagatggtatctcagctgaggttactgcctcttcctcaaaacgtagtgggcctgaaaataaccagtgttccctccaccctttccaagtcagcttccgccagctgggttgggatcactggatcattgctccccctttctacaccccaaactactgtaaaggaacttgtctccgagtactacgcgatgatctcaattcccccaatcatgccattatacagaaccttgtcaatcagttg

SEQ ID NO: 21975 - DNA, 119 bp, Macaca Mulatta
gtgccacccaccatccaggccaggcagaacattgtgaatgccaccgccaacctcggccagtccgtcaccctggtgtgtgatgccgaaggcttcccggaacccaccatgagctggacaaa

SEQ ID NO: 21976 - DNA, 1892 bp, Macaca Mulatta
  misc_feature (1)...(1892): n = A,T,C or G
tatttatttggtcactggtgcgatttcatagacctaattatggcacaattccataccctgactggggagttgctctaggctggtgtatgattattttctgcannnnnnnnnnnnnnnnnnnnnnnnnnnnnnnnnnnnnnnnnnnnnnnnnnnnnnnntttcagcgccttataagttgctgcagaccagcttctaactggggtccatacctggaacaacatcgtggggagagatataaaggcatggtagatcccaaaacagaggctgactatgaaatacctactgttagtggcagcggaaaaccagaatgagatctcattgaaaaaaatataggattgtataatgtgattttttttagaatgggggaaacttatttatttgtatgttaactgaataggaaaatgtacttactatgttcatgatggtgtgatttttttcacatttaagcaggaatgcaatataaaaatgtgaatctcttaatgctcagccatgtgcttattatatttctttttagataatgtatctgtatnnnnnnnnnnnnnnnnnnnnnngtctctatttcacaattatatctttgtaaatagtatatgcttttttaatacatcggaggctttattttgagctaatttcttagagaatagttatattttctattacacaagtttaaaaatattatttacttgtattttcttaatatacaatctttcttttccacaaatatgggtgggaaataaatcagtacatttaaaagaaacagttaaaactgacggcctcactnnnnnnnnnnnnnnnnnnnnnnnnnnnnnnnnnnnnnnnnnnnnnnnnnnnnnnnnnnnnnnnnnnnnnnnnnnnnnnnnnnnnnnnnnnnnnnnnnnnnnnnnnnnnnnnnnnnnnnnnnnnnnnnnnnnnnnnnnnnnnnnnnnnnnnnnnnnnnnnnnnnnnnnnnnnnnnnnnnnnnnnnnnnnnnnnnnnnnnnnnnnnnnnnnnnnnnnnnnnnnnnnnnnnnnnnnnnnnnnnnnnnnnnnnnnnnnnnnnnnnnnnnnnnnnnnnnnnnnnnnnnnnnnnnnnnnnnnnnnnnnnnnnnnnnnnnnnnnnnnnnnnnnnnnnnnnnnnnnnnnnnnnnnnnnnnnnnnnnnnnnnnnnnnnnnnnnnnnnnnnnnnnnnnnnnnnnnnnnnnnnnnnnnnnnnnnnnnnnnnnnnnnnnnnnnnnnnnnnnnnnnnnnnnnnnnnnnnnnnnnnnnnnnnnnnnnnnnnnnnnnnnnnnnnnnnnnnnnnnnnnnnnnnnnnnnnnnnnnnnnnnnnnnnnnnnnnnnnnnnnnnnnnnnnnnnnnnnnnnnnnnnnnnnnnnnnnnnnnnnnnnnnnnnnnnnnnnnnnnnnnnnnnnnnnnnnnnnnnnnnnnnnnnnnnnnnnnnnnnnnnnnnnnnnnnnnnnnnnnnnnnnnnnnnnnnatatgtaaagaacttttcatcaattcttaaatttcttaacctaggcttcaggaaacatatgaacccaaattcatatggaacattttctgtgtgtacatgtacatgcatttttctagggagagagtccataggtttatcagaatatcaaggaaacctgtgacccaaagaagtttaagaaccacatacactgctgctagctttttgtgcttggcaaaagagtgacaatagaagaaataatttttcttacacattttaaaacattttatcttccttgtgattgaagatgaaaggagtaagaaattaaggcctttgtttaatttatactggtaatttatttagggggaggggacatgaaggtaggtaaacaggtaggcctctaattgaaccacctctgtaagttatgtatgaatgtataagctgaaattgtgttacacattctgagg

SEQ ID NO: 21977 - DNA, 3621 bp, Macaca Mulatta
  misc_feature (1)...(3621): n = A,T,C or G
gattgcagctgatgagccaccaccagatggttgtaatgcatttgtggttatccataagaagcacacctgtaaaattaatgagattaaaaagctgctgaagaaagctgcttcaaggnnnnnnnnnnnnnnnnnnnnnnnnnnnnnnnnnnnnnnnnnnnnnnnnnnnnnnnnnnnnnnnnnnnnnnnnnnnnnnnnnnnnnnnnnnnnnnnnnnnnnnnnnnnnnnnnnnnnnnnnnnnnnnnnnnnnnnnnnnnnnnnnnnnnnnnnnnnnnnnnnnnnnnnnnnnnnnnnnnnnnnnnnnnnnnnnnnnnnnnnnnnnnnnnnnnnnnnnnnnnnnnnnnnnnnnnnnnnnnnnnnnnnnnnnnnnnnnnnnnnnnnnnnnnnnnnnnnnnnnnnnnnnnnnnnnnnnnnnnnnnnnnnnnnnnnnnnnnnnnnnnnnnnnnnnnnnnnnnnnnnnnnagaaatatattcagatcttagagataatctgacagcattccaaaaatacttgattgagagtaacaagcaaatgacgcctttgaaagtctgggaactacaannnnnnnnnnnnnnnnnnnnnnnnnnnnnnnnnnnnnnnnnnnnnnnnnnnnnnnnnnnnnnnnnnnnnnnnnnnnnnnnnnnnnnnnnnnnnnnnccagatctctaaccagaattgctgtaaatcaacatatgagagaagaaatacaggaaaatcaaaagnnnnnnnnnnnnnnnnnnnnnnnnnnnnnnnnnnnnnnnnnnnnnnnnnnnnnnnnnnnnnnnnnnnnnnnnnnnnnnnnnnnnnnnnnnnnnnnnnnnnnnnnnnnnnnnnnnnnnnnnnnnnnnnnnnnnnnnnnnnnnnnnnnnnnnnnnnnnnnnnnnnnnnnnnnnnnnnnnnnnnnnnnnnnnnnnnnnnntgggaatatacttatgtattagatattcgacattcttctataatnnnnnnnnnnnnnnnnnnnnnnnnnnnnnnnnnnnnnnnnnnnnnnnnnnnnnnnnnnnnnnnnnnnnnnnnnnnnnnnnnnnnnnnnnnnnnnnnnnnnnnnnnnnnnnnnnnnnnnnnnnnnnnnnnnnnnnnnnnnnnnnnnnnnnnnnnnnnnnnnnnnnnnnnnnnnnnnnnnnnnnnnnnnnnnnnnnnnnnnnnnnnnnnnnnnnnnnnnnnnnnnnnnnnnnnnnnnnnnnnnnnnnnnnnnnnnnnnnnnnnnnnnnnnnnnnnnnnnnnnnnnnnnnnnnnnnnnnnnnnnnnnnnnnnnnnnnnnnnnnnnnnnnnnnnnnnnnnnnnnnnnnnnnnnnnnnnnnnnnnnnnnnnnnnnnnnnnnnnnnnnnnnnnnnnnnnnnnnnnnnnnnnnnnnnnnnnnnnnnnnnnnnnnnnnnnnnnnnnnnnnnnnnnnnnnnnnnnnnnnnnnnnnnnnnnnnnnnnnnnnnnnnnnnnnnnnnnnnnnnnnnnnnnnnnnnnnnnnnnnnnnnnnnnnnnnnnnnnnnnnnnnnnnnnnnnnnnnnnnnnnnnnnnnnnnnnnnnnnnnnnnnnnnnnnnnnnnnnnnnnnnnnnnnnnnnnnnnnnnnnnnnnnnnnnnnnnnnnnnnnnnnnnnnnnnnnnnnnnnnnnnnnnnnnnnnnnnnnnnnnnnnnnnnnnnnnnnnnnnnnnnnnnnnnnnnnnnnnnnnnnnnnnnnnnnnnnnnnnnnnnnnnnnnnnnnnnnnnnnnnnnnnnnnnnnnnnnnnnnnnnnnnnnnnnnnnnnnnnnnnnnnnnnnnnnnnnnnnnnnnnnnnnnnnnnnnnnnnnnnnnnnnnnnnnnnnnnnnnnnnnnnnnnnnnnnnnnnnnnnnnnnnnnnnnnnnnnnnnnnnnnnnnnnnnnnnnnnnnnnnnnnnnnnnnnnnnnnnnnnnnnnnnnnnnnnnnnnnnnnnnnnnnnnnnnnnnnnnnnnnnnnnnnnnnnnnnnnnnnnnnnnnnnnnnnnnnnnnnnnnnnnnnnnnnnnnnnnnnnnnnnnnnnnnnnnnnnnnnnnnnnnnnnnnnnnnnnnnnnnnnnnnnnnnnnnnnnnnnnnnnnnnnnnnnnnnnnnnnnnnnnnnnnnnnnnnnnnnnnnnnnnnnnnnnnnnnnnnnnnnnnnnnnnnnnnnnnnnnnnnnnnnnnnnnnnnnnnnnnnnnnnnnnnnnnnnnnnnnnnnnnnnnnnnnnnnnnnnnnnnnnnnnnnnnnnnnnnnnnnnnnnnnnnnnnnnnnnnnnnnnnnnnnnnnnnnnnnnnnnnnnnnnnnnnnnnnnnnnnnnnnnnnnnnnnnnnnnnnnnnnnnnnnnnnnnnnnnnnnnnnnnnnnnnnnnnnnnnnnnnnnnnnnnnnnnnnnnnnnnnnnnnnnnnnnnnnnnnnnnnnnnnnnnnnnnnnnnnnnnnnnnnnnnnnnnnnnnnnnnnnnnnnnnnnnnnnnnnnnnnnnnnnnnnnnnnnnnnnnnnnnnnnnnnnnnnnnnnnnnnnnnnnnnnnnnnnnnnnnnnnnnnnnnnnnnnnnnnnnnnnnnnnnnnnnnnnnnnnnnnnnnnnnnnnnnnnnnnnnnnnnnnnnnnnnnnnnnnnnnnnnnnnnnnnnnnnnnnnnnnnnnnnnnnnnnnnnnnnnnnnnnnnnnnnnnnnnnnnnnnnnnnnnnnnnnnnnnnnnnnnnnnnnnnnnnnnnnnnnnnnnnnnnnnnnnnnnnnnnnnnnnnnnnnnnnnnnnnnnnnnnnnnnnnnnnnnnnnnnnnnnnnnnnnnnnnnnnnnnnnnnnnnnnnnnnnnnnnnnnnnnnnnnnnnnnnnnnnnnnnnnnnnnnnnnnnnnnnnnnnnnnnnnnnnnnnnnnnnnnnnnnnnnnnnnnnactgagaaaactgttacagcagaatatgaactagaatacttactcctcgaaggacattgctttgataaagtgacagaacagcctcctcggggtctgcagttcacactaagcgcaaaaaataaaccagttgtggtnnnnnnnnnnnnnnnnnnnnnnnnnnnnnnnnnnnnnnnnnnnnnnnnnnnnnnnnnnnnnnnnnnnnnnnnnnnnnnnnnnnnnnnnnnnnnnnnnnnnnnnnnnnnnnnnnnnnnnnnnnnnnnnnnnnnnnnnnnnnnnnnnnnnnnnnnnnnnnnnnnnnnnnnnnnnnnnnnnnnnnnnnnnnnnnnnnnnnnnnnnnnnnnnnnnnnnnnnnnnnnnnnnnnnnnnnnnnnnnnnnnnnnnnnnnnnnnnnnnnnnnnnnnnnnnnnnnnnnaagtttcacaataaggttgcataaagaagaagaaaaggaaaaagatgtcctaaacattttttcagttgcttctggtcatttatatgaacgttttttaannnnnnnnnnnnnnnnnnnnnnnnnnnnnnnnnnnnnnnnnnnnnnnnnnnnnnnnnnnnnnnnnnnnnnnnnnnnnnnnnnnnngaagtaattcctcatatggctaaagaatatggattccaatatgaactagttcaatataggtggccccgttggcttcgtcagcagactgaaagacaaaggattatttggggttacagaattattttccttgatgttcttttcccactagcagtggacaaaatcatttttgttg

SEQ ID NO: 21978 - DNA, 132 bp, Macaca Mulatta
ttcaggccaggtcttcctcctatagtggagagtatggaggtggtggcggaaagcgattctctcattctggcaaccagttggacggccccatcaccgccctccgggtccgagtcaacaactactacatcgtag

SEQ ID NO: 21979 - DNA, 1001 bp, Macaca Mulatta
tggccgaggcgtcgccgcagcccggacggtacttctgccactgctgctccgtggagatcgtcccgcgcctgccggattatatctgtccaagatgcgagtctggtttcattgaggagcttccggaagagaccaggagcacagaaaatggttctgccccctccacagcccccacggaccagagccggccaccactggagggctacggacagtttgctttcggcatcttcgatgacagcttcgagatccctacgttccctcctggggctcaggctgatgaaggcagggaccctgagagccggcgggagagagaccatccgtcccggcaccggtatggcgcccggcagccccgcgcccgcctcaccacgcggcgggccaccggccggcacgaaggcgtccccacgctggaagggatcatccagcagcttgtcaatggcatcatcacgcctgccaccatccccagcctgggtccctggggagtcctgcactcaaaccctatggactacgcctggggggacaacggcctggacgccatcatcacacagctcctcaatcagtttgaaaacacgggccccccaccggcagataaagagaaaatccaggccctccccaccgtccccgtcaccgaggagcacgtaggctccgggctcgagtgccctgtgtgcaaggacgactacgcgctgggtgagcgtgtgcggcagctgccctgcaaccacctgttccacgacggctgcatcgtgccctggctggagcagcacgacagctgccccgtctgccgaaaaagcctcacgggacagaacacggacacgaaccccccgggcctcactggggtgagcttctcctcctcgtcgtcctcctcctcctccagatcgaccagcaacgagaacgccacaggcaactcgtgagcccgcgtcggccgacgggaaagcacgggtcctttcccaaccatctgcagccggcgccaaacggaaaccacggactggtgccccggcgggccacacttg

SEQ ID NO: 21980 - DNA, 732 bp, Macaca Mulatta
  misc_feature (1)...(732): n = A,T,C or G
gaagactttctttaatataacatccagagtgctccaccatgagtggtgggaaagccatagaacatttggccaatcaaggaaatagatttcattttgacatcaaacctcccttgcatcgtgctaaaaactgtgatttttcttttactggacttcaacaagttactaataaaagaataatgaaaaaggaaaaagaggaaggtatatttctaattagtaaagttgaacagataaatgttcctggattgtgcctaaaaatgcctgctcatttctgcaggtattgaggaggggcaagtcctgtcttcagctgcagacattgctgccacagtacagcacacaatggcatgtcatattgtgaaaagaacacatcgggctattctgttttgtaagcagagagacttgttacctcaaaataatgcagtactggtnnnnnnnnnnnnnnnnnnnnnnnnnnnnnnnnnnnnnnnnnnnnnnnnnnnnnnnnnnnnnnnnnnnnnnnnnnnnnnnnnnnnnnnnnnnnnnnnnnnnnnnnnnnnnnnnnnnnnnnnnnnnnnnnnnnnnnnnnnnnnnnnnnnnnnnnnnnnnnnnnnnnnnnnnnnnnnnnnnnnnnnnnnnnnnnnnnnnnnnnnnnnnnnnnnnnnnnnnnnnnnnnnnnnnnnnnnnnnagaagctgccataaaagtaccacaattaaaaatggagatatgatttctgctgttcaaaaaagtccctaaa

SEQ ID NO: 21981 - DNA, 845 bp, Macaca Mulatta
  misc_feature (1)...(845): n = A,T,C or G
tgggactgggcccaggttcccaccgcatcgtcctcctcagccagaaccttctggtccccgtccccggatagagacccaggaggcccaagccctttcttccggcttggagtgggagcctctccactctcagcagctccagacccttcgcatctccgtttacagttcacgacctcagctgcattttggcgctaacgccccgtttcccaggnnnnnnnnnnnnnnnnnnnnnnnnnnnnnnnnnnnnnnnnnnnnnnnnnnnnnnnnnnnnnnnnnnnnnnnnnnnnnnnnnnnnnnnnnnnnnnnnnnnnnnnnnnnnnnnnnnnnnnnnnnncccacacacaccatctgaccttgaagtgcagctgtgctttcaagaggtcactctagtcctagacagcccattcctggaatctggagtgagtcccaagttaccctgtcacacatcagaattgcgaacaatgaacaacaaaggactggtcaggaagccccagcccatccgcctcagtggagtagattctgtctttggcagggttatcacagctcagccaccaaaatggaccgggactttcagagtttcagacaagtcagccttttgcaaaatcattagcagggagcaccagtggcccattggactgaaggagcctcagattcagatgacagtgactatgtgcaaacagatgctgcgctctatcctcttgctgtatgcaacttacaaaaagtgcacctttgccttgcagcactccaagtaaagggtcctcatttgatccccatttcttcacaccatgccctttggcatgtaactgaagcttacagaaacctgtccatgtaaatgaaactgtgtcatt

SEQ ID NO: 21982 - DNA, 624 bp, Macaca Mulatta
  misc_feature (1)...(624): n = A,T,C or G
aaagttaaagttaacaaagaagttaaaagtttcatcagaaactttacatatctttagcaaatatatttttatatgtgtatggtatataatggaaataattctttgagcaacagaagctattattgactactgcaagctaagctgagcttaaaaatgccttttgttttaaatgggctttgagaaaaacaaacaaacgggggattatttcaaatcaaccaaccaactcagtatcctgtggcttgatagacaagagtttactacatatattgataatgtaaatagcctgtcttgctatttactatcttatagtgattcaggctctaattagctgagggaatgaaacacacacacaaatcactgaattcctaagagttccattaaataagcagtactatttacaaatcacagtataagatttaagtgcctggggaagggatacaatttttagaaattacatattgggtcannnnnnnnnnnnnnnnnntgaggaaaaggtggtaaataggaaaccatgaatgggaaggatggcaataagtagcaactgtactttccaatgactaaagaaagaagatctcagtatattccttctcatgaagacacagtcagacactggacaatgtaacg

SEQ ID NO: 21983 - DNA, 815 bp, Macaca Mulatta
gggccttttccccccctctagcgccgctgggcctgcaggtctctgtcgacccgcggacgctggtgtctgttccgcaggatggggtttgttaaagttgttaagaataaggcctactttaagagataccaagtgaaatttaaaagacgacgagagggtaaaactgattactatgctctgaaacgcttggtgatacaggataaaaataaatacaactcacccaaatacaggatgatagttcgtgtatcaaacagagatatcatttgtcagattgcttatgcccgtttagagggggatatgatagtctgcgcagcatatgcacacgaactgccaaaatacggtgtgaaggttggcctgacaaactattcttgcagcatattgtactggcctgctgctggcccgcacgattctctatatgtttggcatggacaatatctattgaaggcctgttggaggtaactggccaatgaattctacgttggaacagcatttgatggtccagtcaggtgcctcttaacctgactatgtggaatgcccggcctttgcctaaaacctcccatttggcaaagtaacaatttttttgcgagcccccagtaaatggatcctattgggaattggactgcattgctattataccctccaccagatcctaaaaccaattttccccgcgtctaattaattgcctggaaaatccatggagatattcatcctggccccacaagttcccatcccgtggaagtcccacttccatgtgggatccagataaatgcttgtctctaaataaagaatagacccctcattatataaaccggcgaata

SEQ ID NO: 21984 - DNA, 512 bp, Macaca Mulatta
  misc_feature (1)...(512): n = A,T,C or G
cagaaagaaattttggcactaattccaaaccagaatgctcttctaaaggacttggatattcttcataattcatcacatatgaagagcatgtcaaccttcattgaagaagcctacaagaaactgaatgcctcttaaagannnnnnnnnnnnagattgttccatattaatttaatgttcatgaatttgtaaaactgttaacctatgattatatgtacagaggctaaggcttctgcaggatttattatctcctgatatgcactttaaaattaataattgtaggtctatcattagcatctaatgtagttctgaaaactgtgtttagcagttgccatttctaggaagctaacatttatattgctctatcaataagtatttgcctagaaccacaaaataggaattgccttaaggatcgaatagtttataatgcctgaatggaggtcatttattgattaacagctcatatcaggaactgtgataagtaagtgtttacatatagtgtctagtgcataaaa

SEQ ID NO: 21985 - DNA, 3924 bp, Macaca Mulatta
  misc_feature (1)...(3924): n = A,T,C or G
agatctggtggttctccggagagcagcttcctcgggtgttacatgagccaagccctcactgtacagatgagtgagagctgaaacctgttccctgagctgatcagaaggacatcccttggcccctccatctgggcccctgtggataggaggggctgggcgagcaggccagctgggctatggtgtggtgcctcggcctggccgtcctcagcctggttatcagccagggggctgacggnnnnnnnnnnnnnnnnnnnnnnnnnnnnnnnnnnnnnnnnnnnnnnnnnnnnnnnnnnnnnnnnnnnnnnnnnnnnnnnnnnnnnnnnnnnnnnnnnnnnnnnnnnnnnnnnnnnnnnnnnnnnnnnnnnnnnnnnnnnnnnnnnnnnnnnnnnnnnnnnnnnnnnnnnnnnnnnnnnnnnnnnnnnnnnnnnnnnnnnnnnnnnnnnnnnnnnnnnnnnnnnnnnnnnnnnnnnnnnnnnnnnnnnnnnnnnnnnnnnnnnnnnnnnnnnnnnnnnnnnnnnnnnnnnnnnnnnnnnnnnnnnnnnnnnnnnnnnnnnnnnnnnnnnnnnnnnnnnnnnnnnnnnnnnnnnnnnnnnnnnnnnnnnnnnnnnnnnnnnnnnnnnnnnnnnnnnnnnnnnnnnnnnnnnnnnnnnnnnnnnnnnnnnnnnnnnnnnnnnnnnnnnnnnnnnnnnnnnnnnnnnnnnnnnnnnnnnnnnnnnnnnnnnnnnnnnnnnnnnnnnnnnnnnnnnnnnnnnnnnnnnnnnnnnnnnnnnnnnnnnnnnnnnnnnnnnnnnnnnnnnnnnnnnnnnnnnnnnnnnnnnnnnnnnnnnnnnnnnnnnnnnnnnnnnnnaggacccccagtcatcgtggtgccccccaagaactgcacagtcaatgcttcccaggatgtttccttggcctgccacgctgaggcataccctgctaatctcacctacagctggttccaggacaacaccaatgtcttccacattannnnnnnnnnnnnnnnnnnnnnnnnnnnnnnnnnnnnnnnnnnnnnnnnnnnnnnnnnnnnnnnnnnnnnnnnnnnnnnnnnnnnnnnnnnnnnnnnnnnnnnnnnnnnnnnnnnnnnnnnnnnnnnnnnnnnnnnnnnnnnnnnnnnnnnnnnnnnnnnnnnnnnnnnnnnnnnnnnnnnnnnnnnnnnnnnnnnnnnnnnnnnnnnnnnnnnnnnnnnnnnnnnnnnnnnnnnnnnnnnnnnnnnnnnnnnnnnnnnnnnnnnnnnnnnnnnnnnnnnnnnnnnnnnnnnnnnnnnnnnnnnnnnnnnnnnnnnnnnnnnnnnnnnnnnnnnnnnnnnnnnnnnnnnnnnnnnnnnnnnnnnnnnnnnnnnnnnnnnnnnnnnnnnnnnnnnnnnnnnnnnnnnnnnnnnnnnnnnnnnnnnnnnnnnnnnnnnnnnnnnnnnnnnnnnnnnnnnnnnnnnnnnnnnnnnnnnnnnnnnnnnnnnnnnnnnnnnnnnnnnnnnnnnnnnnnnnnnnnnnnnnnnnnnnnnnnnnnnnnnnnnnnnnnnnnnnnnnnnnnnnnnnnnnnnnnnnnnnnnnnnnnnnnnnnnnnnnnnnnnnnnnnnnnnnnnnnnnnnnnnnnnnnnnnnnnnnnnnnnnnnnnnnnnnnnnnnnnnnnnnnnnnnnnnnnnnnnnnnnnnnnnnnnnnnnnnnnngcactagccctcatgttgtcaccaatgtgtccgtggtgcctttgcctaagggtgccaatgtctcctgggagcctggctttgatggtggctatctgcagagattcagtgtctggtacacgccactgnnnnnnnnnnnnnnnnnnnnnnnnnnnnnnnnnnnnnnnnnnnnnnnnnnnnnnnnnnnnnnnnnnnnnnnnnnnnnnnnnnnnnnnnnnnnnnnnnnnnnnnnnnnnnnnnnnnnnnnnnnnnnnnnnnnnnnnnnnnnnnnnnnnnnnnnnnnnnnnnnnnnnnnnnnnnnagggcttcctaccacgccagctgcacccaggcttcctccaacagagatatcccctcccctgtcccctccacggggtctggtggcagtgaggacaccccggggggtactcctgcattgggatcccccagagctggtccctaagagactggatggctacgtcttggaaggacggcaaggctcccagggctgggaggtgctggacccagctgtggcaggcacagaaacagagctgctggtaccaggcctcatcaannnnnnnnnnnnnnnnnnnnnnnnnnnnnnnnnnnnnnnnnnnnnnnnnnnnnnnnnnnnnnnnnnnnnnnnnnnnnnnnnnnnggtctggaggtctacccttcgcgcacgcagctgccgggtctcctgccccagcctgtgttggccggcgtggtgggcggggtctgcttcctaggcgtggccgtcctcgtgagcattctggccgcctgcctcatgaaccggcgcagggctgcccgccgccgccgcaagcgcctccgccaannnnnnnnnnnnnnnnnnnnnnnnnnnnnnnnnnnnnnnnnnnnnnnnnnnnnnnnnnnnnnnnnnnnnnnnnnnnnnnnnnnnnnnnnnnnnnnnnnnnnnnnnnnnnnnnnnnnnnnnnnnnnnnnnnnnnnnnnnnnnnnnnnnnnnnnnnnnnnnnnnnnnnnnnnnnnnnnnnnnnnnnnnnnnnnnnnnnnnnnnnnnnnnnnnnnnnnnnnnnnnnnnnnnnnnnnnnnnnnnnnnnnnnnnnnnnnnnnnnnnnnnnnnnnnnnnnnnnnnnnnnnnnnnnnnnnnnnnnnnnnnnnnnnnnnnnnnnnnnnnnnnnnnnnnnnnnnnnnnnnnnnnnnnnnnnnnnnnnnnnnnnnnnnnnnnnnnnnnnnnnnnnnnnnnnnnnnnnnnnnnnnnnnnnnnnnnnnnnnnnnnnnnnnnnnnnnnnnnnnnnnnnnnnnnnnnnnnnnnnnnnnnnnnnnnnnnnnnnnnnnnnnnnnnnnnnnnnnnnnnnnnnnnnnnnnnnnnnnnnnnnnnnnnnnnnnnnnnnnnnnnnnnnnnnnnnnnnnnnnnnnnnnnnnnnnnnnnnnnnnnnnnnnnnnnnnnnnnnnnnnnnnnnnnnnnnnnnnnnnnnnnnnnnnnnnnnnnnnnnnnnnnnnnnnnnnnnnnnnnnnnnnnnnnnnnnnnnnnnnnnnnnnnnnnnnnnnnnnnnnnnnnnnnnnnnnnnnnnnnnnnnnnnnnnnnnnnnnnnnnnnnnnnnnnnnnnnnnnnnnnnnnnnnnnnnnnnnnnnnnnnnnnnnnnnnnnnnnnnnnnnnnnnnnnnnnnnnnnnnnnnnnnnnnnnnnnnnnnnnnnnnnnnnnnnnnnnnnnnnnnnnnnnnnnnnnnnnnnnnnnnnnnnnnnnnnnnnnnnnnnnaggaggaacacatctgtggacgagaactatgagtgggactcagaattccctggggacatggaattgctggagacgaaggacctcggcttggccagctcccggctcagacctgannnnnnnnnnnnnnaggtgtgaagactccagaggagggctgcctcctgaacactgcccatgttactggccctgaggcccgctgtgctgcccttcgggaggaattcctggccttccgccgccgccgagatgctactagggctcggctaccagcctatcgacagccagtccctcaccccgaacaggccactctgctgtgaacacccctaatgtgaggctgggaaaaggcatatggacctgcaaaggaggcccccaaccagactgacctagcttcaacctaggacactgcccctgcctgcccctttggtgcccagaccctgatagtggatagtgagcctgggtcaccttggtatggaatgtatgtgctgaccccctaggtgagtctggggattggaacagggatcttaggtct

SEQ ID NO: 21986 - DNA, 811 bp, Macaca Mulatta
gggatgaaaaaacacactcgacctctccctaaaaagatgttgcaacccagtgtctctcaattccaccccaagaagagccctgaatgagaagagcggtttcccgtgcacgtggagggtggtcagcggtgagcgttctggggaccggggaaagacacgttgcctgatgccgtgcacgtgcgcaggccctgggtgcacacccagaaaggggcatgtggctgtagaaccatccatccagctacagctaaacaatttgccaataaagtacatgtttttcctaagccaaaaataaatacaaatatgttaacggaaaaatgatttaggatattagcttgaacgcttaaatatttgcatctttacaagcctctcagtgtattcttggagttcttaaagtggtgttttaatatttgttgccagtaatgttctttcttcacagccgctccgggaattctgaagtactgggcctttctcaaaagactgtaatgtacctgaagtgtctgaaatgttgcaaacccgcagagtttaggctggtgctgccaaaaagaaaagccaagtagagtttgtatttttaagtatccagtagtgattttgtaaacttgttttttcatttgaagctgaatatatacgtagtcttgttttatgcctgaaaactaaacctatttctttagccagaaaaaatattttcccccttatccccacttgctgtggaaggttttctgtaccctggccctgggatgcctggggagggacccccgggaaccccttgctgcaactgctgtgggtggatggcctgcccccacctctggtttccctt

SEQ ID NO: 21987 - DNA, 89 bp, Macaca Mulatta
gatctcctctctggtacttcagacaagttcaacctcttggccaagctggaacgcgctcagagccggatcctgtccctggaaagccaggt

SEQ ID NO: 21988 - DNA, 1093 bp, Macaca Mulatta
  misc_feature (1)...(1093): n = A,T,C or G
gacgaagcgtcgcttagacaggacgccgatcggctccgctcctgctgatcgcaaggtcccgttccccgccgcccacccggagccgacgaaagccagcgagcgcctcagcctcaggcatctgcatctgggaccgacctcctgggctggctgatcaaggaagaagcagcagcaatgtctggtgtggggggctgcagctccgtacctgcatcatcctagtgatagtcacagtggccgagtgagtttcttgggggcccagcttcctccagaggtggcagcaatggcccgactactaggtgacctagacaggagcacgttcagaaaattgctgaagcttgtggtcagcagcctgcagggggaggactgccgagaggctgtgcagcgtcttcgggtcagcgccgacctgccggaggagcggctgggtgccctgttggcaggcatgcacacgctgctccagcaagccctccgtctgccccccgccagcctgaagcctgacaccttcagggaccagctccaggagctctgcatcccccaagacctggtcggggacttggccagcgtggtatttgggagccagcggcccctccttgattgcgtggcccagcagcagggggcctggctgccccatgttgctgactttcggtggcgggtggatgtagcaatctctaccagtgccctggctcgctccctgcagccagcgtcctgatgcagctgaagcttcagatgggtcaagagtacgctcgacgtcccacagacaaattccagactgggacaggtggtctgtctgaaggatgcgatctgcaaaacggttgagcatgtggaatgacccccttgcagcccacggcaggggagcgccaatggcaagcggaaccgagagttgcagaggcgcagatttgcgggaaacctgctctgagctctctgcgacgtctcccgtcccccacgcgcacacnnnnnnnnnnnnnnnnnnnnnnnnnnnnnnnaacgagagaagaagacagagaaacacaagacaagaaagaaaaaagacacaaacgaaaaaaacacaaagagacaaacaaaactaaaaagaaaacacagaaaaaaacaaacgaagaca

SEQ ID NO: 21989 - DNA, 175 bp, Macaca Mulatta
  misc_feature (1)...(175): n = A,T,C or G
nggtctgtcttccgagctgcgttctgtccttgtcatgatgctggagccggaccccaagctgcgggccacggccgaggccctgctggcactgcctatgttgaggcagccgcgggcctggggtgtgctgtggtgcatggcagcggaggccctgagccgagggtgggccctgtggcag

SEQ ID NO: 21990 - DNA, 716 bp, Macaca Mulatta
taagattatttataatagtcttataaatgtgtgtttgtataagggaccacctggagggtgtggcagacctgtctgaaatgttagatcagggatctcgtggaaagggtagttggacagaattcagaagaaatcatcttttatgaagaataacagagcctttttccactctctgccctcaaacagatactgacaagttaaaaaacataatgcaggtggcagagcccagagtcagagatgtcatcaacagcatggagcatgctattgtttcccggagccctcgcatccgctacaaccctggcctggatgccaaactcctctacatccccctggctaaattgcccacccctgtgacagatttcatcctgagccggtaccttccaaggccagcggacagtgtctaaactggggaggctcaatgggtcagtggagcctagaagtgggggtggaaggaaggactgtggggtcacaaaaggtggtatcagatatcctggggacactggctgcaaaggacgcttggctcagctgacacccactgctgtcgaatttaccagtaacttctaacagaagatgaatgcctcttcccaccctctgggaccacacagaaacctgaggtggtgtttgcaagttcagcgatctgcagcaatggctccaaggacatctgtcacccagtcaggatatggctttttctggtcttggaaaagtcaggagaagaaaac

SEQ ID NO: 21991 - DNA, 2702 bp, Macaca Mulatta
  misc_feature (1)...(2702): n = A,T,C or G
atgatcggaagctcttcactgactttgttaatgatgttaaagattatcttagaaacatgaaggaatatcaagtagataatgatggagtatttgagaagttggatgaatatatatatagacacttctttggtcacactttttcccctccatatggacccaggtcggtttacataaaaccatgtcattacagtagtttgtaacatttgtagattggatagcatttttatgatttgatgagtttcttggaaggttactgtttctaagagttgtgctttattgccactgagagaattcagaataaattgaaaggtggagtctaaaaattattagctgttacaaatggaacatttcattataatgtaatcactttgatttgagcaaatggtttaatttttatcctaaaaatcagttaagaatatataaaatcctattttggccaactttgtttcttttcagtatagtttgtaatgaaaagatcaccttaagcgaaattannnnnnnnnnnnnnnnnnnnnnnnnnnnnnnnnnnnnnnnnnnnnnnnnnnnnnnnnnnnnnnnnnnnnnnnnnnnnnnnnnnnnnnnnnnnnnnnnnnnnnnnnnnnnnnnnnnnnnnnnnnnnnnnnnnnnnnnnnnnnnnnnnnnnnnnnnnnnnnnnnnnnnnnnnnnnnnnnnnnnnnnnnnnnnnnnnnnnnnnnnnnnnnnnnnnnnnnnnnnnnnnnnnnnnnnnnnnnnnnnnnnnnnnnnnnnnnnnnnnnnnnnnnnnnnnnnnnnnnnnnnnnnnnnnnnnnnnnnnnnnnnnnnnnnnnnnnnnnnnnnnnnnnnnnnnnnnnnnnnnnnnnnnnnnnnnnnnnnnnnnnnnnnnnnnnnnnnnnnnnnnnnnnnnnnnnnnnnnnnnnnnnnnnnnnnnnnnnnnnnnnnnnnnnnnnnnnnnnnnnnnnnnnnnnnnnnnnnnnnnnnnnnnnnnnnnnnnnnnnnnnnnnnnnnnnnnnnnnnnnnnnnnnnnnnnnnnnnnnnnnnnnnnnnnnnnnnnnnnnnnnnnnnnnnnnnnnnnnnnnnnnnnnnnnnnnnnnnnnnnnnnnnnnnnnnnnnnnnnnnnnnnnnnnnnnnnnnnnnnnnnnnnnnnnnnnnnnnnnnnnnnnnnnnnnnnnnnnnnnnnnnnnnnnnnnnnnnnnnnnnnnnnnnnnnnnnnnnnnnnnnnnnnnnnnnnnnnnnnnnnnnnnnnnnnnnnnnnnnnnnnnnnnnnnnnnnnnnnnnnnnnnnnnnnnnnnnnnnnnnnnnnnnnnnnnnnnnnnnnnnnnnnnnnnnnnnnnnnnnnnnnnnnnnnnnnnnnnnnnnnnnnnnnnnnnnnnnnnnnnnnnnnnnnnnnnnnnnnnnnnnnnnnnnnnnnnnnnnnnnnnnnnnnnnnnnnnnnnnnnnnnnnnnnnnnnnnnnnnnnnnnnnnnnnnnnnnnnnnnnnnnnnnnnnnnnnnnnnnnnnnnnnnnnnnnnnnnnnnnnnnnnnnnnnnnnnnnnnnnnnnnnnnnnnnnnnnnnnnnnnnnnnnnnnnnnnnnnnnnnnnnnnnnnnnnnnnnnnnnnnnnnnnnnnnnnnnnnnnnnnnnnnnnnnnnnnnnnnnnnnnnnnnnnnnnnnnnnnnnnnnnnnnnnnnnnnnnnnnnnnnnnnnnnnnnnnnnnnnnnnnnnnnnnnnnnnnnnnnnnnnnnnnnnnnnnnnnnnnnnnnnnnnnnnnnnnnnnnnnnnnnnnnnnnnnnnnnnnnnnnnnnnnnnnnnnnnnnnnnnnnnnnnnnnnnnnnnnnnnnnnnnnnnnnnnnnnnnnnnnnnnnnnnnnnnnnnnnnnnnnnnnnnnnnnnnnnnnnnnnnnnnnnnnnnnnnnnnnnnnnnnnnnnnnnnnnnnnnnnnnnnnnnnnnnnnnnnnnnnnnnnnnnnnnnnnnnnnnnnnnnnnnnnnnnnnnnnnnnnnnnnnnnnnnnnnnnnnnnnnnnnnnnnnnnnnnnnnnnnnnnnnnnnnnnnnnnnnnnnnnnnnnnnnnnnnnnnnnnnnnnnnnnnnnnnnnnnnnnnnnnnnnnnnnnnnnnnnnnnnnnnnnnnnnnnnntcccaaagtgctgggattacagtcgtgagccactgtgccctgcctaaaacttacgaattatttctgaaattttctatttaacattttcagaccacagttgaccacaggtaaccaaaacctcaatcacagaaagtaagccgtggataaggcgggactagtgtataggcagcagcctagaagattgatgggaaaggtgtgatgctagaaggtggtcagcacaatacagacatgagctgatgagcatctaaactgggacagtagtagtaggagaggaaaggagaaaacatttggaaaacagtaacattgacatttcttgtgaaggaggagaaagtaactgtgacttctagatttctgggttgggtcatttgttggatagtagtaccattgagatagggaattcaaggtttggggcaagggtaattggagatgagaattgtgtttggaggtaactactaacattcaagtggagagggttagttggcagttctatggtcatctcttgccgagactgtatatcagactcctgggagaagaccaacatctacggggttgtagggaaggctaaggacaagagtggggagtggtatcatgaaaatccaaaggccatctcaagt

SEQ ID NO: 21992 - DNA, 443 bp, Macaca Mulatta
ggtgattgaattagaagactggagtgataaaaaagtctatgcagaatacagcagctttcgtctggaacccgaaagtgaattctatagactgcgcctgggaacttaccagggaaatgcaggggattctatgatgtggcataatggtaaacaattcaccacactggacagagataaagatatgtatgcaggaaactgcgcccactttcataaaggaggctggtggtacaatgcctgtgcacattctaacctaaatggagtatggtacagaggaggccattacagaagcagcaccaatggaattttctgggccgatacagagcggcatactccttaaacgtaatatgatcacctattgactgaaagactccataatgacaacttgcttctcaagagtcgtcgcattcagtaatctcagcagtctgtcatgccatatgaatcatcaa

SEQ ID NO: 21993 - DNA, 349 bp, Macaca Mulatta
atcatcttcgctacagttatgttctacgcagagaaggggtcttcggccagcaagtttaccagcatccctgcagcattctggtataccatcgtcaccatgacaacactagggtatggtgacatggtgccaaaaaccatagcagggaagatttttggttctatctgttcgctgagtggggtcttggtcattgctctaccagttccggtgattgtatcgaacttcagtcgtatctaccaccagaatcaacgagcagacaaacgaagggcacagaagaaagctagactggccaggatccgggcagccaaaagtggaagcgcaaatgcttacatgcagagcaaacggaatggtt

SEQ ID NO: 21994 - DNA, 501 bp, Macaca Mulatta
ttcttttgttggtcaggaagttgatgatggcatttcttcctttccagactgttgatcccacacaagagtgtttcatcccacgggccaaactaagcccccagcaagatgcaggagtataaatctacaggaaacacgagtagagaaaacccagccgaccatcctgggtagtatagccctgataggccaccagggcccacagagtcacgctgccaatgaagagtcagaacatcccctcttctgtttcctaacccctccatccacgtggaccctccaccagaagaccacccttttgagcataattacaatcttgctggccaccctaccttgactgtgtctctttcttcattggtgcaactgcaaaattccctttcttagcaacactagaaagaattggtgcctcttattcacagaactaaaagaccctgtctggagaaattaagggtattctaatgtgacaaggaggttagtagcagctttactactgggttacgtgtctggtca

SEQ ID NO: 21995 - DNA, 493 bp, Macaca Mulatta
gccttcgatgatgcttacctgagctggaccactaaacgaggattcctataaggactccacgctcatcatgcagttgctgcgagacaacctcaccctctggacgagcgaccagcaggatgaagaagcaggagaaggcaactgaagatccttcaggtcccctggcccttccttcacccaccacccccatcatcaccgattcttccttgccacaatcactaaatatctagtgctaaacctatctgtattggcagcacagctactcagatctgcactcctgtctcttgggaagcagtttcagataaatcatgggcattgctggactgacggttgctttgagcccacaggagctccctttttgaattgtgtggagaagtgtgttctgatgaggcattttactatgcctgttgatgtatgggaaatctaggcgaaagtaatgggggagattagaaagaattagccaacacaggctacagttgatgtttaaagatccatt

SEQ ID NO: 21996 - DNA, 105 bp, Macaca Mulatta
tacagagcaactgattttgttgttcctgggcctggaaaagtagagataacctacacaccaagtgatggaacccaaaaggtgacatacctggtacataactttgaa

SEQ ID NO: 21997 - DNA, 302 bp, Macaca Mulatta
ccaagtttaaaagcctgcaaaccagctatcgtaaagttcataatggccaggcaccagagacctgtcccttctttgaagagatggatgctttggtgagtgtccgggttgctgtcccatccaatgatggccaggaagaaacagcttcttgccccatccaggggaccagtgaggccaaagctcagaagcaagccgaggaggcagacgagaccacagaggacgattctgatgatgaagaagataccgagatactcccaggggctgtcataacccgtgctccagtgttattccagagcccctgtggt

SEQ ID NO: 21998 - DNA, 3675 bp, Macaca Mulatta
  misc_feature (1)...(3675): n = A,T,C or G
ctatgccattttttgtttattcaaaatgggagctaatgtgtttgatactgatgtggtgaatgtagataaaacaatcacagatatatgttttgaaaatgtaaccatattnnnnnnnnnnnnnnnnnnnnnnnnnnnnnnnnnnnnnnnnnnnnnnnnnnnnnnnnnnnnnnnnnnnnnnnnnnnnnnnnnnnnnnnnnnnnnnnnnnnnnnnnnnnnnnnnnnnnnnnnnnnnnnnnnnnnnnnnnnnnnnnnnnnnnnnnnnnnnnnnnnnnnnnnnnnnnnnnnnnnnnnnnnnnnnnnnnnnnnnnnnnnnnnnnnnnnnnnnnnnnnnnnnnnnnnnnnnnnnnnnnnnnnnnnnnnnnnnnnnnnnnnnnnnnnnnnnnnnnnnnnnnnnnnnnnnnnnnnnnnnnnnnnnnnnnnnnnnnnnnnnnnnnnnnnnnnnnnnnnnnnnnnnnnnnnnnnnnnnnnnnnnnnnnnnnnnnnnnnnnnnnnnnnnnnnnnnnnnnnnnnnnnnnnnnnnnnnnnnnnnnnnnnnnnnnnnnnnnnnnnnnnnnnnnnnnnnnnnnnnnnnnnnnnnnnnnnnnnnnnnnnnnnnnnnnnnnnnnnnnnnnnnnnnnnnnnnnnnnnnnnnnnnnnnnnnnnnnnnnnnnnnnnnnnnnnnnnnnnnnnnnnnnnnnnnnnnnnnnnnnnnnnnnnnnnnnnnnnnnnnnnnnnnnnnnnnnnnnnnnnnnnnnnnnnnnnnnnnnnnnnnnnnnnnnnnnnnnnnnnnnnnnnnnnnnnnnnnnnnnnnnnnnnnnnnnnnnnnnnnnnnnnnnnnnnnnnnnnnnnnnnnnnnnnnnnnnnnnnnnnnnnnnnnnnnnnnnnnnnnnnnnnnnnnnnnnnnnnnnnnnnnnnnnnnnnnnnnnnnnnnnnnnnnnnnnnnnnnnnnnnnnnnnnnnnnnnnnnnnnnnnnnnnnnnnnnnnnnnnnnnnnnnnnnnnnnnnnnnnnnnnnnnnnnnnnnnnnnnnnnnnnnnnnnnnnnnnnnnnnnnnnnnnnnnnnnnnnnnnnnnnnnnnnnnnnnnnnnnnnnnnnnnnnnnnnnnnnnnnnnnnnnnnnnnnnnnnnnnnnnnnnnnnnnnnnnnnnnnnnnnnnnnnnnnnnnnnnnnnnnnnnnnnnnnnnnnnnnnnnnnnnnnnnnnnnnnnnnnnnnnnnnnnnnnnnnnnnnnnnnnnnnnnnnnnnnnnnnnnnnnnnnnnnnnnnnnnnnnnnnnnnnnnnnnnnnnnnnnnnnnnnnnnnnnnnnnnnnnnnnnnnnnnnnnnnnnnnnnnnnnnnnnnnnnnnnnnnnnnnnnnnnnnnnnnnnnnnnnnnnnnnnnnnnnnnnnnnnnnnnnnnnnnnnnnnnnnnnnnnnnnnnnnnnnnnnnnnnnnnnnnnnnnnnnnnnnnnnnnnnnnnnnnnnnnnnnnnnnnnnnnnnnnnnnnnnnnnnnnnnnnnnnnnnnnnnnnnnnnnnnnnnnnnnnnnnnnnnnnnnnnnnnnnnnnnnnnnnnnnnnnnnnnnnnnnnnnnnnnnnnnnnnnnnnnnnnnnnnnnnnnnnnnnnnnnnnnnnnnnnnnnnnnnnnnnnnnnnnnnnnnnnnnnnnnnnnnnnnnnnnnnnnnnnnnnnnnnnnnnnnnnnnnnnnnnnnnnnnnnnnnnnnnnnnnnnnnnnnnnnnnnnnnnnnnnnnnnnnnnnnnnntcctaaattagtaccaggcagtgaataagccctaggcggaacaaagcattaaaatttcttttggggagagactgtctagtaatttaaaatgtgttaaatatgagccatattctcattgtgagaattttaatactaatggaatgtttcaaaggttttattcaaaccacaaattatagaatccacccaagaaaattttcttagcattctggaattctcatctaatggttcactggctctcatctattgtttaactcactagtttataggcctgaccttttaaattcctgggataaattttggaatattaaattcttcatcttaaagggaatttgtaatgtgctattcaaacttgtttccttgatgagccctgaaatactgttgacattaactttcataaatgaagcataacacttattagagaaatggtagatgaaaaactctttacattcaattttctgtgtgtggtgctgatttccattgtgactttggaatttagggaagtgagtagctgatcaacaccttaaaattcatttaatacgtatttaaaaagaagatgggagattcaaaaatatcagaaaagttgaccatggnnnnnnnnnnnnnnnnnnnnnnnnnnnnnnnnnnnnnnnnnnnnnnnnnntagtaagagttgatgtctgctagcggtatttttcattaaaagtcatattcttacaacaatgacattggaatcatttccatatgaggtaatttccatnnnnnnnnnnnnnnnnnnnnnnnnnnnnnnnnnnnnnnnnnnnnnnnnnnnnnnnnnnnnnnnnnnnnnnnnnnnnnnnnnnnnnnnnnnnnnnnnnnnnnnnnnnnnnnnnnnnnnnnnnnnnnnnnnnnnnnnnnnnnnnnnnnnnnnnnnnnnnnnnnnnnnnnnnnnnnnnnnnnnnnnnnnnnnnnnnnnnnnnnnnnnnnnnnnnnnnnnnnnnnnnnnnnnnnnnnnnnnnnnnnnnnnnnnnnnnnnnnnnnnnnnnnnnnnnnnnnnnnnnnnnnnnnnnnnnnnnnnnnnnnnnnnnnnnnnnnnnnnnnnnnnnnnnnnnnnnnnnnnnnnnnnnnnnnnnnnnnnnnnnnnnnnnnnnnnnnnnnnnnnnnnnnnnnnnnnnnnnnnnnnnnnnnnnnnnnnnnnnnnnnnnnnnnnnnnnnnnnnnnnnnnnnnnnnnnnnnnnnnnnnnnnnnnnnnnnnnnnnnnnnnnnnnnnnnnnnnnnnnnnnnnnnnnnnnnnnnnnnnnnnnnnnnnnnnnnnnnnnnnnnnnnnnnnnnnnnnnnnnnnnnnnnnnnnnnnnnnnnnnnnnnnnnnnnnnnnnnnnnnnnnnnnnnnnnnnnnnnnnnnnnnnnnnnnnnnnnnnnnnnnnnnnnnnnnnnnnnnnnnnnnnnnnnnnnnnnnnnnnnnnnnnnnnnnnnnnnnnnnnnnnnnnnnnnnnnnnnnnnnnnnnnnnattttttaaaacctcattgctgtttttgacagcatttgtgattgtcattgccactaaattattgagctagaagatgctgcaggcaaaattgtttctgaagctggcatctaagcattcnnnnnnnnnnctagttgatgcctgcctttattacaaatcagtattaaaacttccagattatattcttgtcattgttcctcatgcaaataatagcaggaaggatttaagttgtataagaaaaagaaaatattcatatagaaattacctggcagttacgccctcagagcagaactttgaaacaggtctaaagccctttttacctagaaccatttaaaagcctgagcaaggaccaccacctcctccccaccaaattattcagtctctttctggggaggcctagcttactatatgttacaagtctgaaatgggcctggtgtggtcagctcctgaaatgctaatttacctcttcccaaaagagtgtagttataatacgaagttggtt

SEQ ID NO: 21999 - DNA, 7430 bp, Macaca Mulatta
  misc_feature (1)...(7430): n = A,T,C or G
aacctaattgtattcttagatattcccagacacccaatgccnnnnnnnnnnnnnnnnnnnnnnnnnnnnnnnnnnnnnnnnnnnnnnnnnnnnnnnnnnnnnnnnnnnnnnnnnnnnnnnnnnnnnnnnnnnnnnnnnnnnnnnnnnnnnnnnnnnnnnnnnnnagtaaatgctgctactcttcttttgggggtagagaatcaacataaaataagtgttcctagagcaccgacaaaagaggaaatgtctctcagagcttatactgctcggtgtaggttaaacagactacgtcgtgcagcatgtcgtttgtttacttctgaaaaaatggttaaagctattaaaaagcttgaaattgaaattgaagctaggcggttaattgttcgaaaagatagacacctatggaaagatgtggnnnnnnnnnnnnnnnnnnnnnnnnnnnnnnnnnnnnnnnnnnnnnnnnnnnnnnnnnnnnnnnnnnnnnnnnnnnnnnnnnnnnnnnnnnnnnnnnnnnnnnnnnnnnnnnnnnnnnnnnnnnnnnnnnnnnnnnnnnnnnnnnnnnnnnnnnnnnnnnnnnnnnnnnnnnnnnnnnnnnnnnnnnnnnnnnnnnnnnnnnnnnnnnnggtcatgaaggagcttagaacaagtttacattgaaaaagttattgttgttgatctgttttcttgattatgataaaatttccaaactcattgatcatgatccttgtctcttctgtaaagatgccgaattcaagnnnnnnnnnnnnnnnnnnnnnnnnnnnnnnnnnnnnnnnnnnnnnnnnnnnnnnnnnnnnnnnnnnnnnnnnnnnnnnnnnnnnnnnnnnnnnnnnnnnnnnnnnnnnnnnnnnnnnnnnnnnnnnnnnnnnnnnnnnnnnnnnnnnnnnnnnnnnnnnnnnnnnnnnnnnnnnnnnnnnnnnnnnnnnnnnnnnnnnnnnnnnnnnnnnnnnnnnnnnnnnnnnnnnnnnnnnnnnnnnnnnnnnnnnnnnnnnnnnnnnnnnnnnnnnnnnnnnnnnnnnnnnnnnnnnnnnnnnnnnnnnnnnnnnnnnnnnnnnnnnnnnnnnnnnnnnnnnnnnnnnnnnnnnnnnnnnnnnnnnnnnnnnnnnnnnnnnnnnnnnnnnnnnnnnnnnnnnnnnnnnnnnaggtggatatttcccttaacttagatcaattaaaggaagaaattgcctttctaaaacacacaaagagtataaagaaaacaatatctctactatcatgccattctgatgctcttattaataagaaaaaaggcaaaagagatagtggttcttttgaacaatatagtgaaaacataaagttattgatggattgggtaaatgcagtttgtgccttctataataaaaaggnnnnnnnnnnnnnnnnnnnnnnnnnnnnnnnnnnnnnnnnnnnnnnnnnnnnnnnnnnnnnnnnnnnnnnnnnnnnnnnnnnnnnnnnnnnnnnnnnnnnnnnnnnnnnnnnnnnnnnnnnnnnnnnnnnnnnnnnnnnnnnnnnnnnnnnnnnnnnnnnnnnnnnnnnnnnnnnnnnnnnnnnnnnnnnnnnnnnnnnnnnnnnnnnnnnnnnnnnnnnnnnnnnnnnnnnnnnnnnnnnnnnnnnnnnnnnnnnnnnnnnnnnnnnnnnnnnnnnnnnnnnnnnnnnnnnnnnnnnnnnnnnnnnnnnnnnnnnnnnnnnnnnnnnnnnnnnnnnnnnnnnnnnnnnnnnnnnnnnnnnnnnnnnnnnnnnnnnnnnnnnnnnnnnnnnnnnnnnnnnnnnnnnnnnnnnnnnnnnnnnnnnnnnnnnnnnnnnnnnnnnnnnnnnnnnnnnnnnnnnnnnnnnnnnnnnnnnnggagagagataaagctgcaagaattattcaatcagctgtaatcaattttctagcaaaacaaagattgagaaaaagagttaatgcggcgctcatcattcagaaatactggcgaagagtcttagcacagagaanattattaatattanaaaagganaagctggaaaaagttcaaaataaagcagcatcacttattcaggnnnnnnnnnnnnnnnnnnnnnnnnnnnnnnnnnnnnnnnnnnnnnnnnnnnnnnnnnnnnnnnnnnnnnnnnnnnnnnnnnnnnnnnnnnnnnnnnnnnnnnnnnnnnnnnnnnnnnnnnnnnnnnnnnnnnnnnnnnnnnnnnnnnnnnnnnnnnnnnnnnnnnnnnnnnnnnnnnnnnnnnnnnnnnnnnnnnnnnnnnnnnnnnnnnnnnnnnnnnnnnnnnnnnnnnnnnnnnnnnnnnnnnnnnnnnnnnnnnnnnnnnnnnnnnnnnnnnnnnnnnnnnnnnnnnnnnnnnnnnnnnnnnnnnnnnnnnnnnnnnnnnnnnnnnnnnnnnnnnnnnnnnnnnnnnnnnnnnnnnnnnnnnnnnnnnnnnnnnnnnnnnnnnnnnnnnnnnnnnnnnnnnnnnnnnnnnnnnnnnnnnnnnnnnnnnnnnnnnnnnnnnnnnnnnnnnnnnnnnnnnnnnnnnnnnnnnnnnnnnnnnnnnnnnnnnnnnnnnnnnnnnnnnnnnnnnnnnnnnnnnnnnnnnnnnnnnnnnnnnnnnnnnnnnnnnnnnnnnnnnnnnnnnnnnnnnnnnnnnnnnnnnnnnnnnnnnnnnnnnnnnnnnnnnnnnnnnnnnnnnnnnnnnnnnnnnnnnnnnnnnnnnnnnnnnnnnnnnnnnnnnnnnnnnnnnnnnnnnnnnnnnnnnnnnnnnnnnnnnnnnnnnnnnnnnnnnnnnnnnnnnnnnnnnnnnnnnnnnnnnnnnnnnnnnnnnnnnnnnnnnnnnnnnnnnnnnnnnnnnnnnnnnnnnnnnnnnnnnnnnnnnnnnnnnnnnnnnnnnnnnnnnnnnnnnnnnnnnnnnnnnnnnnnnnnnnnnnnnnnnnnnnnnnnnnnnnnnnnnnnnnnnnnnnnnnnnnnnnnnnnnnnnnnnnnnnnnnnnnnnnnnnnnnnnnnnnnnnnnnnnnnnnnnnnnnnnnnnnnnnnnnnnnnnnnnnnnnnnnnnnnnnnnnnnnnnnnnnnnnnnnnnnnnnnnnnnnnnnnnnnnnnnnnnnnnnnnnnnnnnnnnnnnnnnnnnnnnnnnnnnnnnnnnnnnnnnnnnnnnnnnnnnnnnnnnnnnnnnnnnnnnnnnnnnnnnnnnnnnnnnnnnnnnnnnnnnnnnnnnnnnnnnnnnnnnnnnnnnnnnnnnnnnnnnnnnnnnnnnnnnnnnnnnnnnnnnnnnnnnnnnnnnnnnnnnnnnnnnnnnnnnnnnnnnnnnnnnnnnnnnnnnnnnnnnnnnnnnnnnnnnnnnnnnnnnnnnnnnnnnnnnnnnnnnnnnnnnnnnnnnnnnnnnnnnnnnnnnnnnnnnnnnnnnnnnnnnnnnnnnnnnnnnnnnnnnnnnnnnnnnnnnnnnnnnnnnnnnnnnnnnnnnnnnnnnnnnnnnnnnnnnnnnnnnnnnnnnnnnnnnnnnnnnnnnnnnnnnnnnnnnnnnnnnnnnnnnnnnnnnnnnnnnnnnnnnnnnnnnnnnnnnnnnnnnnnnnnnnnnnnnnnnnnnnnnnnnnnnnnnnnnnnnnnnnnnnnnnnnnnnnnnnnnnnnnnnnnnnnnnnnnnnnnnnnnnnnnnnnnnnnnnnnnnnnnnnnnnnnnnnnnnnnnnnnnnnnnnnnnnnnnnnnnnnnnnnnnnnnnnnnnnnnnnnnnnnnnnnnnnnnnnnnnnnnnnnnnnnnnnnnnnnnnnnnnnnnnnnnnnnnnnnnnnnnnnnnnnnnnnnnnnnnnnnnnnnnnnnnnnnnnnnnnnnnnnnnnnnnnnnnnnnnnnnnnnnnnnnnnnnnnnnnnnnnnnnnnnnnnnnnnnnnnnnnnnnnnnnnnnnnnnnnnnnnnnnnnnnnnnnnnnnnnnnnnnnnnnnnnnnnnnnnnnnnnnnnnnnnnnnnnnnnnnnnnnnnnnnnnnnnnnnnnnnnnnnnnnnnnnnnnnnnnnnnnnnnnnnnnnnnnnnnnnnnnnnnnnnnnnnnnnnnnnnnnnnnnnnnnnnnnnnnnnnnnnnnnnnnnnnnnnnnnnnnnnnnnnnnnnnnnnnnnnnnnnnnnnnnnnnnnnnnnnnnnnnnnnnnnnnnnnnnnnnnnnnnnnnnnnnnnnnnnnnnnnnnnnnnnnnnnnnnnnnnnnnnnnnnnnnnnnnnnnnnnnnnnnnnnnnnnnnnnnnnnnnnnnnnnnnnnnnnnnnnnnnnnnnnnnnnnnnnnnnnnnnnnnnnnnnnnnnnnnnnnnnnnnnnnnnnnnnnnnnnnnnnnnnnnnnnnnnnnnnnnnnnnnnnnnnnnnnnnnnnnnnnnnnnnnnnnnnnnnnnnnnnnnnnnnnnnnnnnnnnnnnnnnnnnnnnnnnnnnnnnnnnnnnnnnnnnnnnnnnnnnnnnnnnnnnnnnnnnnnnnnnnnnnnnnnnnnnnnnnnnnnnnnnnnnnnnnnnnnnnnnnnnnnnnnnnnnnnnnnnnnnnnnnnnnnnnnnnnnnnnnnnnnnnnnnnnnnnnnnnnnnnnnnnnnnnnnnnnnnnnnnnnnnnnnnnnnnnnnnnnnnnnnnnnnnnnnnnnnnnnnnnnnnnnnnnnnnnnnnnnnnnnnnnnnnnnnnnnnnnnnnnnnnnnnnnnnnnnnnnnnnnnnnnnnnnnnnnnnnnnnnnnnnnnnnnnnnnnnnnnnnnnnnnnnnnnnnnnnnnnnnnnnnnnnnnnnnnnnnnnnnnnnnnnnnnnnnnnnnnnnnnnnnnnnnnnnnnnnnnnnnnnnnnnnnnnnnnnnnnnnnnnnnnnnnnnnnnnnnnnnnnnnnnnnnnnnnnnnnnnnnnnnnnnnnnnnnnnnnnnnnnnnnnnnnnnnnnnnnnnnnnnnnnnnnnnnnnnnnnnnnnnnnnnnnnnnnnnnnnnnnnnnnnnnnnnnnnnnnnnnnnnnnnnnnnnnnnnnnnnnnnnnnnnnnnnnnnnnnnnnnnnnnnnnnnnnnnnnnnnnnnnnnnnnnnnnnnnnnnnnnnnnnnnnnnnnnnnnnnnnnnnnnnnnnnnnnnnnnnnnnnnnnnnnnnnnnnnnnnnnnnnnnnnnnnnnnnnnnnnnnnnnnnnnnnnnnnnnnnnnnnnnnnnnnnnnnnnnnnnnnnnnnnnnnnnnnnnnnnnnnnnnnnnnnnnnnnnnnnnnnnnnnnnnnnnnnnnnnnnnnnnnnnnnnnnnnnnnnnnnnnnnnnnnnnnnnnnnnnnnnnnnnnnnnnnnnnnnnnnnnnnnnnnnnnnnnnnnnnnnnnnnnnnnnnnnnnnnnnnnnnnnnnnnnnnnnnnnnnnnnnnnnnnnnnnnnnnnnnnnnnnnnnnnnnnnnnnnnnnnnnnnnnnnnnnnnnnnnnnnnnnnnnnnnnnnnnnnnnnnnnnnnnnnnnnnnnnnnnnnnnnnnnnnnnnnnnnnnnnnnnnnnnnnnnnnnnnnnnnnnnnnnnnnnnnnnnnnnnnnnnnnnnnnnnnnnnnnnnnnnnnnnnnnnnnnnnnnnnnnnnnnnnnnnnnnnnnnnnnnnnnnnnnnnnnnnnnnnnnnnnnnnnnnnnnnnnnnnnnnnnnnnnnnnnnnnnnnnnnnnnnnnnnnnnnnnnnnnnnnnnnnnnnnnnnnnnnnnnnnnnnnnnnnnnnnnnnnnnnnnnnnnnnnnnnnnnnnnnnnnnnnnnnnnnnnnnnnnnnnnnnnnnnnnnnnnnnnnnnnnnnnnnnnnnnnnnnnnnnnnnnnnnnnnnnnnnnnnnnnnnnnnnnnnnnnnnnnnnnnnnnnnnnnnnnnnnnnnnnnnnnnnnnnnnnnnnnnnnnnnnnnnnnnnnnnnnnnnnnnnnnnnnnnnnnnnnnnnnnnnnnnnnnnnnnnnnnnnnnnnnnnnnnnnnnnnnnnnnnnnnnnnnnnnnnnnnnnnnnnnnnnnnnnnnnnnnnnnnnnnnnnnnnnnnnnnnnnnnnnnnnnnnnnnnnnncagaaaactaactgctgtgcgtacccaagcagttatttgtatacagtcttactacagaggctttaaagtacgaagggatatccaaaatatgcaccgggctgccacactaattcagtcattctatcgaatgcacagggccaaagttgattatcaaacaaagaaaactgcaattgtggttatacagaattattataggttatatgttagagtaaaaacagaaagaaaaagctttttaccagttcagaaatctgtacgaactattcaggctgcttttagaggcatgaaagttagacaaaaattgaaaatcgtatcagaggaaaagatggcagccattgttaaccaatctgcactctgctgttacagaagtaaaactcaatatgaagctgttcaaagtgaaggtgttatgattcaagagtggtacaaagcttctgaccttgcttgttcacaggaagcagagtatcattctcaaagtagggctgcagtaacaattcaaaatgcttttcgtagaatggtcacaagaaaactggaaacacagaaatgtgctgccctacgaattcagttcttccttcagatggctgtgtatcggagaagatttgttcaacagaaaagagctgctatcactttacagcattattttaggacgtggcaaaccagaaaacagtttttactatatagaanagcagcagtggttttacaaaatcactacagagcatttctgtctgcaaaacatcaaagannnnnnnnnnnnnnnnnnnnnnnnnnnnnnnnnnnnnnnnnnnnnnnnnnnnnnnnnnnnnnnnnnnnnnnnnnnnnnnnnnnnnnnnnnnnnnnnnnnnnnnnnnnnnnnnnnnnnnnnnnnnnnnnnnnnnnnnnnnnnnnnnnnnnnnnnnnnnnnnnnnnnnnnnnnnnnnnnnnnnnnnnnnnnnnnnnnnnnnnnnnnnnnnnnnnnnnnnnnnnnnnnnnnnnnnnnnnnnnnnnnnnnnnnnnnnnnnnnnnnnnnnnnnnnnnnnnnnnnnnnnnnnnnnnnnnnnnnnnnnnnnnnnnnnnnnnnnnnnnnnnnnnnnnnnnnnnnnnnnnnnnnnnnnnnnnnnnnnnnnnnnnnnnnnnnnnnagacatcgagctgcttgtttgatccaagcacattatagaggatataaagaaaggcaggtctttcttcggcagaaatctgctgctttgatcatacaaaaatatatacgagccagggaggctggaaagcgtgaaaggataaaatacattgaatttaaaaagtctacagttatcctacaagcactggtgcgtggttggctagtacgaaaaagnnnnnnnnnnnnnnnnnnnnnnnnnnacttcttcacttcactgcagctgcatattatcacctgaatgctctcagaattcaaagagcctataaactttacctggctgtgaagaatgctaacaagcaggttaattcagtcatctgtattca

SEQ ID NO: 22000 - DNA, 626 bp, Macaca Mulatta
  misc_feature (1)...(626): n = A,T,C or G
cgaggctgaccgcgactccatgagctgtggcctggattcggagggtgctacacccccgccagtggggctgcgggcatccttccctgtccagatcctgcccaacctctatctgggcagtgcccgggattccgccaacttggagagcctggccaaactgggcatccgctacatcctcaatgtcacccccaacctcccaaacttcttcgagaagaatggcgactttcactacaagcagatccccatctccgaccactggagccagaacctgtcgcagttcttcccggaggctattgagttcangatgaggccttgtcccagaactgcggggtgctcgtccactgcctggcgggggtcagccgttctgtcaccgtcactgtggcctacctcatgcagaagctccacctctctctcaacgatgcctatgacctggtcaagagaaagaagtctaacatctcccccaacttcaacttcatggggcagttgctggactttgagcgcagcctgcggctggaggagcgccgctcacaggagcagggcagtggggggcaggcatccatggcctctgacccgccctccttcttcaccacccccaccagtgatggcgccttcgagctggcccctaccta

SEQ ID NO: 22001 - DNA, 782 bp, Macaca Mulatta
  misc_feature (1)...(782): n = A,T,C or G
ggggcagttcggcggtcccgcgggtctgtctcttgcttcaacagtgtttggacggaacagatccggggactctttcttccagcctccgagcgccctccgatttcctctccacttgcaacctccgggaccatcttctcggccatctcctgcttctgggacctgccagcaccgtttttgtggttagctccgtcttgccgaccaaccatgagctcccagattcgtcagaattattccaccgacgtggaggcagccgtcaacagcctggtcaatatgtacctgcaggcctcctacacctacctctctctgggcttctatttcgaccgcgatgatgtggctctggaaagcgtgagccacttcttccgcgaattggcccaaggagaagcgccgaagggctaacaagcgtcctcctggaaaaagcaaaaaccagggtggggcggcccggccttcttttttttcggaacgttnnnnnnnnnnnnnnnnnnnnnnnnnnnnnnnnnnnnnnnnnnnnnnnnnngaaaagccccgataaaaacccccccctttggggggccccnnnnnnnnnnnnnnnnnnnnnnnnnttttgcggcgcgcccccttttgtggagatgaatnnnnnnnnnnnnnnnnnnnnnnnnnnnnnnnnnnnnccccaagagagaaaaaaacacacccacctcctttagttgtatttggggaaggggaggaggaggaacatataccaatttcttnnnnnnnnnnnnnnnnannnnnnnnnnnnnttaagataagggtgcacaattcca

SEQ ID NO: 22002 - DNA, 707 bp, Macaca Mulatta
tttgacacaaagataagccttgcccttgtttccttttgggagggatatatccactgagatgagaggccaaactccgtttttcacgagatttttttacctttgggaataaggaagacacacgattagaattcaaaatcaaaattatctgagttaattttacgacagtcatatgtaccagcaggtatagtatacaacactgctttatgaggaagtcaagtcttcagcagtcgtgcagactcacacaataaagcagctgaaaagaattccagactccttctggctttaaacaatttctgtttgaaaaataagctgcctaagtagtttcaacttactttgagcttcattttcttcttgtcaggatcatgtacaacagcatgcctagtgagactttgctaaaatgaaagaaagttattaatgaaatattaatatgaaaactgtgttgtgaacgcatagactacaggaccgcgactgtgagggtgagtgcttactttcattgcaaatgttttgccacagccggccccccccacacaaaagggcgcctttcctcgtggaaggagaggaaatggctttggagattaaatccagttgtgtaggttcttccacagccttctcttggacagggacatacctccatgtgtggggcatgagttttcatgtgttgcttaagggtaatatgggcgtttaaatgttttgtggcatacttcaca

SEQ ID NO: 22003 - DNA, 692 bp, Macaca Mulatta
  misc_feature (1)...(692): n = A,T,C or G
actacttttcccnttccctctcagatgtcttggaagaaggctttgcgcgatccctggcggccttcgggcagcaactgtgaccttgatgctggcgatgctgagcaccccagtggctgagggcagagacgctcccgaggatttcgtgtaccagtttaagggcctgtgctacttcaccaacgggacggagcgcgtgcgtcgtgtgaccagatacatctataaccgagaggagtacgtgcgcttcgacagcgactggggggagtaccgggcggtgacgccgcaggggcggcctgacgccgagtactggaacaaccagaaggacatcctggagagcacccgggcggagttggacacggtgtgcatacacaactacgaggtggagttccgcgggatcttgcagaggagagtggagcccacagtgaccatctccccgtccaggacagaggccctcaaccaccacaacctgctggtctgctcggtgacagatttctatccaggccagatcaaagtccggtggtttcggaacaatcaggaggagacagtcggcgttgtgtccacccccctcattaggaacggtgactggaccttccagatccctggtgatgctggaaatgactccccagtggagatctacacctgccagtggatcactctagcctccagatcaccgtggagtggcgggctcagtctgagtc

SEQ ID NO: 22004 - DNA, 111 bp, Macaca Mulatta
agatttgcagaccctgcgtgtggtctttgctgtgctgggaaagggatgttttgggataagcctgacctgcctctccatctacaaggctgaactcttcccaacgccattgcg

SEQ ID NO: 22005 - DNA, 356 bp, Macaca Mulatta
tacctttttgagaaatgattgttagaaattgacaatctttttgttccagtgatactgaaagtagtggggcaagaattgagtttcacagtggaattgactttggatctggcctatagattagtgacataaaatattttctctattttcccctgttctttttgtgttatgcacttaattttatgactgccgggggggtcagttggagtgctgcttaacaagtatctctcctactctcagtggtcagaggctgtgttggacccatagtagaattttccaggtcacagacccaagcttccatgggttgttactgtgctgtaccacttggtgggtctgattctgaacctgatgtgtgtgtt

SEQ ID NO: 22006 - DNA, 2850 bp, Macaca Mulatta
  misc_feature (1)...(2850): n = A,T,C or G
caggtaaagcaaatgaaattgaaggactcgcgcatcaagctgatgagtgagatcctgaatggcatcaaggtgctgaagctgtacgcctgggaacccagcttcctgaagcaggtggagggcatcaggcagggtgagctccagctgctgcgcacggcggcctacctccacgccatatccaccttcacctggatgtgtacccccttcctggtgnnnnnnnnnnnnnnnnnnnnnnnnnnnnnnnnnnnnnnnnnnnnnnnnnnnnnnnnnnnnnnnnnnnnnnnnnnnnnnnnnnnnnnnnnnnnnnnnnnnnnnnnnnnnnnnnnnnnnnnnnnnnnnnnnnnnnnnnnnnnnnnnnnnnnnnnnnnnnnnnnnnnnnnnnnnnnnnnnnnnnnnnnnnnnnnnnnnnnnnnnnnnnnnnnnnnnnnnnnnnnnnnnnnnnnnnnnnnnnnnnnnnnnnnnnnnnnnnnnnnnnnnnnnnnnnnnnnnnnnnnnnnnnnnnnnnnnnnnnnnnnnnnnnnnnnnnnnnnnnnnnnnnnnnnnnnnnnnnnnnnnnnnnnnnnnnnnnnnnnnnnnnnnnnnnnnnnnnnnnnnnnnnnnnnnnnnnnnnnnnnnnnnnnnnnnnnnnnnnnnnnnnnnnnnnnnnnnnnnnnnnnnnnnnnnnnnnnnnnnnnnnnnnnnnnnnnnnnnnnnnnnnnnnnnnnnnnnnnnnnnnnnnnnnnnnnnnnnnnnnnnnnnnnnnnnnnnnnnnnnnnnnnnnnnnnnnnnnnnnnnnnnnnnnnnnnnnnnnnnnnnnnnnnnnnnnnnnnnnnnnnnnnnnnnnnnnnnnnnnnnnnnnnnnnnnnnnnnnnnnnnnnnnnnnnnnnnnnnnnnnnnnnnnnnnnnnnnnnnnnnnnnnnnnnnnnnnnnnnnnnnnnnnnnnnnnnnnnnnnnnnnnnnnnnnnnnnnnnnnnnnnnnnnnnnnnnnnnnnnnnnnnnnnnnnnnnnnnnnnnnnnnnnnnnnnnnnnnnnnnnnnnnnnnnnnnnnnnnnnnnnnnnnnnnnnnnnnnnnnnnnnnnnnnnnnnnnnnnnnnnnnnnnnnnnnnnnnnnnnnnnnnnnnnnnnnnnnnnnnnnnnnnnnnnnnnnnnnnnnnnnnnnnnnnnnnnnnnnnnnnnnnnnnnnnnnnnnnnnnnnnnnnnnnnnnnnnnnnnnnnnnnnnnnnnnnnnnnnnnnnnnnnnnnnnnnnnnnnnnnnnnnnnnnnnnnnnnnnnnnnnnnnnnnnnnnnnnnnnnnnnnnnnnnnnnnnnnnnnnnnnnnnnnnnnnnnnnnnnnnnnnnnnnnnnnnnnnnnnnnnnnnnnnnnnnnnnnnnnnnnnnnnnnnnnnnnnnnnnnnnnnnnnnnnnnnnnnnnnnnnnnnnnnnnnnnnnnnnnnnnnnnnnnnnnnnnnnnnnnnnnnnnnnnnnnnnnnnnnnnnnnnnnnnnnnnnnnnnnnnnnnnnnnnnnnnnnnnnnnnnnnnnnnnnnnnnnnnnnnnnnnnnnnnnnnnnnnnnnnnnnnnnnnnnnnnnnnnnnnnnnnnnnnnnnnnnnnnnnnnnnnnnnnnnnnnnnnnnnnnnnnnnnnnnnnnnnnnnnnnnnnnnnnnnnnnnnnnnnnnnnnnnnnnnnnnnnnnnnnnnnnnnnnnnnnnnnnnnnnnnnnnnnnnnnnnnnnnnnnnnnnnnnnnnnnnnnnnnnnnnnnnnnnnnnnnnnnnnnnnnnnnnnnnnnnnnnnnnnnnnnnnnnnnnnnnnnnnnnnnnnnnnnnnnnnnnnnnnnnnnnnnnnnnnnnnnnnnnnnnnnnnnnnnnnnnnnnnnnnnnnnnnnnnnnnnnnnnnnnnnnnnnnnnnnnnnnnnnnnnnnnnnnnnnnnnnnnnnnnnnnnnnnnnnnnnnnnnnnnnnnnnnnnnnnnnnnnnnnnnnnnnnnnnnnnnnnnnnnnnnnnnnnnnnnnnnnnnnnnnnnnnnnnnnnnnnnnnnnnnnnnnnnnnnnnnnnnnnnnnnnnnnnnnnnnnnnnnnnnnnnnnnnnnnnnnnnnnnnnnnnnnnnnnnnnnnnnnnnnnnnnnnnnnnnnnnnnnnnnnnnnnnnnnnnnnnnnnnnnnnnnnnnnnnnnnnnnnnnnnnnnnnnnnnnnnnnnnnnnnnnnnnnnnnnnnnnnnnnnnnnnnnnnnnnnnnnnnnnnnnnnnnnnnnnnnnnnnnnnnnnnnnnnnnnnnnnnnnnnnnnnnnnnnnnnnnnnnnnnnnnnnnnnnnnnnnnnnnnnnnnnnnnnnnnnnnnnnnnnnnnnnnnnnnnnnnnnnnnnnnnnnnnnnnnnnnnnnnnnnnnnnnnnnnnnnnnnnnnnnnnnnnnnnnnnnnnnnnnnnnnnnnnnnnnnnnnnnnnnnnnnnnnnnnnnnnnnnnnnnnnnnnnnnnnnnnnnnnnnnnnnnnnnnnnnnnnnnnnnnnnnnnnnnnnnnnnnnnnnnnnnnnnnnnnnnnnnnnnnnnnnnnnnnnnnnnnnnnnnnnnnnnnnnnnnnnnnnnnnnnnnnnnnnnnnnnnnnnnnnnnnnnnnnnnnnnnnnnnnnnnnnnnnnnnnnnnnnnnnnnnnnnnnnnnnnnnnnnnnnnnnnnnnnnnnnnnnnnnnnnnnnnnnnnnnnnnnnnnnnnnnnnnnnnnnnnnnnnnnnnnnnnnnnnnnaggaccccatcctgttctcggggaccctgcgcatgaacctggacccctttggcagatactcagaggaagacatttggcaggccttggagctgtcccacctgcacacgtttgtgagctcccagccggcaggcctggacttccagtgctctgagggcggggagaatctcag

SEQ ID NO: 22007 - DNA, 160 bp, Macaca Mulatta
aatagttatccattgactagaaattagcacatgcccacagctggctcccagggatggccaggtagagttatcgtataggtggaaagtctgtgtcagccaaagccatgccactctgagagagctgattctgaggacacgttagccatctaccacccatgtt

SEQ ID NO: 22008 - DNA, 348 bp, Macaca Mulatta
  misc_feature (1)...(348): n = A,T,C or G
gtgcacttgtatatagtggggctgaggcaaaggagccctgtaggcttcaaagaatcagtgtaagctactaagaggaactgaaaacctaggtgtcacaataaacagtctacacagtttcatgtagacaaaaattctgatcattttccaggctgtttcaggaagtggtagnnnnnnnnnnnnnnnnnnnnnnnnnnnnnnnnnnnnnnnnnnnnnnnnnctgtcaatgtgatgatctgtgttttatggggtagagtggatttgtctacctttggctgtaaaatatcctaaccacattatgatcttgataggtgcacttcactgggtagagtaaaaaggaccacacagtaa

SEQ ID NO: 22009 - DNA, 396 bp, Macaca Mulatta
cacagaggtccagttccggccgtaccgcacagatgacttcatcacgcgcctgtactacgagacacccaggttcacagtgctgaaccagacgtgggtcctgaaggctcgcgtcaatgactcggagcgcaaccccaacctgtcgtgcaagcgtacgctgtcctttcagctcctcctcaagagcaaggtcacagcaccactggagtgctccttcctgctgctcaagggcccctacgatgacgtgaggatcagccctgtcatctaccacttcgtcttcaccaacgagagcaacgagacggactacgtgccactgcccatcattgactccgtggagtgcaacaagctgctggccgccaagaacatcaacctgcggctcttcctgttccagatacagaagta

SEQ ID NO: 22010 - DNA, 289 bp, Macaca Mulatta
gcgagagcgtgcgcgcgtctccgcggccaggggtactggtagggtcggaccccgagtgggagcaccctgttcccggggctggggtcgacggcacagggtgtgtgtgtggaggaacattcaggtgcctggtaccttatcgttttcctgggaccccaggctctgtccggttccccgggggtaagactgtgccttgggacacagctcgttgaatgctcaggcgtccagaagtgacctgcgttttgatacccgtctttggtccagagcaaatggggaagatgccaagcatcct

SEQ ID NO: 22011 - DNA, 358 bp, Macaca Mulatta
  misc_feature (1)...(358): n = A,T,C or G
ggggtgtcagaccgtgggaccccacaatccccacaacccccaccctccctggacatgttcgctgaggaagtggcagaggaggaactggaaaccccaacccctacccagagaggannnnnnnnnnnnnnnnnnnnnnnnnnnnnnnnnnnnnnnnnnnnnnnnnnnnnnnnnnnnnnnnnnnnnnnnnnnnnnnnnnnnnnnnnnnnnnnnnnnnnntgcagacctgggtgagtgaaggctacttcccggacggtgtttattgccggaagctggacccccctggtggtcagttctacaactccaaacgcattgactttgagctctacacctgagcctgctgggaggcccagtttggtgg

SEQ ID NO: 22012 - DNA, 658 bp, Macaca Mulatta
  misc_feature (1)...(658): n = A,T,C or G
gggggactctggtgtttctgtgagctgaggcggttgggcctggctgaggggactctgatgtaactgggaatgtgacagcaacacaacattttgatatgtatgaaggtgataactctggaccgatgataaagtttattcagagtgctcctccaaaatccctgctcttcatggtgacctatgacgacggaagcacaagactgaataatgatgcaaagaatgccatagaagaacttggaagtaaagaaatcaggaacatgaaattcaggtctagctgggtatttcttgcagcaaaaggctttgaactcccttccgaaattcagagagaaaagatcaaccactctgatactaagaacaacagatattctggctggcctgcagagatccagatagaaggctgcatacccaaagaaccaagctgacactgcagggtccttaataaatgtgttctgtataaacnannnnnnnnnnnnnnnnnnnnnnnnnnnnnnnnnnnnnnnnnnnnnnnnnnnnnnnnnnnnnnnnnnnnnnnnnnnnnnnnnnnnnnnnnnnnnnnnnnnnnnnnnnnnnnnnnnnnnnnnnnnnnnnnnnnnncgcccccctcgccctcnnnnnnnnnnnnnnnnnnnnnnggccggccccataagaataaaattgtata

SEQ ID NO: 22013 - DNA, 2785 bp, Macaca Mulatta
  misc_feature (1)...(2785): n = A,T,C or G
agattcttcaagagaaacttaatgaaatgagctatgaactaaagtgtgctcaggagtcgtctcaaaagcaagatggtacaattcagaacctcaaggaaactctgaagagcagggaaagtgannnnnnnnnnnnnnnnnnnnnnnnnnnnnnnnnnnnnnnnnnnnnnnnnnnnnnnnnnnnnnnnnnnnnnnnnnnnnnnnnnnnnnnnnnnnnnnnnnnnnnnnnnnnnnnnnnnnnnnnnnnnnnnnnnnnnnnnnnnnnnnnnnnnnnnnnnnnnnnnnnnnnnnnnnnnnnnnnnnnnnnnnnnnnnnnnnnnnnnnnnnnnnnnnnnnnnnnnnnnnnnnnnnnnnnnnnnnnnnnnnnnnnnnnnnnnnnnnnnnnnnnnnnnnnnnnnnnnnnnnnnnnnnnnnnnnnnnnnnnnnncaggaattgcggaaagccttgcagcagctacaagaagaattgcagaataagagccaacagcttcgtgcccgggaggctgaaaaatacaatgagattcgaacccaggaacaaaacatccagcacctaaaccatagtctgagtcacaaggagcaattgcttcagnnnnnnnnnnnnnnnnnnnnnnnnnnnnnnnnnnnnnnnnnnnnnnnnnnnnnnnnnnnnnnnnnnnnnnnnnnnnnnnnnnnnnnnnnnnnnnnnnnnnnnnnnnnnnnnnnnnnnnnnnnnnnnnnnnnnnnnnnnnnnnnnnnnnnnnnnnnnnnnnnnnnnnnnnnnnnnnnnnnnnnnnnnnnnnnnnnnnnnnnnnnnnnnnnnnnnnnnnnnnnnnnnnnnnnnnnnnnnnnnnnnnnnnnnnnnnnnnnnnnnnnnnnnnnnnnnnnnnnnnnnnnnnnnnnnnnnnnnnnnnnnnnnnnnnnnnnnnnnnnnnnnnnnnnnnnnnnnnnnnnnnnnnnnnnnnnnnnnnnnnnnnnnnnnnnnnnnnnnnnnnnnnnnnnnnnnnnnnnnnnnnnnnnnnnnnnnnnnnnnnnnnnnnnnnnnnnnnnnnnnnnnnnnnnnnnnnnnnnnnnnnnnnnnnnnnnnnnnnnnnnnnnnnnnnnnnnnnnnnnnnnnnnnnnnnnnnnnnnnnnnnnnnnnnnnnnnnnnnnnnnnnnnnnnnnnnnnnnnnnnnnnnnnnnnnnnnnnnnnnnnnnnnnnnnnnnnnnnnnnnnnnnnnnnnnnnnnnnnnnnnnnnnnnnnnnnnnnnnnnnnnnnnnnnnnnnnnnnnnnnnnnnnnnnnnnnnnnnnnnnnnnnnnnnnnnnnnnnnnnnnnnnnnnnnnnnnnnnnnnnnnnnnnnnnnnnnnnnnnnnnnnnnnnnnnnnnnnnnnnnnnnnnnnnnnnnnnnnnnnnnnnnnnnnnnnnnnnnnnnnnnnnnnnnnnnnnnnnnnnnnnnnnnnnnnnnnnnnnnnnnnnnnnnnnnnnnnnnnnnnnnnnnnnnnnnnnnnnnnnnnnnnnnnnnnnnnnnnnnnnnnnnnnnnnnnnnnnnnnnnnnnnnnnnnnnnnnnnnnnnnnnnnnnnnnnnnnnnnnnnnnnnnnnnnnnnnnnnnnnnnnnnnnnnnnnnnnnnnnnnnnnnnnnnnnnnnnnnnnnnnnnnnnnnnnnnnnnnnnnnnnnnnnnnnnnnnnnnnnnnnnnnnnnnnnnnnnnnnnnnnnnnnnnnnnnnnnnnnnnnnnnnnnnnnnnnnnnnnnnnnnnnnnnnnnnnnnnnnnnnnnnnnnnnnnnnnnnnnnnnnnnnnnnnnnnnnnnnnnnnnnnnnnnnnnnnnnnnnnnnnnnnnnnnnnnnnnnnnnnnnnnnnnnnnnnnnnnnnnnnnnnnnnnnnnnnnnnnnnnnnnnnnnnnnnnnnnnnnnnnnnnnnnnnnnnnnnnnnnnnnnnnnnnnnnnnnnnnnnnnnnnnnnnnnnnnnagctctgagagagaccgaactctgcaggtggaactggaaggggctcaggtgttacgcagtcggctagaagaagttcttggaagaagcttggaccgcttaaacaggctggagaccctggccgccattggaggtnnnnnnnnnnnnnnnnnnnnnnnnnnnnnnnnnnnnnnnnnnnnnnnnnnnnnnnnnnnnnnnnnnnnnnnnnnnnnnnnnnnnnnctatagcttcagaagaatttttacttgcaagacaatggacacattccccttgggctttttgtaactgaaaagcaccacagaagacagggagtcatcaaagggctgctcggggaggtggcggggtgaaggacctgcttgggaaggaactccaagaagactggaatgcttccaaagcaagggtctttctcagtgaaatctcattatacagagagaaccttatgcaacctgacaaaccactgaggtcatggtgactcaatgatcagcagatggttcttcaacagcaatcccctgtcaagtctcagaacttgaggctgaaacattgtttccacccaccatcagtgcagatgtaactagcatgttacaagagtgaataatctggacttcagagattaagtcaccaatagtgatcccacaagcactcactggaactcctataatgtctccacttcgtccgtgccatttagcaatctcatctcctagatggactgtgcctatgattcttaaggagaaagtgaatcattggtaggtgtcccacacaagcagctggactgtccagtgacagctttcttggggcttttaggaaaactatacaagaaatgaggctttctaggtctgcctgtatgtcttctgcataagagaaagaggag

SEQ ID NO: 22014 - DNA, 500 bp, Macaca Mulatta
  misc_feature (1)...(500): n = A,T,C or G
gtcttcaacctgtgaaatgggatcataatcactgccttacctccctcacggttgttgtgaggactgagtgtgtggaagttttttgtaaactctggatgctaggtacttagggaatgtgccaggtgtctttcgtggggccttccagacccactccccagccttctgcccttcctctgcctggggacgccgaactctctcgatggtatcgacaggctcccttgccctttggctcctggtcatgttccattattggggagccccagcaggagaatggaggagaggaggagactgagtttggggtaatgaatcccctggctcctgccctgcagcatcaaggttgctatggactctcctgctgggcaactcttgagtaatcatgactatctctaggattctggcatcacttccttccttggccccttaagcctagctgtgtatnnnnnnnccaccccactagagtactccctctcacttgcggtttccttatactccaccctttt

SEQ ID NO: 22015 - DNA, 419 bp, Macaca Mulatta
  misc_feature (1)...(419): n = A,T,C or G
ggggctgaaaagtgcgctctacgtaaggacggtcgactttggcggggcccaggtgagaaaggcccacctgtgtcccgtttgaaggtcttcagggttctttggggcccgaggtgccaatgggtcatgtttggttagaaggtgataatctacagaattctacagattccagatactatggacctattccatatggactaataagaggacgaatcttctttaagatttggcctctgagtgattttggatttttacgtgccagccctaatggccacagattttctgatgattagtaatcatttattcttttgacttgattattgtctccttttcatgtgaatttattactcccgttgaaaccatgtactaataaactatttgctattnnnnnnnnnnnnnnnnnnnnnnnnnnnnnnnnnnnn

SEQ ID NO: 22016 - DNA, 130 bp, Macaca Mulatta
aggcaatataaagtcctggttcactctcaggcacgagagctgacccagttaagggagaagttacgggaagggagagatgcctcccgctcattgactcagcatctccaggccctcctcactccggatgagc

SEQ ID NO: 22017 - DNA, 530 bp, Macaca Mulatta
agacagtccgcggcttctagccttgtccctcccttagtgttctttaatcagataactgcctggaagcctttcattttacacaccctgaagcagccttctttgctagttgaattatgtggtgtgtttttcataataggcaaaataaattttaaaagatgaaaagttgacttttgtccatgtatattttaattggatgatatcgaattgaaaatccaaggtaagaaacctcatggcaattgggctatggaattctgtgttggttgtaagaatggtccaacatcccatttctctttctttccctgagctagtgtctatgacaccttctaagaggaatcataaccaaatgaaggagcccatgtggcttctgttttaagtgtcactagagtcaccagattaagttggtttaggacattccagtggcaacaggacaccatctcctgtgatgtataccgtgcgagctcagctctagagtgttttgcagacaccgtgtttcctgatcctcacgatacccccaggagagctgccctaac

SEQ ID NO: 22018 - DNA, 828 bp, Macaca Mulatta
  misc_feature (1)...(828): n = A,T,C or G
agcaagccgcccctcccccccccccagcaagaagggtggcgtcccgcagctttctggttattttcccgcctggggtacatccgcccccgccgcacgactcggcgctgaggcccaaggggaagccccgaggggaccccgcgcggtaggagggagtggaggcgctggcgaaccncgatggagccggggccccgcacagcgcgagcggctcctcagctgttcatgctgcttccccagcttcttcaccggctcctgcagcttccgcacctcttggtccgcgttcacgttggagttaacgtcctccatcccggcccggctgcctccgtcgcccgccgcccactcgctctcgcagcaacagggaaagagccggaggaaagaggcgtccccgccgctcactccagccgaagcgcccgcatgtagcaggaccaggccccgccgccagggtccccccagcgcgggtcccgaagtgcagctggcgccagccgaaccgcctcctcggcgccggtccggggttcagggagggagcaccaatatctggcctctgccgccatcgtccctccgccccccgagggtcgcccctgtaagtgacctcaaagcgtcgggggtgggcgtggccgccggcgggcgttgagagaacccggcgtagagaggatcaccgagctcccgacagggcggggccaggtgtgtgaggggcggggattgggccaggaggggcgtgtccggactactggctgaagtggcgcgctactggacgctcgactgaaagtccctgcggtcccggaggcgagcagaaggtatgccgcgagccgggccgaggtggtgaacatggtc

SEQ ID NO: 22019 - DNA, 662 bp, Macaca Mulatta
  misc_feature (1)...(662): n = A,T,C or G
cagtcgttctactcgccacagtcatggcccactgcaagcagatgtatttgtggaattgctgagtcctcgtagaaaacgcagaggcaggaaaagtgctaataatacaccagaaaatagtcccaacttccctaacttcagagtcattgccacaaagtcaagtgagcagtcaagatctttaaatgttgcttcaaaactttctctccaagagagtgaatccacaagaagatgcagaaaaagacaatctccagagtctagctcggtttnnnnnnnnnnnnnnnnnnnnnntgattnnnnnnnnnnnnnnnnnnnnnnnnnnnnnnnnnnnnnnnnnnnctgccccagcctcccaagtagcaggattacagagtcatcgcctgtgacactgggtcgaaggagttctggccgacagggaggagttcatgaattatctgcttttgaacaacttgttgtagaattggtacgacatgatgacagctggccttttttgaaacttgtttctaaaatccaggtcccagactactatgacatcatcaaaaagcccattgccttaaatataattcgtgaaaaagtgaataactgtgaatataaaatagcatctgagtttattgatgatatcgagttaatgttctcgaactgctttgcatacaaccctcgtaacacaa

SEQ ID NO: 22020 - DNA, 2664 bp, Macaca Mulatta
  misc_feature (1)...(2664): n = A,T,C or G
ctgcagtagcggggttggggtgggagtgagagagtgaggacgctgggctgggggaaactggaagccactgcaagtcccccgcctcagctacccagattgggatctgcccaggcccgctttatggactcgtgtgggcggtaggctcctttaggtccctgccctgctgtcccccgctccttagagaccccctgtatccctcccgcaaggtggaatccgcaggctggaggctcccaggggaggcaaacgcctggccctgccctgccccacgccgcaccatgaccctcctgctgctgccccttctgctggcctctctgctcgcgtcctgctcctgtaacaaannnnnnnnnnnnnnnnnnnnnnnnnnnnnnnnnnnnnnnnnnnnnnnnnnnnnnnnnnnnnnnnnnnnnnnnnnnnnnnnnnnnnnnnnnnnnnnnnnnnnnnnnnnnnnnnnnnnnnnnnnnnnnnnnnnnnnnnnnnnnnnnnnnnnnnnnnnnnnnnnnnnnnnnnnnnnnnnnnnnnnnnnnnnnnnnnnnnnnnnnnnnnnnnnnnnnnnnnnnnnnnnnnnnnnnnnnnnnnnnnnnnnnnnnnnnnnnnnnnnnnnnnnnnnnnnnnnnnnnnnnnnnnnnnnnnnnnnnnnnnnnnnnnnnnnnnnnnnnnnnnnnnnnnnnnnnnnnnnnnnnnnnnnnnnnnnnnnnnnnnnnnnnnnnnnnnnnnnnnnnnnnnnnnnnnnnnnnnnnnnnnnnnnnnnnnnnnnnnnnnnnnnnnnnnnnnnnnnnnnnnnnnnnnnnnnnnnnnnnnnnnnnnnnnnnnnnnnnnnnnnnnnnnnnnnnnnnnnnnnnnnnnnnnnnnnnnnnnnnnnnnnnnnngggaacattgagaacacagagaagctgcagtacagtggtgagaggctctataagtttacagtgacggcttatgactgtgggaagaagcgggcggcagatgacgccgaggtggagattcaggtgaagcccacctgtaaacccagctggcaagnnnnnnnnnnnnnnnnnnnnnnnnnnnnnnnnnnnnnnnnnnnnnnnnnnnnnnnnnnnnnnnnnnnnnnnnnnnnnnnnnnnnnnnnnnnnnnnnnnnnnnnnnnnnnnnnnnnnnnnnnnnnnnnnnnnnnnnnnnnnnnnnnnnnnnnnnnnnnnnnnnnnnnnnnnnnnnnnnnnnnnnnnnnnnnnnnnnnnnnnnnnnnnnnnnnnnnnnnnnnnnnnnnnnnnnnnnnnnnnnnnnnnnnnnnnnnnnnnnnnnnnnnnnnnnnnnnnnnnnnnnnnnnnnnnnnnnnnnnnnnnnnnnnnnnnnnnnnnnnnnnnnnnnnnnnnnnnnnnnnnnnnnnnnnnnnnnnnnnnnnnnnnnnnnnnnnnnnnnnnnnnnnnnnnnnnnnnnnnnnnnnnnnnnnnnnnnnnnnnnnnnnnnnnnnnnnnnnnnnnnnnnnnnnnnnnnnnnnnnnnnnnnnnnnnnnnnnnnnnnnnnnnnnnnnnnnnnnnnnnnnnnnnnnnnnnnnnnnnnnnnnnnnnnnnnnnnnnnnnnnnnnnnnnnnnnnnnnnnnnnnnnnnnnnnnnnnnnnnaggtctgtgatgatgagtggcaccactacgctctgaacctcgagttccccacagtcacactctacaccgatggcatctccttcgaccctgccctcatccatgacaatggcctcatccacccgccccgaagggagcctgctctcatgattggggcctgctggactnnnnnnnnnnnnnnnnnnnnnnnnnnnnnnnnnnnnnnnnnnnnnccaccctaggagaccctttgccgatccaccactatttccatggctacctggctggtttcagtgtgcgctcaggtcgcctggagagccgtgaggtcatcgagtgcctctatgcatgtcgggaggggctggactatagggatttcgagagcctgggcaaaggcatgaaggnnnnnnnnnnnnnnnnnnnnnnnnnnnnnnnnnnnnnnnnnnnnnnnnnnnnnnnnnnnnnnnnnnnnnnnnnnnnnnnnnnnnnnnnnnnnnnnnnnnnnnnnnnnnnnnnnnnnnnnnnnnnnnnnnnnnnnnnnnnnnnnnnnnnnnnnnnnnnnnnnnnnnnnnnnnnnnnnnnnnnnnnnnnnnnnnnnnnnnnnnnnnnnnnnnnnnnnnnnnnnnnnnnnnnnnnnnnnnnnnnnnnnnnnnnnnnnnnnnnnnnnnnnnnnnnnnnnnnnnnnnnnnnnnnnnnnnnnnnnnnnnnnnnnnnnnnnnnnnnnnnnnnnnnnnnnnnnnnnnnnnnnnnnnnnnnnnnnnnnnnnnnnnnnnnnnnnnnnnnnnnnnnnnnnnnnnnnnnnnnnnnnnnnnnnnnnnnnnnnnnnnnnnnnnnnnnnnnnnnnnnnnnnnnnnnnnnnnnnnnnnnnnnnnnnnnnnnnnnnnnnnnnnnnnnnnnnnnnnnnnnnnnnnnnnnnnnnnnnnnnnnnnnnnnnnnnnnnnnnnnnnngggtggagagcatcactgtgtatgaagagatcctgaggcaggctcgttatcggctgcgacacggagctgccctctacgccaggaaattccggctttcctgctcggaaatgaatggccgttactccagcaatgaattcatcgtggaggt

SEQ ID NO: 22021 - DNA, 2394 bp, Macaca Mulatta
  misc_feature (1)...(2394): n = A,T,C or G
aggtggcacctacttccttatctcccggagtcggggccaagagcttgggggctccatcggcctcattttcgctttcgccaatgctgtgggtgaggccatgcataccgtgggctttgcagagactgtgcnnnnnnnnnnnnnnnnnnnnnnnnnnnnnnnnnnnnnnnnnnnnnnnnnnnnnnnnnnnnnnnnnnnnnnnnnnnnnnnnnnnnnnnnnnnnnnnnnnnnnnnnnnnnnnnnnnnnnnnnnnnnnnnnnnnnnnnnnnnnnnnnnnnnnnnnnnnnnnnnnnnnnnnnnnnnnnnnnnnnnnnnnnnnnnnnnnnnnnnnnnnnnnnnnnnnnnnnnnnnnnnnnnnnnnnnnnnnnnnnnnnnnnnnnnnnnnnnnnnnnnnnnnnnnnnnnnnnnnnnnnnnnnnnnnnnnnnnnnnnnnnnnnnnnnnnnnnnnnnnnnnnnnnnnnnnnnnnnnnnnnnnnnnnnnnnnnnnnnnnnnnnnnnnnnnnnnnnnnnnnnnnnnnnnnnnnnnnnnnnnnnnnnnnnnnnnnnnnnnnnnnnnnnnnnnnnnnnnnnnnnnnnnnnnnnnnnnnnnnnnnnnnnnnnnnnnnnnnnnnnnnnnnnnnnnnnnnnnnnnnnnnnnnnnnnnnnnnnnnnnnnnnnnnnnnnnnnnnnnnnnnnnnnnnnnnnnnnnnnnnnnnnnnnnnnnnnnnnnnnnnnnnnnnnnnnnnnnnnnnnnnnnnnnnnnnnnnnnnnnnnnnnnnnnnnnnnnnnnnnnnnnnnnnnnnnnnnnnnnnnnnnnnnnnnnnnnnnnnnnnnnnnnnnnnnnnnnnnnnnnnnnnnnnnnnnnnnnnnnnnnnnnnnnnnnnnnnnnnnnnnnnnnnnnnnnnnnnnnnnnnnnnnnnnnnnnnnnnnnnnnnnnnnnnnnnnnnnnnnnnnnnnnnnnnnnnnnnnnnnnnnnnnnnnnnnnnnnnnnnnnnnnnnnnnnnnnnnnnnnnnnnnnnnnnnnnnnnnnnnnnnnnnnnnnnnnnnnnnnnnnnnnnnnnnnnnnnnnnnnnnnnnnnnnnnnnnnnnnnnnnnnnnnnnnnnnnnnnnnnnnnnnnnnnnnnnnnnnnnnnnnnnnnnnnnnnnnnnnnnnnnnnnnnnnnnnnnnnnnnnnnnnnnnnnnnnnnnnnnnnnnnnnnnnnnnnnnnnnnnnnnnnnnnnnnnnnnnnnnnnnnnnnnnnnnnnnnnnnnnnnnnnnnnnnnnnnnnnnnnnnnnnnnnnnnnnnnnnnnnnnnnnnnnnnnnnnnnnnnnnnnnnnnnnnnnnnnnnnnnnnnnnnnnnnnnnnnnnnnnnnnnnnnnnnnnnnnnnnnnnnnnnnnnnnnnnnnnnnnnnnnnnnnnnnnnnnnnnnnnnnnnnnnnnnnnnnnnnnnnnnnnnnnnnnnnnnnnnnnnnnnnnnnnnnnnnnnnnnnnnnnnnnnnnnnnnnnnnnnnnnnnnnnnnnnnnnnnnnnnnnnnnnnnnnnnnnnnnnnnnnnnnnnnnnnnnnnnnnnnnnnnnnnnnnnnnnnnnnnnnnnnnnnnnnnnnnnnnnnnnnnnnnnnnnnnnnnnnnnnnnnnnnnnnnnnnnnnnnnnnnnnnnnnnnnnnnnnnnnnnnnnnnnnnnnnnnnnnnnnnnnnnnnnnnnnnnnnnnnnnnnnnnnnnnnnnnnnnnnnnnnnnnnnnnnnngatgcctttgatttcaactatggtgtgtgtgtcatgaggatgcgggagggactcaatgtgtccaagatgatgcaggcacacnnnnnnnnnnnnnnnnnnnnnnnnnnnnnnnnnnnnnnnnnnnnnnnnnnnnnnnnnnnnnnnnnnnnnnnnnnnnnnnnnnnnnnnnnnnnnnnnnnnnnnnnnnnnnnnnnnnnnnnnnnnnnnnnnnnnnnnnnnnnnnnnnnnnnnnnnnnnnnnnnnnnnnnnnnnnnnnnnnnnnnnnnnnnnnnnnnnnnnnnnnnnnnnnnnnnnnnnnnnnnnnnnnnnnnnnnnnnnnnnnnnnnnnnnnnnnnnnnnnnnnnnnnnnnnnnnnnnnnnnnnnnnnnnnnnnnnnnnnnnnnnnnnnnnnnnnnnnnnnnnnnnnnnnnnnnnnnnnnnnnnnnnnnnnnnnnnnnnnnnnnnnnnnnnnnnnnnnnnnnnnnnnnnnnnnnnnnnnnnnnnnnnnnnnnnnnnnnnnnnnnnnnnnnnnnnnnnnnnnnnnnnnnnnnnnnnnnnnnnnnnnnnnnnnnnnnnnnnnnnnnnnnnnnnnnnnnnnnnnnnnnnnnnnnnnnngtcccttcggcaggtgaggctgaatgagattctgctggattactcccgagacgctgctctcatcgtcatactttgcccatagggaggaagggggagtgc

SEQ ID NO: 22022 - DNA, 81 bp, Macaca Mulatta
tggtccatgttgcctacagcctctgcttaccaatgagaaggtcagagagatatttgtttctcaacatggcttatcagcagg

SEQ ID NO: 22023 - DNA, 1142 bp, Macaca Mulatta
  misc_feature (1)...(1142): n = A,T,C or G
ggattgaatttaccaaattggctgcagacccttctgttgtgaatcttggccaaggctttccagatatatcccctcctacatatgtaaaagaagaattatcaaagatttcagcaatcgatagcctgaatcagtatacacgaggctttggccatccatcacttgtgaaagctctgtcctacctgtatgaaaagctttatcaaaagcaaatcgattcaaataaagaaatccttgtgacagtaggagcatatggatctctttttaacaccattcaagcattaattgatgagggagatgaagtnnnnnnnnnnnnnnnnnnnnnnnnnnnnnnnnnnnnnnnnnnnnnnnnnnnnnnnnnnnnnnnnnnnnnnnnnnnnnnnnnnnnnnnnnnnnnnnnnnnnnnnnnnnnnnnnnnnnnnnnnnnnnnnnnnnnnnnnnnnnnnnnnnnnnnnnnnnnnnnnnnnnnnnnnnnnnnnnnnnnnnnnnnnnnnnnnnnnnnnnnnnnnnnnnnnnnntataacaaagaggaactgcaagtaattgctgacctttgcatcaaatatgacacactctgcatcagcgatgaggtttatgaatggcttgtatattctggaaataagcacttaaaaatannnnnnnnnnnnnnnnnnnnnnnnnnnnnnnnnnnnnnnnnnnnnnnnnnnnnnnnnnnnnnnnnnnnnnnnnnnnnnnnnnnnnnnnnnnnnnnnnnnnnnnnnnnnnnnnnnnnnnnnnnnnnnnnnnnnnnnnnnnnnnnnnnnnnnnnnnnnnnnnnnnacaggaagccttggctcaagctttctggattgacatcaagcgcatggatgacccagaatgttactttaattctttgccaaaagagttagaagtaaaaagagatcggatggtacatttacttgaaagtgttggcctaaaacccatagttcctgacggaggatacttcatcatcgctgatgtgtctttgctannnnnnnnnnnnnnnnnnnnnnnnnnnnnnnnnnnnnnnnnnnnnnnnnnnnnnnnnnnnnnnnnnnnnnnngaaactatcagccatccccgtttcagcattctgtaactcagagactaaatcacagtttgagaagtttgtgcgattttgcttcattaaa

SEQ ID NO: 22024 - DNA, 1136 bp, Macaca Mulatta
  misc_feature (1)...(1136): n = A,T,C or G
gtatgttcgcatgctgggggcactttacatgaggctgacaggcactgcaattgattgctacaagtacttggagcctttgtacaatgactatcgaaaaatcaagagccagaaccgaaatgggnnnnnnnnnnnnnnnnnnnnnnnnnnnnnnnnnnnnnnnnnnnnnnnnnnnnnnnnnnnnnnnnnnnnnnnnnnnnnnnnnnnnnnnnnnnnnnnnnnnnnnnnnnnnnnnnnnnnnnnnnnnnnnnnnnnnnnnnnnnnnnnnnnnnnnnnnnnnnnnnnnnnnnnnnnnnnnnnnnnnnnnnnnnnnnnnnnnagttggaaagagtgccatcacctgatcaccgccggagaagctaccgagacttggacaagccccgtcgctctcccacactgcgctacagaaggagtagaagccggtctcccagaagnnnnnnnnnnnnnnnnnnnnnnnnnnnnnnnnnnnnnnnnnnnnnnnnnnnnnnnnnnnnnnnnnnnnnnnnnnnnnnnnnnnnnnnnnnnnnnnnnnnnnnnnnnnnnnnnnnnnnnnnnnnnnnnnnnnnnnnnnnnnnnnnnnnnnnnnnnnnnnnnnnnnnnnnnnnnnnnnnnnnnnnnnnnnnnnnnnnnnnnnnnnnnnnnnnnnnnnnnnnnnnnnnnnnnnnnnnnnnnnnnnnnnnnnnnnnnnnnnnnnnnnnnnnnnnnnnnnnnnnnnnnnnnnnnnnnnnnnnnnnnnnnnnnnnnnnnnnnnnnnnnnnnnnnnatcaagtttctcaacctttgtttttaacgaaggagatgctgagttttgtatctctttttaatcataatcaacatcagttttttacccaactaaccttgactgtattcaaacttacaagagtagaagggatctggaggttgggggtatgaatgacaaggaaaggatgtggccacctgatgacgctttccctttttattaaaccagacacacctgtttcccatttctctgtagtttagtttttggtttgttgtggtcggaactgctttgagaatcctgggatttgtgctgctgctgttattcaaagatgaaatgagtaaaacgtagtagctcctaacttttttccagcagcagcaaacggtaataaacatgaaaactg

SEQ ID NO: 22025 - DNA, 194 bp, Macaca Mulatta
  misc_feature (1)...(194): n = A,T,C or G
tgggtggccaagtctctgttgaaggcagggctctgccggagagtgctcgtccaggtnaggtttcctatgccattggtgtggccgagccgctgtccatttccatcttcacctacggaacctcccagaagacagagcaagagctgctggatgtggtgcgtaagaacttcgacctccggccgggtgtcattgtcagg

SEQ ID NO: 22026 - DNA, 812 bp, Macaca Mulatta
ggctacactgctggtgtggctatagatttttaaatgttattttttaaaatgttttggagattggggagcaggaatggaggatcctcagcaccactggaagataggctggggttggggggaggtgctgaaagttccagcctccatagcaaacctatagtatggctgtgtgttgtgtgagatgctggtggcagctttgtcagacactgagatcaggggtcttgctccagaatccaccgggctgccaagtgactcttgaagatctgtctgtaatgttgagtcttgtccatctgctcttgactctgagctggctaggtgactgttggttattcctgggacaggtgctgggtaggccaggtttcagcatcgcagacaagaagcgcacgacaggctgcattggggccaaacacagaatcagcaaagaggaggccatgcgctggttccagcagaaagtaaagctgatttatctcaagtgaagtggtggaatgtggtgttggtgaatggagttgggatttcggcatgccacagacgggactagttggcgggtgaccctcccctacgcttagcactcctccggtcctttggctccgtcccggggtttccaagggatgcgtggctccgcccgtactatcccgcgaaccaggtcccttccccatcccccccttagttgccgggccagccccctagatggggccggacttcttgttcgttagcagggggcccgcccttagcgtgggacagggtgggtgtgccacctctgggggcgtgtccgcgaccgcgagtgtggccacgggtcttccccgcgcgctgcccgg

SEQ ID NO: 22027 - DNA, 1159 bp, Macaca Mulatta
  misc_feature (1)...(1159): n = A,T,C or G
ggtagaattgggctatttgctgaagcttcttcgtagcccttggtggcccaggaagaaacttacgttttgatttttttgtaccatgggtttgtttcacaaagtgctgcgnnnnnnnnnnnnnnnnnnnnnnnnnnnnnnnnnnnnnnnnnnnnnnnnnnnnnnnnnnnnnnnnnnnnnnnnnnnnnnnnnnnnnnnnnnnnnnnnnnnnnnnnnnnnnnnnnnnnnnnnnnnnnnnnnnnnnnnnnnnnnnnnnnnnnnnnnnnnnnnnnnnnnnnnnnnnnnnnnnnnnnnnnnnnnnnnnnnnnnnnnnnnnnnnnnnnnnnnnnnnnnnnnnnnnnnnnnnnnnnnnnnnnnnnnnnnnnnnnnnnnnnnnnnnnnnnnnnnnnnnnnnnnnnnnnnnnnnnnnnnnnnnnnnnnnnnnnnnnnnnnnnnnnnnnnnnnnnnnnnnnnnnnnnnnnnnnnnnnnnnnnnnnnnnnnnnnnnnnnnnnnnnnnnnnnnnnnnnnnnnnnnnnnnnnnnnnnnnnnnnnnnnnnnnnnnnnnnnnnnnnnnnnnnnnnnnnnnnnnnnnnnnnnnnnnnnnnnnnnnnnnnnnnnnnnnnnnnnnnnnnnnnnnnnnnnnnnnnnnnnnnnnnnnnnnnnnnnnnnnnnnnnnnnnnnnnnnnnnnnnnnnnnnnnnnnnnnnnnnnnnnnnnnnnnnnnnnnnnnnnnnnnnnnnnnnnnnnnnnnnnnnnnnnnnnnnnnnnnnnnnnnnnnnnnnnnnnnnnnnnnnnnnnnnnnnnnnnnnnnnnnnnnnnnnnnnnnnnnnnnnnnnnnnnnnnnnnnnnnnnnnnnnnnnnnnnnnnnnnnnnnnnnnnnnnnnnnnnnnnnnnnnnnnnnnnnnnnnnnnnnnnnnnnnnnnnnnnnnnnnnnnnngatctcttctataggattcaccttggctgataaagtggatggtccattctttctggagatagattttattggagtgtttactgatccagcccatacagaagaatttgcctatgaaaattctccagagcttaacccaaggctttttaaataaagattatgtggtagttttgttttactactctaagggtactagcatctataatgatgtagacaaaataaaatatttctttaatggcatccaaccaa

SEQ ID NO: 22028 - DNA, 1881 bp, Macaca Mulatta
  misc_feature (1)...(1881): n = A,T,C or G
gtttttctaggaaatcctcatgtttgtaactgttccacatttctgaaaggagaggaactttgtaagcatatctgctgnnnnnnnnnnnnnnnnnnnnnnnnnnnnnnnnnnnnnnnnnnnnnnnnnnnnnnnnnnnnnnnnnnnnnnnnnnnnnnnnnnnnnnnnnnnnnnnnnnnnnnnnnnnnnnnnnnnnnnnnnnnnnnnnnnnnnnnnnnnnnnnnnnnnnnnnnnnnnnnnnnnnnnnnnnnnnnnnnnnnnnnnnnnnnnnnnnnnnnnnnnnnnnnnnnnnnnnnnnnnnnnnnnnnnnnnnnnnnnnnnnnnnnnnnnnnnnnnnnnnnnnnnnnnnnnnnnnnnnnnnnnnnnnnnnnnnnnnnnnnnnnnnnnnnnnnnnnnnnnnnnnnnnnnnnnnnnnnnnnnnnnnnnnnnnnnnnnnnnnnnnnnnnnnnnnnnnnnnnnnnnnnnnnnnnnnnnnnnnnnnnnnnnnnnnnnnnnnnnnnnnnnnnnnnnnnnnnnnnnnnnnnnnnnnnnnnnnnnnnnnnnnnnnnnnnnnnnnnnnnnnnnnnnnnnnnnnnnnnnngtgtaccgagtgcatagaatatcacttatgccaggaatgttttgatagctgctgccatctttcccacacgtttacatttcgtgannnnnnnnnnnnnnnnnnnnnnnnnnnnnnnnnnnnnnnnnnnnnnnnnnnnnnnnnnnnnnnnnnnnnnnnnnnnnnnnnnnnnnnnnnnnnnnnnnnnnnnnnnnnnnnnnnnnnnnnnnnnnnnnnnnnnnnnnnnnnnnnnnnnnnnnnnnnnnnnnnnnnnnnnnnnnnnnnnnnnnnnnnnnnnnnnnnnnnnnnnnnnnnnnnnnnnnnnnnnnnnnnnnnnnnnnnnnnnnnnnnnnnnnnnnnnnnnnnnnnnnnnnnnnnnnnnnnnnnnnnnnnnnnnnnnnnnnnnnnnnnnnnnnnnnnnnnnnnnnnnnnnnnnnnnnnnnnnnnnnnnnnnnnnnnnnnnnnnnnnnnnnnnnnnnnnnnnnnnnnnnnnnnnnnnnnnnnnnnnnnnnnnnnnnnnnnnnnnnnnnnnnnnnnnnnnnnnnnnnnnnnnnnnnnnnnnnnnnnnnnnnnnnnnnnnnnnnnnnnnnnnnnnnnnnnnnnnnnnnnnnnnnnnnnnnnnnnnttgataaattgaatacacctcaaagcccaaaagatgcctgtgagaatataccaatagacaatctatgctctatccaattagataattcaaattcaagaaaagtaacctatgaatataaaattagccaacattttcccagataccttcaagatttacccatgttatcatttgggaaaataccatctcaaacatttcttccccctattgttcataagaatatcgtatgtcccactgcaatggaaagtccatgcatcagtggaaaataccacactagtcaaagccggatgaccaaaggctgtacatgtaataaccacaacctaaagaagactcctggcactaaaataagagaggacaataagagatcaactttactttcagaggatttcaatcttattgtcaattggagcacagctaaacttagtttgtctaaaaggtataataactgtatgggggaaattacacgaaaatgtagtcatctgtcaagacagcctgtgtctcactctgtaaatacaaaaggtactgagctatctttaataatagaaggagttcaattgtgaaaaagtatttttatttactattagaaaatatttgaatgttgagcataaaagctgttttatatagaacataaaaagcacatatagtcttgacaaatgtatataaaattatctcttggaatttgcctacttacctataaacagctcac

SEQ ID NO: 22029 - DNA, 492 bp, Macaca Mulatta
gcaaagtagtgcagaggcggccgagagtctttgacagcaacgggaacttcctgtatagaatttgagtcggggcttggcttgtggagatgccttgtgaaacacagctgggcaaggaatatatatggaacagcctggatttctacatatggagaagccaccttggaataggaagaagtgttgagcctggactgtgggaggaaaaaactgcctggatagatttcagacttcctgtagtagtgcccccaatctgacctctgttgatcttcagtactcactcttcttgcttggactctctgtatgttgaaaaccagccatgttgcatgtgttgttacaattttctgtgatacttgcaatttatatttgagaggaagtgaaaagtttgccttctgacctcatttccttcttgatcagtgaacactaacatttttgggacaacttagtcaattgttttccttacaagcaaaataaagtaaaatgtagcagtcaaaaaac

SEQ ID NO: 22030 - DNA, 2360 bp, Macaca Mulatta
  misc_feature (1)...(2360): n = A,T,C or G
ggtcctgtccctgggcgcggatgtgctgcccgagtacaagctgcaggcgccgcgcatccaccgctggaccatcctgcattacagccccttcaaggccgtgtgggactggctcatcctgctgctggtcatctacacggctgtcttcacaccctattcagctgccttcctgctcagcgaccaggacgaatcgcggcgtggggcctgtggatatacctgcagtcccctcactgtggtggatctcatcgtggacatcatgttcgtcgtggacatcgtcatcaacttccgcaccacctacgtcaacaccaatgatgaggtggtcagccacccccgccgcatcgccgtccactacttcaagggctggttcctcatcgacatggtggccgccatcccttttgacctcctgatcttccgcaccggctccgatgagngaccacaaccctgatcgggctattgaagacagcgcggctgctgcggctggtgcgcgtggcacggaagttggaccgctactctgagtacggggcggctgtgctcttcttgctcatgtgcacctttgcgctcattgcgcattggctggcctgcatctggtacgccatcggcaatgtggagcggccctacctggaacacaagatcggctggctggacagcctgggtgtgcagcttggcaagcgctacaacggcagcgacccagcctcgggcccctcggtgcaggacaagtatgtcacagccctctacttcaccttcagcagccttaccagcgtgggcttcggcaatgtctcacccaacaccaactccgagaaggtcttctccatctgcgtcatgctcattggctnnnnnnnnnnnnnnnnnnnnnnnnnnnnnnnnnnnnnnnnnnnnnnnnnnnnnnnnnnnnnnnnnnnnnnnnnnnnnnnnnnnnnnnnnnnnnnnnnnnnnnnnnnnnnnnnnnnnnnnnnnnnnnnnnnnnnnnnnnnnnnnnnnnnnnnnnnnnnnnnnnnnnnnnnnnnnnnnnnnnnnnnnnnnnnnnnnnnnnnnnnnnnnnnnnnnnnnnnnnnnnnnnnncaggctgacatctgcctgcacctgcaccgcgcgctgctgcagcactgcccggctttcagcggagccagcaagggctgcctgcgcgcattagccgtcaagttcaagaccacgcacgcgccgcctggggacacgctggtacacctcggcgatgtgctctccacgctctacttcatctcccgaggctccatcgagatcctgcgcgacgacgtggtcgtggccatcctagnnnnnnnnnnnnnnnnnnnnnnnnnnnnnnnnnnnnnnnnnnnnnnnnnnnnnnnnnnnnnnnnnnnnnnnnnnnnnnnnnnnnnnnnnnnnnnnnnnnnnnnnnnnnnnnnnnnnnnnnnnnnnnnnnnnnnnnnnnnnnnnnnnnnnnnnnnnnnnnnnnnnnnnnnnnnnnnnnnnnnnnnnnnnnnnnnnnnnnnnnnnnnnnnnnnnnnnnnnnnnnnnnnnnnnnnnnnnnnnnnnnnnnnnnnnnnnnnnnnnnnnnnnnnnnnnnnnnnnnnnnnnnnnnnnnnnnnnnnnnnnnnnnnnnnnnnnnnnnnnnnnnnnnnnnnnnnnnnnnnnnnnnnnnnnnnnnnnnnnnnnnnnnnnnnnnnnnnnnnnnnnnnnnnnnnnnnnnnnnnnnnnnnnnnnnnnnnnnnnnnnnnnnnnnnnnnnnnnnnnnnnnnnnnnnnnnnnnnnnnnnnnnnnnnnnnnnnnnnnnnnnnnnnnnnnnnnnnnnnnnnnnnnnnnnnnnnnnnnnnnnnnnnnnnnnnnnnnnnnnnnnnnnnnnnnnnnnnnnnnnnnnnnnnnnnnnnnnnnnnnnnnnnnnnnnnnnnnnnnnnnnnnnnnnnnnnnnnnnnnnnnnnnnnnnnnnnnnnnnnnnnnnnnnnnnnnnnnnnnnnnnnnnnnnnnnnnnnnnnnnnnnnnnnnnnnnnnnnnnnnnnnnnnnnnnnnnnnnnnnnnnnnnnnnnnnnagaccccaagttatggagacttggacgactgtagtgcaaagcacaggagttcctcccccaggatgcctcacctggctgtggcaacggacaaaactctggcaccatcctcagaagaggaacagcctgaggggctctgggcacccctggcctcacctctgtatcccctgaaagtacagggactcatctgtggtccctgcttctcctccctccctgaacaccttggctctgttcccaagcagctggacttccagagacatggctcatatcctggatttgcagggagttggggccactgaactccaagataaagacaccatgaggggattgaaggtgggcaaggtgaga

SEQ ID NO: 22031 - DNA, 782 bp, Macaca Mulatta
atctattatgccatctccaaatccataggctttggggttgacacctgggtttacccaaatatcactgaccctgagtatggctacctggctagggaatacatctattgcctttactggtccacactgaccctcactaccattggggagacaccaccccctgtaaaggatgaggagtacctatttgtcatctttgacttcctgattggcgtcctcatctttgccaccattgtgggaaatgtgggctccatgatctccaacatgaatgccacccgggcagagttccaggctaagatcgatgccgtgaaacactacatgcagttccgaaaggtcagcaaggagatggaagccaaggtcattaggtggtttgactacttgtggaccaataagaagacagtggatgagcgagaagttctcaagaatctgccagccaagctcagggctgagatagccatcaatgtccacttgtccacacttaagaaagtgcgcatcttccatgattgtgaggctggcctgctggtagagctggtattgaaactccgtcctcaagtcttcagtcctggggattacatttgtcgcaaaggggacattggcaaggagatgtacatcattaaggagggcaggctggcagtggtggctgatgatggggtgactcagtatgccctgctctcggctggaagctgctttggtgagatcagtatccttaacattaagggaagtaaaatgggcaatcgacgcacggctaatatccgcagcctgggctactcagacctcttctgcttgtc

SEQ ID NO: 22032 - DNA, 649 bp, Macaca Mulatta
tcttccaccggcgcaaggaccactgtcggcggagaccgcgaccggccccacggaggaccaggtggagatcctggagtacaacttcaacaaggtcgacaaacacccggatccaccacgctgtgcctcatcgcggccgaggccggcctttccgaggaggagacccagaaatggtttaagcagcgcctggcgaagtggcggcgctcagaaggcctgccctcagagtgcagatccgtcacagactaaggagatggcaggcactgacagcttcactccatgaaggccatctgctgtttctctcctctgcttaaccaagctgttgtggtttttcagcatagtgttgtatgttccgttgctagctgtcctgctatttaacacagtgttgtatttttttctaaatgtacatagttagaaaagaaaataacaataggaagctacacgtatcttctgtgtaaagcagtggcttcactggaaaaatggtgtgatttgcatttccctttgagtcatgatgacagatggtgtgaaaaccatctaagtttgcttttgaccatcacctcccggtaacaatttgctttcataatccatttagcaatccaggcctctgttgaaaagatcatatgagggagaagggaacacatttccttctgcactt

SEQ ID NO: 22033 - DNA, 667 bp, Macaca Mulatta
gggggcttagcacaggaaagatggcggtgacgggctggttggagagtctgcggacagcccagaagactgcactgctgcaggacgggagaaggaaggtgcactatttattcccagatggcaaggaaatggctgaagaatatgacgagaagacgagtgaactacttgtgagaaagtggcgtgtgaaaagtgccctgggagccatgggccagtggcagcttgaagtaggagagccagcgcccctaggagcaggaaacctggggcctgaactcatcaaggaaagcaatgccaatcctatcttcatgcgcaaggacaccaagaagagtttccagtggcgaattcgaaacctcccctatcctaaggatgtctacggtgtctgtgtggaccagaaggagcgctgcatcattgtcaaaacaaccaacaagaagtactacaagaagttctccattcctgacctagatagacaccagctacctctggatgacgccttgctaagctttgcccacgccaactgcaccctgatcatctcttaccagaagccaaaggaggttgtggtggctgagtccgagctacagaaggaactaagaaggtaaagacagcccacggcaacgatgggggactgcagaccagtagttggcccttgagcctatacctcagccaaggggtgccg

SEQ ID NO: 22034 - DNA, 269 bp, Macaca Mulatta
ggaataatcagcacaccttattttttagttatccacagaggtctataaacacctgtctttgttctctgggttgaatgcatagtaacatttacagaatatgctggaatcttgcttttctatgggcgagtttcctcaaggtttgctttcactgttctatcattccttgtgcccttttctatgaagatgcagtctgcttcttggtcaccctacaccctaggagtgcatgagaaccttcccctgccctggttcttttccagttcttcataaaa

SEQ ID NO: 22035 - DNA, 289 bp, Macaca Mulatta
ctgagagcaagttttacccagttcctctctatcctcccgacgactctggggtcaaactcagcagggcatccgagcccccacggcgcagcgggcctaggctggcataaaaagacgcggagctacgccgccctcaggaagcagcggaggtgtccagcgggagaatgacccaaatcaccgtctaatctctgctgtgaagtggaagcgggaggagggagcgtctcatgacggagggtgtgaagacgctagactggaggaagcagaaaggcgggtatcactggggacgttctga

SEQ ID NO: 22036 - DNA, 827 bp, Macaca Mulatta
  misc_feature (1)...(827): n = A,T,C or G
gggtggcatcgcagctatgggagctcccgggggaaagatcaaccggccccgaacgtaggagctgaagaagaagctgttcaaacgccggcgggtgctgaatcgggagcggcgtctgaggcaccgggtggtcggggctgtgatagaccaagggctgatcacgcggcaccacctcaaaaagcgggcgtccagcgcacgtgccaacattactctgtcagggaagaagcgcagaaaactcctccagcagatccggcttgcccagaaagagaaggcagccatggaagtggaagccccttcaaaaccagccaggactagtgaaccacggctcaaaaggcaaaagaagacaaaagctccccaagatgtagaaatgaaggaccttgaagatgagagctaaacctcttccagtaaaagattctcaattggagccagccttccgattcagtggtttgttttaaaggacgtttgacaaaagccattgccccttttttcactctccagaatttcctccctacaaaatgggcctacttgacctcccctaaccggggaatgtcttttgggaagggaagaaaaggnnnnnnnnnnnnnnnnnnnaaaaatgggccttttcttagcaagtctaatgccaatttgggtaaaaaagtcccctagaccctttgaaaaaacaagatcaattcaataaatttgacattaaatactttgttgttgtgcccacacttggggcacttcgaagaaagctcttttttttaaaactaattcattttgaggccgcctggggacaccgtataaggtttaggtgggaaacatggtcgcaaaatagccagacttctcct

SEQ ID NO: 22037 - DNA, 423 bp, Macaca Mulatta
tatttgaaagaaatgataaaggctgtagtacaagcaagcaatttaaagataagacttgagatttttgaattgagaatttcatggagaatattcagtcaaggagtagactgtggtctgaactaaccattgatgattgttaagtttcccattcttagactgcatcaatccttgtgatccttaacaggttataatatacagctagcatttttctaattgttaaaatatctgttaattaagcatcatgactcagataatttttactagtgtaacgacagtaaaattaccttcaattctctttgaaatgtagagtgcttcctcctaaccattctttaccttttctgatcacacagaattgagaaagattccttatgccactagttactagttgtttgttgagatgtgtaagtcaccagtgtacctgta

SEQ ID NO: 22038 - DNA, 607 bp, Macaca Mulatta
tgttttctttccctgaactcccccaggttctaggacaaatttaataacgtgtaattctcctcaaatacttttgtatgtctcagtgttggcgttttcctccctaaaactaacattaaggctgtgccacgggcatgacttgatttttgttgggcttttgttttcctgcttaaggagaggtgtctttttaggatatgagtgatttattttgcgaaatgaaaattgttcatccaaaacgattctcttataaactattggtaaatgtcacttattcattagtgtttgacataatttttagaatatttattttgaatcaatactttcattatgaaagacttgaagttttgtgtccatccttgcaagccctggtcagtcaagtcccaataaatggtcagcacaaaaaagatactcttgaaaattgctcttcattaaggtattacgttgagtttgcaaccagatgggaaaaatcacaaaaatgagaagagggggagcaggtatcttgttgaggtctggaatattatctcccgttataaacttggtgtaggctgtatattttgaaaataaacatctggttgaggttatttcatttggaaaccttccttagagtcct

SEQ ID NO: 22039 - DNA, 547 bp, Macaca Mulatta
gctaccccggggccccgccgccagccgcggacttcaaactgctggccctgaccgaggcgcgcggaaggtgcccgtccgcccagctctaccacggccaccaccacctgccgctgactgagcagaactgggccggccgcgcggccgagcagcagcgccacgagctcagggcctaccccgcggcgcccacgcccgcagcccccagccccaccggcagcagctcccagccgcccacgcacgaggctgaggccggcgcggcgcacctgctgctggatggcagcggcagcagtctggaggggagcgccctggcggggacccccgaggaggaggagcaggccgtgaccaccgcggctcagatgcaccagccgcccttgctcctcggagacccaggtcgggccagcaaggccagcagggccagcggtgggcgggccaggccggaggacttggccatctagggcccgggtgcctgcctccagacagctgtgtagtgatccttttcttagaaaccaaaaccaaagtgcacttgccaccagcagatagaacctgaaag

SEQ ID NO: 22040 - DNA, 438 bp, Macaca Mulatta
  misc_feature (1)...(438): n = A,T,C or G
cagcctccgctccttcagttcggataggtcttacaccttgaacagaagctcctatgcacgggacagcatgatgattgaagaactccttgtgccatccaaagagcagnnnnnnnnnnnnnnnnnnnnnnnnnnnnnnnnnnnnnnnnnnnnnnnnnnnnnnnnnnnnnnnnnnnnnnnnnnnnnnnnnnnnnnnnnnnnnnnnnnnnnnnnnnnnnnnnnnnnnnnnnnnnnnnnnnnnnnnnnnnnnnnnnnnnnnnnnnnnnnnnnnnnnnnnnnnnnnnnnnnnnnnnnnnnnnnnnnnnnnnnnnnnnnnnnnnnnnnnnnnnnnnnnnnnnnnnnnnnnnnnnnnnnnnnnnnnnnnnnnnnncccatggtggaaggagagggattagccagtaggctggtagaaatgggtcctgcaggggcacaatttttagg

SEQ ID NO: 22041 - DNA, 541 bp, Macaca Mulatta
aatgggggaagaggggaggctaggggagtgctgtgcccattttccagccttggtcagacaggtcacccgggagcctcgaggaaagctctggagggaatcacgtgtactttttcatgaagcttttcgcaaagtacatctaagatacactagtttattggactaatgtccaggagtagacacgattggtggccaagttatctggggacacctaaacaggtcaccgacctacatgacttctcagaacctttaatatgccaatgtgtgtgacagacttacaagaagggagctgagtatccagcctctcccaaacctctttgagcaaagcttctgtccctcccacacctctgacctcacaggcacatcaggccgcagaatgcgctttagaaagcattgttgtaattgagaggggcagggctggagaaggagcaggtagtggggagccaggcttccctcatgcagcctgtggtggatgtgggaaggagatcaacttctcctcactctgggacagacaatgtatggaaactaaaaagaacatgcagca

SEQ ID NO: 22042 - DNA, 652 bp, Macaca Mulatta
ctgaaaacgcctcatcgcttaggcccaaagtcagtgatcagcagcccttctgttcctgtgtcttctgttttttttctggtgaattgttgcttgctgtggacttggtggaggactcagtcagaggggaggaaaggctgggccctgagtacaacggatgccttggatgctgcctccaaagaggttctgccgcagcttttcttctttttcctcatgccccgggaaatagtctttcttcagaattgtcaggctgggcgggtcaacttgtgttccttttccctcaccggcttgcctcttaaacgcctgcacatgtgtgtagaggacaaaagaaagtgaagtcagcacatctgcttctgcccaaatggttggggccctgggcaacagattggagagagagcgcgtgaagggcagttggtcaggcagccctcctggtttcgccgctggccctgatttgaactgctaccacttgggaaagctcaggggtggtccctggttttccctcctggagaatgaggcgcagaggcttcgcctcccgaaggacacagtgtggatgccgctggcctagtgtcctggcctcacagcttccttgcaaggctgtcacaaggaaaagcagccggctggcaccctgagcatacggcctttcagggctccctca

SEQ ID NO: 22043 - DNA, 119 bp, Macaca Mulatta
ctgatcactgtaatccattccatgacccacatagatatttttctccccacatgttaggaaagcagatctcccatggtattcatggacttctctttctgagtggaaattcacaagggtat

SEQ ID NO: 22044 - DNA, 463 bp, Macaca Mulatta
ctcttaggaaggaccctcaggataccctctccgcaccctgtggtcctctagagtagctagctctgaggcccccaaggtgcttacaaagcaggtatggccctcagagatgcagcctgctgctggcttttcagtcagagggttgagggctggccagccaagctgccttgccttggccgctcttattccctccctctgctgtctcacttcaggtccatgtatttcacttttcttaaataaaagaatcaggtaacctttctgcgacttgagtcctgattgaagagggtatgaagcagggcttgtgttggggcccttcacagagggtgaggtgcagtgatggatggggcagcaggaggagtgttgattcttggatctctcttctcttcctccccttgtttgtatcatctccagcagggcctgtaggaaggcatctgggggatggggaagaaggaggcccacaacccaa

SEQ ID NO: 22045 - DNA, 895 bp, Macaca Mulatta
  misc_feature (1)...(895): n = A,T,C or G
gggccttttttcttttttccggcgttcaagatgtcgaagcgaggacgtggtgggtcctctggtgcgaaattccggatttcgttgggtcttccggtaggagctgtgatcaattgtgctgacaacacaggagccaaaaacctgtatatcatctccgtgaaggggatcaagggacggctgaacagacttcccgctgctggtgtgggtgacatggtgatggccacagtcaagaaaggcaaaccagagctcagaaaaaaggtacatccagcagtggtcattcgacaacaaaagtcataccgtataaaagatggcgtgtttctttattttaaagataatgcaggggtcataatgaaacataaaggcgagatgaaaagttccacccttacaggaccagtaccaaatgagtgtgcaaacttgtggccccggaatgcatccaatggctggcaccattgcatggattctccagtatatattgnnnnnnnnnnnnnnnnnnnnncccctactctaagtgataacaaaaataaaacatttaacccttggtcggcacgcctttagcccacaaataaaacctttttcagatccttttcttttgggccgccccgggtctccagtaggttaattaaaaaaagagtctataatctgttttttcataagaaaaacccagggatcaggaaaaaagtcgcactgggaattatctccccaatattaaaaaaacccgcaggaggggccacacataccgcgccttgggaacaaaatatcattatttggagatttcaagtgaagatcattattactggagatccctttttctcgagatagaattcaaaagcttaaatactccaatttatctaacattttagcagtctccgcggcctttggtgaatactttttctaccat

SEQ ID NO: 22046 - DNA, 181 bp, Macaca Mulatta
  misc_feature (1)...(181): n = A,T,C or G
agcaactcttatctaaatgcccctggaaggaatacaaatcagattctggaaagccttactattataattctcaaacaaaagaatctcgctgggccaaacctaaagaacttgaggatcttgaaggnaggataccagaataccattgttgctggaagtcttattacaaaatcaaacctgcatg

SEQ ID NO: 22047 - DNA, 299 bp, Macaca Mulatta
cgaggaagcatttagctgaataagtttaaagccctttattcagagaattctacaagtttgcaaatattttaacaatattaaatgtgcaatagaacttttataaaataattcgaacagagattttacacttaaggtttcaaattgtggcaggtggtactgttgatctcagggcactttctgggattgctcacatttcgctaatgtactgcacttgatgccagtaggaaagaagcttaagtgtcttcagttcaagattgatagagcccttggcattttattgtcacatttttagttctcag

SEQ ID NO: 22048 - DNA, 510 bp, Macaca Mulatta
  misc_feature (1)...(510): n = A,T,C or G
tagcgcctttccttcgaggagctcaaggcatttttcaaaatctgacagtttttctcacaacaaccctgtganagatttcggcctattaaaggaaggcaggaagaactaaaggaagtaattgaacgttttaagaaagatgaacacttggagaaagccttcaaatgtttgacttcaggcgaatgggcacggcactattttctcaacaagaataaaatgcaggagaagttattcaaagaacatgtnnnnnnnnnnnnnnnnnnnnnnnnnnnnnnnnnnnnnnnnnnnnnnnnnnnnnnnnnnnnnnnnnnnnnnnnnnnnnnnnnnnnnnnnnnnnnnnnnnnnnnnnnnggaaacgaaatgacaaaatagaattactggtgggttgtattgccgaactttcagaaattgaggagaacatgctacttagacatggagaaaacgacttcagtgtcatgtattccacaaggaaaaactgtgctcaactctggctgggtcctgctgcatttataa

SEQ ID NO: 22049 - DNA, 934 bp, Macaca Mulatta
gtttgcccaccagctgccagccctaggaaggccagaagcccagcagccacgtggccagtctaccatggggcccaggagctggggaaacacagtaaaggtggtgtatgaaggaaaggctggtagcagagtttttgaggggtcctggatctgggtagggtgggtaggggtggggacagtacctatgcaggatcaggagggacatcagggccacgtgcaggtgatgtctgcattgtccggcttcttttgtaccctagagctaaggggagccccatgctgagcttggccgctctagagtaatgggcccatggccctgcccacccccgtctgtgtgtttctctgcctgtgaggaagggcagggcgatttaggtgagacagttccaccaggcgtgtccatggctgaggcatggcaggaacctctgcttcagggagcttgaggcgtgtgccgcagaaggacgtggccatcctcagcccacaggtgctttaggggtgcaggagtgactgatgacaggccctgccttcctggggccacacaggaggttcccgggggagcaatactaaagaaactgacctttagtccgtttcaccctcatctgctcgcctgagctaagagcctggagagaggaggtcccctggcctgtgggaattaagcaggtccagagtcacatcaagttgcttacttgcaggagctcaggagctcagcctccaggtccagggagggacacgcaacacttggtgtggccagggagttattgttcctgggagagtggacagccttccttggtggggaccagtctacctgcacacggtggctagccttccctgcttctagcagggcacacaatggccacacaacttgcagagcttgcaaaagagaaggaacagtggactcagctacaactgggacattaaatccaccagaaaacctggtatccag

SEQ ID NO: 22050 - DNA, 218 bp, Macaca Mulatta
aggcaactgcctttcccacagaagtcaaagacttgacgaagagaatccgcactgttcttatggccactgcccaaatgaaggagcatgagaaagatcctgaaatgctaattgatctccagtatagcttagccaagtcctatgcaagcaccccagagctcaggaaaacctggcttgatagcatggccaaaattcatgtaaaaaatggagatttttcagag

SEQ ID NO: 22051 - DNA, 802 bp, Macaca Mulatta
  misc_feature (1)...(802): n = A,T,C or G
gtatcaggagcacagatacagtttatgatacttgatggaagaaaatggaattactccaaaaagacaagtgctcaagcagcaaaatccttacttccagcaaaatccaaactgctgtctcttaaatctctgaaactctcttcttccactagaatgctacaagtaactcagtgaaggcccatgaaggaaattgggactagtttataggagaacgtatcaatacagtttataaagccaagaattgctatgatttaagactaagatctgtctttttggtgactaacccttcagttctttcaactcctgttaatacccataatcagtaacctatcaagaaaagcccttatttggaaagtgtgaaatttgtatttggaaaagctgcctggagagaagaactgtgtcctttactgtatttcaacaggactcttttgagggatcaaaattaaaactcctaattatgcattatctttcttttctccagtcctcacaaatacagaaacagtaactgaaattaannnnnnnnnnnnnnnnnnnnnnnnnactcagtttgcagtagacattccttaagtatttgtatttatttatgattatcaattttacataacattaatattgtatcagacctccttatgcaaatgagtatggatgtgcacagtatgtttgatttttattcaccagaatgaatttgatcagaaagcttgtccagatgaaatacgagcactaatattgcaggcagtcataggctgaacttctagaatataagacttgggaatacggaaactttaaagattatccttagacaacg

SEQ ID NO: 22052 - DNA, 788 bp, Macaca Mulatta
  misc_feature (1)...(788): n = A,T,C or G
ggatgggcttcttttaaatgcctcaccacatctggacaagacatccaggaatgcattgcctcctcagcctctagctttcagtgaaatggaaaggattaataagaatatcaaaacctcaatcattgatgcagtagaactggccaaggatcattctgacttaagcaaattgactgagctctccttgaggcggcggcagatgcttctgttagaaaccctgaaggtgaaacagaccatcctggagccaatccctgcttcactgaagttgcccgttgctgtcagttgctactggttgcagcacactgagaccaaaacaaagctacatcatctacaatccttactgctcgcaatgctaatgggacccttgactgccataatcaacagccctggtaaggaagagctgcaggaagatggtgctaagatgttgtatgcagagttccaaagagtgaaggtgcagacacggctgggcacaagactggacttagacacagctcacatcttctgtcagtggcagtcctgtctccagatggggatgtatctcaaccagctgttgtccactcctctcccaaagccagaccctactcgactgtacagtggaagcctggtgcacgggctatgccaacaactgctagcatcgacctcggtaaaagtctcctgaacaggtgtcctgaaggctaacaactttatgaacattctatccaatgcacaaggtcatattccccccactgaaatattcctaccaaaaaggaaaatcaaannnnnnnnnnnnnnnnnnngaaataaacccgaat

SEQ ID NO: 22053 - DNA, 163 bp, Macaca Mulatta
accaagaagatgaaatggcaaaagcacttcttacctttggccctttggtagtcatagtagatgcagtgagctggcaagattatctgggaggcattatacagcatcactgctctagtggagaagcaaatcatgcagttctcataactgggtttgataaaacagg

SEQ ID NO: 22054 - DNA, 736 bp, Macaca Mulatta
tgggccaaggggaagttttcaggactgctcatcccatcaggaactcatggccttgaacaggcttgccaggaagtggggaaaaggcagtgctttccttgacatcacgctagcaagtttctgtcgactcttacgcaggatggtcagaacatcgagtccaggaatacttcgagtgggcagcgcaagtggtgaaggggcttcagggaacaaaccggcaactggaagaggcgctaaagcatctgttcaaggagcgggggctgacactctgatcagtgcttgaagctgtccagaggcacaattccagcctcattcaggccggacaggattcatacaccatcttttctgtgcctcccgaactccctccatccttcccagatactacaggccaaaaaaagacttgcattttttcttaatctgaaggtctcctactaactaagctgagccccgcgtgtgggaatcagatgtacccatccatttgtgatgcactcactgcctctccccaagtcttgggtctgtttgctattttgcatggtgggatctctggcccctcagggacttgagattatataagtactagttcctaagacgttatggaaaataaaacctctgggttaaggtttaagctgctgctgcttcttctccagcctcctgaatgggggactgttaggctgcatatctgtcctccagcaaagcaggactaattgtgtgtccctgagtcacctccctcaggttgggggcc

SEQ ID NO: 22055 - DNA, 803 bp, Macaca Mulatta
  misc_feature (1)...(803): n = A,T,C or G
atttnttttgtggaatatgtttgttcttggactttatgagagattctngtaagaatcatgattttctacacctgtcattgagtcaagaaagtccagtttatgacacgtgtgtacagtgaacaccgtcctagatctgtacgaaatgtgaaatgtttagggacatctccgtgccgtcacttgtgatttgccctcttgtgtattttggtcatattgccagctggaaagtcaaaattttctaacaactttaagttctttgaagacttagtgctgtttttaatccagtttagaaagtaacttaattttaataccactactaagaattcaaaaagttcttctttaatcccattcaatacaactaaaagaacaacactaattggcattactggggctttttcttccttggtttaaaatgtcatttgttgaggaagcattgntagtattatctacttacttgaggctgttaatttttcattacagtgttttgtaaatgtatccacaagaccataatgcattgttttgtgctcaaattgtgttttgtatttaaggcattttgaatgaagtgtattttataagcatttaatatttatgctctttagaatggaacacagaaaacaaaccttataaggcctgattaaattaaccggaaccaataacctgtgtggcccacaaaatctaattctgctaaatgtttcttcaaacacttttttctaattaaaatctttgcaagtgcttgtgtaacttcctgccttacagctgcttgtttgctgagagccacccgcaactgacaagcggctgataagtga

SEQ ID NO: 22056 - DNA, 839 bp, Macaca Mulatta
aggagtctgacaagccttgaataaaacacaagcctccatttctctgtggtgtgtttcgaagagctactagctcctgtgttggcggtgggagtggaaggttcaaaggtggtttccctgagggacaggtatcttttgggtagagggtggaactagcttcctcttactgtcccaactctcttctcctccatggcatttgtgcaggtgtctgttacgcaagcagagggtgggagttcccatccctcctgtgagaaggtcctagcagccctgccccaagcttcctaattcaggacttatttcctacagaagagaaacaaggcaaggtacaggcctggtccccagctctggctctctgcctctccacatgctcatggcctctcccaggctaacactaagcagtgtcatgagtctgagccaggtgggagattaattcctgggggcgcttcagggctgagaagggggaggaatgacaggtccagtaaccgttaccaacagagcagtgcagctgccatccttgacagctccctcctcctcggagaccatgacatagatggtcaggaacccaggctgagaaagacagccaaggggtggggggagcctaggcaaatctggcctctgccaagtcctggcttcagccaggcaagctccagcctccctggctcctcctccttcccagccctatccccaccctgtcacacatacacttaatacgcctggcatctaagtccacccactccagactttggccttagcagtagctagtgtgggaggctgggaagactgggaggagtctcttaaacaaaagcaaaagaatcagctttgggtgctgtagtacctgccag

SEQ ID NO: 22057 - DNA, 1216 bp, Macaca Mulatta
  misc_feature (1)...(1216): n = A,T,C or G
gagcctccctattaaggaccttgccgtagacagcgcctctcctgtctaccaggctgtgattaagaaccagaacaagccggaagatgaggctgacgagtgggcacgccgctcctccaacctgcagtctcgctccttccgcatcctggcccagatgacagggacagaattcannnnnnnnnnnnnnnnnnnnnnnnnnnnnnnnnnnnnnnnnnnnnnnnnnnnnnnnnnnnnnnnnnnnnnnnnnnnnnnnnnnnnnnnnnnnnnnnnnnnnnnnnnnnnnnnnnnnnnnnnnnnnnnnnnnnnnnnnnnnnnnnnnnnnnnnnnnnnnnnnnnnnnnnnnnnnnnnnnnnnnnnnnnnnnnnnnnnnnnnnnnnnnnnnnnnnnnnnnnnnnnnnnnnnnnnnnnnnnnnnnnnnnnnnnnnnnnnnnnnnnnnnnnnnnnnnnnnnnnnnnnnnnnnnnnnnnnnnnnnnnnnnnnnnnnnnnnnnnnnnnnnnnnnnnnnnnnnnnnnnnnnnnnnnnnnnnnnnnnnnnnnnnnnnnnnnnnnnnnnnnnnnnnnnnnnnnnnnnnnnnnnnnnnnnnnnnnnnnnnnnnnnnnnnnnnnnnnnnnnnnnnnnnnnnnnnnnnnnnnnnnnnnnnnnnnnnnnnnnnnnnnnnnnnnnnnnnnnnnnnnnnnnnnnnnnnnnnnnnnnnnnnnnnnnnnnnnnnnnnnnnnnnnnnnnnnnnnnnnnnnnnnnnnnnnnnnnnnnnnnnnnnnnnnnnnnnnnnnnnnnnnnnnnnnnnnnnnnnnnnnnnnnnnnnnnnnnnnnnnnnnnnnnnnnnnnnnnnnnnnnnnnnnnnnnnnnnnnnnnnnnnnnnnnnnnnnnnnnnnnnnnnnnnnnnnnnnnnnnnnnnnnnnnnnnnnnnnnnnnnnnnnnnnnnnnnnnnnnnnnnnnnnnnnnnnnnnnnnnnnnnnnnnnnnnnnnnnnnnnnnnnnnnnggaagtgatgcatgccttgagacagacatggcacaccacctgcttcgtctgtgcggcctgcaagaagcctttcggaaacagcctcttccacatggaagatggggagccctactgcgagaaanagactacatcaatctgttcagcaccaagtgtcatggctgcgatttccccgtggaggccggcgacaagttcattgaagccctgggccacacctggcatgacacctgcttcatttgcg

SEQ ID NO: 22058 - DNA, 4799 bp, Macaca Mulatta
  misc_feature (1)...(4799): n = A,T,C or G
agtcctcctcatggagaagcaaaagctggatcaagcacccttccaccagtgaaatcaaagacaaattttattgaagcagacaagtacttcttgccttttgagttggcatgccagtccaaatgtccccgcatagttagtacatctctagattgcttacannnnnnnnnnnnnnnnnnnnnnnnnnnnnnnnnnnnnnnnnnnnnnnnnnnnnnnnnnnnnnnnnnnnnnnnnnnnnnnnnnnnnnnnnnnnnnnnnnnnnnnnnnnnnnnnnnnnnnnnnnnnnnnnnnnnnnnnnnnnnnnnnnnnnnnnnnnnnnnnnnnnnnnnnnnnnnnnnnnnnnnnnnnnnnnnnnnnnnnnnnnnnnnnnnnnnnnnnnnnnnnnnnnnnnnnnnnnnnnnnnnnnnnnnnnnnnnnnnnnnnnnnnnnnnnnnnnnnnnnnnnnnnnnnnnnnnnnnnnnnnnnnnnnnnnnnnnnnnnnnnnnnnnnnnnnnnnnnnnnnnnnnnnnnnnnnnnnnnnnnnnnnnnnnnnnnnnnnnnnnnnnnnnnnnnnnnnnnnnnnnnnnnnnnnnnnnnnnnnnnnnnnnnnnnnnnnnnnnnnnnnnnnnnnnnnnnnnnnnnnnnnnnnnnnnnnnnnnnnnnnnnnnnnnnnnnnnnnnnnnnnnnnnnnnnnnnnnnnnnnnnnnnnnnnnnnnnnnnnnnnnnnnnnnnnnnnnnnnnnnnnnnnnnnnnnnnnnnnnnnnnnnnnnnnnnnnnnnnnnnnnnnnnnnnnnnnnnnnnnnnnnnnnnnnnnnnnnnnnnnnnnnnnnnnnnnnnnnnnnnnnnnnnnnnnnnnnnnnnnnnnnnnnnnnnnnnnnnnnnnnnnnnnnnnnnnnnnnnnnnnnnnnnnnnnnnnnnnnnnnnnnnnnnnnnnnnnnnnnnnnnnnnnnnnnnnnnnnnnnnnnnnnnnnnnnnnnnnnnnnnnnnnnnnnnnnnnnnnnnnnnnnnnnnnnnnnnnnnnnnnnnnnnnnnnnnnnnnnnnnnnnnnnnnnnnnnnnnnnnnnnnnnnnnnnnnnnnnnnnnnnnnnnnnnnnnnnnnnnnnnnnnnnnnnnnnnnnnnnnnnnnnnnnnnnnnnnnnnnnnnnnnnnnnnnnnnnnnnnnnnnnnnnnnnnnnnnnnnnnnnnnnnnnnnnnnnnnnnnnnnnnnnnnnnnnnnnnnnnnnnnnnnnnnnnnnnnnnnnnnnnnnnnnnnnnnnnnnnnnnnnnnnnnnnnnnnnnnnnnnnnnnnnnnnnnnnnnnnnnnnnnnnnnnnnnnnnnnnnnnnnnnnnnnnnnnnnnnnnnnnnnnnnnnnnnnnnnnnnnnnnnnnnnnnnnnnnnnnnnnnnnnnnnnnnnnnnnnnnnnnnnnnnnnnnnnnnnnnnnnnnnnnnnnnnnnnnnnnnnnnnnnnnnnnnnnnnnnnnnnnnnnnnnnnnnnnnnnnnnnnnnnnnnnnnnnnnnnnnnnnnnnnnnnnnnnnnnnnnnnnnnnnnnnnnnnnnnnnnnnnnnnnnnnnnnnnnnnnnnnnnnnnnnnnnnnnnnnnnnnnnnnnnnnnnnnnnnnnnnnnnnnnnnnnnnnnnnnnnnnnnnnnnnnnnnnnnnnnnnnnnnnnnnnnnnnnnnnnnnnnnnnnnnnnnnnnnnnnnnnnnnnnnnnnnnnnnnnnnnnnnnnnnnnnnnnnnnnnnnnnnnnnnnnnnnnnnnnnnnnnnnnnnnnnnnnnnnnnnnnnnnnnnnnnnnnnnnnnnnnnnnnnnnnnnnnnnnnnnnnnnnnnnnnnnnnnnnnnnnnnnnnnnnnnnnnnnnnnnnnnnnnnnnnnnnnnnnnnnnnnnnnnnnnnnnnnnnnnnnnnnnnnnnnnnnnnnnnnnnnnnnnnnnnnnnnnnnnnnnnnnnnnnnnnnnnnnnnnnnnnnnnnnnnnnnnnnnnnnnnnnnnnnnnnnnnnnnnnnnnnnnnnnnnnnnnnnnnnnnnnnnnnnnnnnnnnnnnnnnnnnnnnnnnnnnnnnnnnnnnnnnnnnnnnnnnnnnnnnnnnnnnnnnnnnnnnnnnnnnnnnnnnnnnnnnnnnnnnnnnnnnnnnnnnnnnnnnnnnnnnnnnnnnnnnnnnnnnnnnnnnnnnnnnnnnnnnnnnnnnnnnnnnnnnnnnnnnnnnnnnnnnnnnnnnnnnnnnnnnnnnnnnnnnnnnnnnnnnnnnnnnnnnnnnnnnnnnnnnnnnnnnnnnnnnnnnnnnnnnnnnnnnnnnnnnnnnnnnnnnnnnnnnnnnnnnnnnnnnnnnnnnnnnnnnnnnnnnnnnnnnnnnnnnnnnnnnnnnnnnnnnnnnnnnnnnnnnnnnnnnnnnnnnnnnnnnnnnnnnnnnnnnnnnnnnnnnnnnnnnnnnnnnnnnnnnnnnnnnnnnnnnnnnnnnnnnnnnnnnnnnnnnnnnnnnnnnnnnnnnnnnnnnnnnnnnnnnnnnnnnnnnnnnnnnnnnnnnnnnnnnnnnnnnnnnnnnnnnnnnnnnnnnnnnnnnnnnnnnnnnnnnnnnnnnnnnnnnnnnnnnnnnnnnnnnnnnnnnnnnnnnnnnnnnnnnnnnnnnnnnnnnnnnnnnnnnnnnnnnnnnnnnnnnnnnnnnnnnnnnnnnnnnnnnnnnnnnnnnnnnnnnnnnnnnnnnnnnnnnnnnnnnnnnnnnnnnnnnnnnnnnnnnnnnnnnnnnagttggcttggacaccttttctggctgcattcagtgtgggtctacaagattgtgatgatactgaagtagcctctctttgcctggaaggtataagatgtgcaatcagaattgcatgcattttcagcattcannnnnnnnnnnnnnnnnnnnnnnnnnnnnnnnnnnnnnnnnnnnnnnnnnnnnnnnnnnnnnnnnnnnngaaatgaaacagaagaacattgacacaataaaaacacttatcacagtggctcatacagatggaaattatttaggaaattcgtggcatgannnnnnnnnnnnnnnnnnnnnnnnnnnnnnnnnnnnnnnnnnnnnnnnnnnnnnnnnnnnnnnnnnnnnnnnnnnnnnnnnnnnnnnnnnnnnnnnnnnnnnnnnnnnnnnnnnnnnnnnnnnnnnnnnnnnnnnnnnnnnnnnnnnnnnnnnnnnnnnnnnnnnnnnnnnnnnnnnnnnnnnnnnnnnnnnnnnnnnnnnnnnnnnnnnnnnnnnnnnnnnnnnnnnnnnnnnnnnnnagaatattcacaggatctacaaggctagatggaaatgctattgngtggattttgtccgttggctctgtgctgtgtctatggatgaattactttccacgacacacccaagaatgtttagtctacaaaaaatagtagaaatatcatattacaacatgggaagaataagattgcagtggtctcgaatttgggaagttattggagatcattttaataaggtnnnnnnnnnnnnnnnnnnnnnnnnnnnnnnnnnnnnnnnnnnnnnnnnnnnnnnnnnnnnnnnnnnnnnnnnnnnnnnnnnnnnnnnnnnnnnnnnnnnnnnnnnnnnnnnnnnnnnnnnnnnnnnnnnnnnnnnnnnnnnnnnnnnnnnnnnnnnnnnnnnnnnnnnnnnnnnnnnnnnnnnnnnnnnnnnnnnnnnnnnnnnnnnnnnnnnnnnnnnnnnnnnnnnnnnnnnnnnnnnnnnnnnnnnnnnnnnnnnnnnnnnnnnnnnnnnnnnnnnnnnnnnnnnnnnnnnnnnnnnnnnnnnnnnnnnnnnnnnnnnnnnnnnnnnnnnnnnnnnnnnnnnnnnnnnnnnnnnnnnnnnnnnnnnnnnnnnnnnnnnnnnnnnnnnnnnnnnnnnnnnnnnnnnnnnnnnnnnnnnnnnnnnnnnnnnnnnnnnnnnnnnnnnnnnnnnnnnnnnnnnnnnnnnnnnnnnnnnnnnnnnnnnnnnnnnnnnnnnnnnnnnnnnnnnnnnnnnnnnnnnnnnnnnnnnnnnnnnnnnnnnnnnnnnnnnnnnnnnnnnnnnnnnnnnnnnnnnnnnnnnnnnnnnnnnnnnnnnnnnnnnnnnnnnnnnnnnnnnnnnnnnnnnnnnnnnnnnnnnnnnnnnnnnnnnnnnnnnnnnnnnnnnnnnnnnnnnnnnnnnnnnnnnnnnnnnnnnnnnnnnnnnnnnnnnnnnnnnnnnnnnnnnnnnnnnnnnnnnnnnnngaaagctgaatggatgacaacaacttgcaatcatgcactttatgcaatctgtgatgtattcactcagtatttagaagtactcagtgatgtacttttggatgatatttttgctcagctctactggtgtgtgcagcaagnagacaatgagcagttagcacgatctggtacaaannnnnnnnnnnnnnnnnnnnnnnnnnnnnnnnnnnnnnnnnnnnnnnnnnnnnnnnnnnnnnnnnnnnnnnnnnnnnnnnnnnnnnnnnnnnnnnnnnnnnnnnnnnnnnnnttgacctggcggcccacttctggagaaactgccccncccctccatctcctgtaagtgaaaagccattgnnnnnnnnnnnnnnnnnnnnnnnnnnnnnnnnnnnnnnnnnnnnnnnnnnnnnnnnnnnnnnnnnnnnnnnnnnnnnnnnnnnnnnnnnnnnnnnnnnnnnnnnnnnnnnnnnnnnnnnnnnnnnnnnnnnnaatttccagaacaaaaattgtttgctgccctgttgattaaatgtgttgtgcagctggaactcatccagactatcgacaacattgtcttcttcccagccacaagtaagaaagaagatgcggaaaacttagctgcag

SEQ ID NO: 22059 - DNA, 662 bp, Macaca Mulatta
  misc_feature (1)...(662): n = A,T,C or G
cttgaaagcgtaacaaagtttcctattccacattgttcatttctaacactcatgaaaactattctaaagaaggcaggagccaaggctgcaagtgaacgtgcaggtttgagaatggctgtgataaggaccagctggtattaactgataactttgtctttgggtttttgttgttttgtctttctagtccctacctctatttaaattatggataactcgaaagacagctcatgtgaaggccagtaatgatttttttgaagtttaaatggtgtgaaataaatttctctnnnnnnnnnnnnnnnnnnnnnnnnnnnnnnnnnnnnnnnnnnnnnnnnnnnnnnnnnnnnnnnnnnnnnnnnnnnnnnnnnnnnnnnnnnnnnnnnnnnnnnnnnnnnnnnnnnnnnnnnnnnnnnnnnnnnnnnnnnnnnnnnnnnnnnnnnnnnnnnnnnnnnnnnnnnnnnnnnnnnnnnnnnnnnnnnnnnnnnnnnnnnnnnnnnnnnnnnnnnnnnnnnnnnnnnnnnnnnnnnnnnnnnnnnnnnnnnnnnnnnnnnnnnnnnnnnnnnnnnnnnnnnnnnnnnnnnnnnnnnnnnnnnnnnnnnnnnnnnnnnnnnnnnnnnnnnnnnnnnnnnnnnnnnnnnnnnnnnnnnnnnnnnnnnnnnnnnnnn

SEQ ID NO: 22060 - DNA, 958 bp, Macaca Mulatta
  misc_feature (1)...(958): n = A,T,C or G
tgaagaaagaaaacaaaacaaagtggaagctaaattaagagctaaacannnnnnnnnnnnnnnnnnnnnnnnnnnnnnnnnnnnnnnnnaaatctctagaagaaaagattggatgcttgctgaaattttcaggtgatttagatgatcagacctgtagagaagatttacacatacttttctcaaatcatggtgaaataaaatggatagacttcgtcagaggagcaaaagaggnaggggataattctatttaaagaaaaagccaaggaagctttgggtaaagccaaagatgcaaataatggtaacctacaattnnnnnnnnnnnnnnnnnnnnnnnnnnnnnnnnnnnnnnnnnnnnnnnnnnnnnnnnnnnnnnnnnnnnnnnnnnnnnnnnnnnnnnnnnnnnnnnnnnnnnnnnnnnnnnnnnnnnnnnnnnnnnnnnnnnnnnnnnnnnnnnnnnnnnnnnnnnnnnnnnnnnnnnnnnnnnnnnnnnnnnnnnnnnnnnnnnnnnnnnnnnnnnnnnnnnnnnnnnnnnnnnnnnnnnnnnnnnnnnnnnnnnnnnnnnnnnnnnnnnnnnnnnnnnnnnnnnnnnnnnnnnnnnnnnnnnnnnnnnnnnnnnnnnnnnnnnnnnnnnnnnnnnnnnnnnnnnnnnnnnnnnnnnnnnnnnnnnnnnnnnnnnnnnnnnnnnnnnnnnnnnnnnnnnnnnnnnnnnnnnnnnnnnnnnnnnnnnnnnnnnnnnnnnnnnncaatgtccacctgtgagaaaggaaaaattttttgttgttgtttaacttgtctttttgttatgcaaatgagatttctttgaatgtatagttctgtttgtgttatttcagatgattcaaatatcaaaaggaagattcttccattaaattgcctttgtaatatgagaatgtattagtacaaactaataaaatatatgctatatgaaaagagcaaaaac

SEQ ID NO: 22061 - DNA, 725 bp, Macaca Mulatta
gggctcttccggtctctctggtctcggctgcagaagcgagatgacgaagggaacgtcatcgtttggaaagcgtcgcaataagacgcacacattgtgccgccgctgtggctctaaggcctaccaccttcagaagtcgacctgtggcaaatgtggctaccctgccaagcgcaagagaaagtataactggagtgccaaggctaaaagacgaaataccaccggaactggtcgaatgaggcacctaaaaattgtataccgtagattcaggcatggattccgtgaaggaacaacacctaaacccaagagggcagctgttgcagcatctagttcatcttaagaatgtcaacgattagtcatgcaataaatgttctggttttaaaaaatacatatctggtgtgtgctgaggtatttttaatcagttagacttgtagtatcagtgaaataatgtaggtttaaagactgggctagcttaataccagatttacttgttaagtgactgttctggaatgtttcctttggactggggttgtaatgcggtttaaggcaatgactaacaagcagaattccaggagtccttgaagcagagggcactggaagacaatacagcagattaaaatagcacagctcatgtggcatagatgggtatttaagacattcgagtaaattggaagagcatgatgttaatacctatacagtcgtgaacctataggaattacacacacgtgtat

SEQ ID NO: 22062 - DNA, 3040 bp, Macaca Mulatta
  misc_feature (1)...(3040): n = A,T,C or G
taagtgccaagaattcaagagccccacagccaatattcagttacagatttgaaaaagatactttctgttaaagaagaaagccttgtgattaatctggaaaaggcagagtggtggaaacaagcaggactaaatctgaaaatgatggaaacgttggaacatctgaatacatattnnnnnnnnnnnnnnnnnnnnnnnnnnnnnnnnnnnnnnnnnnnnnnnnnnnnnnnnnnnnnnnnnnnnnnnnnnnnnnnnnnnnnnnnnnnnnnnnnnnnnnnnnnnnnnnnnnnnnnnnnnnnnnnnnnnnnnnnnnnnnnnnnnnnnnnnnnnnnnnnnnnnnnnnnnnnnnnnnnnnnnnnnnnnnnnnnnnnnnnnnnnnnnnnnnnnnnnnnnnnnnnnnnnnnnnnnnnnnnnnnnnnnnnnnnnnnnnnnnnnnnnnnnnnnnnnnnnnnnnnnnnnnnnnnnnnnnnnnnnnnnnnnnnnnnnnnnnnnnnnnnnnnnnnnnnnnnnnnnnnnnnnnnnnnnnnnnnnnnnnnnnnnnnnnnnnnnnnnnnnnnnnnnnnnnnnnnnnnnnnnnnnnnnnnnnnnnnnnnnnnnnnnnnnnnnnnnnnnnnnnnnnnnnnnnnnnnnnnnnnnnnnnnnnnnnnnnnnnnnnnnnnnnnnnnataaagaagcatgttctttgacacttcaagaagaaagtcctattgttcatgttaataaaaccctggaggaaataaatcaggaaaggggaacagataatgtcattgaaattcaagcgtcagnnnnnnnnnnnnnnnnnnnnnnnnnnnnnnnnnnnnnnnnnnnnnnnnnnnnnnnnnnnnnnnnnnnnnnnnnnnnnnnnnnnnnnnnnnnnnnnnnnnnnnnnnnnnnnnnnnnnnnnnnnnnnnnnnnnnnnnnnnnnnnnnnnnnnnnnnnnnnnnnnnnnnnnnnnnnnnnnnnnnnnnnnnnnnnnnnnnnnnnnnnnnnnnnnnnnnnnnnnnnnnnnnnnnnnnnnnnnnnnnnnnnnnnnnnnnnnnnnnnnnnnnnnnnnnnnnnnnnnnnnnnnnnnnnnnnnnnnnnnnnnnnnnnnnnnnnnnnnnnnnnnnnnnnnnnnnnnnnnnnnnnnnnnnnnnnnnnnnnnnnnnnnnnnnnnnnnnnnnnnnnnnnnnnnnnnnnnnnnnnnnnnnnnnnnnnnnnnnnnnnnnnnnnnnnnnnnnnnnnnnnnnnnnnnnnnnnnnnnnnnnnnnnnnnnnnnnnnnnnnnnnnnnnnnnnnnnnnnnnnnnnnnnnnnnnnnnnnnnnnnnnnnnnnnnnnnnnnnnnnnnnnnnnnnnnnnnnnnnnnnnnnnnnnnnnnnnnnnnnnnnnnnnnnnnnnnnnnnnnnnnnnnnnnnnnnnnnnnnnnnnnnnnnnnnnnnnnnnnnnnnnnnnnnnnnnnnnnnnnnnnnnnnnnnnnnnnnnnnnnnnnnnnnnnnnnnnnnnnnnnnnnnnnnnnnnnnnnnnnnnnnnnnnnnnnnnnnnnnnnnnnnnnnnnnnnnnnnnnnnnnnnnnnnnnnnnnnnnnnnnnnnnnnnnnnnnnnnnnnnnnnnnnnnnnnnnnnnnnnnnnnnnnnnnnnnnnnnnnnnnnnnnnnnnnnnnnnnnnnnnnnnnnnnnnnnnnnnnnnnnnnnnnnnnnnnnnnnnnnnnnnnnnnnnnnnnnnnnnnnnnnnnnnnnnnnnnnnnnnnnnnnnnnnnnnnnnnnnnnnnnnnnnnnnnnnnnnnnnnnnnnnnnnnnnnnnnnnnnnnnnnnnnnnnnnnnnnnnnnnnnnnnnnnnnnnnnnnnnnnnnnnnnnnnnnnnnnnnnnnnnnnnnnnnnnnnnnnnnnnnnnnnnnnnnnnnnnnnnnnnnnnnnnnnnnnnnnnnnnnnnnnnnnnnnnnnnnnnnnnnnnnnnnnnnnnnnnnnnnnnnnnnnnnnnnnnnnnnnnnnnnnnnnnnnnnnnnnnnnnnnnnnnnnnnnnnnnnnnnnnnnnnnnnnnnnnnnnnnnnnnnnnnnnnnnnnnnnnnnnnnnnnnnnnnnnnnnnnnnnnnnnnnnnnnnnnnnnnnnnnnnnnnnnnnnnnnnnnnnnnnnnnnnnnnnnnnnnnnnnnnnnnnnnnnnnnnnnnnnnnnnnnnnnnnnnnnnnnnnnnnnnnnnnnnnnnnnnnnnnnnnnnnnnnnnnnnnnnnnnnnnnnnnnnnnnnnnnnnnnnnnnnnnnnnnnnnnnnnnnnnnnnnnnnnnnnnnnnnnnnnnnnnnnnnnnnnnnnnnnnnnnnnnnnttgaatgaaattcttccattatggaactaaaagaaatctcaggttttttaccacttgtgacttcatataatcagaccagctactggaaagactctagttgtaaacctaatatagtgcagaatactccttttctaattaatatagaatcaaggagaccggcttataactcctttctaaaccacagtgattcagagtcagatgtcttttctttgggtctaacacaaatgaactgtgaaactataaaaccaccaagtgacgctcagaagagagtgtcaattgtcccccgttttataaattctcagaaaaggagaacacatgaagcaaaaggtttcataaataaagaagtatctgaccctatcttttcactagagggctctcattctcctcttcattggaacttaaagaaaactatatgggaacaagagaatcacccgttcaacttacaatatggtgcagagcagactacatgtaacaaattgtactctcagaaaggtaatttattcactgatcagcaaaaatgtctatcagatgagttcgaaggcctcacatgtgaaagttcaaatgatgagactttctggagagaattaccatctgtccccagtttggatttattttgtgcttctgattctaatgcaaatcaaaaagaattcaacagcctttatttctaccaaagagctggaaaaagtttaggacagaaaaggcatcctgaatcttcatttaactcaggagacaaggaatcattaacaggt

SEQ ID NO: 22063 - DNA, 483 bp, Macaca Mulatta
ctgccctctgtttcacggcagctccccgacctgtgttgctgcatgcacgccccacagcccgacacagccagaggaccaacaggccaagaaatgcaagatcttgggagggttctcagcagtggaatctgagaccctgaggccacggccaggcctgctagtccggctagagcaaggtccactcctggcaagagtgtcactggcttcactggatgcttccctctcagggtcctgggactgcaccagacgccctgagggaatggcccgccctggcctgtacccacttcaaaatatgatctatccaaagagccaggcccaagagcgcctaggtcagggggctcaggctaccaggagcacgcctttgtgcccccagcaacccagttgacctttaattgacgctttccaaaccagccctgcagcaccacttgccatgtgggaggccataagggtgtgcgagcctggctgccattctagtctgtcctttct

SEQ ID NO: 22064 - DNA, 491 bp, Macaca Mulatta
gagactgtgaaccaggaagagaagagtggcccaggtgcaagtgggggcagcagcggggaccctgatggcttcttcaactcaaaggtggcattgtttgcggctgtcggtgccggttgcgtcatcttcctgctcatcatcatcttcctgacggtcctactactgaagctacgcaagcggcaccgcaagcacacgcagcagcgggcggctgccctctcgctcagtaccctggccagtcccaaggggggcagtggcacagcgggcaccgagcccagcgacatcatcattcccttacggactacagagaacaactactgcccccactatgagaaggtgagtggggactacgggcaccccgtctacatcgtccaggagatgccgccccagagcccggcgaacatctactacaaggtctgagtgcccagtacggcctcaggcccctgagggacagtcggcctggaccggacctctcctttcgcccccacgccccctcc

SEQ ID NO: 22065 - DNA, 163 bp, Macaca Mulatta
agttttcacattggcagtggctgtcctgaccctcaggcctatgctcagtccatcgcagatgtccggctcgtgtttgaaatgggcaccgagctgggtcacaagatgcacgttctggaccttggtggcggcttccctggcacagaaggggccaaagtgagatttg

SEQ ID NO: 22066 - DNA, 2848 bp, Macaca Mulatta
  misc_feature (1)...(2848): n = A,T,C or G
cagggtattaatggcattcttgctgatgaaatgggccttggtaaaacagtacagagcattgcccttctggcccatctggctgannnnnnnnnnnnnnnnnnnnnnnnnnnnnnnnnnnnnnnnnnnnnnnnnnnnnnnnnnnnnnnnnnnnnnnnnnnnnnnnnnnnnnnnnnnnnnnnnnnnnnnnnnnnnnnnnnnnnnnnnnnnnnnnnnnnnnnnnnnnnnnnnnnnnnnnnnnnnnnnnnnnnnnnnnnnnnnnnnnnnnnnnnnnnnnnnnnnnnnnnnnnnnnnnnnnnnnnnnnnnnnnnnnnnnnnnnnnnnnnnnnnnnnnnnnnnnnnnnnnnnnnnnnnnnnnnnnnnnnnnnnnnnnnnnnnnnnnnnnnnnnnnnnnnnnnnnnnnnnnnnnnnnnnnnnnnnnnnnnnnnnnnnnnnnnnnnnnnnnnnnnnnnnnnnnnnnnnnnnnnnnnnnnnnnnnnnnnnnnnnnnnnnnnnnnnnnnnnnnnnnnnnnnnnnnnnnnnnnnnnnnnnnnnnnnnnnnnnnnnnnnnnnnnnnnnnnnnnnnnnnnnnnnnnnnnnnnnnnnnnnnnnnnnnnnnnnnnnnnnnnnnnnnnnnnnnnnnnnnnnnnnnnnnnnnnnnnnnnnnnnnnnnnnnnnnnnnnnnnnnnnnnnnnnnnnnnnnnnnnnnnnnnnnnnnnnnnnnnnnnnnnnnnnnnnnnnnnnnnnnnnnnnnnnnnnnnnnnnnnnnnnnnnnnnnnnnnnnnnnnnnnnnnnnnnnnnnnnnnnnnnnnnnnnnnnnnnnnnnnnnnnnnnnnnnnnnnnnnnnnnnnnnnnnnnnnnnnnnnnnnnnnnnnnnnnnnnnnnnnnnnnnnnnnnnnnnnnnnnnnnnnnnnnnnnnnnnnnnnnnnnnnnnnnnnnnnnnnnnnnnnnnnnnnnnnnnnnnnnnnnnnnnnnnnnnnnnnnnnnnnnnnnnnnnnnnnnnnnnnnnnnnnnnnnnnnnnnnnnnnnnnnnnnnnnnnnnnnnnnnnnnnnnnnnnnnnnnnnnnnnnnnnnnnnnnnnnnnnnnnnnnnnnnnnnnnnnnnnnnnnnnnnnnnnnnnnnnnnnnnnnnnnnnnnnnnnnnnnnnnnnnnnnnnnnnnnnnnnnnnnnnnnnnnnnnnnnnnnnnnnnnnnnnnnnnnnnnnnnnnnnnnnnnnnnnnnnnnnnnnnnnnnnnnnnnnnnnnnnnnnnnnnnnnnnnnnnnnnnnnnnnnnnnnnnnnnnnnnnnnnnnnnnnnnnnnnnnnnnnnnnnnnnnnnnnnnnnnnnnnnnnnnnnnnnnnnnnnnnnnnnnnnnnnnnnnnnnnnnnnnnnnnnnnnnnnnnnnnnnnnnnnnnnnnnnnnnnnnnnnnnnnnnnnnnnnnnnnnnnnnnnnnnnnnnnnnnnnnnnnnnnnnnnnnnnnnnnnnnnnnnnnnnnnnnnnnnnnnnnnnnnnnnnnnnnnnnnnnnnnnnnnnnnnnnnnnnnnnnnnnnnnnnnnnnnnnnnnnnnnnnnnnnnnnnnnnnnnnnnnnnnnnnnnnnnnnnnnnnnnnnnnnnnnnnnnnnnnnnnnnnnnnnnnnnnnnnnnnnnnnnnnnnnnnnnnnnnnnnnnnnnnnnnnnnnnnnnnnnnnnnnnnnnnnnnnnnnnnnnnnnnccaggcaaggagagcctcatcactgacagtggaaagctgtatgcccttgatgtcctgctgactcggctcaagtctcaagggcatagggtccttatctactcccagatgaccaggatgatagacctgctggagnnnnnnnnnnnnnnnnnnnnnnnnnnnnnnnnnnnnnnnnnnnnnnnnnnnnnnnnnnnnnnnnnnnnnnnnnnnnnnnnnnnnnnnnnnnnnnnnnnnnnnnnnnnnnnnnnnnnnnnnnnnnnnnnnnnnnnnnnnnnnnnnnnnnnnnnnnnnnnnnnnnnnnnnnnnnnnnnnnnnnnnnnnnnnnnnnnnnnnnnnnnnnnnnnnnnnnnnnnnnnnnnnnnnnnnnnnnnnnnnnnnnnnnnnnnnnnnnnnnnnnnnnnnnnnnnnnnnnnnnnnnnnnnnnnnnnnnnnnnnnnnnnnnnnnnnnnnnnnnnnnnnnnnnnnnnnnnnnnnnnnnnnnnnnnnnnnnnnnnnnnnnnnnnnnnnnnnnnnnnnnnnnnnnnnnnnnnnnnnnnnnnnnnnnnnnnnnnnnnnnnnnnnnnnnnnnnnnnnnnnnnnnnnnnnnnnnnnnnnnnnnnnnnnnnnnnnnnnnnnnnnnnnnnnnnnnnnnnnnnnnnnnnnnnnnnnnnngaagaaaaaggaagatgaattggatgggaaaaggagaaaagagggtgtgaacctggtgatcccatttgttccctcggctgataactccaacctctctgctgacggagatgactccttcattagcgtggactcagccatgccaagccctttcagtgagnnnnnnnnnnnnnnnnnnnnnnnnnnnnnnnnnnnnnnnnnnnnnnnnnnnnnnnnnnnnnnnnnnnnnnnnnnnnnnnnnnnnnnnnnnnnnnnnnnnnnnnnnnnnnnnnnnnnnnnnnnnnnnnnnnnnnnnnnnnnnnnnnnnnnnnnnnnnnnnnnnnnnnnnnnnnnnnnnnnnnnnnnnnnnnnnnnnnnnnnntcagcccgaagccgaggccgccccaaaggttcaggaagcacagccaaaggagcagggaaggtccggagccgaaagtccacagcaggcagcgctgctgcaatggcaggagccaaagccggggctgcagcggcctctgcggctgcctatgctgcatacgggtacaatgtgtctaaag

SEQ ID NO: 22067 - DNA, 185 bp, Macaca Mulatta
cagcacagagcagtggccagaccacccaaaggagctccgcctggactttggctcaacggtgccactgaggacccgtgtgaatcgccagctcattctcaccaatcactccccaatacagacccctttctccctcgagtttgagtacttcgggagcccccaaaacagcctcagcaaaaagaccagcc

SEQ ID NO: 22068 - DNA, 763 bp, Macaca Mulatta
ggggcggggggaggaagcagtgagcccaggagtctcggccagtcctgcctgcccaccaggaggatgaaggtctccgtggctctcctctcctgcctcatgcttgttgctgcccttggatcccaggcccaggttacaaatgatgcagagacagagttcatgtcaaagcttctactgaaaaatccagtagttctgagcagctttcaccttgctactgactgctgcatctcctacatctcacaaagcatcccgtgttcactcatggaaagttattttgaaacgagcagcgagtgctccaagccgggtgtcatcttcctcaccaagaaggggcgacaagtctgtgccaaacccaatggtccgggagttcagaattgcatgaaaaagctgaagtcctaaccaatataataataaagagacaaaagaggccagccaaccacctccaacacctcctagatctgagcccggaacaagtgttgcagagaagcagaaaaagagaggactccatccaggtgacactggtggtggcaacagcttccagattctggaagcagcagtgccagcacacataccccatgaccagtgctggaggtcagcaatgctaaccacaatgcccagcaacagtgacagcattcacaccaggttgactcttgtggcatgagtttggatgtggcattggaagctgggtctctctaggattcgaacctccgcctcccaagtttcaggcaattctccctgcctcagccctcccttagtagcctgggaatac

SEQ ID NO: 22069 - DNA, 728 bp, Macaca Mulatta
gctgttaatcagataagcagaatacattctatgtgacctacctttctttatatgtgaaatgtgggaatgttaggaatttctttaccacaaagtccctcttcatatgccagttgtaggaatttaaaggtatttttgtgataattgtctatcctgagaaggttcaggattctaaaaagtaacacatttttatttcataaataaagtctagctctctcttgcacgatttttttgttagacacaaatgccagaccctaagaccttcaagcagcactttgagagcaagcatcctaagactccacttcctccagaattagctgatgttcaggcataaggttgtttacaggtaactcacctctttttctattggtttgttaatatcagggttgtatacaagaccaaaactgtcttctgttattgtgaaattaatttctgccttctgagattttattgcttcccctttttaagttaatgtgtaacttagtcccttttttctcagactgtttcctttcattgccttagaaacatccatatttttactactgtagccaaaaatggggagatgagtacatgctagccatctctgatccaagaatggaagaaacgtatcagtttaaggaaaatagtgattacaaagatatttgagagtttccctctcaaaaacaatgtacaccaatgttcgtgagcacctctttacaattagtttacttatagtacatagcagaggttct

SEQ ID NO: 22070 - DNA, 867 bp, Macaca Mulatta
atgggccacacacggaggcaggaaatatcaccatccaagtgtccatacctcaagttctttcagctcttggtgctggcttgtctttctcatttctgttcaggtgttatccacgtgaccaaggaagtgaaagaagtggcaacgctgtcctgtggtcacaatgtttctgttgaagagctggcacaaactcgcatctactggcaaaaggagaagaaaatggtgctgactatgatgtctggggacatgaatatatggcccgagtacaagaaccggaccatctttgatatcacaaataacctctccattgtgattctggctctgcgcccatctgacgagggcacatacgagtgtgttgttctgaagtatgaaaaagatgctttcaagcgggaacacctggctgaagtgatgttatccgtcaaagctgacttccctacacctagtataactgactctgaaattccaccttctaacattagaaggataatttgctcaaactctggaggttttccagagcctcacctctcctggttggaaaatggagaagaattaaatgccatcagcacaacagtttcccaagatcctgaaactgagctctatactgttagcagcaaactggatttcaatatgacaaccaatcacagtttcatgtgtctcatcaagtatggacatttaagagtgaatcagaccttcaactggaacacacccaagcaagagcattttcctgataacctgctcccatcctgggccattatcctaatctcagtaaatggaatttttgtgatatgctgcctgacctactgttttgccccaaggtgcagagagagaagaaggaatgagacattgagaagggaaagtgtacgccctgtatga

SEQ ID NO: 22071 - DNA, 579 bp, Macaca Mulatta
  misc_feature (1)...(579): n = A,T,C or G
gtagtgctccccagcttttccttccccaccccccggccttagatgcctcctcgcttttcaatctcttaatctaaatgctttttaaagagattatttgtttagatgtaggcnnnnnnnnnnnnnnnnnnnnnctctaccagaactaagcactttgttaatttggggggaaaagaatagatatggggaaataannnnnnnnnnnnnnnnngnnnnnnnnnnnnnnngagcaatttgattgaagagaatcttttggattttaagcagttcgaaataatagcaattcatgannnnnnnnnnnnnnnnnnnnnnnnnnnnngttcaattatgttaccttttcatcccctttaggagcgttttcagattttggttgctaagacctgaatcccacattgatctcgagtagaatccttggtgtggttactggtgtctgctcagctgtcccctcattatactaatgtgatgcttacattatgtccctgtggattagaatagtgtcactgttactccttaaggaactcagtacccagaacagccagtttgactgtgattcagagccacagtctaactgagcacctttga

SEQ ID NO: 22072 - DNA, 415 bp, Macaca Mulatta
gcggctgtaatgtgcaatgatgtgttttattttccttgatgcttaacattactaacaattgcaaaaataatactgaggagcactactttgcattgtttatagttggagttttggatactgatcataaatcatgaatctggcttattaatgcttaacttcagcgcttttgagttgtgtgtatgtgtattttttctccctcccaaccccgcccttttttttaagaataaggacaagtgcttacaatctgctcaagcaattgtttttcagatgttggaattcagcaaagagtgacctctctggccattctaaaattttaatgttgtgtcctaaatctggtggaggaaaagcatgcgctgttgaaccaagctgctcactggacacgtatttgtgtccccaggagattatttgtcaggca

SEQ ID NO: 22073 - DNA, 448 bp, Macaca Mulatta
  misc_feature (1)...(448): n = A,T,C or G
gatgtcagcgcctgtgtggccgcgggannnnnnnnnnnnnnnnnnnnnnnnnnnnnnnnnnnnnnnnnnnnnnnnnnnnnnnnnnnnnnnnnnnnnnnnnnnnnnnnnnngggttcggtccgagaccggtgggaggctcccggagcgcagtctgagcccagcccaccccgcgccggcggccatggcgggcactctggacctggacaagggctgcacggtggaggagctgctccgcgggtgcatcgaagccttcgnnnnnnnnnnnnnnnnnnnnnnnnnnnnnnnnnnnnnnnnnnnnnnnnnnnnnnnnnnnnnnnnnnnnnnnnnnnnnnnnnnnnnnnnnnnnnnnnnnnnnnnnncggcctccttaactctctccttcacctaccaacaatcccggaaagacaactccaattccctgcaggtgaaaacgtgccacctggtcagg

SEQ ID NO: 22074 - DNA, 2358 bp, Macaca Mulatta
  misc_feature (1)...(2358): n = A,T,C or G
aggtttgatttaattttggatgagattgttcttgcagcaagatgttaataagacaaaatctannnnnnnnnnnnnnnnnnnnnnnnnnnnnnnnnnnnnnnnnnnnnnnnnnnnnnnnnnnnnnnnnnnnnnnnnnnnnnnnnnnnnnnnnnnnnnnnnnnnnnnnnnnnnnnnnnnnnnnnnnnnnnnnnnnnnnnnnnnnnnnnnnnnnnnnnnnnnnnnnnnnnnnnnnnnnnnnnnnnnnnnnnnnnnnnnnnnnnnnnnnnnnnnnnnnnnnnnnnnnnnnnnnnnnnnnnnnnnnnnnnnnnnnnnnnnnnnnnnnnnnnnnnnnnnnnnnnnnnnnnnnnnnnnnnnnnnnnnnnnnnnnnnnnnnnnnnnnnnnnnnnnnnnnnnnnnnnnnnnnnnnnnnnnnnnnnnnnnnnnnnnnnnnnnnnnnnnnnnnnnnnnnnnnnnnnnnnnnnnnnnnnnnnnnnnnnnnnnnnnnnnnnnnnnnnnnnnnnnnnnnnnnnnnnnnnnnnnnnnnnnnnnnnnnnnnnnnnnnnnnnnnnnnnnnnnnnnnnnnnnnnnnnnnnnnnnnnnnnnnnnnnnnnnnnnnnnnnnnnnnnnnnnnnnnnnnnnnnnnnnnnnnnnnnnnnnnnnnnnnnnnnnnnnnnnnnnnnnnnnnnnnnnnnnnnnnnnnnnnnnnnnnnnnnnnnnnnnnnnnnnnnnnnnnnnnnnnnnnnnnnnnnnnnnnnnnnnnnnnnnnnnnnnnnnnnnnnnnnnnnnnnnnnnnnnnnnnnnnnnnnnnnnnnnnnnnnnnnnnnnnnnnnnnnnnnnnnnnnnnnnnnnnnnnnnnnnnnnnnnnnnnnnnnnnnnnnnnnnnnnnnnnnnnnnnnnnnnnnnnnnnnnnnnnnnnnnnnnnnnnnnnnnnnnnnnnnnnnnnnnnnnnnnnnnnnnnnnnnnnnnnnnnnnnnnnnnnnnnnnnnnnnnnnnnnnnnnnnnnnnnnnnnnnnnnnnnnnnnnnnnnnnnnnnnnnnnnnnnnnnnnnnnnnnnnnnnnnnnnnnnnnnnnnnnnnnnnnnnnnnnnnnnnnnnnnnnnnnnnnnnnnnnnnnnnnnnnnnnnnnnnnnnnnnnnnnnnnnnnnnnnnnnnnnnnnnnnnnnnnnnnnnnnnnnnnnnnnnnnnnnnnnnnnnnnnnnnnnnnnnnnnnnnnnnnnnnnnnnnnnnnnnnnnnnnnnnnnnnnnnnnnnnnnnnnnnnnnnnnnnnnnnnnnnnnnnnnnnnnnnnnnnnnnnnnnnnnnnnnnnnnnnnnnnnnnnnnnnnnnnnnnnnnnnnnnnnnnnnnnnnnnnnnnnnnnnnnnnnnnnnnnnnnnnnnnnnnnnnnnnnnnnnnnnnnnnnnnnnnnnnnnnnnnnnnnnnnnnnnnnnnnnnnnnnnnnnnnnnnnnnnnnnnnnnnnnnnnnnnnnnnnnnnnnnnnnnnnnnnnnnnnnnnnnnnnnnnnnnnnnnnnnnnnnnnnnnnnnnnnnnnngtgtcctcagtgtgtgtttggtaccaattgccctaaaacatttgtgcaacatgctaaaacccatgaaaaagataaaaggtactactgctgtgaagagtgtaacttcatggcagtgacagaaaatgaattagaatgccatcgaggcattgcacatggggcagtggtaaaatgcccgttggtcacttctgatatagcccagagaaaaacacaaaaaaagaactttcatgaaagaactccgtagtaggatcgtccaaaaaatcagctacctacgtatgtaagaatgtgtccttttactacttcagccaaaagtgttttaaaaaagcacatggagtacttgcattcatcatcatgtgttgattcatttggtagtcctcttggacttgataaaagaaaaaatgacatccttgaagaacctgtagatagtgatagcactaaaccatataactaaacaacagtcaaccacgtttccaaagaactctgctttaaaacaagatgtgaagcgaacatttttggatcaccctcacaatcaagtagttttttcaaaaatcccatagcggccacacagagtacagaaagctcggaaaagcattgccccagtcaggcgtaaacacttgcaatcaaaacagctctcctcataagaatgttacagttaaaagcagcattgaccaaaaacctaagtattttcatcaaacagcagaagaaaagtctaatgccaaggcaaatagcaactatttgtatagacacaaatatgaaaactataggatgataaaaaaatcaggtgaatcatatcctgtgcattttcaaaaagagaagctagttcattaatttctttacactgttttcatcatcag

SEQ ID NO: 22075 - DNA, 531 bp, Macaca Mulatta
  misc_feature (1)...(531): n = A,T,C or G
gagttcagcaaatggtggatcaatgaatttaagaccatcaagttctcctcgcagggaacgattttcgactactacattgatcccgacacgaaaaagttcctgccctggacagataaagtgccctcctttgagctggatcctgatgtcccactgcaggnnnnnnnnnnnnnnnnnnnnnnnnnnnnnnnnnnnnnnnnnnnnnnnnnnnnnnnnnnnnnnnnnnnnnnnnnnnnnnnnnnnnnnnnnnnnnnnnnnnnnnnnnnnnnnnnnnnnnnnnnnnnnnnnnnnnnnnnnnnnnnnnnnnnnnnnnnnnnnnnnnnnnnnnnnnnnnnnnnnnnnnnnnnnnnnnnnnnnnnnnnnnnnggggtgctggagaagccgctagagaagaaatcggggaggaactacgggccgccaggcactaagaagctcatctacttcatcgatgacatgaacatgcccgaggtggacaagtatgggacggtggccccacacaccctcatccggcagcacatggaccaccggcactgg

SEQ ID NO: 22076 - DNA, 1265 bp, Macaca Mulatta
ggggattccagcggcggacagcacccgggccgagatgtctcgctcagtggccttagccgtgctggcgctactctctctttctggcctggaggctatccagcgtactccaaagattcaggtttactcacgccatccaccagagaatggaaagccaaatttcctgaattgctatgtgtctggatttcatccatctgatattgaagttgacttactgaagaatggagagaaaatgggaaaagtggagcattcagacttgtctttcagcaaagactggtctttctatctcttgtactacactgaattcacccccaatgaaaaagatgagtatgcctgccgtgtgaaccatgtgactttgtcagggcccaggacagttaagtgggatcgagacatgtaagcagcatcatggaggtttgaagatgccgcatttggattggatgaattccaaattctgcttccttgctttttaatattgatatgcttatacagtttatgcaaaaaatgcagagttataataatgttaacacaggcatgatcttctttataattctactttgagtgctatctccacgtttgaggtatctgggcagctagctttaggagggctggcaacttagaggtggggagcagagaattctcatatccaacatcaacatcttggtcagatctgagctcttcaatctcttgcactcgaagcttgataagatagttatgcgtatataagttaacttccaatttacatactgtgcttagaatttggaggaaaaatttagaaatataattgatggggttattggaaatttgttataatgagtaaaacattttgtcatataagattcatatttacttcttatacatttggataaaagttgtgggtttaaatctgggttcatttttttgttccacccgaattttaaataaaactcatgaaaaacctgggaaacacaaccatatgtcttcataaaaaaactgaaatatatctccaccccctcttgcacaccacatacatactacaaataaaattataaatatttttgatggggccgcccgtcgacgcctctcataaaaaaaacctttttcatacaaaacacttttttttatttggcgcccggcggggacccccatatagggaaatatagtaaaaagagggggtcaaccgacactcggttttcccagatagaaaaaaccccgcgggattaactaacacaaggagtgcatgtagagaactctccccaccaataataagaataaaccccccggggggggcc

SEQ ID NO: 22077 - DNA, 822 bp, Macaca Mulatta
  misc_feature (1)...(822): n = A,T,C or G
ttggggggngtggcctcactttattttttacacacgaggctggggcatatagagcccttgatcatataagaatgagaagaccctctttggtactatgattcggaggtggagggaggcgccctttgctatgaatcctaggagattaaggggccctttccaccaattttttcgaattggttcggcaagtttgggatgccaactttccaggggtgaatggtttttgtccggtacaggggttttcagagaagatctgcattgccacctgtcagggagcaggaccaggtgcagggtcgactctttcgggatgtggtagtcagaaaggagagcggcnnnnnnnnnnnnnnnnnnnnnnnnnnnnnnnnnnnnnnnnnnnnnnnnnnnnnnnnnnnnnnnnnnnnnnnnnnnnnnnnnnnnnnnnnnnnnnnnnnnnnnnnnnnnnnnnnnnnnnnnnnnnnnnnnnnnnnnnnnnnnnnnnnnnnnnnnnnnnnnnnnnnnnnnnnnnnnnnnnnnnnnnnnnnnnnnnnnnnnnnnnnnnnnnnnnnnnnnnnnnnnnnnnnnnnnnnnnnnnnnnnnnnnnnnnnnnnnnnnnnnnnnnnnnnnnnnnnnnnnnnnnnnnnnnnnnnnnnnnnnnnnnnnnnnnnnnnnnnnnnnnnnnnnnctgggctccacctcaagggtgatggtcttgccggtcagggtcttcacgaagatgtgcattttgacctgtcagcggttacgaagatgctgcgaatcaccaatcacggtcagccgcagggacgccaaaccaagcacacccaacaaagccggccgccccagaatccc

SEQ ID NO: 22078 - DNA, 746 bp, Macaca Mulatta
  misc_feature (1)...(746): n = A,T,C or G
gtgcccttccagctgtcactgaaatgactttattcgtcaccgtctttgggctgaaaaagaagcctttctgagcaccttcatgacgggaacctaaggacgaaggctacaggggcaagggccgcttcgtattcctggaagaaggaaggcataggcttcggtcctcccctcggaaactgcttctgctggaggatatgtgttggaataattacgtcttgagtctgggattatccgcattgtatttagtggtttgtaataaaatatgttttgtagtaagattaagacatatacagttttcagggcacaattgaaatggcgaaactactgaannnnnnnnnnnnnnnnnnnttttctagttctgcagaccgtaagatacttggtatcgcttctattttggttattacggtagttgtctggcggaagggagtgggcggagatatgtaaatagaaagtgcttacagttagaacgtccagcacgtaaatgatcggagcattctgggaaaaagaaatttattccttttcggcagccgaannnnnnnnnnnnnnnnnnnnntgtgcaagcaaatatggcaatacaactggaaggatgctaagtagtagggttacttataccaacgcgtcgtgaactcaccctagctgtaaacggaatctttttgactgagtgcggaatgtcggccatttagaaatatcgtcaggtgggataatccttacctgttcctcttttggagggcagaattagaacatgatga

SEQ ID NO: 22079 - DNA, 2377 bp, Macaca Mulatta
  misc_feature (1)...(2377): n = A,T,C or G
ttttcaccacatcaaaatagaatccagtacagacccaacacggtcaaatcagatcattctttatatgaacaaatggnnnnnnnnnnnnnnnntatgtatatgaataaccaggggaactagatgccttttagcaagaatgtcaggtggtagttctggatgaaacttgtattgcagttttcatttccacagttgtgtgctgagagtctgacccgatgagcttccagaccatcctgctgttgtgctggggggctggccaaaacctgcagtaggggttgcactactgatactcatgccagccatttgctgattcatctgtgaaacacataaaaaggcttagttcaagaggctttacttcacctttaattcttgtttctttagccacacagttggtcattttttttcattaatgtgaaaactagtccaagcactggaataaaagcagagtaccatacaaatatttcttaaagcaaatagctacttttttcccttctttatttatctgctttctagattcagtttccctaaagattaacnnnnnnnnnnnnnnnnnnnnnnnnnnnnnnnnnnnnnnnnnnnnnnnnnnnnnnnnnnnnnnnnnnactttcacctacactaggatattgtgctttaactactaaggagtaagaaaattttagaaagtaaaatagtctaaaattatcctataaactttgtatgatagctattattctctgttaaaatcttaaatggctctatatacttcctaaaagtggtcataaagcatttatttctcttgctgatctaacaacataaacatctaaaatttattttcattgtatgcaataaagtataagattatgtatacttttcttcaagactggagtcaannnnnnnnnnnnnnnnnnnncttaaccctgtggttctcttatttccaaaattggtggtaagagaaggcaagatttaccataaagtacagagcgggtttaaaacttaaactcaagtgttagactgtgttcttaatttaatacagttgacttatttacagtttcaaagacactaacataaactacatcactaatcatcaggcataagtgtctgaagaagcagatcacgtcttcatacctcctaaaggacatnnnnnnnnnnnnnnnnnnnnnnnnnnnnnnnnnnnnnnnnnnnnnnnnnnnnnnnnnnnnnnnnnnnnnnnnnnnnnnnnnnnnnnnnnnnnnnnnnnnnnnnnnnnnnnnnnnnnnnnnnnnnnnnnnnnnnnnnnnnnnnnnnnnnnnnnnnnnnnnnnnnnnnnnnnnnnnnnnnnnnnnnnnnnnnnnnnnnnnnnnnnnnnnnnnnnnnnnnnnnnnnnnnnnnnnnnnnnnnnnnnnnnnnnnnnnnnnnnnnnnnnnnnnnnnnnnnnnnnnnnnnnnaatcactctagactattccctgaatgctctaaaggtaaaacaagtgaccaaacagaaaccaagattgacaaaatgctggaggaacatcaatgggaagtgtaaaaggaagaagagtgggagcatgaacctctctaagagcctttgtctgtgcagctagagagagagaagtcagaacacagcacctgaaatagaaatgttctatcttagctctaacttaggtagaaacaggattttataatatgaggggatgtctggttcacaccttatgggaattgaatctttttgtactctttttaaacataaaagtcattatagggtacataaaaagaaaatacaactttacaaaggtttttgaacaaaaagaatttttacagagccatggggcagtaatcatatgacctgaaaaatagccttagatccctcataaaatagtgctttgagaatatgaggctagatttttttttctaataaaagaccccaaaattattagtgaagttgtctaagtggactataaaaacgtcccacaagcaagctggttaaagcttagtgctaatctcagaggtggcagagagggagtctcatgatgcctaagataatttctggccatnattagtggtgttcaccattacagttacgttacaatttgaaatgaaagacgtttaacctttttttaacagaatactctaaaacagggataacacatcatttgtctgatacaacttcataatatttatagatacttttgaccctatacatattatccctattgaattctttctgccagatcactagacttnnnnnnnnnnnnnnnnnnnnnnnnnnnnnntttagaaaataaatctggtttctttgatttgggaggagctagaaagtaaatgacccctacctgtgagaggctccatgggggctgctgagcttgcggcaggccaaacttactctggggtgcacccatttgtcccaccattcctccttggggg

SEQ ID NO: 22080 - DNA, 2240 bp, Macaca Mulatta
  misc_feature (1)...(2240): n = A,T,C or G
aggcttgctggcctccggggccgtccaggcacggggggcccctcaggtacgctttttcttccctgcaggatccggccctcaaaggtgagggtcacgcacgcgttacagccccgaaacagtagcacaagatttaatttttaaaagaacgtgtttcttcggggcttgccattcgttcgtttccagccttaggaatttatggtcgcctttttgaatgannnnnnnnnnnnnnnnnnnnnnnnnnnnnnnnnnnnnnnnnnnnnnnnnnnnnnnnnnnnnnnnnnnnnnnnnnnnnnnnnnnnnnnnnnnnnnnnnnnnnnnnnnnnnnnnnnnnnnnnnnnnnnnnnnnnnnnnnnnnnnnnnnnnnnnnnnnnnnnnnnnnnnnnnnnnnnnnnnnnnnnnnnnnnnnnnnnnnnnnnnnnnnnnnnnnnnnnnnnnnnnnnnnnnnnnnnnnnnnnnnnnnnnnnnnnnnnnnnnnnnnnnnnnnnnnnnnnnnnnnnnnnnnnnnnnnnnnnnnnnnnnnnnnnnnnnnnnnnnnnnnnnnnnnnnnnnnnnnnnnnnnnnnnnnnnnnnnnnnnnnnnnnnnnnnnnnnnnnnnnnnnnnnnnnnnnnnnnnnnnnnnnnnnnnnnnnnnnnnnnnnnnnnnnnnnnnnnnnnnnnnnnnnnnnnnnnnnnnnnnnnnnnnnnnnnnnnnnnnnnnnnnnnnnnnnnnnnnnnnnnnnnnnnnnnnnnnnnnnnnnnnnnnnnnnnnnnnnnnnnnnnnnnnnnnnnnnnnnnnnnnnnnnnnnnnnnnnnnnnnnnnnnnnnnnnnnnnnnnnnnnaggatgttcaagatccttcagtatttgtaacgttccctttggaagaagatgaaactgtatctttagttgcttggacaaccactccctggactctacctagtaaccttgctgtctgtgtcaatccagaaatgcaatatgtgaagattaaannnnnnnnnnnnnnnnnnnnnnnnnnnnnnnnnnnnnnnnnnnnnnnnnnnnnnnnnnnnnnnnnnnnnnnnnnnnnnnnnnnnnnnnnnnnnnnnnnnnnnnnnnnnnnnnnnnnnnnnnnnnnnnnnnnnnnnnnnnnnnnnnnnnnnnnnnnnnnnnnnnnnnnnnnnnnnnnnnnnnnnnnnnnnnnnnnnnnnnnnnnnnnnnnnnnnnnnnnnnnnnnnnnnnnnnnnnnnnnnnnnnnnnnnnnnnnnnnnatctgtatggactttaacattattcggaaagactcactccccgtttgccctgtggatgcttcaggctgcttcacagcggaggtgacagatttcgcaggacagtatgtgaagnnnnnnnnnnagtatcatcaggactttgaaggaacaaggccgacttctggttgccagcaccttcactcacagctaccctttttgctggaggtcagannnnnnnnnnnnnnnnnnnnnnnnnnnnnnnnnnnnnnnnnnnnnnnnnnnnnnnnnnnnnnnnnnnnnnnnnnnnnnnnnnnnnnnnnnnnggtcccagagttggtacgagaaaaacgatttggaaattggctgaaagatgcacgtgactgggcagtttccagaaacagatactggggcacacctatcccactgtgggtcagcgatgactttgaggaggtgnnnnnnnnnnnnnnnnnnnnnnnnnnnnnnnnnnnnnnnnnnnnnnnnnnnnnnnnnnnnnnnnnnnnnnnnnnnnnnnnnnnnnnnnnnnnnnnnnnnnnnnnnnnnnnnnnnnnnnnnnnnnnnnnnnnnnnnnnnnnnnnnnnnnnnnnnnnnnnnnnnnnnnnnnnnnnnnnnnnnnnnnnnnnnnnnnnnnnnnnnnnnnnnnnnnnnnnnnnnnnnnnnnnnnnnnnnnnnnnnnnnnnnnnnnnnnnnnnnnnnnnnnnnnnnnnnnnnnnnnnnnnnnnnnnnnnnnnnnnnnnnnnnnnnnnnnnnnnnnnnnnnnnnnnnnnnnnnnnnnnnnnnnnnnaagtgatggccaaaaaatgagtaaacggaaaaagaattatccagatccagtttccatcatccagaagtatggtgctgatgccctcagnncagattgtatctgattaactcccctgtggtgagagcagaaaacctccgctttaaagaggagggtgtgcgggatgtccttaaggatgtactgctcccatggtacaatgcctatcgcttcttaatccagaacgttctgaggcttcagaag

SEQ ID NO: 22081 - DNA, 779 bp, Macaca Mulatta
  misc_feature (1)...(779): n = A,T,C or G
gaccccccaagcccactggtgaaacagctgagtgaagtatttgaaactgaagactctaaatcaaatcttcccccagagcctgttctgcccccggaggcacctttatcttctgaattggacttgcctctgggtacccagttatctgctgaggaacagatgccaccttggaaccagactgagttcccctccaaacaggtgttttccaaggaggaagcaagacagcccacagaaacccctgtggccagccagagctctgacaagccctcaagggaccctgagactcccagatcttcaggtnnnnnnnnnnnnnnnnnnnnnnnnnnnnnnnnnnnnnnnnnnnnnnnnnnnnnnnnnnnnnnnnnnnnnnnnnnnnnnnnnnnnnnnnnnnnnnnnnnnnnncagggtaagcggccttcacccctaagtgaaaatgttagtgaactaaaggaaggagccattcttggaactggacgacctctgaaaactggaggacgaacatgggaacaatgccaggaccatgacaaggaaaatcagcactttcccttggtggagagctaggccttgcatggccccagcaatgcaatcacccagggcctggtggtgtctgtgtcctctcaccccttctttcccagggatactgaggaaaggcttgttttcttagactcctcctcannnnnnnnnnnggactcagagctttattgggctttctttgtgtcttgtgtgtttcttttatattaaaggaagtgattttaaatgttactttaaaaaggtatatgtaa

SEQ ID NO: 22082 - DNA, 950 bp, Macaca Mulatta
gcccttccgtgttctgacccaaccactgtttattttgcagacagtctccatcctggagcagcggttgacactgacagaagacaagctgaagcagtgtctggagaaccagcagctaatcatgcagagagcaacaccgtgatcgggggagcaagaatcaggagctcggttgatttgcgggtggcaggccagggatttgtaccgtgggacttgggtaaataaagggaactgaactctgtgggaatcacatccataccggagccctggatttttgcagttctgccctccatcttgctatctgcaccaggaggctctccacctggcagccagaggtccccagtgggccgggctcacacacaaatgatgcttcagacccgactgagaggaccacattttccttaatgtaaaggagccacttgaaaatgcctgctccctcggggtcctgagactgtggctccccctctggaggaggtggccccaccatgccttgattttcactcatcatttggacacatgattggcttttgccacccctgccatggcgtagaaattgactgcacactgattggatgagccggggggtttctctaaatctgactaaaggcccaaagtgggcccatctgagtcaggtttgtcaggaacaagccctctcgagtgggtggtggctttcagtggccctggtttctgttccacctgtgttcactggagccaggtggcttcctcctccttgcgtgagtgagagcacaggaatctcaaaattaaacgtgacttcattgcacttgttgcaggagtggcttatgctggatgatacttaatcaatcttcccatccccagggcccaaacagaatgagaatggtgacttgggagggcccccgccaggattgcctctgaggccaggacacccctgttttcagctgttcagggtgtcggggaacaagggcagtcagagccct

SEQ ID NO: 22083 - DNA, 154 bp, Macaca Mulatta
ttagcagtggtgatgctgcagacccctcagtcttcctatgtgtagctagtgatgtctctctctgtaaagagaaatgtgaggggaaaacaattcccagcctcgagggggtgacccagaccagattagagaccagtcccctggggttggtgtgcac

SEQ ID NO: 22084 - DNA, 873 bp, Macaca Mulatta
gatatatgaatggtagagaatatacacatctatgcagacaggtagacatatgtaaatgaacttttaaaaaaatcagatgattgtaagctgtatagaattccttgttactcctcataaaaatctctggtacacagtcattgcattgtgtaaatcaagctttcattgtgtaatctattattttattagctacttaacttattgatttagaaattctaagaatgtaacaatatactagtaaagttaaattgtgaaatatttaagttaggtctggctttctttaccagtttcatcggctactgaaaaaaatttaagtaatttatctaccaataatatggttctgttttctctctccttatttttgctcttttaggaccccaaacgtcatttggaggaacatgtggatgtacttatgacctcaaatattgtccagtgtttagcagctatgttggatactgttgtatttaaataaagcaacgaaaaacgctattgatgatgctttcagtgtatattcctctgttgttcctaatgctcaaaatcaagggacctctgaaggtgtacttggctaaatgtaagacatctggcatcatctgcagcaccgtaacaccttcagtctcagttgtgcaattacttctgtttctttagtcagggtctttgcagattctaaagttatacatgagtacatcaaagtggacaaattttgttaagatcccatttaatatttgaaaaaatcagtagcacaaatatattttgattgttacttacaaaataaaatacatttacagtctatgcttcctgaggtctttttggcaatgggtgggattgatggaataacgtttgacagtggtctagaaatctcacacaaagatatgtttc

SEQ ID NO: 22085 - DNA, 440 bp, Macaca Mulatta
gtgcagtggcttctcctcttgcctctctctgcaggctattctgagtcaggactgccccatggagacccgaatgtacgcaacccagaagcccacgaaggaatttcccctgggcgaggacagtgatgacgagcctgaccatgaggagtagctgcagaaagtgctccctgaattcatgacgcctcagtgaccacctctttccctgggaccagatcaccatggctgagcgcacggctcagtgggcttcacatacctcttcctggaaatcttctttcctcccctcccatggacactgtccctgatactcttctcacctgtgtaacctgtagctctccctctacgccttggtgctgcagtggcccaacttttatggcaagacagagtgacgcaccttccccctgctgtgaggttgattaaacttgagctgcgacgggttctgcaag

SEQ ID NO: 22086 - DNA, 484 bp, Macaca Mulatta
aacttccaactcggaaccaagaacaggaaacttttttggctacagaagccccaagcaagagattaactagagctcagttggctaaacaaattcttcagtcaaaggagaatgtagttgcaaccactgggtccaaaaaggacatgtttgttttagaaggcattgattctgctgatgaacaatttcaaaatactaatgctgagactctcagtactaattgtgttcctattaaaaatggcagtctgttaatggtttctgatagtgagaggacaacagaagggacttcacagcaggaagttaaggaaggaaatgacaaaacagtgcctggagagacaggtcttccaggttccacggaagatacctgtaaaattgtacttgcaacaccaagacttcatataacaatacctcggaggtcaaaaagaaatgtttcaaagctttctccaagaatatttcaaactgttacaaatggagttaagaaaaatcaggt

SEQ ID NO: 22087 - DNA, 183 bp, Macaca Mulatta
gcgttctcctgctctcggtttggggtgagagcagccttcctaccggtcttcgggaactgtgcgcgccggctgcaatggggccacattttaccctcctgtgtgcggcgctggccggttgcttgcttcctgccgaggagtgtgttatgtgtgacccgtctgtcgtgctggcgctaaagtccctgg

SEQ ID NO: 22088 - DNA, 695 bp, Macaca Mulatta
  misc_feature (1)...(695): n = A,T,C or G
gggggtagtggccgctggcgctggcgaactgcagggtctggggtgttattggaggggcagttggtcctcatttctcccgaagcccgcggaggagcggcgcgccgcgattccccagcctggtcccttctgcggagagcgatgccgcttcccgacaccatgttctgcgctcagcagatccacattcccccggagctgccggacatcctgaagcagttcaccaaggctgccatccgcacccagccggccgacgtgctgcagtggtccgcgggatatttttcagctttgtcaagaggagatccacttcctgtaaaggacagaatggaaatgcccacggcaacccagaaaacagacacaggcctgactccaggactcctgaaaattttgcacaagcagtgtcaccacaagcagtatgtggaattaacagatctggagcagaagtggaagaacttgtgcctgccgaaggaaaaattcaaagcgctcttacatctggatccttgtgaaaacagaaatcagtggataaacttttagcacttgngtgcagcatgcttggtgggtcttgacactgcgctgaagcactgtgtgagatctcacgacgatccgagggcggcccctccatccttcagactttccacgctacgctactgncaaatagatcgactgtctcctcgagacgatctacttgcttctaagaaatn

SEQ ID NO: 22089 - DNA, 4002 bp, Macaca Mulatta
  misc_feature (1)...(4002): n = A,T,C or G
gacaagctgagcagccagagctttgggactgacctgccgctggtggaccaccaagtggaggagcataacatcttccacaacgaggtcaaggccatcgggccccacctggccaaggacggggtcaaggnaggagcagaacagtgaacttcgggccaagtaccagnnnnnnnnnnnnnnnnnnnnnnnnnnnnnnnnnnnnnnnnnnnnnnnnnnnnnnnnnnnnnnnnnnnnnnnnnnnnnnnnnnnnnnnnnnnnnnnnnnnnnnnnnnnnnnnnnnnnnnnnnnnnnnnnnnnnnnnnnnnnnnnnnnnnnnnnnnnnnnnnnnnnnnnnnnnnnnnnnnnnnnnnnnnnnnnnnnnnnnnnnnnnnnnnnnnnnnnnnnnnnnnnnnnnnnnnnnnnnnnnnnnnnnnnnnnnnnnnnnnnnnnnnnnnnnnnnnnnnnnnnnnnnnnnnnnnnnnnnnnnnnnnnnnnnnnnnnnnnnnnnnnnnnnnnnnnnnnnnnnnnnnnnnnnnnnnnnnnnnnnnnnnnnnnnnnnnnnnnnnnnnnnnnnnnnnnnnnnnnnnnnnnnnnnnnnnnnnnnnnnnnnnnnnnnnnnnnnnnnnnnnnnnnnnnnnnnnnnnnnnnnnnnnnnnnnnnnnnnnnnnnnnnnnnnnnnnnnnnnnnnnnnnnnnnnnnnnnnnnnnnnnnnnnnnnnnnnnnnnnnnnnnnnnnnnnnnnnnnnnnnnnnnnnnnnnnnnnnnnnnnnnnnnnnnnnnnnnnnnnnnnnnnnnnnnnnnnnnnnnnnnnnnnnnnnnnnnnnnnnnnnnnggcctgatttcacggggctacagctacaccctgcacacttcaatggggagagctgggaactcatggacagtgctgggaacaagctgattgctccggctgtctgtttcgtgatcccccccacagaccctgaggccctggctctggctgacagnnnnnnnnnnnnnnnnnnnnnnnnnnnnnnnnnnnnnnnnnnnnnnnnnnnnnnnnnnnnnnnnnnnnnnnnnnnnnnnnnnnnnnnnnnnnnnnnnnnnnnnnnnnnnnnnnnnnnnnnnnnnnnnnnnnnnnnnnnnnnnnnnnnnnnnnnnnnnnnnnnnnnnnnnnnnnnnnnnnnnnnnnnnnnnnnnnnnnnnnnnnnnnnnnnnnnnnnnnnnnnnnnnnnnnnnnnnnnnnnnnnnnnnnnnnnnnnnnnnnnnnnnnnnnnnnnnnnnnnnnnnnnnnnnnnnnnnnnnnnnnnnnnnnnnnnnnnnnnnnnnnnnnnnnnnnnnnnnnnnnnnnnnnnnnnnnnnnnnnnnnnnnnnnnnnnnnnnnnnnnnnnnnnnnnnnnnnnnnnnnnnnnnnnnnnnnnnnnnnnnnnnnnnnnnnnnnnnnnnnnnnnnnnnnnnnnnnnnnnnnnnnnnnnnnnnnnnnnnnnnnnnnnnnnnnnnnnnnnnnnnnnnnnnnnnnnnnnnnnnnnnnnnnnnnnnnnnnnnnnnnnnnnnnnnnnnnnnnnnnnnnnnnnnnnnnnnnnnnnnnnnnnnnnnnnnnnnnnnnnnnnnnnnnnnnnnnnnnnnnnnnnnnnnnnnnnnnnnnnnnnnnnnnnnnnnnnnnnnnnnnnnnnnnnnnnnnnnnnnnnnnnnnnnnnnnnnnnnnnnnnnnnnnnnnnnnnnnnnnnnnnnnnnnnnnnnnnnnnnnnnnnnnnnnnnnnnnnnnnnnnnnnnnnnnnnnnnnnnnnnnnnnnnnnnnnnnnnnnnnnnnnnnnnnnnnnnnnnnnnnnnnnnnnnnnnnnnnnnnnnnnnnnnnnnnnnnnnnnnnnnnnnnnnnnnnnnnnnnnnnnnnnnnnnnnnnnnnnnnnnnnnnnnnnnnnnnnnnnnnnnnnnnnnnnnnnnnnnnnnnnnnnnnnnnnnnnnnnnnnnnnnnnnnnnnnnnnnnnnnnnnnnnnnnnnnnnnnnnnnnnnnnnnnnnnnnnnnnnnnnnnnnnnnnnnnnnnnnnnnnnnnnnnnnnnnnnnnnnnnnnnnnnnnnnnnnnnnnnnnnnnnnnnnnnnnnnnnnnnnnnnnnnnnnnnnnnnnnnnnnnnnnnnnnnnnnnnnnnnnnnnnnnnnnnnnnnnnnnnnnnnnnnnnnnnnnnnnnnnnnnnnnnnnnnnnnnnnnnnnnnnnnnnnnnnnnnnnnnnnnnnnnnnnnnnnnnnnnnnnnnnnnnnnnnnnnnnnnnnnnnnnnnnnnnnnnnnnnnnnnnnnnnnnnnnnnnnnnnnnnnnnnnnnnnnnnnnnnnnnnnnnnnnnnnnnnnnnnnnnnnnnnnnnnnnnnnnnnnnnnnnnnnnnnnnnnnnnnnnnnnnnnnnnnnnnnnnnnnnnnnnnnnnnnnnnnnnnnnnnnnnnnnnnnnnnnnnnnnnnnnnnnnnnnnnnnnnnnnnnnnnnnnnnnnnnnnnnnnnnnnnnnnnnnnnnnnnnnnnnnnnnnnnnnnnnnnnnnnnnnnnnnnnnnnnnnnnnnnnnnnnnnnnnnnnnnnnnnnnnnnnnnnnnnnnnnnnnnnnnnnnnnnnnnnnnnnnnnnnnnnnnnnnnnnnnnnnnnnnnnnnnnnnnnnnnnnnnnnnnnnnnnnnnnnnnnnnnnnnnnnnnnnnnnnnnnnnnnnnnnnnnnnnnnnnnnnnnnnnnnnnnnnnnnnnnnnnnnnnnnnnnnnnnnnnnnnnnnnnnnnnnnnnnnnnnnnnnnnnnnnnnnnnnnnnnnnnnnnnnnnnnnnnnnnnnnnnnnnnnnnnnnnnnnnnnnnnnnnnnnnnnnnnnnnnnnnnnnnnnnnnnnnnnnnnnnnnnnnnnnnnnnnnnnnnnnnnnnnnnnnnnnnnnnnnnnnnnnnnnnnnnnnnnnnnnnnnnnnnnnnnnnnnnnnnnnnnnnnnnnnnnnnnnnnnnnnnnnnnnnnnnnnnnnnnnnnnnnnnnnnnnnnnnnnnnnnnnnnnnnnnnnnnnnnnnnnnnnnnnnnnnnnnnnnnnnnnnnnnnnnnnnnnnnnnnnnnnnnnnnnnnnnnnnnnnnnnnnnnnnnnnnnnnnnnnnnnnnnnnnnnnnnnnnnnnnnnnnnnnnnnnnnnnnnnnnnnnnnnnnnnnnnnnnnnnnnnnnnnnnnnnnnnnnnnnnnnntccgcctggagcttgtggagcaggacccattgtaccggggtgccgaggagcagctccggagctaccagacttagctggaggccctcaggaggcgaggcccccaggtggaagtcaaagaggtgactaaggaagtcattaagtacaaaactgaccccgagatggagaaggagcttcagcggcttagggaggagatcgtggacaagaccagactgattgaaaggtgtgatttagagatctaccagctcaagcaggaaatccaggccctgaaagacaccaaaccccaggtccagaccaaagaagtggtccaggagatcctccaattccaagaagaccctcaaaccaaggaggaggtggagtctctgagggcaaagctctcagaggagcagaagaagcaagtggatctggagagggagaaggcctcccaggaaaagcagatcgcccagaaggaggaggagctctcgcgagtgaaggaaagggtggtgcagcaggaggtagtcaggtacgaggaggagccaggcctgcgggccgaggtgagcgcctttgccgagagcatcgacgtggagctgcgacagattgacaagctgcgggcagagctgcggaggctgcagcgccggcgcactgagcttgagcggcagctggaggagctggagcgtgagcggcaggcccgcagggaggccgagcgcgaggtgcagcggttgcagcagcggctggcagcgctggagcaggaagaagcggaggcccgtgagaaggtaacccgcaagcagaaggtggtgctgcagcaggacccgcagcaggcccgagagcatgccctgctccgactccagctggaagaagagcagcaccggcggcagctcctggagggtgagct

SEQ ID NO: 22090 - DNA, 2394 bp, Macaca Mulatta
  misc_feature (1)...(2394): n = A,T,C or G
agaaatttcacaagctatggaacaagaaggtgccacagcagcagagacagaagcacaagnagaaatttcacaagctatggaacaagaaggtgccacagcagcagagacagaagcacaaggnnntggaggtgacaaatgggactacaagagtcacgtggtgaccaaattcgctgtgaaggaggatgtacgtcgtggttttgaaaaaactgctgactggccagaaatgcaaatgttggctggtgcttttaattcagaccaatggggcttccggcctcacacagtggttctacacggaaagtcaggaattgggaaatcagctctggccagaaggatcgtgctgtgctgggcacaaggtggactctaccagggaatgttctcctacgtcttcttcctccccgttagagagatgcagcagcagaaggagagcagtgttgcagagttcatctccagggaatggccagacgcccaggctccagtgacggagatcatgtcccgaccnnnaaggctgttgttctcattgatggtttcgatgacctgggctctgtcctcaacagtgacacgaagctctgcaaagactgggctgagaagcagcccccattcatcctcatccagagtctgctgaggaaagtcctgctccctgagtccttcctgatggtcactgtcagagacgtgggcatagagaagctcaagtcggaggtcgtgtctccccgttacctgtttgttagaggaatcaccgcagaacaaagaatccacttgctcctcgagcgcgggatcggtgagcatcagaagatgcaagggttgcgtgcgataatgaacaaccgtaagctgttcgaccagtgtcaggtccctgccgtgggctctctgatctgcgtggctctgcagctgcaggacgtggtgggggagagtatcgcccccttcggccaaacgctcacaggcttgtatgccgcttttgtgtttcatcagctcacccctcgaggcgtggcccggcgctgcctcaatctggaggagagagttgtcctgaagcgtttctgccgtatggctgtggagggagtgtggaacatgaagtctgtgtttgatggtgacgacctcatggttcacggactcggggagtctgaactccgtactctgtttcacatgaatatccttctccgagacagccactgcgaggagttctacaccttcttccacctcagtctccaggacttctgtgccgccttgtactacgtgttagaggggctggagatcgagccggctctctgccctctgttcgttgagaagacgaagaggtccatggagcttcaacaagcaggcttccacatccacttgctttggatgaagcgtttcttgtttggcctcgtgagcgaagacgtaaggaggccactggaggtcctgctgggctgtcccgttccctgggggtgaacagaagctctgcactgggtgtctctgttgggtcagcagcccaacgccgccgccccgggagacaccctggatgcctttcgtttgtcttttcgagacacaagaacaaaaagtttgttccgctcggcattaaacggctttcagaaagtggggcttcnnnnnnnnnnnnnnnnnnnnnnnnnnnnnnnnnnnnnnnnnnnnnnnnnnnnnnnnnnnnnnnnnnnnnnnnnnnnnnnnnnnnnnnnnnnnnnnnnnnnnnnnnnnnnnnnnnnnnnnnnnnnnnnnnnnnnnnnnnnnnnnnnnnnnnnnnnnnnnnnnnnnnnnnnnnnnnnnnnnnnnnnnnnnnnnnnnnnnnnnnnnnnnnnnnnnnnnnnnnnnnnnnnnnnnnnnnnnnnnnnnnnnnnnnnnnnnnnnnnnnnnnnnnnnnnnnnnnnnnnnnnnnnnnnnnnnnnnnnnnnnnnnnnnnnnnnnnnnnnnnnnnnnnnnnnnnnnnnnnnnnnnnnnnnnnnnnnnnnnnnnnnnnnnnnnnnnnnnnnnnnnnnnnnnnnnnnnnnnnnnnnnnnnnnnnnnnnnnnnnnnnnnnnnnnnnnnnnnnnnnnnnnnnnnnnnnnnnnnnnnnnnnnnnnnnnnnnnnnnnnnnnnnnnnnnnnnnnnnnnnnnnnnnnnnnnnnnnnnnnnnnnnnnnnnnnnnnnnnnnnnnnnnnnnnnnnnnnnnnnnnnnnnnnnnnnnnnnnnnnnnnnnnnnnnnnnnnnnnnnnnnnnnnnnnnnnnnnnnnnnnnnnnnnnnnnnnnnnnnnnnnnnnnnnactggaggactgtggcatcatggccacgggttgccagagtctggcctcagccctcgtcagcaaccggagcttgacacacctgtgcctatccaacaacgacctggggaacgaaggtgtgaatctgctgtgtcgatccatgaggcttccccactgtagtctgcggagactgatg

SEQ ID NO: 22091 - DNA, 745 bp, Macaca Mulatta
caagggtgctagaaacctgtaccatttctccccaacaacctgttattccttgaaaacattttgacatgattcacttcatgcaaaatagcttcaaagataaacatattaaacaggaatttccagtctgtttatctgctggatgatctatatgacttcaaagttcaagtagcttctagcacaaaattcatgtttccagtccttcagtgagaatgagaatgtcttaagttatgaacctaattctcagctttcctgctattctcttacactggattttattccacttgttacgctactcttgtttctttttggtttgaagtcactactttattcagcccttttcccttcctctgttcagcacatacctaactgaggagaaccacagacaagtaaaatttacttctctctgagaagaagagatgagagaaaggtttgcttttatcattaaaaggtatttgttttctgttgtttattttcagatgtccttgcttttgaaaaatattcagtggatatatagatatcaataacctgagcaaagagatattggcagtaaatatcaaagaggaaatttacattcctgttccctttgctacattattgatgttttcttataccgttccctttgaaaacataatgtgtaccgacaggcttttgctttgacgtaggctttaaatagagttatgttcccctagtccttttatcagactgtctcacttcttctaccttgtgaaacagctgtgaatccaaa

SEQ ID NO: 22092 - DNA, 122 bp, Macaca Mulatta
agtcaccgccaaaggcccggcgggcacagatggacctaatctctgagctgaaacggaagcagcagaaggagccactcatttatgagagcgaccgtgacggggccattgaagacatcatcaca

SEQ ID NO: 22093 - DNA, 223 bp, Macaca Mulatta
tgcaagagcagcgtgactgacattatgaaggcctgtactgaagacagcaagctgttagtacagaccagatgctttcttggcaggctcgttgtacctcttggaaaacctcaatgcaagatagtttttcagtgctggcatattttggaattctgcacattcatggagtgcaataatactgtatagttttccccaccccccacaaaatcacccagttaatgtgtgg

SEQ ID NO: 22094 - DNA, 430 bp, Macaca Mulatta
  misc_feature (1)...(430): n = A,T,C or G
cgtcggggagtctgggcgcggcgctcgacagcagcctgcgggccgccgtggcgttcaaggcagagggccagcgctgctaccgagagaagaagttccgggaggccatcggcaagtaccaccgagcgctgcttcagctgaaggcggcgcagggggcccgccctggcggcctgaccgcccccgcccccgggcccaccagcaaaaaagggccggcgcgtctcagcgaggagcagcggcgcctggtggagagcacggaggtggagtgttacgactccctcacgggtacgccgtcgnnnnnnnnnnnnnnnnnnnnnnnnnnnnnnnnnnnnnnnnnnagcttggcgacttgtggcggcaggggccctggggctgaagagtccagggctgtgggcttctgggggagacttcagagcttgatcaaggaaagggatta

SEQ ID NO: 22095 - DNA, 935 bp, Macaca Mulatta
ggcgctcgccttacctgagagccacgtaccgttacaccccgctgctgggttggctcctcactcccaacatctacctcagcgagctctttggaaagtttctcttcatcagctgcgacctcctcaccgctttcctcttataccgcctgctgctgctgaaggggctggcgcgccgccaggcttgtggctactgtgtcttttggcttcttaaccccctgcctatggcagtatccagtcgaggtaatgcggactcgattatcgcctccctggtcctgatggtcctgtacttgataaggaaaagagtcgtcgcgtgtgcagctgtgttctatggtttcgcggtgcatatgaagatatatccggtgacttatatccttcccataactctccacctgcttccagatcgcgacaatgacaaaagcctccgtcaatcccggtatactttccaggctcatttgtacgagctcctgaagaggctgtgtgatcgggctgtgctgctgttcgtagcggttgctggactcacgttttttgccctgagctttggtttttactatgagtacggctgggaatttttggagcacacctatttttatcacctgactaggcgggatatccgtcacaacttttctccatacttctacatgctgtatttgactgcagagagcaagtggagtttttctctgggaattgctgcattcctgccacagttcatcttgctttcagctgtgtctttcgcctattacagagacctcgtcttttgttgttttcttcatacatccatttttgtgacttttaacaaagtctgcacctcccagtactttctttggtacctctgcttactgcctcttgtgatgccactagtaagaatgacttggaaaagagctgtagttctcctaatgttatggtttatagggcaggccctatggctggctcctgcctat

SEQ ID NO: 22096 - DNA, 162 bp, Macaca Mulatta
cccagggctggcctgtttgggagagctgaccaataaacactgatcatgtgtttgtctctgtgctgtgtttacccagggtcggggctggagcgggctgggagtggtcttgggtcaggagatcctgtacagtggggttgactcaggggccttctgccctgaccc

SEQ ID NO: 22097 - DNA, 1219 bp, Macaca Mulatta
  misc_feature (1)...(1219): n = A,T,C or G
agcactttgtcagcgagcgtaaatatgatgaagagctcgggaaagctgcccggttctcgtgtgacatcgaacagctgaaggcccaaatcatgctctgcggagaannnnnnnnnnnnnnnnnnnnnnnnnnnnnnnnnnnnnnnnnnnnnnnnnnnnnnnnnnnnnnnnnnnnnnnnnnnnnnnnnnnnnnnnnnnnnnnnnnnnnnnnnnnnnnnnnnnnnnnnnnnnnnnnnnnnnnnnnnnnnnnnnnnnnnnnnnnnnnnnnnnnnnnnnnnnnnnnnnnnnnnnnnnnnnnnnnnnnnnnnnnnnnnnnnnnnnnnnnnnnnnnnnnnnnnnnnnnnnnnnnnnnnnnnnnnnnnnnnnnnnnnnnnnnnnnnnnnnnnnnnnnnnnnnnnnnnnnnnnnnnnnnnnnnnnnnnnnnnnnnnnnnnnnnnnnnnnnnnnnnnnnnnnnnnnnnnnnnnnnnnnnnnnnnnnnnnnnnnnnnnnnnnnnnnnnnnnnnnnnnnnnnnnnnnnnnnnnnnnnnnnnnnnnnnnnnnnnnnnnnnnnnnnnnnnnnnnnnnnnnnnnnnnnnnnnnnnnnnnnnnnnnnnnnnnnnnnnnnnnnnnnnnnnnnnnnnnnnnnnnnnnnnnnnnnnnnnnnnnnnnnnnnnnnnnnnnnnnnnnnnnnnnnnnnnnnnnnnnnnnnnnnnnnnnnnnnnnnnnnnnnnnnnnnnnnnnnnnnnnnnnnnnnnnnnnnnnnnnnnnnnnnnnnnnnnnnnnnnnnnnnnnnnnnnnnnnnnnnnnnnnnnnnnnnnnnnnnnnnnnnnnnnnnnnnnnnnnnnnnnnnnnnnnnnnnnnnnnnnnnnnnnnnnnnnnnnnnnnnnnnnnnnnnnnnnnnnnnnnnnnnnnnnnnnnnnnnnnnnnnnnnnnnnnnnnnnnnnnnnnnnnnnnnnnnnnnnnnnnnnnnnnnnnnnnnnnnnnatttactcattgttagcaaaatcaagatgtgactgaagatcagaggctcagttattaacctatgttgtagcagtgatgtcagtccattgattgtctttagagagttaatgttacaaaaaaagaattcttaataatcagacaaacatgatctgctgaggacacatgcgcttttgtagaatttaacatctggtgtttttctgaaaaaatatatatacatatattgctttatttgaaacaaattaaaatatgctgcatttg

SEQ ID NO: 22098 - DNA, 545 bp, Macaca Mulatta
  misc_feature (1)...(545): n = A,T,C or G
atggaggccgtgccccgcatgcctatgatctggctggatctgaaggaggctggtgacttccacttccaaccagctgttaagaannnnnnnnnnnnnnnnnnnnnnnnnnnnnnnnnnnnnnnnnnnnnnnnnnnnnnnnnnnnnnnnnnnnnnnnnnnnnnnnnnnnnnnnnnnnnnnnnnnnnnnnnnnnnnnnnnnnnnnnnnnnnnnnnnnnnnnnnnnnnnnnnnnnnnnnnnnnnnnnnnnnnnnnnnnnnnnnnnnnnnnnnnnnnnnnnnnnnnnnnnnnnnnnnnnnnnnnnnnnnnnnnnnnnnnnnnnnnnnnnnnnnnnnnnnnnnnnnnnnnnnnnnnnnnnnnnnnnnnnnnnnnnnnnnnnnnnnnnnnnnnnnnnnnnnnnnnnnnnnnnnnnnnnagggcatgaaggtctcctgtacccacttccagtgcgcagccggcgccttcgcctacctgcgggagcacttccctcaagcctacagcgtcgacatgagccgccagatccttactctcaacgtcaacctcatgctg

SEQ ID NO: 22099 - DNA, 150 bp, Macaca Mulatta
gcaaccatttttacattactgatgtaaatactttttgggataaaatagagtataaatcaattatacatgtttctcatttatgttctttgtcctcatgcacagaccatttttacaaagttataattttggcctatatgttttaatattctg

SEQ ID NO: 22100 - DNA, 610 bp, Macaca Mulatta
tttttcagtttgaagccgcagctaaaaaacttttagaaattttccccgactttggaaccaagcagctgtcattacatcaacacccagttgctggagagctctgagggcctggccgagggctccacgctgcttccaactggactgaaacattgaccctgactctatatttgcttcctgcagtcccccacgctgccatcagcgtggtcacagcagaaattcatgacagcaaacctcatgaaggacggtacatcctgaatgggggcagtgaggaatgggaagatgtgacttctgccgcctctgctgcagtcacagctgaaaagaacagtgttttacccggggagagacttgttaggaatggggtcccctggtcccactcgagcacgctgcccttgggaagctcactgcctgatgaacttttgtttgctgacgactcctcagaaagctcagaagtcctgatgtgaggagaggtgcggggagacattccaaaactcaagccagttcttctgctctaggagaatccagttgtatctgatgtttttggtatttgtcttccttaccaagtgaactccatggccccaaagcaccagatgaatgttgtcaagtaagctgt

SEQ ID NO: 22101 - DNA, 291 bp, Macaca Mulatta
  misc_feature (1)...(291): n = A,T,C or G
aagtgatcctcccgtccttggcctcccaaagtgctgggattacaggtgtgagccactgcacccagcccactttttntactctgaagtgattccagtcatctgtgtgtgtaactgcatcctatgagaagagcacaaatattgctgttccatgttctccactttcattttccactacaaatgaaaagcaatttttgagactgaatctgttgctattttaaaggttattgtgggaaactgagctaaaggagttagcatctttatttttgtatcaaagataaaggttattttgaa

SEQ ID NO: 22102 - DNA, 528 bp, Macaca Mulatta
cagcgcgtgcacacgggcgagaagccctacgcgtgcgccgactgtggcatgtctttccgccagaggtcggacgccgccaagcaccgccgcacccacaccggggagaggctgtacgcgtgcggcgagtgcggaaagcgcttcctgcacagctccaacgtggtccggcaccggcggacccaccacggggagaacccgtacgagtgccgggagtgcggccaggccttcagccagagctccaacctcctccagcaccagcgcgtgcacacgggggagcggcccttcgcctgccagtacttttgtcgcgccttcagccgcagctccttcctccgcgagcaccgccgcatccacaccggggagaagccccacgagtgcggccactgcgggcgcgcgttccgggcgctgtcgggcttcttccggcaccagcggctccacacgggcgagaagccgttccgctgcaccgagtgcggccgcgcctttcgcctgagcttccacctcatccagcaccagcgggtgcacggcgccgagtga

SEQ ID NO: 22103 - DNA, 1674 bp, Macaca Mulatta
  misc_feature (1)...(1674): n = A,T,C or G
cagaacatggtttcattggatattcacccgaactgctacagaacaacacgctgcccgattacagccccggggaatcttttttcactgtgtttggggttttcttcccagcggctacaggnnnnnnnnnnnnnnnnnnnnnnnnnnnnnnnnnnnnnnnnnnnnnnnnnnnnnnnnnnnnnnnnnnnnnnnnnnnnnnnnnnnnnnngtggattctgtacatcgtcttcgttttcctcctgggcgccatgtgcacgcgagaggccatttgatatgacttcttgatagcggaaaaggtnnnnnnnnnnnnnnnnnnnnnnnnnnnnnnnnnnnnnnnnnnnnnnnnnnnnnnnnnnnnnnnnnnnnnnnnnnnnnnnnnnnnnnnnnnnnnnnnnnnnnnnnnnnnnnnnnnnnnnnnnnnnnnnnnnnnnnnnnnnnnnnnnnnnnnnnnnnnnnnnnnnnnnnnnnnnnnnnnnnnnnnnnnnnnnnnnnnnnnnnnnnnnnnnnnnnnnnnnnnnnnnnnnnnnnnnnnnnnnnnnnnnnnnnnnnnnnnnnnnnnnnnnnnnnnnnnnnnnnnnnnnnnnnnnnnnnnnnnnnnnnnnnnnnnnnnnnnnnnnnnnnnnnnnnnnnnnnnnnnnnnnnnnnnnnnnnnnnnnnnnnnnnnnnnnnnnnnnnnnnnnnnnnnnnnnnnnnnnnnnnnnnnnnnnnnnnnnnnnnnnnnnnnnnnnnnnnnnnnnnnnnnnnnnnnnnnnnnnnnnnnnnnnnnnnnnnnnnnnnnnnnnnnnnnnnnnnnnnnnnnnnnnnnnnnnnnnnnnnnnnnnnnnnnnnnnnnnnnnnnnnnnnnnnnnnnnnnnnnnnnnnnnnnnnnnnnnnnnnnnnnnnnnnnnnnnnnnnnnnnnnnnnnnnnnnnnnnnnnnnnnnnnnnnnnnnnnnnnnnnnnnnnnnnnnnnnnnnnnnnnnnnnnnnnnnnnnnnnnnnnnnnnnnnnnnnnnnnnnnnnnnnnnnnnnnnnnnnnnnnnnnnnnnnnnnnnnnnnnnnnnnnnnnnnnnnnnnnnnnnnnnnnnnnnnnnnnnnnnnnnnnnnnnnnnnatttcttcttgaagtccaggctccaagaacaagatatcttgagaagatcaacttctttctatacccacatgtgcaacccctgggtctccctgttgggggnnnnnnnnnnnnnnnnnnnnnnnnnnnnnnnnnnnnnnnnnnnnnnnnnnnnnnnnnnnnnnnnnnnnnnnnnnnnnnnnnnnnnnnnnnnnnnnnnnnnnnnnnnnnnnnnnnnnnnnnnnnnnnnnnnnnnnnnnnnnnnnnnnnnnnnnnnnnnnnnnnnnnnnnnnnnctgcaggagcttgcggtcccctcaggagcagatcatcttggcgccatccctggctaaggttgacatggagatgactcagctcacccaggagaacgcagactttgccactcgggatcgctaccaccactcctccctcatgagccgggagcagctgatgcctccctactagatgcagcgctgggaccttcctctttcggagcggtcccacgcacagtggacccaagcccggaaccttcgtggggctgcttctcctccctgagaaactcaaggcccatccttccactgtcactttggacaatggaaatctacattttctt

SEQ ID NO: 22104 - DNA, 528 bp, Macaca Mulatta
  misc_feature (1)...(528): n = A,T,C or G
ctggctggatcggccgtcattgcttttggactatggtttcggttcggaggtgccataaaggagttatcatcagaggacaagtccccagagtatttctatgtgggnnnnnnnnnnnnnnnnnnnnnnnnnnnnnnnnnnnnnnnnnnnnnnnnnnnnnnnnnnnnnnnnnnnnnnnnnnnnnnnnnnnnnnnnnnnnnnnnnnnnnnnnnnnnnnnnnnnnnnnnnnnnnnnnnnnnnnnnnnnnnnnnnnnnnnnnnnnnnnnnnnnnnnnnnnnnnnnnnnnnnnnnnnnnnnnnnnnnnnnnnnnnnnnnnnnnnnnnnnnnnnnnnnnnnnnnnnnnnnnnnnnnnnnnnnnnnnnnnnnnnnnnnnnnnnnnnnnnnnnnnnnnnnnnnnnnnnnnnnnnnnnnnnnnnnnnnnnnnnnnnnnnnnnnnnnnnnnnnnnnnnnnnnatgcatcgatgnaaattgagaccataatcagtgttaagctccagctcattggaattgtcggtattggaattgcaggtc

SEQ ID NO: 22105 - DNA, 334 bp, Macaca Mulatta
actgaagggccttgagcaggtgtaaaggctctcaccacccgtgagcctgtgtccgcagctgctaccactccgggttgctccagcctgcgacttggtggaaggaattacttcctccggaggctacaggcgagaaaggtagggctgggccagcctctcctcccagctgttgggagagagttggcaggctgagtggcccagaccactcctggaagcagaagcgggactcccctgccttgcaaatgtgcctctccagactgccactgtactccttcccgccccgccctggcaccttctctgccctttctcgtccacacatctattaaatgcttctgtt

SEQ ID NO: 22106 - DNA, 85 bp, Macaca Mulatta
ggcatcatcctctcgctggccctggctggcgttcttggcatctgtattgtgatggcagtgtccatttggcttttcagaaggaaga

SEQ ID NO: 22107 - DNA, 584 bp, Macaca Mulatta
agacttcaatacttgtaatagaaacatgttccagacaatataaagttataaaaaaactgactgtgactcttttcattggattttgtattgcagtatattactataaatttagtccaaaacatctaaatccatgaaaataaaatatattccaattcttagaaatatcagcaatcatccaggaaataaataatttcctcttctccactattccacaagaaatagtgataccatgaaaccaaaataagaaaatattttctaatgagaaaataattacaagcttaagaaaatctttcttgctgaattcatgtaggataatatttactaaaattctatggaaacttttcaacatagataaaaagaatataagcaattaagactaccatattgataagtactgtttgaaacagtttgctttacctgtgtaaaagtatattttatgatacttttagctgatagcacataatcaaacttacccatgtcaacttaaaaagtttaagtccttccatcttacaagccttacctaatgtgtcttgcaaatgaaagaacacggctgagatcgttacatgtataatttcaggagatct

SEQ ID NO: 22108 - DNA, 614 bp, Macaca Mulatta
gggggggttctgaagaagcagctttcaaagctagtggcagagggtagctcctctcctgcctgtggcttgcactggccttgagagtatagggcagaaggatggcagatgagtgactccgcatccagagctgcctccctttaatccaggatcctgcccttcctgtcctgcaggagtgcctgttggtcgccagtgtggggtcagacaagttcgtcccacagggctgtctgagcagatgagattaaggcctgggtctctgttcagttaactcctgtgggcacaggggctgggaagagcaaaagcaggggtgcctacagtcagcaccatgctgggcctgccgtggaggggagctctgccttgggtgctgctgctgcttctcttcggcttccagctcccgctgatccatgcctggcatttccacgagcaaagggactgtgacgaatacaatgtcatggctcgttacctccctgccacagtggagtttgccgtgcacacattcaaccaacagagcaaggaccattatgcctacagactggtgcacatcttgaattcctggaaggagcaggtggagtccagaccgtactctcgatggagctactgctggggagaacaggtgt

SEQ ID NO: 22109 - DNA, 259 bp, Macaca Mulatta
gatccaaattcagaggcctcaggtaaagacatcattttaaggtatggagttgagaagtctgggagtgaggagattccagtccggctaagcttggtggagcatttccccattgagagccttccatgggaactcaatgttcccattgtaagtacaggaaacaagcactgtacttaccaaggagaaagaggagagagatggcagtgctgggagagtctcaaatagaaacccgtggaagctccaatgggcttgccttgatatc

SEQ ID NO: 22110 - DNA, 79 bp, Macaca Mulatta
agataaccaagacacaagttcgttagctgatgctgtagagaaagttgcaaagcaacaacaatcacaagcatcagagata

SEQ ID NO: 22111 - DNA, 274 bp, Macaca Mulatta
gccactccacggtcacttctatcacaggcccgtttagtcatccgcagagccctgtgccaggctggccagccacaagccatcaaccagctggatattcctcccatgttgattagctatctaaaacaccaactgtaatcttgcagtctccccaggaacttatgatgcctccaaaaaccacctggggactcaggtagctggagggcattacagcctcatccacttacctggagttgctctcctgtattatcctccacaataaaattatccagaaaat

SEQ ID NO: 22112 - DNA, 538 bp, Macaca Mulatta
ggtacccagcttctgttggaggcctgtgtccaagctactgtgccaatcttcatctacactagtaccctagaggtagccaggcccaactcctacaaggaaatcatccagaacggccatgaagagcctctggaaaacacatggtctgctccatacccatacagcaaaaagtttgctgagaaggctgtgctggtggccaatgggtggactctgaaaaatggtggcaccttgtacacttgtgccttaagaccaatggttatctatggggaagaaagcccaatcctttctgctggtataaatgaggccctgaacaacaataggatcctgtcaagtttcagcaagttctccagagtcaacccagtctatgttgacaacgtggcctgggctcacattctggccatgagggtcctgcaggaccccaagaaggccccaagtgtccaaggacagttctactacatctcagatgacacgcctcaccaaagctacgataacaataattacaccctgagcaaagagttcagcctccgccttgattccagat

SEQ ID NO: 22113 - DNA, 426 bp, Macaca Mulatta
ccccgggggaccaagatggaggccacagactaagatggcctagaggggtggaactggtgatgggatttccttcattcccttctgataaaggtactccccaaccctgagacccagaaggagctgagttttctagaccagaagaggatgacaatgggaacgggtgtttggaagttccaaggtgtgttcaaagaggcttgccttgacgaagggctggcatctgtcttccctgactcagcttctcaggtcttcagcctccacctcgtctaagctttggtctataaagtgcgctacagaaatagccttttactgtgtcttccttcttgagggagggtggtgaagctgagataactatctgtttgaatcttaccacgttcatttcattccccccagagctctgtatgagaggtaccataaaatttgggcttg

SEQ ID NO: 22114 - DNA, 215 bp, Macaca Mulatta
gacctgttccccgaggccaagcggaaacggcctgccaagtctccaggccggaagcggcgggaaacggatcgaggcaggggtcgtctttgtgaccggaagtttcccaagcccaaggacaagccccaggggtcccagaccaggcgggggcccagaggggcttcccgggatggtgggcgaggccagggccggggccgctcacggaagagagtggcctg

SEQ ID NO: 22115 - DNA, 149 bp, Macaca Mulatta
gatatatctacatttccattggaaaatgcccctattggacataatagacaatacaacatggtgccattctggcccccagtcaccaacacagaaatgtttgttactgctccagacaacctgggatacacttatgaagttcaatggccaag

SEQ ID NO: 22116 - DNA, 662 bp, Macaca Mulatta
ccaagctagatggtgaacgtatgcaaatgcacaaagatggagatgtatataaatacttctcccgaaatggatataactatactgatcagtttggtgcttctcctactgaaggttctcttaccccattcattcataatgcattcaaaacagatatacaaatctgtattcttgatggtgagatgatggcctataatcctaatacacaaactttcatgcaaaagggaattaagtttgatattaaaagaatggtagaagattctgatctgcaaacttgttattgtgtttttgatgtattgatggttaataataaaaaactagggcatgagactctgagaaagaggtatgaaattcttagtagtatttttacacaaattccaggtagaatagaaatagtgcagaaaacacaagctcatactaagaatgaagtaattgatgcactgaatgaagcaatagataaaagagaagagggaatcatgataaaacaacctctatccatctacaagccagacaaaagaggtgaagggtggttaaaaattaaaccagagtatgtcactggactaatggatgaattggacattttaattgttggaggatattggggtaaaggatcacggggtggaatgatgtctcattttttgtgtgcagtagcagagaagccccct

SEQ ID NO: 22117 - DNA, 826 bp, Macaca Mulatta
  misc_feature (1)...(826): n = A,T,C or G
acgttcacgtatttgctttggaatacaaagtaggagatggacaacgtatttaccttgtgacaacctatgctgaattttggttttactataaatccagnnnnnnnnnnnnnnnnnnnnnnnnnnnnnnnnnnnnnnnnnnnnnnnnnnnnnnnnnnnnnnnnnnnnnnnnnnnnnnnnnnnnnnnnnnnnnnnnnnnnnnnnnnnnnnnnnnnnnnnnnnnnnnnnnnnnnnnnnnnnnnnnnnnnnnnnnnnnnnnnnnnnnnnnnnnnnnnnnnnnnnnnnnnnnnnnnnnnnnnnnnnnnnnnnnnnnnnnnnnnnnnnnnnnnnnnnnnnnnnnnnnnnnnnnnnnnnnnnnnnnnnnnnnnnnnnnnnnnggtaattttttgagaaaaattttgcagcctgctcttgacttgcttggcagtgaagatgatgatagcgcttcagagacaacaggccacggatttccccattttttggaagcacctgcaagacaaggattttctttcnnnnnnnnnnnnnnnnnnnnnnnnnnnnnnnnnnnnnnnnnnnnnnnnnnnnnnnnnnnnnnnnnnnnnnnnnnnnnnnnnnnnnnnnnnnnnnnnnnnnnnnnnnnnnnnnnnnnnnnnnnnnnnnnnnnnnnnnnnnnnnnnnnnnnnnngagtttatacaagaaatagaaactttcggctatataaatcatcaaaaataggaaagcgtgtggctttggaggttactgaagataacacattttttcctataccgtcaaaggatgtttctgacgaatatcagtattttctctcttctttggtcagcaatgtcaggt

SEQ ID NO: 22118 - DNA, 286 bp, Macaca Mulatta
  misc_feature (1)...(286): n = A,T,C or G
gataatgaaattttcaccagaaagtgttgcagcgtttatagcagtccttggcattctttccattattgcacagnnnnnnnnnnnnnnnnnnnnnnnnnnnnnnnnnnnnnnnnnnnnnnnnnnnnnnnnnnnnnnnnnnnnnnnnnnnnnnnnnnnnnnnnnnnnnnnnnnnnnnnnnnnnnnnnggatgatgtgggctgctggggcagtagcggccatgtctagcatcacctttcctgccgtcagtgcacttgtttcgcgaactgctgatgctgatcaacagggt

SEQ ID NO: 22119 - DNA, 473 bp, Macaca Mulatta
tgtggggatggctggacatgtcagcatgttaagtaaaaggagaatttatgaaatagtaatgcaattctgatatcttctttctaaaattcaagagtgcaattttgtttcaaatacagtatattgtctatttttaaggcctcatctggtctctgttttaataatttgtttgtcagaagaccctgaagtatacctaggtcttttttttgaaagtctctaaattcagaatcatttttaatttaaagttctacaaataattgttactgcaaacattttattttaaaacgctgatagactgatatttcttggaagaaaatataaaatatcaaacactggttatcacttgtgataggaaagagaatattcaacctgttgttatttctcgttagaaatgtaaaccttcaatatctgtcgtagttaatgacacgacttcacaattggaaacggagcctcgctcatggatgctgtgaatcatt

SEQ ID NO: 22120 - DNA, 781 bp, Macaca Mulatta
gggggacgctggcggatctctgaagagctcggttgcgatcctctctcgcgcacgctgcctaacctccagcacctccttggtcccgcgcgctccctcgtgtcgcccctcggagcagcaaccgcctcggtcgccgttacccggaaagaagtcagagaccccgcgaggtcgccgccaccgccatgcccaagaataaaggtaaaggaggtaaaaatagacgcagaggtaagaatgagaatgaatctgaaaaaagagaactggtgttcaaagaggatggtcaggagtatgctcaggtaatcaaaatgttgggaaatggacggctagaagcaatgtgttttgatggtgtaaagaggttatgtcacatcagaggaaaattgagaaaaaaggtttggataaatacctcggacattatattggtcggtctccgagactaccaggataacaaagctgatgtgattttaaaatacaatgcagatgaagctagaagtctgaaggcatacggcgagcttccagagcatgctaaaatcaatgaaactgatacatttggtcctggagatgatgatgaaattccagttcgatgacatcggagatgatgatggaaaatattgatgacttcttaattgaactcaacatttttacattccctccttttctgggattggccctacaatttgggaatttttgaccctggaccaaaggaaaaatttaaaattttctcttaagccctggaaatgcgccatcctgttttaaagcccagaactggagttttggttttcccaaaggt

SEQ ID NO: 22121 - DNA, 943 bp, Macaca Mulatta
  misc_feature (1)...(943): n = A,T,C or G
caaattcataacacttatttcttggtgacacgtggttaataagttggacagttcaggaaagaagaagtttagagcaatagcaaaggaaaggaaacaatatttagcaaggtttattcttcccttgtgtcttagtatgtttctgagtgtgcacacaggcccagtgattccacgaatttttgagtgatcactgcctctgttctggcccttccccatctagaaccgccgctggcactggagcagtgggtccctgttctcttacaaatcctgggacattggagccccaaacagtattaatcctggctactgtgtgagcctgacctcaagctcaggtgagagacagagaatccatccacctctttctgttctctcctgcttagctctaggaatggaactggaactgggatagaggaaaggtgaactcctcattaaggaaatgggtgtttggtttttgtcctgagtcctaaagccaggaggctcatactctttctggtctcccaattctaactcttctcattgacttataggattccggaaatggaaggacgtaccttgtgaagacaagttctcctttgtctgcaagttcaaaaactagaggctgctagaaaatagatgtctagaactgatccagcaattactacagagtcaaaaattaaaccggaccatctctccaattcaactcaacctggacactctcttctctgctgagtttgccttgttaatcttcagtacttttacctaccccagtctctggaaccctaaataataaaaataaacatgtttccactattgtgctgtcttactgtgtctgctatttcacaactgatgccntagtggttgagatgagaatgattancacaagcttgctcaggcctatccacttttaaaagtctatcacataccatgcatattggaatcagtatttatggaatatgtggctttgcta

SEQ ID NO: 22122 - DNA, 488 bp, Macaca Mulatta
cataaagtcatccccaaggctccgtctactctaaattatgtctccttataagttattgctgctccaggagatcgtccttcattgtccaggggcctggctcccacgtggttgcagatacctcagacctggtgctctaggctgtgctgagcccactctgccgagggtgcatccaagcggggggccacttgagaagtgaataaatggggcagtttcgggaacttctgtgttttcatgttatggatctctttgcatttgaataaagactatctctgttcctaacaaatgtgctggctgtccccacacttgttctgggccctgtgcagtgcagggacacctggtgtgtgctaatgggggacacacgttcagaaggtgcctggtgatctatctgggccatgaggcgcatactctgtgtgtgtgggagggaagcttgagacccacaggtctccccacaacagaggccacccctggcccacaggatttcagaagac

SEQ ID NO: 22123 - DNA, 1956 bp, Macaca Mulatta
  misc_feature (1)...(1956): n = A,T,C or G
ggccgtaggttccgctgtctcgggaaccttcgtagccctcggtcaggcggcggcgggggcggcagtagcggcggaggtggcttcaggcctccggtgcggctgcaatgctgagctcacgggccgaggcggcgatgaccgcggccgacagggccatccagcgcttcctgaggaccggggcggccgtcannnnnnnnnnnnnnnnnnnnnnnnnnnnnnnnnnnnnnnnnnnnnnnnnnnnnnnnnnnnnnnnnnnnnnnnnnnnnnnnnnnnnnnnnnnnnnnnnnnnnnnnnnnnnnnnnnnnnnnnnnnnnnnnnnnnnnnnnnnnnnnnnnnnnnnnnnnnnnnnnnnnnnnnnnnnnnnnnnnnnnnnnnnnnnnnnnnnnnnnnnnnnnnnnnnnnnnnnnnnnnnnnnnnnnnnnnnnnnnnnnnnnnnnnnnnnnnnnnnnnnnnnnnnnnnnnnnnnnnnnnnnnnnnnnnnnnnnnnnnnnnnnnnnnnnnnnnnnnnnnnnnnnnnnnnnnnnnnnnnnnnnnnnnnnnnnnnnnnnnnnnnnnnnnnnnnnnnnnnnnnnnnnnnnnnnnnnnnnnnnnnnnnnnnnnnnnnnnnnnnnnnnnnnnnnnnnnnnnnnnnnnnnnnnnnnnnnnnnnnnnnnnnnnnnnnnnnnnnnnnnnnnnnnnnnnnnnnnnnnnnnnnnnnnnnnnnnnnnnnnnnnnnnnnnnnnnnnnnnnnnnnnnnnnnnnnnnnnnnnnnnnnnnnnnnnnnnnnnnnnnnnnnnnnnnnnnnnnnnnnnnnnnnnnnnnnnnnnnnnnnnnnnnnnnnnnnnnnnnnnnnnnnnnnnnnnnnnnnnnnnnnnnnnnnnnnnnnnnnnnnnnnnnnnnnnnnnnnnnnnnnnnnnnnnnnnnnnnnnnnnnnnnnnnnnnnnnnnnnnnnnnnnnnnnnnnnnnnnnnnnnnnnnnnnnnnnnnnnnnnnnnnnnnnnnnnnnnnnnnnnnnnnnnnnnnnnnnnnnnnnnnnnnnnnnnnnnnnnnnnnnnnnnnnnnnnnnnnnnnnnnnnnnnnnnnnnnnnnnnnnnnnnnnnnnnnnnnnnnnnnnnnnnnnnnnnnnnnnnnnnnnnnnnnnnnnnnnnnnnnnnnnnnnnnnnnnnnnnnnnnnnnnnnnnnnnnnnnnnnnnnnnnnnnnnnnnnnnnnnnnnnnnnnnnnnnnnnnnnnnnnnnnnnnnnnnnnnnnnnnnnnnnnnnnnnnnnnnnnnnnnnnnnnnnnnnnnnnnnnnnnnnnnnnnnnnnnnnnnnnnnnnnnnnnnnnnnnnnnnnnnnnnnnnnnnnnnnnnnnnnnnnnnnnnnnnnnnnnnnnnnnnnnnnnnnnnnnnnnnnnnnnnnnnnnnnnnnnnnnnnnagctcctccacatacctcttccggctgatggcagttgtcgtccaccatggagacatgcactctggacactttgtcacttaccgacggtccccaccttcggccaggaaccctctctcaaccagcaaccagtggctgtgggtctccgatgacactgtccgcaaggccagcctgcaggaggtcctgtcctccagcgcctacctgctgttctatgagcgcgtcctttccaggatgcaacaccagagccaggagtacaagtctgaagaatgacttcgccctcctgcaaggctagagctgatggcactgtcttcacactgtccgggaaaaaagtaaaactgtactgttgtgtgtgcaagcagccgcactggagccttccagctttccggtgtgttctgagagcaggctccacctgggagccagccccaattcataccaaatcaggctccctgaacagctctgttcatgtgtgtagaaggtactgttgttgtattaagaaagcattcatgatgtctggagtgtctttttactcatctgatacaggtcattaaaagaatgcagattcttgaagcc

SEQ ID NO: 22124 - DNA, 151 bp, Macaca Mulatta
tgtgcaaatgtaatcgacagttgtgtcaaaaccgtgttgtccaacatggtcctcaagtgaggctacaggtgttcaaaactgagcagaagggatggggtgtacgctgcctagatgacattgacagagggacgtttgtttgcatttattcagg

SEQ ID NO: 22125 - DNA, 163 bp, Macaca Mulatta
caggtcctggctgccctgggaagagacaagaagtgaatgaagaaagaggaagattccaggacctagataatgatttttgtgggcactcttcactggtgactgagctttctactagaaatttaagcagatccagaggagacaaagacagagtatcccaggtgct

SEQ ID NO: 22126 - DNA, 345 bp, Macaca Mulatta
  misc_feature (1)...(345): n = A,T,C or G
tcatgcgtgccatgctctcctctacgcgccggaccctggcatgctcttcggccgcatcccgctgcgctacgccgtactgngatgcagatgcgcttcgatggacgcctgggcttccccggcggattcgtggacacgcaggacagcagcctagaggacgggctgaaccgcgagctgcgcgaggagctcggcgaggcggcggccgctttccgcgtggagcgcactgactaccgcagctcccacgccgggtcagggccacgcgttgtggcccacttctatgccaagcgtctgacgctcgagcagctgttggctgtggaggccggcgcaacacgcgccaaggaccacggg

SEQ ID NO: 22127 - DNA, 140 bp, Macaca Mulatta
tgcccgtgctggctagatggtcatcttcaacagccggtagccgcgtgtggaggggacagagcgtgagctgagcaggccacacttcaaactactttgctgctaatattttcctcctgagtgcttgcttttcatgcaaactc

SEQ ID NO: 22128 - DNA, 628 bp, Macaca Mulatta
ggttgttggtgtggagtggaagatgaggcaccttctaagcaaagtatttatatacaaagagagactcaggtcaggattcctatggcaggtgtgtctcccaagaaggcccacccctgtgagatgtgcggccctatcttaggagacattccacacatgggagatcatcagggaacacatcccaagcagaaactgcacagctgtgaggcctgggggaacaaattgtatgacagtggaaactttcatcaacaccagaatgagtacattggagagaaaccctacagaggcagtgttgaggaagtgttgtttgtgaagaggtgtaagttccatgtgtcagaggagtcatctgtcttcagtcagagtgggaaagactttttgcccatttcaggattactccagcaggaggccactcacactggggagaagtcaaacagcaaaactgagtgtgtgtctccctttcagtgggggggagctcactatagccatggagaatccatgaaacattttagcaccaaacatacactcagtcagcacgagagacttctccctagagaagagtgttatgtgtgctgtgaatgtgggaaatcctttagcaaacatgctagctgcagtaatcatcagagagttcaca

SEQ ID NO: 22129 - DNA, 272 bp, Macaca Mulatta
agagtctggctaaggcttcgttcctgattcacttctcagcgtaacatctggtgctccagttcggccgagtgggcccagacacattcaccatggacttctgcttcccgtttagcccactccaggccttcggcgtctgcttgtccagtttcagttggaagctggctgttgaataactcaataaaataccatacccttaccagtttctgtgcctcctcatttggaggaagggcccagacatgccttcttttgcaccaccttaataaccaacactg

SEQ ID NO: 22130 - DNA, 783 bp, Macaca Mulatta
  misc_feature (1)...(783): n = A,T,C or G
gggggcttcaggaactgcgcaaggaggaggagacgctgctgcggttgaaggcagccctgcacgaccagctgaaccgcctcaaggttgaagaattggccctccaatcaatgatcagttctagaagaggggatgagatgctgtcttctcacactgtacctgaacagtcacatgatatgttggtgcatgtagacaatgaagcatcaatcaaccaaacgaccctggagttgagcacaaagagtcatgtgacnnnnnnnnnnnnnnnnnnnnnnnnnnnnnnntcagattcctaaagaagggggaaagccaggctggtcagttatacaaattgcatttctaagtctcaggcacttctcctcaaggaactcatcttgccctgggccctgtgatctgcttgaaaggaaagcaagaactataaggaggatgtgtagttgcaaaaatggctccatcagtaactcaagcttcagaatgttatgacatacagaaaatcaaagatgctatgtcttagcattgagcaatatgggtggtgctgtctgtaatctggtcagattcggttaactgttcaaaacaatttcctctgaaatactgttggggaaagtctggcatttgcaaaaagagcagaagttttaattcaagcccagtctttccagtcaacaatgccctctttgaaagaaaacccaattaaaggctgttttgcatgcccgcttgattcttttgtgaacagtttagcttcacaggtcttggaaccgaaaagatggacaagggggggaaggactgaaggggccc

SEQ ID NO: 22131 - DNA, 460 bp, Macaca Mulatta
ttatatacatgtatatataataaactagtgtttatgaataatactattaagaaaatgaaaattgttctagtttcttcactatatcaatgatatttttacagtatcattgttttctgttctcacgtttttctcaaccttttatttctccatagtgctattgatgtttcagaacactttactcagaaccaaagcagaccagaagaaatcactcttagagaaaattttgacaaggatctacttttacaagctgagagctttggtgagaatatttgagaactcaaaattacaaattataatcaattatatttgtatttgtgtattgaaacaatgccagtagacgtagctatagaatgaatcttttgatgcataaatgtaattcccaatacatctttccttgccttttcctagtatagatgtcaatgccaagactcagtcttaggatatacttctattctcagtg

SEQ ID NO: 22132 - DNA, 829 bp, Macaca Mulatta
gtgggcgagggaatagtcagagtgatcacaatctttcagctaacttattctactccgatgatcggctgaatgtaacagaggaactaacgtccaacgacaagacgaggattctcaacgtccagtccaggctcacagacgccaaacgcattaattggcgaacagtgctgagtggaggcagcctctacatcgagatcccgggcggcgcgctgcctgaggggagcaaggacagctttgcagttctcctggaattcgctgaggagcagctgcgagccgaccatgtcttcatttgcttccacaagaaccgcgaggacagagccgccttgctccgaaccttcagctttttgggctttgagattgtgagaccggggcatccccttgtccccaagagacccgacgcttgcttcatggcctacacgttcgagagagagtcttcgggagaggaggaggagtagggccgcctgggggctgggcatccggcccctggggccaccccttgtcagccgggtgggtggaaaccgtagactcgctcatctcgcctgggtttgtccgcatgttgtaattgtgcaaataaatgctcactccaaattagcgtatatttcttgaagtttaatattgtgtttgtgatactgaagtatttgctttaattctaaataaaaatttatattttacttttttattgctggtttaagatgattcagattatccttgtactttgaggagaagtttcttatttggagtcttttggaaacagtcttagtcttttaacttggaaagattaggtattaatcccctctattgctctccgaaaaccaataaagtgattacaccc

SEQ ID NO: 22133 - DNA, 124 bp, Macaca Mulatta
ctacaccagctctcagcccctgcgtgtggggtactatgagactgacaactataccatgcccaccccggccatgaagcgggccgtgctggagaccaaacagagccttgaggctgcggggcacacg

SEQ ID NO: 22134 - DNA, 153 bp, Macaca Mulatta
gataataaaaagtcgctcgcagcagcgtaacttccagcttctggtaatcactcatgatgaagattttgtggagcttttaggacgtttctgaatatgtggagaaattctacaggattaaaaagaacatcgatcagtgctcagagatttgaaatg

SEQ ID NO: 22135 - DNA, 5337 bp, Macaca Mulatta
  misc_feature (1)...(5337): n = A,T,C or G
aagacagaaccttatttcattggaatcttttgctttgaagctgggatcaaaattgtggccctggggttcatcttccataagggttcatacctccgcaatggctggaatgtcatggacttcatcgtggtcctcagtgnnnnnnnnnnnnnnnnnnnnnnnnnnnnnnnnnnnnnnnnnnnnnnnnnnnnnnnnnnnnnnnnnnnnnnnnnnnnnnnnnnnnnnnnnnnnnnnnnnnnnnnnnnnnnnnnnnnnnnnnnnnnnnnnnnnnnnnnnnnnnnnnnnnnnnnnnnnnnnnnnnnnnnnnnnnnnnnnnnnnnnnnnnnnnnnnnnnnnnnnnnnnnnnnnnnnnnnnnnnnnnnnnnnnnnnnnnnnnnnnnnnnnnnnnnnnnnnnnnnnnnnnnnnnnnnnnnnnnnnnnnnnnnnnnnnnnnnnnnnnnnnnnnnnnnnnnnnnnnnnnnnnnnnnnnnnnnnnnnnnnnnnnnnnnnnnnnnnnnnnnnnnnnnnnnnnnnnnnnnnnnnnnnnnnnnnnnnnnnnnnnnnnnnnnnnnnnnnnnnnnnnnnnnnnnnnnnnnnnnnnnnnnnnnnnnnnnnnnnnnnnnnnnnnnnnnnnnnnnnnnnnnnnnnnnnnnnnnnnnnnnnnnnnnnnnnnnnnnnnnnnnnnnnnnnnnnnnnnnnnnnnnnnnnnnnnnnnnnnnnnnnnnnnnnnnnnnnnnnnnnnnnnnnnnnnnnnnnnnnnnnnnnnnnnnnnnnnnnnnnnnnnnnnnnnnnnnnnnnnnnnnnnnnnnnnnnnnnnnnnnnnnnnnnnnnnnnnnnnnnnnnnnnnnnnnnnnnnnnnnnnnnnnnnnnnnnnnnnnnnnnnnnnnnnnnnnnnnnnnnnnnnnnnnnnnnnnnnnnnnnnnnnnnnnnnnnnnnnnnnnnnnnnnnnnnnnnnnnnnnnnnnnnnnnnnnnnnnnnnnnnnnnnnnnnnnnnnnnnnnnnnnnnnnnnnnnnnnnnnnncggcacaaggaaaggcttctgcgcatctccattcgccacatggttaaatcccaggtgttttactggattgtgctgagccttgtagcactcaacactgcctgtgtggccattgtccatcacaaccagccccagtggctcacccacctcctctnnnnnnnnnnnnnnnnnnnnnnnnnnnnnnnnnnnnnnnnnnnnnnnnnnnnnnnnnnnnnnnnnnnnnnnnnnnnnnnnnnnnnnnnnnnnnnnnnnnnnnnnnnnnnnnnnnnnnnnnnnnnnnnnnnnnnnnnnnnnnnnnnnnnnnnnnnnnnnnnnnnnnnnnnnnnnnnnnnnnnnnnnnnnnnnnnnnnnnnnnnnnnnnnnnnnnnnnnnnnnnnnnnnnnnnnnnnnnnnnnnnnnnnnnnnnnnnnnnnnnnnnnnnnnnnnnnnnnnnnnnnnnnnnnnnnnnnnnnnnnnnnnnnnnnnnnnnnnnnnnnnnnnnnnnnnnnnnnnnnnnnnnnnnnnnnnnnnnnnnnnnnnnnnnnnnnnnnnnnnnnnnnnnnnnnnnnnnnnnnnnnnnnnnnnnnnnnnnnnnnnnnnnnnnnnnnnnnnnnnnnnnnnnnnnnnnnnnnnnnnnnnnnnnnnnnnnnnnnnnnnnnnnnnnnnnnnnnnnnnnnnnnnnnnnnnnnnnnnnnnnnnnnnnnnnnnnnnnnnnnnnnnnnnnnnnnnnnnnnnnnnnnnnnnnnnnnnnnnnnnnnnnnnnnnnnnnnnnnnnnnnnnnnnnnnnnnnnnnnnnnnnnnnnnnnnnnnnnnnnnnnnnnnnnnnnnnnnnnnnnnnnnnnnnnnnnnnnnnnnnnnnnnnnnnnnnnnnnnnnnnnnnnnnnnnnnnnnnnnnnnnnnnnnnnnnnnnnnnnnnnnnnnnnnnnnnnnnnnnnnnnnnnnnnnnnnnnnnnnnnnnnnnnnnnnnnnnnnnnnnnnnnnnnnnnnnnnnnnnnnnnnnnnnnnnnnnnnnnnnnnnnnnnnnnnnnnnnnnnnnnnnnnnnnnnnnnnnnnnnnnnnnnnnnnnnnnnnnnnnnnnnnnnnnnnnnnnnnnnnnnnnnnnnnnnnnnnnnnnnnnnnnnnnnnnnnnnnnnnnnnnnnnnnnnnnnnnnnnnnnnnnnnnnnnnnnnnnnnnnnnnnnnnnnnnnnnnnnnnnnnnnnnnnnnnnnnnnnnnnnnnnnnnnnnnnnnnnnnnnnnnnnnnnnnnnnnnnnnnnnnnnnnnnnnnnnnnnnnnnnnnnnnnnnnnnnnnnnnnnnnnnnnnnnnnnnnnnnnnnnnnnnnnnnnnnnnnnnnnnnnnnnnnnnnnnnnnnnnnnnnnnnnnnnnnnnnnnnnnnnnnnnnnnnnnnnnnnnnnnnnnnnnnnnnnnnnnnnnnnnnnnnnnnnnnnnnnnnnnnnnnnnnnnnnnnnnnnnnnnnnnnnnnnnnnnnnnnnnnnnnnnnnnnnnnnnnnnnnnnnnnnnnnnnnnnnnnnnnnnnnnnnnnnnnnnnnnnnnnnnnnnnnnnnnnnnnnnnnnnnnnnnnnnnnnnnnnnnnnnnnnnnnnnnnnnnnnnnnnnnnnnnnnnnnnnnnnnnnnnnnnnnnnnnnnnnnnnnnnnnnnnnnnnnnnnnnnnnnnnnnnnnnnnnnnnnnnnnnnnnnnnnnnnnnnnnnnnnnnnnnnnnnnnnnnnnnnnnnnnnnnnnnnnnnnnnnnnnnnnnnnnnnnnnnnnnnnnnnnnnnnnnnnnnnnnnnnnnnnnnnnnnnnnnnnnnnnnnnnnnnnnnnnnnnnnnnnnnnnnnnnnnnnnnnnnnnnnnnnnnnnnnnnnnnnnnnnnnnnnnnnnnnnnnnnnnnnnnnnnnnnnnnnnnnnnnnnnnnnnnnnnnnnnnnnnnnnnnnnnnnnnnnnnnnnnnnnnnnnnnnnnnnnnnnnnnnnnnnnnnnnnnnnnnnnnnnnnnnnnnnnnnnnnnnnnnnnnnnnnnnnnnnnnnnnnnnnnnnnnnnnnnnnnnnnnnnnnnnnnnnnnnnnnnnnnnnnnnnnnnnnnnnnnnnnnnnnnnnnnnnnnnnnnnnnnnnnnnnnnnnnnnnnnnnnnnnnnnnnnnnnnnnnnnnnnnnnnnnnnnnnnnnnnnnnnnnnnnnnnnnnnnnnnnnnnnnnnnnnnnnnnnnnnnnnnnnnnnnnnnnnnnnnnnnnnnnnnnnnnnnnnnnnnnnnnnnnnnnnnnnnnnnnnnnnnnnnnnnnnnnnnnnnnnnnnnnnnnnnnnnnnnnnnnnnnnnnnnnnnnnnnnnnnnnnnnnnnnnnnnnnnnnnnnnnnnnnnnnnnnnnnnnnnnnnnnnnnnnnnnnnnnnnnnnnnnnnnnnnnnnnnnnnnnnnnnnnnnnnnnnnnnnnnnnnnnnnnnnnnnnnnnnnnnnnnnnnnnnnnnnnnnnnnnnnnnnnnnnnnnnnnnnnaaggctgtcttcgactgcgtggtgacctccttgaagaatgtcttcaacatacttattgtctacaagctcttcatgttcatctttgctgtcatcgcagttcagctcttcaagggaaagttcttttattgcacggacagttccaaggacacagagaaggagtgcatnnnnnnnnnnnnnnnnnnnnnnnnnnnnnnnnnnnnnnnnnnnnnnnnnnnnnnnnnnnnnnnnnnnnnnnnnnnnnnnnnnnnnnnnnnnnnnnnnnnnnnnnnnnnnnnnnnnnnnnnnnnnnnnnnnnnnnnnnnagttctgcagcactctgtagatgtgacagaggaagaccgaggcccaagccgcagcaaccgcatggagatgtctatcttttatgtggtctactttgtggtcttccctttcttctttgtcaatatctttgtggctctcatcatcatcaccttccaggagcaaggggataagatgatggaggagtgcagcctggagaagaatgannnnnnnnnnnnnnnnnnnnnnnnnnnnnnnnnnnnnnnnnnnnnnnnnnnnnnnnnnnnnnnnnnnnnnnnnnnnnnnnnnnnnnnnnnnnnnnnnnnnnnnnnnnnnnnnnnnnnnnnnnnnnnnnnnnnnnnnnnnnnnnnnnnnnnnnnnnnnnnnnnnnnnnnnnnnnnnnnnnnnnnnnnnnnnnnnnnnnnnnnnnnnnnnnnnnnnnnnnnnnnnnnnnnnnnnnnnnnnnnnnnnnnnnnnnnnnnnnnnnnnnnnnnnnnnnnnnnnnnnnnnnnnnnnnnnnnnnnnnnnnnnnnnnnnnnnnnnnnnnnnnnnnnnnnnnnnnnnnnnnnnnnnnnnnnnnnnnnnnnnnnnnnnnnnnnnnnnnnnnnnnnnnnnnnnnnnnnnnnnnnnnnnnnnnnnnnnnnnnnnnnnnnnnnnnnnnnnnnnnnnnnnnnnnnnnnnnnnnnnnnnnnnnnnnnnnnnnnnnnnnnnnnnnnnnnnnnnnnnnnnnnnnnnnnnnnnnnnnnnnnnnnnnnnnnnnnnnnnnnnnnnnnnnnnnnnnnnnnnnnnnnnnnnnnnnnnnnnnnnnnnnnnnnnnnnnnnnnnnnnnnnnnnnnnnnnnnnnnnnnnnnnnnnnnnnnnnnnnnnnnnnnnnnnnnnnnnnnnnnnnnnnnnnnnnnnnnnnnnnnnnnnnnnnnnnnnnnnnnnnnnnnnnnnnnnnnnnnnnnnnnnnnnnnnnnnnnnnnnnnnnnnnnnnnnnnnnnnnnnnnnnnnnnnnnnnnnnnnnnnnnnnnnnnnnnnnnnnnnnnnnnnnnnnnnnnnnnnnnnnnnnnnnnnnnnnnnnnnnnnnnnnnnnnnnnnnnnnnnnnnnnnnnnnnnnnnnnnnnnnnnnnnnnnnnnnnnnnnnnnnnnnnnnnnnnnnnnnnnnnnnnnnnnnnnnnnnnnnnnnnnnnnnnnnnnnnnnnnnnnnnnnnnnnnnnnnnnnnnnnnnnnnnnnnnnnnnnnnnnnnnnnnnnnnnnnnnnnnnnnnnnnnnnnnnnnnnnnnnnnnnnnnnnnnnnnnnnnnnnnnnnnnnnnnnnnnnnnnnnnnnnnnnnnnnnnnnnnnnnnnnnnnnnnnnnnnnnnnnnnnnnnnnnnnnnnnnnnnnnnnnnnnnnnnnnnnnnnnnnnnnnnnnnnnnnnnnnnnnnnnnnnnnnnnnnnnnnnnnnnnnnnnnnnnnnnnnnnnnnnnnnnnnnnnnnnnnnnnnnnnnnnnngcctctgacctgactgtgggcaaaatctatgcagcaatgatgatcatggactactataagcagagtaaggtgaagaagcagaggcagcagctggaggaacagncagaaaaatgcccccatgttccaacgcatggagccctcatctctgcctc

SEQ ID NO: 22136 - DNA, 833 bp, Macaca Mulatta
gggcctttttcctctcttaagcgcggggagcccacaacttgtgcgctctctttctgctgtttcccagctctcggatacagccgacaccatgggtttcggagacctgaaaagccccgccggcctccaggtgctcaacgattacctggcggacaagagctacatcgaggggtatgtgccatcacaagcagatgtggcagtatttgaagccgtgtccgggccaccgcctgctgacttgtgtcatgccctacgttggtataatcacatcaagtcctacgaaaaggaaaaggccagcctgccaggagtgaagaaagctttgggcaagtatggtcctgctgatgtggaagacactacaggaagtggagctacagatagtaaagatgatgatgatattgatctctttggatctgatgatgaggaggaaagtgaagaggctaagagactaagagaagaacgtcttgcacaatatgaatcaaagaaagccaaaaaacctgcacttgttgccaagtcttccatcttactagatgtgaaacctttgggatgatgagacagatatggcaaaattagaggaagtgcgtcagaaaccattcaagccagacggcttagtcttggggctcatctaaactagttccagtggggatatggcattaaaaaaaacttcaaaatacagtggtgtagtttgaaaatgataaaatttgggaaaaaatatgcctggaaggaccaaaatcctgcctttttgaggaactattgtggcagtcccatgggaagttgcctggctttcaaacaaaatctttaaaatccatcacctgggaactattgggattttttaataaaat

SEQ ID NO: 22137 - DNA, 617 bp, Macaca Mulatta
ctgaccccaccgcctcttcccccatccctggattccgcctccctggctttggccaattcagtgagatgccctgcatgcacggaaagccaaagcgaccggtgctcccagatgctgcagcctctggcgagagctgacgacagatgaaatcaccagagcgggggggcccgcgagaaccctcggggaccttccgctgccctctcggcacacattctcaagtggagcccgcacagcgagacgcgggtggcggcagggcatcccagggtgcagccccggggctccagtccttggaaataattaggcaaattctaaaggtctcaaaaggagcaaagtaaaccgtggaggacaaagaaaagcgttgttatttttgtctttccagccagcctgctggctcccaagagagggactttttcagttgagactccacttaagagaagatgcaaagttaaagccctggggtcaggggaggggctgggggcaggaaactacctctggcttcattcttttaagccacgtgggaattttcttgagggacaggtggaccctgatatccctgtggccttgcccaagggctcagctggtctttctgagtcacagctgcagggtgctcggggctggga

SEQ ID NO: 22138 - DNA, 420 bp, Macaca Mulatta
  misc_feature (1)...(420): n = A,T,C or G
aactgtcagtacggctgtgagacacagaagaagggccacagtgcctgtgtccatcctcaggactcctcctggccccaaatggaagagtctgtctagnnnnnnnnnnnnnnnnnnnnnnnnnnnnnnnnnnnnnnnnnnnnnnnnnnnnnnnnnnnnnnnnnnnnnnnnnnnnnnnnnnnnnnnnnnnnnnnnnnnnnnnnnnnnnnnnnnnnnnnnnnnnnnnnnnnnnnnnnnnnnnnnnnnnnnnnnnnnnnnnnnnnnnnnnnnnnnnnnnnnnnnnnnnnnnnnnnnnnnnnnnnnnnnnnnnnnnnnnnnnnnnnnnnnnnnnnnnnnnnnnnnnnnnnnnnnnnnnngctatccctcaaaattctgtgaaggaagtcctcagagcacctggtaccatcaaagacagaatcaaga

SEQ ID NO: 22139 - DNA, 840 bp, Macaca Mulatta
  misc_feature (1)...(840): n = A,T,C or G
tggggtctcggatgcgtggaggctgcttaagttgtctgctgattccgcttgcactttggagtataatcgtgaacatattattgtatttcccgaatgggcaaacttcctatgcatccagcaataaactcaccaactacgtgtggtattttgaaggaatctgtttctcaggcgtcatgnnnnnnnnnnnnnnnnnnnnnnnnnnnnnnnnnnnnnnnnnnnnnnnnnnnnnnnnnnnnnnnnnnnnnnnnnnnnnnnnnnnnnnnnnnnnnnnnnnnnnnnnnnnnnnnnnnnnnnnnnnnnnnnnnnnnnnnnnnnnnnnnnnnnnnnnnnnnnnnnnnnnnnnnnnnnnnnnnnnnnnnnnnnnnnnnnnnnnnnnnnnnnnnnnnnnnnnnnnnnnnnnnnnnnnnntttccttacagattccagcatatggattcagtgcctggaacctgcacatgttgtggagtggaacatcattttattttccattctcataaccctcagtgggcttcaagtgatcatctgcctcatcagagtagccatgcaattatccaagatactgtgtggaagctattcagtgatcatccagnagcctggaatcatttgaataaggacaaaaatgttttccattatcaagacatggccatctatctaaatattatatcaactgtgtagacttaaggacaatattgaaatgatggtgctttctccatttggtgtttatttgtaaaatttgcagtcctcactgcacatgcaagtatgccactctttcatttagaatgttttttaagcaatatggcatcaggaacttcagaaatatttctgcccttgatcaaacaa

SEQ ID NO: 22140 - DNA, 590 bp, Macaca Mulatta
gtaaagatgggctttaaatatttaaggggagtcacattaaaagattgtcattaggaatgcagttaaattactaagacagtgatctaagctacataaacaatctggatgtgagagatgggtaataatagggtaacaaaaggtttgtggagtaatatcacgttacctttttacaggcacctacaaaggcagcacctaagcaaaagattgtgaagcctgtgaaagtttcagctccccgagttggtggaaaacgctaaactggcagattcgatttttaaataaagattgcattataactctaggttgtgctggattttttttttttcttgtaacaggcatgttggatttacatggtcataggtgacctagtaaagaatgtaagacataggtattttattaaaaagtctattcctcaggaataatgcatcctataaagtaagcctcttccttggagagaggttaagcaaaatgatgtaagaagatgggtatggtcagatgctacctttgcttggctggggtgtatagggcacattacaaaaacttcattgccttaactctttggttacaatgctgtaagtattaggatgttgctg

SEQ ID NO: 22141 - DNA, 2196 bp, Macaca Mulatta
  misc_feature (1)...(2196): n = A,T,C or G
aagtccctactgcgttgctgtgaacgtagctttgagaagctggcgcccagtgatggggcaaaaagccaggcccttccagcagccgtgaaagccccaacagcaaactgcctgggagcagggtaggtcaccaacttcgttgctagaactccctgggtgcccgccgcggtggttacaaagggggtcaggggtgccggacccagccgcgcggagcccaccattacggcccgaggggggcccgacggnnnnnnnnnnnnnnnnnnnnnnnnnnnnnnnnnnnnnnnnnnnnnnnnnnnnnnnnnnnnnnnnnnnnnnnnnnnnnnnnnnnnnnnnnnnnnnnnnnnnnnnnnnnnnnnnnnnnnnnnnnnnnnnnnnnnnnnnnnnnnnnnnnnnnnnnnnnnnnnnnnnnnnnnnnnnnnnnnnnnnnnnnnnnnnnnnnnnnnnnnnnnnnnnnnnnnnnnnnnnnnnnnnnnnnnnnnnnnnnnnnnnnnnnnnnnnnnnnnnnnnnnnnnnnnnnnnnnnnnnnnnnnnnnnnnnnnnnnnnnnnnnnnnnnnnnnnnnnnnnnnnnnnnnnnnnnnnnnnnnnnnnnnnnnnnnnnnnnnnnnnnnnnnnnnnnnnnnnnnnnnnnnnnnnnnnnnnnnnnnnnnnnnnnnnnnnnnnnnnnnnnnnnnnnngcactacatcctccttcagcggatatccacttggaagagcagactttgatcattatactggccgggacagtgaaagggccttgaggctctcagagaagcctccgtattccaagtatagctcaaggaataaatcgcacgacaatgtctactttctcggagggctggaaggtcggaaggcatctggctcgctcctggccatgtggaatggaagttccctgagtgatgctggcccccctcctatcagcagatcgggagctgcaagcatgccttcaagcccaaagcaagccaggaaaatgagcattcaggacagcctgacgcttcaacccaagttaactagacacaaggagcttgcatctgaaaacatcaatttgagaactaggaagtactccagcagcagcctgagtcacatgggagcctacagccgatcacttcccaggttgtacaaagccacagagaaccagctgacacctctcagcttgcctccaagaaactctctgggcaattccaaacgaacaaaacttggggaaaaggatctacctcatagcataatagacaatgacaattaccttaatttttcttctttgagctcaggggctttaccctataaaacctnnnnnnnnnnnnnnnnnnnnnnnnnnnnnnnnnnnnnnnnnnnnnnnnnnnnnnnnnnnnnnnnnnnnnnnnnnnnnnnnnnnnnnnnnnnnnnnnnnnnnnnnnnnnnnnnnnnnnnnnnnnnnnnnnnnnnnnnnnnnnnnnnnnnnnnnnnnnnnnnnnnnnnnnnnnnnnnnnnnnnnnnnnnnnnnnnnnnnnnnnnnnnnnnnnnnnnnnnnnnnnnnnnnnnnnnnnnnnnnnnnnnnnnnnnnnnnnnnnnnnnnnnnnnnnnnnnnnnnnnnnnnnnnnnnnnnnnnnnnnnnnnnnnnnnnnnnnnnnnnnnnnnnnnnnnnnnnnnnnnnnnnnnnnnnnnnnnnnnnnnnnnnnnnnnnnnnnnnnnnnnnnnnnnnnnnnnnnnnnnnnnnnnnnnnnnnnnnnnnnnnnnnnnnnnnnnnnnnnnnnnnnnnnnnnnnnnnnnnnnnnnnnnnnnnnnnnnnnnnnnnnnnnnnnnnnnnnnnnnnnnnnnnnnnnnnnnnnnnnnnnnnnnnnnnnnnnnnnnnnnnnnnnnnnnnnnnnnnnnnnnnnnnnnnnnnnnnnnnnnnnnnnnnnnnnnnnnnnnnnnnnnnnnnnnnnnnnnnnnnnnnnnnnnnnnnnnnnnnnnnnnnnnnnnnnnnnnnnnnnnnnnnnnnnnnnnnnnnnnnnnnnnnnnnnnnnnnnnnnnnnnnnnnnnnnnnnnnnnnnnnnnnnnnnnnnnnnnnnnnnnnnnnnnnnnnnnnnnnnnnnnnnnngaccccagagggtataagtgaagaacagagatctcaggagttggctgcgatggaagaaacccggatggtcattctgaacaacctcgaggaacttaaacaaaaaatcaaagacataaatgatcagatggatgaatcttacagagag

SEQ ID NO: 22142 - DNA, 124 bp, Macaca Mulatta
agggacattactctggaggcctctggaaggcgctggatgggtgagctgtgagtaaagaagaggagcctgcatagtgtgggtgggtctcctccgatcccttgaaggcttgactagaacagagata

SEQ ID NO: 22143 - DNA, 3302 bp, Macaca Mulatta
  misc_feature (1)...(3302): n = A,T,C or G
aggagcggaaagaatgtcggagcgggccgcagatgacgtcaggggggagcnnnnnnnnnnnnnnnnnnnnnnnnnnnnnnnnnnnnnnnnnnnnnnnnnnnnnnnnnnnnnnnnnnnnnnnnnnnnnnnnnnnnnnnnnnnnnnnnnnnnnnnnnnnnnnnnnnnnnnccgccgccacggcgcccacggccggaggactgcgggcccggcgccgcctccacctcggcggccgcaatgaaggcggtcggggagcgcaggcctctacccagtcctgaagaaaggctgggacagtcnnnnnnnnnnnnnnnnnnnnnnnnnnnnnnnnnnnnnnnnnnnnnnnnnnnnnnnnnnnnnnnnnnnnnnnnnnnnnnnnnnnnnnnnnnnnnnnnnnnnnnnnnnnnnnnagacatgccaatatttggtttctgtcctgcccatgatgatttctacttggtggtgtgtaacgactgtaatcaggttgtcaaaccgcaggcatttcaatcacattatnnnnnnnnnnnnnnnnnnnnnnnnnnnnnnnnnnnnnnnnnnnnnnnnnnnnnnnnnnnnnnnnnnnnnnnnnnnnnnnnnnnnnnnnnnnnnnnnnnnnnnnnnnnnnnnnnnnnnnnnnnnnnnnnnnnnnnnnnnnnnnnnnnnnnnnnnnnnnnnnnnnnnnnnnnnnnnnnnnnnnnnnnnnnnnnnnnnnnnnnnnnnnnnnnnnnnnnnnnnnnnnnnnnnnnnnnnnnnnnnnnnnnnnnnnnnncatgacgccctctgtgaaagtggaaaagattcatccgaaaatggatggcacactactgaaatctgcggtggggccaacctgtcctgctactgtgagttccttagtnnnnnnnnnnnnnnnnnnnnnnnnnnnnnnnnnnnnnnnnnnnnnnnnnnnnnnnnnnnnnnnnnnnnnnnnnnnnnnnnnnnnnnnnnnnnnnnnnnnnnnnnnnnnnnnnnnnnnnnnnnnnnnnnnnnnnnnnnnnnnnnnnnnnnnnnnnnnnnnnnnnnnnnnnnnnnnnnnnnnnnnnnnnnnnnnnnnnnnnnnnnnnnnnnnnnnnnnnnnnnnnnnnnnnnnnnnnnnnnnnnnnnnnnnnnnnnnnnnnnnnnnnnnnnnnnnnnnnnnnnnnnnnnnnnnnnnnnnnnnnnnnnnnnnnnnnnnnnnnnnnnnnnnnnnnnnnnnnnnnnnnnnnnnnnnnnnnnnnnnnnnnnnnnnnnnnnnnnnnnnnnnnnnnnnnnnnnnnnnnnnnnnnnnnnnnnnnnnnnnnnnnnnnnnnnnnnnnnnnnnnnnnnnnnnnnnnnnnnnnnnnnnnnnnnnnnnnnnnnnnnnnnnnnnnnnnnnnnnnnnnnnnnnnnnnnnnnnnnnnnnnnnnnnnnnnnnnnnnnnnnnnnnnnnnnnnnnnnnnnnnnnnnnnnnnnnnnnnnnnnnnnnnnnnnnnnnnnnnnnnnnnnnnnnnnnnnnnnnnnnnnnnnnnnnnnnnnnnnnnnnnnnnnnnnnnnnnnnnnnnnnnnnnnnnnnnnnnnnnnnnnnnnnnnnnnnnnnnnnnnnttttgcacatttgggagccggcagattggaagaggctattacgtgtttgactccaggtggaaccggcttcgctgtgccctcaacctcatggtggagaagcatctgaatgcacagctatggaannnnnnnnnnnnnnnnnnnnnnnnnnnnnnnnnnnnnnnnnnnnnnnnnnnnnnnnnnnnnnnnnnnnnnnnnnnnnnnnnnnnnnnnnnnnnnnnnnnnnnnnnnnnnnnnnnnnnnnnnnnnnnnnnnnnnnnnnnnnnnnngcatctccccaaatagcaaatcggtaccagctcatggaaccacactaaatgcacagcctgctgcttcatgggcgatggatcctgtgtgcagtatgcaatccagacaagtgtcctcttcatcctcatccccttccacgccctctggtctttcctcggttccctcctcccctatgtccaggaaacctcagaaattgaaatccagcaaatctttgaggcccaaggagtcttctggtaacagcactaactgtcaaaatgccagtagcagtaccagtgtcggctcaggaaagaaacgcaaaaacacttccccactgttggttcannnnnnnnnnnnnnnnnnnnnnnnnnnnnnnnnnnnnnttccatggagtcttttaggaaaaactgtgtggctcactctgggcctccctacccctcaacggtaacatcttcccatagcatcggcctcaactgtgtgacgaataaagcaaatgcggtgaacgtccggcatgaccagtcagggaggggcccccccagcgggagccctgctgaatccatcaagaggatgagtgtgatggtgaacagcagtgattccactctttctcttgggcccttcattcaccagtccaatgaactgcctgtcaactcccatggcagtttttcccactcacacactcctctagacaaactcataggaaaganaagaaagtgctcacccagctcgagcagcatcaacaacagcagcagcaaacccacaaaggttgccaaagtgccagccatgaacaacgtccacatgannnnnnnnnnnnnnnnnnnnnnnnnnnnnnnnnnnnnnnnnnnnnnnnnnnnnnnnngccaaaggcacgtccctgacagctgaaaatagcacggggaggaataatgcggacacttttgaggacaagttacacctccactcagcactctggactccacgatgcctttgagtctgttttcccaacctcctgtgggcctcaagggtagaaacctgcctggctgttgttttaacagaggatttccctgaagctatgtctctagcagtgagtactcataaaggacactggatcaagttcagccaccgaattgcttttatcagtgttaaagtggtctggactgcttgtaccaatctgtgagaannnnnnnnnnnnnnnnnnnnnnnnacttgcagtatatcacggagccactcttcaagtagattggctgggcaaaagaatgttttcgcaagagcgttactgtagacctttctccctccttccttttactaccannnnnnnnnacactgtcgtctgtaggtcactctccagcagttaggcaccttaactggagaccagaaaccttccagaggacagagggctgcatcctgagcaaccctctgaagaagggaattaggctttagattttgatagcagtgttccaggaatgaaatacggatgttagcccaaggcaccatgacaaagtagcccagccttttg

SEQ ID NO: 22144 - DNA, 578 bp, Macaca Mulatta
ggagctccctccaaccgagggccagtcccccaagtccccagtgaacaatctcgtcccccccgaggtcagaagcccagtcctgaatccaggggaacgccgggcagatgtgtccccaacatccccacagcccgagggcctccttgtcctgcagcaggtgggcgactattgcttcctccccggcctgggccccggccctctctcaccacggagtaaaccctcttccccgggaccctgtcctgagatcagggatctagaccaggcttgtcaagtcaagaagcccccaggccaggctgtgccccaggtgcccgtcattcagctgttcaaagtcctgaagcagcaggactacctgtgtctgcccccttgggaggtcaacaagcctggggaggtgtgttgagaccctcagacctagacaggcaaggggacggagagggcttaccttccctcccgcctgaccttcctcagtcatttctgcaaagccaaggggcagcctcctgtcgaggtagctggaggcctgggaaaggagttagccttgctccagaccccttgaccttcggcaaatcacttctctccctgcgctc

SEQ ID NO: 22145 - DNA, 538 bp, Macaca Mulatta
  misc_feature (1)...(538): n = A,T,C or G
tcggatcttcgagctgactgtcatcaaggacaagtacaccgggctgcacaaggnnnnnnnnnnnnnnnnnnnnnnnnnnnnnnnnnnnnnnnnnnnnnnnnnnnnnnnnnnnnnnnnnnnnnnnnnnnnnnnnnatgaacaggccgatccaggtcaagccagccgacagcgagagccgaggagnagaagaccggaagctgtttgtggggatgctagggaagcagcagacagatgaggatgtccggaannnnnnnnnnnnnnnnnnnnnnnnnnnnnnnnnnnnnnnnnnnnnnnnnnnnnnnnnnnnnnnnnnnnnnnnnnnnnnnnnnnnnnnnnnnnnnnnnnnnnnnnnnnnnnnnnnnnnnnnnnnnnnnnnnnnnnnnnnnnnnnnnnnnggtgcctcgtccagcctggtggtgaagtttgctgacactgagaaggagcggggtctccgccgcatgcagcaggtggccacccagctgggcatggtcaaaaccatcgccctccagttcggagcctacagcgcctacacccaggc

SEQ ID NO: 22146 - DNA, 112 bp, Macaca Mulatta
gaggattctgaggttccattcactgaagaagattatcgaagaagaaagtctcatcctaattttctggaccacataaatgctgaaaaaatggttctcaaatttggaagaaagg

SEQ ID NO: 22147 - DNA, 1084 bp, Macaca Mulatta
  misc_feature (1)...(1084): n = A,T,C or G
gggattgaannnnnnnnnnnnnnnnnnnnnnnnnnnnnnnnnnnnnnnnnnnnnnnnnnnnnnnnnnnnnnnnnnnnnnnnnnnnnnnnnnnnnnnnnnnnnnnnnnnnnnnnnnnnnnnnnnnnnnnnnnnnnnnnnnnnnnnnnnnnnnnnnnnnnnnnnnnnnnnnnnnnnnnnnnnnnnnnnnnnnnnnnnnnnnnnnnnnnnnnnnnnnnnnnnnnnnnnnnnnnnnnnnnnnnnnnnnnnnnnnnnnnnnnnnnnnnnnnnnnnnnnnnnnnnnnnnnnnnnnnnnnnnnnnnnnnnnnnnnnnnnnnnnnnnnnnnnnnnnnnnnnnnnnnnnnnnnnnnnnnnnnnnnnnnnnnnnnnnnnnnnnnnnnnnnnnnnnnnnnnnnnnnnnnnnnnnnnnnnnnnnnnnnnnnnnnnnnnnnnnnnnnnnnnnnnnnnnnnnnnnnnnnnnnnnnnnnnnnnnnnnnnnnnnnnnnnnnnnnnnnnnnnnnnnnnnnnnnnnnnnnnnnnnnnnnnnnnnnnnnnnnnnnnnnnnnnaaggaaggcatttcctcccgaccagagaggctgatctttgccggaaagcagctggaagatgggcgcaccctgtctgactacaacatccagaaagagtccaccctgcacctcgtgctcgcgcctcagagggtgggagtgcagatcttcgtgaagacccgtgactggcaagaccatcgccctcgaggtggagcccagtgacacgcatccacaatgtcaaagcaaagatccaggacnnnnnnnnnnnnnnnnnnnnnnnnnnnnnnnnnnnnnnnnnnnnnnnnnnnnnnnnnnnnnnnnnnnnnnnnnnnnnnnnnnnnnnnnnnnnnnnnnnnnnnnnnnnnnnnnnnnnnnnnnnnnnnnnnnnnnnnnnnnnnnnnnnnnnnnnnnnnnnnnnnnnnnnnnnnnnnnnnnnnnnnnnnnnnnnnnnnnnnnnnnnnnnnnnnnnnnnnnnnnnnnnnnnnnnnnnnnnnnnnnnnnnnnnnnnnnnnnnnnnnnnnnnnnnnnnnnngcagctggaagatgggcgcaccctgtctgacta

SEQ ID NO: 22148 - DNA, 139 bp, Macaca Mulatta
ggaagggaagggaagacactgggatggactggagaggccagcctgggggacttgactaacctggactgggaaagctgagtgaaactgggctgaagtgaggtttgcagcctccaaatgagatctgacagtgccccactgc

SEQ ID NO: 22149 - DNA, 120 bp, Macaca Mulatta
tgttggactggtgagttttcgaggtgatagtgctgtgctcggtgaggggacgcccagagagccctcacgcgggatcactccgtcgccgttctcctcttgtctacgtgctggacccggtgc

SEQ ID NO: 22150 - DNA, 805 bp, Macaca Mulatta
tctcgccggcggcagcggctgccgcccttcgccggagcaggcggccgccaacttttccgcgtgttgctgcagcagctgctgctgcctcggcgctcgctcgacagccccgcggctctcgcggagcgcggcgccgagaacgccctcggcggccaccaggaggcaacggagagggagaggcggtccgaggagcctcccatctccctggatctcaccttccacctcctccgggaagtcttggaaatggccagggccgagcagttagcgcagcaagctcacagcaacaggaaactcatggagattattgggaaatgaaacggtgcgtttggccaaaaagattctgcatttagcacacacaaaaaaatacagtattctgtaccatagcgctgctcttacgccatttgtttatttttatatagcttgaaacatagagggagagagggagagagcctataccccttacttagcatgcacaaagtgtattcatgtgcagtaacaacacaatgttattcgttttgtctacgtttagtttccgtttccaggtgtttttagtggtgttttaaagagaatgtagaccagtgagaaaacgttttgtttgaaaaagcagacagaagtcacccaattgtttttgttgtggtttgaaccaaagagaatgccattctcttgggtgggtaagactaaatctgtaagctctttgaaacaactttttcttgtaaacgtttcagtaataaaacatctttccagtccttggtcagtttggttgtgtaagagaatgttgaatatttatatttttaataaaagctgcaaa

SEQ ID NO: 22151 - DNA, 414 bp, Macaca Mulatta
  misc_feature (1)...(414): n = A,T,C or G
cttaaatgataatcccagcccctggatttatcgagagctcaaaagatccttggataagacaagtgccagtcctggtgagtttgcagtctgcttcaccgaactccagcagaagttttttgacaaccgtcccagagaactaaaggatttgatcctcttgataaagcactggcatcaacagnnnnnnnnnnnnnnnaaggatttacccttgctgtctccatatgccctggagttgcttacagtgtatgcctgggaacaggggtgcagaagagacaactttgacattgctgaaggcgtcagaaccattctggagctgatcaaatgccatgagcagctgtgtgtctattggatggtcaactacaactttgaagatgagaccatcaggaacatcctgctgccccagctccaatcagcgag

SEQ ID NO: 22152 - DNA, 775 bp, Macaca Mulatta
  misc_feature (1)...(775): n = A,T,C or G
gggaaaggaattagggtgtgtcatgtgtgccatgaaacaacaaaaccaactatcctagaatcatttatgcagggggtactaaagttagaaataataataagggcagataacatttgtacctcagtctacaaaaaaattgtagcactaaatttaacttctaggcgtttcctggaagcagatgctctataatttgtgatagcattctcataaatggagtcctacacataattggacagagatgtggaaatggtggtttccttctgataagggatacagtggaccatgtcgcttatatatcaccctactaggggatataattttcccttctaagcaagggaaatggcagtgctaaatagttttgtaaagtttttgaatgagaaacttttaggtaaagataaactgtcataatatttttcagatgcatttgcactgactatgggagaaaaatttgggggaaatgacagtcatgnnnnnnnnnnnnnnnnnnnnnntttgaggactgaaattctgttacatgatgtatgacaatataaaaacatatttagttttatactaaatctttttttaaagtcttggcattttatataaagtaaattcacacatttttctaacttttcataagtttccaaaaggggaaagaagaaacctcagtcttgaaatttttgatttttaaagattcatgacactgtttttaccatgaaaattgaaataggctaactttttgggttaccaccttttggttccctttggaaggttgggaaataatgggaaattt

SEQ ID NO: 22153 - DNA, 291 bp, Macaca Mulatta
aagtgcacaacgaagaaaaatgcaggtttcttacagataataagcatactgaattactcctgacagaaccccagacaggatgagaatccatttaagatgtgtgatatcagactaagaaggattcaaggattggggaagacagagaaagtagagcaaaaaattaacagtgaaataagaaaggaatttggcttcaaatatcttagcatctacttggagagagatatatacaagtaaagacaattatcaaactcaggcaagctgggtaattaggaatgttaggagtgattttat

SEQ ID NO: 22154 - DNA, 1177 bp, Macaca Mulatta
gggctgtaatatattatgtgctactcctggaagactgatggatatcataggcaaagaaaagattggtctcaaacagatcaaatatttagttttggatgaagctgatcgcatgttggatatgggttttggtccagaaatgaagaagttaatttcttgcccaggaatgccatcaaaggaacagcgccaaacccttatgttcagtgcaacttttccagaggaaattcaaaggttggctgcagagtttttaaagtcgaattatctgtttgttgctgttggacaagtgggtggagcatgtagagatgttcagcagaccgttctccaagttggccagttctcaaaaagagaaaaacttgttgaaattctacgaaacataggggatgaaagaactatggtctttgttgaaactaagagaaaagcagattttattgcaacttttctttgtcaagaaaaaatatcaactacaagtattcatggtgatcgggaacagagagagcgggagcaagctcttggagattttcgctgtgggaagtgcccagttcttgttgctacttcagtagctgccagagggctggaatattgaaaatggtgcaacatgttatcaattttgatcttcccttctaccattgatgaatatgttccatcgaatttgggcgtaactggttcgttagtggggaatactgggcagaagctatttccctttttttgatattgaatcggataaacccatttagcacagccctctattaaaaagttttgacagatgctcaacaggatgttcctgcatggttggaagaaattgcctttagtacatacattcctggcttcagcggtagtacgagaggaaacgtgtttgcatcagttgatactagaaagggcaagagcagtttgaacacagctgggttttcttcttcacaagctcccaacccagtagatgatgagtcatgggattaaagccaaaacatccttcaagtctgtggttttgatgcagagaagaaaatagtttcgatttttgagtttttacagaagtataaacttgacatctcatagctctgtcctgtatctcactctacactaaaaaaatcctactgactagtatgtgagatgctaactacacatgcatacgatcacgtgtactgatataagctcaatgctctatctgactctcaggttaatgtag

SEQ ID NO: 22155 - DNA, 380 bp, Macaca Mulatta
  misc_feature (1)...(380): n = A,T,C or G
gcagaccctgtcccagctgccacaagtccagaatccttccatggccagtcacctcacctccacctctctcgatccctacgatagacacctgttgccgacctcaggnnnnnnnnnnnnnnnnnnnnnnnnnnnnnnnnnnnnnnnnnnnnnnnnnnnnnntccacttcatattacgggcgggatcggagccccctgcgtcgcgctacagccccagtccccactgttggagagggctacggttacgggcatgagagtgagttgtcccaagcttcagcagccgcgcggaattctctgtacgacatggcccggtatgagcgggagcagtatgccgatcgggcgcggtactcagccttttaaagcttgaggtgagaggggtgggg

SEQ ID NO: 22156 - DNA, 593 bp, Macaca Mulatta
ccagaacccgggcagagatgaccagggtcggggacacgggccagtgggcacacgagagtgggcagtgggctgaggccagggaggggaggggacaggagcctgctgaggaccagcccagcccgccccttgcaggggagtacgtgctcatgatccatgacgtgaccactccaccattcctgggatgcacgctgccccccgccttcaaacacctgcgggtcgtagcgaagagggctgaccggccaccccacgttctggaagaaggccctgaagcctcaagcggctggcaggcccatggctgcaccccagagcctccagcgcctcggtgaggcccagtgtccacaggagaccacctcggtgtgaacggcaagaaactctgcctctgcttgcgggaacctgtccccgattccccagagccctgcggctgtttgaataaaatgctcagtggcagctgtggagggcaccgctccttgggcccgacgcccgcagcgaggccctccccatgcacccgcacactcacaggcgaggccacaggactggagcccgcgtcctccctcactgctgtggcctccgctctgcgcagagccttgggaagc

SEQ ID NO: 22157 - DNA, 562 bp, Macaca Mulatta
  misc_feature (1)...(562): n = A,T,C or G
atggcttgccttggatttcagcggcacaaggctcggctcaacctggctaccaggacccggccctacactctcctgttttctcttctcttcatccctgtcttctccaaagnnnnnnnnnnnnnnnnnnnnnnnnnnnnnnnnnnnnnnnnnnnnnnnnnnnnnnnnnnnnnnnnnnnnnnnnnnnnnnnnnnnnnnnnnnnnnnnnnnnnnnnnnnnnnnnnnnnnnnnnnnnnnnnnnnnnnnnnnnnnnnnnnnnnnnnnnnnnnnnnnnnnnnnnnnnnnnnnnnnnnnnnnnnnnnnnnnnnnnnnnnnnnnnnnnnnnnnnnnnnnnnnnnnnnnnnnnnnnnnnnnnnnnnnnnnnnnnnnnnnnnnnnnnnnnnnnnnnnnnnnnnnnnnnnnnnnnnnnnnnnnnnnnnnnnnnnnnnnnnnnnnnnnnnnnnnnnnnnnnnnnnnnnngctaaagaaaagaagccctctcacaacaggggtctatgtgaaaatgcccccaacagagccagaatgtgaaaagcaatttcagccttattttattcccatcaattga

SEQ ID NO: 22158 - DNA, 505 bp, Macaca Mulatta
  misc_feature (1)...(505): n = A,T,C or G
agagtcttcagatggattttaaaattgaacacacttgggatggttttccagtgaagcacgagccggtatttatcaggctgaatccaggtgacagaggagtgatgatggacattagtgctccatttttcaatgatcctccagccccacttggagaaccaggaaaacctttcaatcaactgtgggattatgaagnnnnnnnnnnnnnnnnnnnnnnnnnnnnnnnnnnnnnnnnnnnnnnnnnnnnnnnnnnnnnnnnnnnnnncatttagtgtttctactttctggaagaagaaatgtgtggaaancaagaacttcctttatcattcagagtgtccagaggagagacaaaatgggaaggcaaagcttatctcccttggaattattttccaccaaatgtgacaaaattcaattcatttgcaattcatggatcaaaagataaacgaagttatgaagctctttaccctgtacctcagcatgaactgcaacaaggacaaaaacctgattt

SEQ ID NO: 22159 - DNA, 824 bp, Macaca Mulatta
  misc_feature (1)...(824): n = A,T,C or G
ggtccagtggatatcttaacttatgtagcctggaagttgagcgcatttcccaaaaaccgtgttattggaagtggttgtaatctggactctgctcgttttcgttactttattgggcaaaggcttggcatccactctgaaagctgtcatgggctgatccttggagagcatggcgactcaagtgttcctgtgtggagtggtgtgaacattgctggtgtccctctgaaggatctgaacccagatataggaactgataaagatcctgagcagtgggaaaaatgtccacaaaaaagtgatttccagtggctatgagatggtcaaaatgaaaggttatacttcttggggcattagcctatctgtagctgatttaacagaaagtatttttgaagaatctcaggagagtgcatccagtttctacccctaaataagggccctctatggaaataaatgaaagaaatattcccttagtggtacccatggtatcccttgaggaacaaaaaagggtcattcaccaggaaccctccacaaaaaaagtgaaaaacttggaacctcttgaatagaaggaaaggcctggcttttgcacaaaagaaggtggcaaaaaaaacaacttcctgggggaacaaattcacgaaagaggaaactctcaaaggttttttaaaaagtttgcctttaaagagtttatccattttctaataaaattttgaacaaaaagaaaaatacaatcactttcaacggaaaattgggtaaatatggtatacnnnnnnnnnnnnnnnnnnnnnnttgtttgaaaaatcttccataaaaaagtcttccgccacattaatttt

SEQ ID NO: 22160 - DNA, 123 bp, Macaca Mulatta
gtggccccgggcttccaggtggtacacctcaacgctgtgactgtggacaatcgcctgtttaacctgcagctggtgccgtggggctggcggcccaaggctgaagagacctccagcaaacagagg

SEQ ID NO: 22161 - DNA, 1316 bp, Macaca Mulatta
  misc_feature (1)...(1316): n = A,T,C or G
ttgtgtgccaggcacgagcccagtactcccacaaacagtgtctccaggtaggagaagtgtaatttcgaccctgccacaccttcctgcactcagacagaagcatgtgcagactgctctcagcaaggccacctccttcgctccctggccattgggccccttctctctacctgtctcctgtcactccacttcctgccccaggccttctctttgggatttccagcctttggggagctactgctttcaggttctggctgtggggtctcggcaggattttgtcccaaaaaccagtagaaataaaatccttcaacagggagatgattcgtgggctgggtggataccagtgaccagaggacatgcaaactctgccctggggcttttacctcgttgcacttcggagagcaacatgggtcaccagcagctgtactggagccacccgcgaaaattcggccagggttctcgctcttgtcgcgtgtgttcaaaccggcacggtctgatccggaaatatggcctcaatatgtgccgccagtgtttccgtcagtacgcgaaggatatcggtttcattaagttggactaaatgatcttccttcaaagcattatccaaggtcatctactcagtgaaaaactatgatagttctttgtacataaaataaacatttgaaaaaacccttccgtttatgagtgatcttccttcaaaggattatccaaggcatctactcaatgaaaaaccatgatagttctttgtacataaaataaacatctgcaccatgcctttcgacgccgactttcgcgcccgcatccggccctgtctcggccggcctcggccccctgaacagcactctcccaccacatatcccccctgggcgccgccgggttctcggtgggggcatcgtagacatggtggggtctagcagccgcgctccccccctatggcgagcatatggcggcctgtccgcgcgagtaggttggcctcgcgctaattgcccgttaccgcggttacgatacaattgtttcttgttgcgcgtgtgaagccagcgcccccgcaccccggtacgctctcttgctctgctgcgccgtgcatttccattgcgggcggccgtattccacctggtccaccccgatttcctctcgccgagagcttcacgcccgcgatcgcggatctctggacatcgtcacgccgttttatgccgtcccagcgcttgcctttttgcatttcatctccacccctatcgctcttccgcctctgttatgcaccccccccgntatgatcatgtagttcacgcgctggggcgcgccgtcttcgtatgccgcgcacgtcg

SEQ ID NO: 22162 - DNA, 3194 bp, Macaca Mulatta
  misc_feature (1)...(3194): n = A,T,C or G
gaagacctctggagatacattggagctgatggaggagtcactggacataaatctgttgaataatgccgttcgcctaaaattccaaaattgcagtgttttacctggaggggtttatgtctctgagactcagaatcatgtgataatcttgatgttaaccaatcaaacagtgcacaggttacttttaccacacccctcccggatgtataggagtgnnnnnnnnnnnnnnnnnnnnnnnnnnnnnnnnnnnnnnnnnnnnnnnnnnnnnnnnnnnnnnnnnnnnnnnnnnnnnnnnnnnnnnnnnnnnnnnnnnnnnnnnnnnnnnnnnnnnnnnnnnnnnnnnnnnnnnnnnnnnnnnnnnnnnnnnnnnnnnnnnnnnnnnnnnnnnnnnnnnnnnnnnnnnnnnnnnnnnnnnnnnnnnnnnnnnnnnnnnnnnnnnnnnnnnnnnnnnnnnnnnnnnnnnnnnnnnnnnnnnnnnnnnnnnnnnnnnnnnnnnnnnnnnnnnnnnnnnnnnnnnnnnnnnnnnnnnnnnnnnnnnnnnnnnnnnnnnnnnnnnnnnnnnnnnnnnnnnnnnnnnnnnnnnnnnnnnnnnnnnnnnnnnnnnnnnnnnnnnnnnnnnnnnnnnnnnnnnnnnnnnnnnnnnnnnnnnnnnnnnnnnnnnnnnnnnnnnnnnnnnnnnnnnnnnnnnnnnnnnnnnnnnnnnnnnnnnnnnnnnnnnnnnnnnnnnnnnnnnnnnnnnnnnnnnnnnnnnnnnnnnnnnnnnnnnnnnnnnnnnnnnnnnnnnnnnnnnnnnnnnnnnnnnnnnnnnnnnnnnnnnnnnnnnnnnnnnnnnnnnnnnnnnnnnnnnnnnnnnnnnnnnnnnnnnnnnnnnnnnnnnnnnnnnnnnnnnnnnnnnnnnnnnnnnnnnnnnnnnnnnnnnnnnnnnnnnnnnnnnnnnnnnnnnnnnnnnnnnnnnnnnnnnnnnnnnnnnnnnnnnnnnnnnnnnnnnnnnnnnnnnnnnnnnnnnnnnnnnnnnnnnnnnnnnnnnnnnnnnnnnnnnnnnnnnnnnnnnnnnnnnnnnnnnnnnnnnnnnnnnnnnnnnnnnnnnnnnnnnnnnnnnnnnnnnnnnnnnnnnnnnnnnnnnnnnnnnnnnnnnnnnnnnnnnnnnnnnnnnnnnnnnnnnnnnnnnnnnnnnnnnnnnnnnnnnnnnnnnnnnnnnnnnnnnnnnnnnnnnnnnnnnnnnnnnnnnnnnnnnnnnnnnnnnnnnnnnnnnnnnnnnnnnnnnnnnnnnnnnnnnnnnnnnnnnnnnnnnnnnnnnnnnnnnnnnnnnnnnnnnnnnnnnnnnnnnnnnnnnnnnnnnnnnnnnnnnnnnnnnnnnnnnnnnnnnnnnnnnnnnnnnnnnnnnnnnnnnnnnnnnnnnnnnnnnnnnnnnnnnnnnnnnnnnnnnnnnnnnnnnnnnnnnnnnnnnnnnnnnnnnnnnnnnnnnnnnnnnnnnnnnnnnnnnnnnnnnnnnnnnnnnnnnnnnnnnnnnnnnnnnnnnnnnnnnnnnnnnnnnnnnnnnnnnnnnnnnnnnnnnnnnnnnnnnnnnnnnnnnnnnnnnnnnnnnnnnnnnnnnnnnnnnnnnnnnnnnnnnnnnnnnnnnnnnnnnnnnnnnnnnnnnnnnnnnnnnnnnnnnnnnnnnnnnnnnnnnnnnnnnnnnnnnnnnnnnnnnnnnnnnnnnnnnnnnnnnnnnnnnnnnnnnnnnnnnnnnnnnnnnnnnnnnnnnnnnnnnnnnnnnnnnnnnnnnnnnnnnnnnnnnnnnnnnnnnnnnnnnnnnnnnnnnnnnnnnnnnnnnnnnnnnnnnnnnnnnnnnnnnnnnnnnnnnnnnnnnnnnnnnnnnnnnnnnnnnnnnnnnnnnnnnnnnnnnnnnnnnnnnnnnnnnnnnnnnnnnnnnnnnnnnnnnnnnnnnnnnnnnnnnnnnnnnnnnnnnnnnnnnnnnnnnnnnnnnnnnnnnnnnnnnnnnnnnnnnnnnnnnnnnnnnnnnnnnnnnnnnnnnnnnnnnnnnnnnnnnnnnnnnnnnnnnnnnnnnnnnnnnnnnnnnnnnnnggagtctaatctccaacacttatcagtactggaattaacagactctggtgctttaatggcaaataggtttnnnnnnnnnnnnnnnnnnnnnnnnnnnnnnnnnnnnnnnnnnnnnnnnnnnnnnnnnnnnnnnnnnnnnnnnnnnnnnnnnnnnnnnnnnnnnnnnnnnnnnnnnnnnnnnnnnnnnnnnnnnnnnnnnnnnnnnnnnnnnnnnnnnnnnnnnnnnnnnnnnnnnnnnnnnnnnnnnnnnnnnnnnnnnnnnnnnnnnnnnnnnnnnnnnnnnnnnnnnnnnnnnnnnnnnnnnnnnnnnnnnnnnnnnnnnnnnnnnnnnnnnnnnnnnnnnnnnnnnnnnnnnnnnnnnnnnnnnnnnnnnnnnnnnnnnnnnnnnnnnnnnnnnnnnnnnnnnnnnnnnnnnnnnnnnnnnnnnnnnnnnnnnnnnnnnnnnnnnnnnnnnnnnnnnnnnnnnnnnnnnnnnnnnnnnnnnnnnnnnnnnnnnnnnnnnnnnnnnnnnnnnnnnnnnnnnnnnnnnnnnnnnnnnnnnnnnnnnnnnnnnnnnnnnnnnnnnnnnnnnnnnnnnnnnnnnnnnnnnnnnnnnnnnnnnnnnnnnnnnnnnnnnnnnnnnnnnnnnnnnnnnnnnnnnnnnnnnnnnnnnnnnnnnnnnnnnnnnnnnnnnnnnnnnnnnnnnnnnnnnnnnnnnnnnnnnnnnnnaggcaattagattgtttacggcagttggtggtagttctttgtgaacgctcacagctacaggatcttgtagagtttccctatgtgaatctgcataatgaggnnnnnnnnnnnnnnnnnnnnnnnnnnnnnnnnnnnnnnnnnnnnnnnnnnnnnnnnnnnnnnnnnnnnnnnnnnnnnnnnnnnnnnnnnnnnnnnnnnnnnnnnnnnnnnnnnnnnnnnnnnnnnnnnnnnnnnnnnnnnnnnnnnnnnnnnnnnnnnnnnnnnnnnnnnnnnnnnnnnnnnnnnnnnnnnnnnnnnnnnnnnnnnnnnnnnnnnnnnnnnnnnnnnnnnnnnnnnnnnnnnnnnnnnnnnnnnnnnnnnnnnntatgatcgccctggagcatcccctaagaggaatcatgatggagaatgcacagctgccccca

SEQ ID NO: 22163 - DNA, 740 bp, Macaca Mulatta
aaagtgaaatgaaatgtgactgatagtcaaggaggttcccagctatttgcctgtaccaagcccaggtctcaaatgctcagatggtaggtggaagtttgccttgcagttgtcagaacaaatcatgagggccccttgatgccactgactgaaggctgggagagaagaaaacctgaataagcaccctaaggtctgagcgtctgttgcttcctcttctctccttgcaggggcattcgtggtgtgctggaccccaggcctggtggttctgctcctcgatggcctgaattgcaggcagtgtggtgtgcagcacgtgaaaaggtggttcctgctgctggcgctgctcaactccgtcatgaaccccatcatctactcctacaaggatgaggacatgtacggcaccatgaagaagatgatctgctgcttctctcaggagaacccagagaggcgtccctctcgcgtcccctccacggtcctcagcaggagtgacacaggcagccagtacatagaggatagtattagccaaggcacagtctgcaataaaagcagctcctaaactctggacgcctctctgcccacccaggcctcctctgggaaaagagctgttaagaatggttacctgtctcttaacaaagcccatgtacagtgttatttgaggtctccattaatcactgctagatttcttttaaaatttgtttttcatagtttaaaagcatgggcagtaaagagaggacctggtgcattta

SEQ ID NO: 22164 - DNA, 1308 bp, Macaca Mulatta
  misc_feature (1)...(1308): n = A,T,C or G
agctctctccggtctcagcctcaataccctgaccatcttctctttctgcaagaccccggagctgcggactccctgccacctgctggtgctgagcttggctcttgcggacagtgggatcagcctgaatgccctcattgcagccacatccagccttctccnnnnnnnnnnnnnnnnnnnnnnnnnnnnnnnnnnnnnnnnnnnnnnnnnnnnnnnnnnnnnnnnnnnnnnnnnnnnnnnnnnnnnnnnnnnnnnnnnnnnnnnnnnnnnnnnnnnnnnnnnnnnnnnnnnnnnnnnnnnnnnnnnnnnnnnnnnnnnnnnnnnnnnnnnnnnnnnnnnnnnnnnnnnnnnnnnnnnnnnnnnnnnnnnnnnnnnnnnnnnnnnnnnnnnnnnnnnnnnnnnnnnnnnnnnnnnnnnnnnnnnnnnnnnnnnnnnnnnnnnnnnnnnnnaacttcaccagcttcctcttcaccatgtccttcttcaactttgccatgcccctcttcatcacgatcacgtcctacagtctcatggagcaaaaactggggaagagcggtcatctccaggtaanccaggtaaacaccactctgccagcaaggacgctgctgctcggctggggcccctatgccatcctgtatctatacgcagtcatcgcagacgtgacttccatctcccccaaactgcagatggtnggtgcccgccctcattgccaaaatggtgcctacaatcaatgccatcaactatgccctgggcaatgaaatggtctgcagggggatctggcagtgcctctcaccacagaagagcgagaaggaccgagccaagtgagcctaccatcctggactgagccccaggccgggaggctgccccaggagtcctgcccagcagcctcagcggccaagcccagacactcacccaccttccctaatggccccgtggagcctggccctaggctggacacaaggattcagaaagacaccaggctgcacagaaagagccagatggacctgagtgttggtcatagccttctacactcgaggctgagaggcttcaggaaagtcactcctttttaaaaataataataaatttaagggggtacattgcagttttgctacgtggatagattgcctagtggtgaagtctgggcttttagtggggccatcaccctaataatatacatcatactcattaagtaatttctcatccctcaccccctgccaccttgtcacccttctgagtctccgatgtctattattctacactctgtgtccatgtgtatacattatttagctcccacttacaagtgagaacatg

SEQ ID NO: 22165 - DNA, 2913 bp, Macaca Mulatta
  misc_feature (1)...(2913): n = A,T,C or G
cccttcaaggatgagtatgagaagttctctggagcctatgtgaacaatcgaatacgaacaacaaagtacacgcttctgaattttgtgccaagaaatttatttgaacaatttcacannnnnnnnnnnnnnnnnnnnnnnnnnnnnnnnnnnnnnnnnnnnnnnnnnnnnnnnnnnnnnnnnnnnnnnnnnnnnnnnnnnnnnnnnnnnnnnnnnnnnnnnnnnnnnnnnnnnnnnnnnnnnnnnnnnnnnnnnnnnnnnnnnnnnnnnnnnnnnnnnnnnnnnnnnnnnnnnnnnnnnnnnnnnnnnnnnnnnnnnnnnnnnnnnnnnnnnnnnnnnnnnnnnnnnnnnnnnnnnnnnnnnnnnnnnnnnnnnnnnnnnnnnnnnnnnnnnnnnnnnnnnnnnnnnnnnnnnnnnnnnnnnnnnnnnnnnnnnnnnnnnnnnnnnnnnnnnnnnnnnnnnnnnnnnnnnnnnnnnnnnnnnnnnnnnnnnnnnnnnnnnnnnnnnnnnnnnnnnnnnnnnnnnnnnnnnnnnnnnnnnnnnnnnnnnnnnnnnnnnnnnnnnnnnnnnnnnnnnnnnnnnnnnnnnnnnnnnnnnnnnnnnnnnnnnnnnnnnnnnnnnnnnnnnnnnnnnnnnnnnnnnnnnnnnnnnnnnnnnnnnnnnnnnnnnnnnnnnnnnnnnnnnnnnnnnnnnnnnnnnnnnnnnnnnnnnnnnnnnnnnnnnnnnnnnnnnnnnnnnnnnnnnnnnnnnnnnnnnnnnnnnnnnnnnnnnnnnnnnnnnnnnnnnnnnnnnnnnnnnnnnnnnnnnnnnnnnnnnnnnnnnnnnnnnnnnnnnnnnnnnnnnnnnnnnnnnnnnnnnnnnnnnnnnnnnnnnnnnnnnnnnnnnnnnnnnnnnnnnnnnnnnnnnnnnnnnnnnnnnnnnnnnnnnnnnnnnnnnnnnnnnnnnnnnnnnnnnnnnnnnnnnnnnnnnnnnnnnnnnnnnnnnnnnnnnnnnnnnnnnnnnnnnnnnnnnnnnnnnnnnnnnnnnnnnnnnnnnnnnnnnnnnnnnnnnnnnnnnnnnnnnnnnnnnnnnnnnnnnnnnnnnnnnnnnnnnnnnnnnnnnnnnnnnnnnnnnnnnnnnnnnnnnnnnnnnnnnnnnnnnnnnnnnnnnnnnnnnnnnnnnnnnnnnnnnnnnnnnnnnnnnnnnnnnnnnnnnnnnnnnnnnnnnnnnnnnnnnnnnnnnnnnnnnnnnnnnnnnnnnnnnnnnnnnnnnnnnnnnnnnnnnnnnnnnnnnnnnnnnnnnnnnnnnnnnnnnnnnnnnnnnnnnnnnnnnnnnnnnnnnnnnnnnnnnnnnnnnnnnnnnnnnnnnnnnnnnnnnnnnnnnnnnnnnnnnnnnnnnnnnnnnnnnnnnnnnnnnnnnnnnnnnnnnnnnnnnnnnnnnnnnnnnnnnnnnnnnnnnnnnnnnnnnnnnnnnnnnnnnnnnnnnnnnnnnnnnnnnnnnnnnnnnnnnnnnnnnnnnnnnnnnnnnnnnnnnnnnnnnnnnnnnnnnnnnnnnnnnnnnnnnnnnnnnnnnnnnnnnnnnnnnnnnnnnnnnnnnnnnnnnnnnnnnnnnnnnnnnnnnnnnnnnnnnnnnnnnnnnnnnnnnnnnnnnnnnnnnnnnnnnnnnnnnnnnnnnnnnnnnnnnnnnnnnnnnnnnnnnnnnnnnnnnnnnnnnnnnnnnnnnnnnnnnnnnnnnnnnnnnnnnnnnnnnnnnnnnnnnnnnnnnnnnnnnnnnnnnnnnnnnnnnnnnnnnnnnnnnnnnnnnnnnnnnnnnnnnnnnnnnnnnnnnnnnnnnnnnnnnnnnnnnnnnnnnnnnnnnnnnnnnnnnnnnnnnnnnnnnnnnnnnnnnnnnnnnnnnnnnnnnnnnnnnnnnnnnnnnnnnnnnnnnnnnnnnnnnnnnnnnnnnnnnnnnnnnnnnnnnnnnnnnnnnnnnnnnnnnnnnnnctccctggacagccaatggcctgcaacctgtgttatgaggctgagagcccagacgaagcagccttagtgtatgctgccagggcttaccagtgcactttacagtctcggacaccagagcaggtcatggtggactttgctgctttgggaccattaacatttcaactcctacacatcctgccctttgactcagtaagaaaaagaatgtctgttgtggtccggcaccccctttccaatcaagttgtggtgtatacaaagggcgccgattctgtgatcatggagttactgtcagtggcttccccannnnnnnnnnnnnnnnnnnnnnnnnnnnnnnnnnnnnnnnnnnnnnnnnnnnnnnnnnnnnnnnnnnnnnnnnnnnnnnnnnnnnnnnnnnnnnnnnnnnnnnnnnnnnnnnnnnnnnnnnnnnnnnnnnnnnnnnnnnnnnnnnnnnnnnnnnnnnnnnnnnnnnnnnnnnnnnnnnnnnnnnnnnnnnnnnnnnnnnnnnnnnnnnnnnnnnnnnnnnnnnnnnnnnnnnnnnnnnnnnnnnnnnnnnnnnnnnnnnnnnnnnnnnnnnnnnnnnnnnnnnnnnnnnnnnnnnnnnnnnnnnnnnnnnnnnnnnnnnnnnnnnnnnnnnnnnnnnnnnnnnnnnnnnnnnnnnnnnnnnnnnnnnnnnnnnnnnnnnnnnnnnnnnnnnnnnnnnnnnnnnnnnnnnnnnnnnnnnngatgcctgtgggatgctgatgagcacaattttgaaagaacttcagaagaaaactcaagccctgccagagcaagtgtcattaagtgtagatttacatcagcctcctgtcccccaggactccgggttacgagctggactcattatcactgggaagaccctggagtttgctctgcaagaaaatgtacaaaagcagttcctggaactgacatcttggtgtcaaacggtggtctgctgccg

SEQ ID NO: 22166 - DNA, 614 bp, Macaca Mulatta
tcccctctcgtcacccatcactccctgtttccgcagggcgcccctcagtattcgctgccatatgtccctgtcctccaggctgtaggggaggagagcctggcggggggagacagactggacgtttctcttactgtttcgagccaagctcttccaagtggccagctgggtccccagagtcagtcctaggctggatgggagggtggccacctcaagaggactcccagcctccacatctggttcctaccttcatatctcaccctcccgttctggagaaagaatctctggttcctacagtatccaccccatcctcaaggcttcccatggggccttggggcactgccttgccatggggcctggttctctgggccccacctgcacccctttcttccccctgggatatgacatgtgtggtgtttcctgtggtaaaagactgaggcaggccagggttctgccagtaacatgttcccatgtacagacgcggtccccacaccctcccagcctcaggcccaggcagacgtggacgagctggcgagactgccagccatggctttgctcaaccacctgtggcggagggctcccagagacccccttaacctcccaaatactaagaagct

SEQ ID NO: 22167 - DNA, 436 bp, Macaca Mulatta
  misc_feature (1)...(436): n = A,T,C or G
gcgagtcccactttacggtgaaccagcaacccttcctctacttccaagtcctgttcctgacagcgcagtttgaagcagcaattgcnnnnnnnnnnnnnnnnnnnnnnnnnnnnnnnnnnnnnnnnnnnnnnnnnnnnnnnnnnnnnnnnnnnnnnnnnnnnnnnnnnnnnnnnnnnnnnnnnnnnnnnnnnnnnnnnnnnnnnnnnnnnnnnnnnnnnnnnnnnnnnnnnnnnnnnnnnnnnnnnnnnnnnnnnnnnnnnnnnnnnnnnnnnnnnnnnnnnnnnnnnnnnnnnnnnnnnnnnnnnnnnnnnnnnnnnnnnnnnnnnnnnnnnnnnnnnnnnnnnnnnnnnnnnnnnnnnnnnnnnnnnnnnnnnnnnnnnnnnnnnnnnnnnnnnnnnnnnnnnnnngggaaactagagaatgacggaagtagaaa

SEQ ID NO: 22168 - DNA, 818 bp, Macaca Mulatta
  misc_feature (1)...(818): n = A,T,C or G
gggccctttccgccatctttccgcgccgccacaatggtgcgcatgaatgtcctggctgatgctctcaagagcatcaacaatgccgaaaagagaggcaaacgccaggtgcttattaggccgtgctccaaagtcatcgtccggtttctcactgtaatgatgaagcatggttacattggcgaatttgaaatcattgatgatcacagagctgggaaaatcgttgtgaaccttacaggcaggctaaacaagtgtggagtgatcagccccagatttgatgtgcaactcaaagatctagaaaaatggcagaataacctgcttccatcccgccagtttggtttcattgtactgacaacctcagctggcatcatggaccatgaagaagcaagacgaaaacacacaggagggaaaatcctgggattctttttctagggatgtaatacatacatttacaaataaaatgcctcacggacaaaattaatatttttaaattattataaatcataaatataattccaaataaataacaaactaataacactataaatttactcttttctaaaaaaaatacttnnnnnnnnnnatttcggcgcccctttgggccctcgaaaaattttttaaaaactttcttttgtgggccccggggccccaaatgggaaaagtaaaagaggggccaaaactgttttcccaaagaaaaaacccgggtccagaaaaaaggggctgggaattcctccnnnnnnnnnnnnnnnnnnnnnnnnnnnnaacacccaagaggttttttaaaaaaaatacccaaaatgggaattttctgaagggccattata

SEQ ID NO: 22169 - DNA, 645 bp, Macaca Mulatta
  misc_feature (1)...(645): n = A,T,C or G
ttgtaaaggacaaaattatagaacgagacagcaaaacatcacaggtgcctgtgaagcatgtgtaccgcgtgctgcaatgccaggaggaggagctcacgcagatggtgtccaccatgtctgacggctggaagtttgagcagctgctggccgcttagcgttgtttgacttttgaccttgacatagtagataggcttgtggtttttttaatttaaagatattaagacttaattcactaaaatttattctgaggggatatttatacttttatacttttttaggtattgtattttatcagcttacagtttaatgcctaagtttcccctgaaaatagcaaataaaattgtgtatttnnnnnnnnnnnnnnnnnnnnnnnnnnnnnnnnnnnnnnnnnnnnnnnnnnnnnnnnnnnnnnnnnnnnnnnnnnnnnnnnnnnnnnnnnnnnnnnnnnnnnnnnnnnnnnnnnnnnnnnnnnnnnnnnnnnnnnnnnnnnnnnnnnnnnnnnnnnnnnnnnnnnnnnnnnnnnnnnnnnnnnnnnnnnnnnnnnnnnnnnnnnnnnnnnnnnnnnnnnnnnnnnnnnnnnnnnnnnnnnnnnnnnnnnnnnnnnnnnnnnnnnnnnnnnnnnnnnnnnnnnnnnnnnnnnnnnnn

SEQ ID NO: 22170 - DNA, 500 bp, Macaca Mulatta
cgcggtaggaagcggaaggctgacggccgcgatggtcgccgcagccgagaagcaagagaagctggcgaacagcggggagggaatggaggagacaaccgttgttatcgagcattgcacgagctgacgcgtctatgggcgcaacgccgcggccctgagtcaggcgctgcgcctggaggccccagagcttccagtaaaggtgaacccgagcaagccccggaggggcagcttcgaggtgacgctgctgcgcccggacggcagcagtgcggagctctggactgggattaagaaggggcccccacgcaaactcaaattccctgagcctcaagaggtggtggaagagttgaagaagtacctgtcgtaaggagatttggctttgtgtccctggtgatgctggaacattaatgatggaacatggccaaacttcagtcatgtgcctgaagccatggtttctaccccggcagaaatgaaggttcagttgtgaggcaaacctctagtaaggc

SEQ ID NO: 22171 - DNA, 307 bp, Macaca Mulatta
ggggcgcagccctgggtttgccatgcagcacatcgtgggtgtgccccgcatactggtccggaggggcctccttggaagggacctctttatgaccaggactctctgcagcccaggcccaagccaacccagagagaaaagacctgaggaagtggccctcgggctgcatcaccgcctcccagcactgggaagagccctggggcacagcattcagcaacgagcgacctccacagccaagacttggtgggatagatatgaagagtttgttggactcagtgaggttcgagaggcccagggaaaggtgacagag

SEQ ID NO: 22172 - DNA, 717 bp, Macaca Mulatta
ggctcagatcccatctggggaagataggttggatgcagggtccctcttagggagtaggatccacagggtcttccgggtgggctcttggtggctgggtccagctaacacaagctcctgttttcctctgacaggtttgactatggcgaccgcttctgggacatcaaaagcaagtatttcacctgccagtgtggctctgagaagtgcaagcactcagccgaagccattgccctggagcagagccgtctggcccgcctggacccacaccctgagctgctgcccgagctcggctccttgccccctgtcaacacatgagaacggaccacaccctccctccccagcatggacggccacagctcagccgcctcctctgccaccagctgctcgcagcccttgcctgggggtgctgccatcttttctccctaccaccccttcacacattcctgaccagagatcccagccaggccctggaggtctgacagcccctccctcccagagctggttcctccctgggagggcaacttcagggctggccacccccctgttcccatcctcagttgaagtttgatgaattgaagtcgggcctctatgccaactggttccttttgttctcaataaatgttgggtttggtaataaactgctatttttgtgttggggtggagagaaagcacactctgctggagggaatgtgggtccaacggccagaagaggatgggaag

SEQ ID NO: 22173 - DNA, 516 bp, Macaca Mulatta
gtaaataaattatgcttcatattagtaaaagatgccataggaaagttcagggttatttaggtcttattgaaatgcagatcgctactagaaatatatagctttggaaacatgggaaggcgccactggtaatgggtaaggttctaataggccatgtttatgactgttgcgtagaattcataatgcatttttcaagagaaacgatgttgtcattggtggccgattcagggaagctcatcaaagcccactttgttcacagtgtagctgaaatactgtctatctctaataaaaacagaaggaaacaagatgatggaatctgtttttcttcactcaaatattataaactattttaaaacacaagtgtaaccaagcagaagaataaagagcttacagtttctcttaaggggacaaacaggcttacttagaagatgcagagattccagaggggatttgggtcccttctggaacttgtggaggaggggtgcggcctctggactggctcagctcggctcagtgcct

SEQ ID NO: 22174 - DNA, 885 bp, Macaca Mulatta
cacctgtgcccaccgcagcacctgcccatagccccagcccggcctcgcccaggagcatcccaggcagcagcagccagcagagcgcctctccgctcgtgcagagccgcagcctccagagcagccgggagagcctgaactcctgcggcttcgtggaaggcaagcccaggcccatgggctcccccaggctgggcatcgccagcctgtccaagacctcggagtacaagccacccggctctccttcccagagatgcaaagtctacacccagaagggggtcctaccatctcccgccccgctgccttcctcgggcaaggattctggcgtggcgtctagtgagtccttgctgcagcccgaggtgcgtacgcccccggttggaatgagcccccaggttttgaaaaaatccatgtctgctgggagcgaagggttcccggaaactcctgtcgatgatgagcagcaggcagctactcctccagagtccgagaaggagatcctgagcaccacgatggtgacggtgcagcagccgctggagctaaacggtgaggatgagctggtgttcacgctggtggaggagctgaccatcagcggggtcctggacagcggccgccccgccagcatcatcagcttcaacagcgactgctctgtgcaggccctggcctcgggctcgcggcccgtcagcatcatcagcagcatcagcgaggacctagagtgctactccggcatggcccccgtctccgaggtcagcatcacacagttcttgcccctcccgaagatgagcctggaggagaaggcccaggaggcagggagcagacgctcttccatcagctcctggctgagcgagatgagtgcgggcagtgagggggagcagtcgtgccacagtttcatagccc

SEQ ID NO: 22175 - DNA, 1646 bp, Macaca Mulatta
  misc_feature (1)...(1646): n = A,T,C or G
agtctaaaagggaggcccgtgagtaccgtgatgctcaggagtttggnnnnnnnnnnnnnnnnnnnnnnnnnnnnnnnnnnnnnnnnnnnnnnnnnnnnnnnnnnnnnnnnnnnnnnnnnnnnnnnnnnnnnnnnnnnnnnnnnnnnnnnnnnnnnnnnnnnnnnnnnnnnnnnnnnnnnagtggtggccgtgtcctccccggcagtgccccctcccaccaaggttgtggccccgccctcgtccagcgacagcagcagcgatagctcctcggacagtgacagttcgactgatgactctgaggaggagcgagcccagcggctagctgagctccaggagcagnnnnnnnnnnnnnnnnnnnnnnnnnnnnnnnnnnnnnnnnnnnnnnnnnnnnnnnnnnnnnnnnnnnnnnnnnnnnnnnnnnnnnnnnnnnnnnnnnnnnnnnnnnnnnnnnnnnnnnnnnnnnnnnnnnnnnnnnnnnnnnnnnnnnnnnnnnnnnnnnnnnnnnnnnnnnnnnnnnnnnnnnnnnnnnnnnnnnnnnnnnnnnnnnnnnnnnnnnnnnnnnnnnnnnnnnnnnnnnnnnnnnnnnnnnnnnnnnnnnnnnnnnnnnnnnnnnnnnnnnnnnnnnnnnnnnnnnnnnnnnnnnnnnnnnnnnnnnnnnnnnnnnnnnnnnnnnnnnnnnnnnnnnnnnnnnnnnnnnnnnnnnnnnnnnnnnnnnnnnnnnnnnnnnnnnnnnnnnnnnnnnnnnnnnnnnnnnnnnnnnnnnnnnnnnnnnnnnnnnnnnnnnnnnnnnnnnnnnnnnnnnnnnnnnnnnnnnnnnnnnnnnnnnnnnnnnnnnnnnnnnnnnnnnnnnnnnnnnnnnnnnnnnnnnnnnnnnnnnnnnnnnnnnnnnnnnnnnnnnnnnnnnnnnnnnnnnnnnnnnnnnnnnnnnnnnnnnnnnnnnnnnnnnnnnnnnnnnnnnnnnnnnnnnnnnnnnnnnnnnnnnnnnnnnnnnnnnnnnnnnnnnnnnnnnnnnnnnnnnnnnnnnnnnnnnnnnnnnnnnnnnnnnnnnnnnnnnnnnnnnnnnnnnnnnnnnnnnnnnnnnnnnnnnnnnnnnnnnnnnnnnnnnnnnnnnnnnnnnnnnnnnnnnnnnnnnnnnnnnnnnnnnnnnnnnnnnnnnnnnnnnnnnnnnnnnnnnnnnnnnnnnnnnnnnnnnnnnnnnnnnnnnnnnnnnnnnnnnnnnnnnnnnnnnnnnnnnnnnnnnnnnnnnnnnnnnnnnnnnnnnnnnnnnnnnnnnnnnnnnnnnnnnnnnnnnnnnnnnnnnnnnnnnnnnnnnnnnnnnnnnnnnnnnnnnnnnnnnnnnnnnnnnnnnnnnnnnnnnnnnnnnntccagctttgcacaacgcactgccccagcagccatcacggcccagcaaccgagccgctgccctgcctcccaagcccgcccggcccccagccgtgtcaccagcgttgacccaaccacccctgctcccacagccccccatggcccaaccaccccaagtattgctggaggatgaagagccacctgccccacccctcacctccatgcagatgcagctgtacctgcagcagctgcagaaggtgcagccccctacgccgctactcccttccgtgaaggtgcagtccca

SEQ ID NO: 22176 - DNA, 1557 bp, Macaca Mulatta
  misc_feature (1)...(1557): n = A,T,C or G
gcgccatccgggggtgcaggtgctgatgagtgccacccagagtgcgtacacggaggaagaaggcgtcttccacttccacatcgaacatcccgtgcctgcctacctcgtggccctggtggccggagacctcaagnnnnnnnnnnnnnnnnnnnnnnnnnnnnnnnnnnnnnnnnnnnnnnnnnnnnnnnnnnnnnnnnnnnnnnnnnnnnnnnnnnnnnnnnnnnnnnnnnnnnnnnnnnnnnnnnnnnnnnnnnnnnnnnnnnnnngcaggtacgacattgtcttcctgcccccctccttccccatcgtggccatggagaacccctgcctcaccttcatcatctcctccatcctggagagcgatgagttcctggtcatcgatgtcatccatgaggtggcccacagctggttcggcaatgctgtcaccaacgccacgtgggaagagatgtgaagagcgagggcctggccacctatgcccagcgccgcatcaccaccgagacnnnnnnnnnnnnnnnnnnnnnnnnnnnnnnnnnnnnnnnnnnnnnnnnnnnnnnnnnnnnnnnnnnnnnnnnnnnnnnnnnnnnnnnnnnnnnnnnnnnnnnnnnnnnnnnnnnnnnnnnnnnnnnnnnnnnnnnnnnnnnnnnnnnnnnnnnnnnnnnnnnnnnnnnnnnnnnnnnnnnnnnnnnnnnnnnnnnnnnnnnnnnnnnnnnnnnnnnnnnnnnnnnnnnnnnnnnnnnnnnnnnnnnnnnnnnnnnnnnnnnnnnnnnnnnnnnnnnnnnnnnnnnnnnnnnnnnnnnnnnnnnnnnnnnnnnnnnnnnnnnnnnnnnnnnnnnnnnncagggctggaattcgagcgctggctcaatgccacaggcccgccgctggctgagccagacctgtctcagggatccagcctgacccgccccgtggaggcccttttccagctgtggaccgcagaacccctggaccaggcagtttttagaaccagtgccattgacatctccaagtggaggannnnnnnnnnnnnnnnnnnnnnnnnnnnnnnnnnnnnnnnnnnnnnnnnnnnnnnnnnnnnnnnnnnnnnnnnnnnnnnnnnnnnnnnnnnnnnnnnnnnnnnnnnnnnnnnnnnnnnnnnnnnnnnnnnnnnnnnnnnnnnnnnnnnnnnnnnnnnnnnnnnnnnnnnnnnnnnnnnnnnnnnnnnnnnnnnnnnagatgtcacgcatgtacaccatcccgctgtacgaggacctctgcaccggtgccctcaagtccttcgcactggaggtcttctaccagacgcagggccggctgcaccccaacctgcgcagagccatccagcagatcctgtcccatgttctgggctctagcacagagcctgccccagagcccagcacggagctgggcagggctgaagcagacacagactcagacgcacaggccctgctgcttggggatgaggcccccagcagtgccatctctctcagggacgtcaatgtgtctgcctagccctgttggcgggctgaccctcgacctcccagacaccacaattgtgccttc

SEQ ID NO: 22177 - DNA, 127 bp, Macaca Mulatta
gaaacacaaaacccttgctttaattaaagatggccgtgttattggtggtatctgtttccgtatgttcccatctcaaggattcacagagattgtcttctgtgctgtaacctccaacgagcaagtcaag

SEQ ID NO: 22178 - DNA, 5480 bp, Macaca Mulatta
  misc_feature (1)...(5480): n = A,T,C or G
ctgaggagactgaggttaccatgtctgagccttttacactggtcagggctttttctacatctgtgctttcagatgtctcaaatctatcgtcaactacaatgaccacagcattggtaccacctttggatcagactgcttccacaaccagtggatattgtgcctacccacggagactcgattcataccacttcagaggccacagtaatctctgtcaggaagacatccacggcagttccttctctgacagaaacaccatttccttcactgagactctccactcctgtgacagctaaggctgaaaccacccttttctccacctcagttgatacagttaccccatctacaaacactcttgtctgctcaaaacctccccctgacaacattcctcctgcgtcctccactcatgttatctcaactacatctacaccagaagcaactcaacccatatctctagtagaagagacttctacctatgctctcagcttcccatatacttacagtggtggtgcagatgttgccaacttggctactggcaccgcagagacctctgttgttgatgagaccgcaccctcacacatctctgccaataagcttactacttcagtaaacagtcacatttctccacctgtcacacatcgtgtacacacaccagtgtccacccacttggtgactagcacctctatcttatcttctgatgaagaccagatgaccatatccctgggaaaaacccctagaactacggaggtgacagaaatgtccccatcaaataatttttttatttcatactcccggggtactccatttttggaaatgacagatacaggatttcctgagaccacaataatttccagtcaccaaacacatttgccttcagagattccacttgggactccctctgatggaaattcggcttcatctcccacttctggaagtacacagattacacctaccttgacctcaagtaacacagtagacgttcacattccaaaaatgtctaccagtcttgggaaaacagctctcccctcacaagctctgacaatcaccactttttttgtctcctgaaaaaaaaagccctagtgtttttccagcatatactcccaggaaccgtggaaatgatagtaaactccacctatgtgactcactctgtctcatatggccaggatatttcatttgtaaataccacaacttccagctcagccagaatatcaaatcctatggacatcaacacaactttttcacacttgcattcacttaggacacaacctgaggtgacttcagttgcctctttcatttctgaaagcacacagactttccctgagtccttgtctctttccacagctggactatataatgacagttttacagttctctccgacaggatcactacagccttttccattccaaatgtacctacaatgcttcttagagaatcctctatggcaaccttcactcctatttaccagatgtcctcattgccagttagtgtaactgccttcacctccaaaaaggtttctgacactcccccaatactgatcactaaatcttctaaaacaatgcatccaggttgtttggaaagtccctgtacagccacttctgggcctatgtctgagatgtcctcaatgtcagctaatgactctgctttcacacctgcaacagtctcttctgacacttccacaacagttgggttattctctactttattgtctttggttacccccaggattactatgaccatgcagacatctacattggatgtcacacctgtgacatatgctgggcctacttcaaaaagcaaaatggtttcctctgctttcactacagaaatgatagaggtaccttccaggatcacacctacaacctttctctctccaacagagccaactttcccctttgtaaaaaccgttcccaccactattatggctgggatagtgactccatttgtaggtaccactgccttttctctactcagttctaagaacactggagctatttcctccattccaaagaccacattttcaccatttctatcagcaactcaacagtcatcacaagcagatgaggctacaactttgggcatattatctggaattactaagaggtccctatctactggaacagtgnnnnnnnnnnnnnnnnnnnnnnnnnnnnnnnnnnnnnnnnnnnnnnnnnnnnnnnnnnnnnnnnnnnnnnnnnnnnnnnnnnnnnnnnnnnnnnnnnnnnnnnnnnnnnnnnnnnnnnnnnnnnnnnnnnnnnnnnnnnnnnnnnnnnnnnnnnnnnnnnnnnnnnnnnnnnnnnnnnnnnnnnnnnnnnnnnnnnnnnnnnnnnnnnnnnnnnnnnnnnnnnnnnnnnnnnnnnnnnnnnnnnnnnnnnnnnnnnnnnnnnnnnnnnnnnnnnnnnnnnnnnnnnnnnnnnnnnnnnnnnnnnnnnnnnnnnnnnnnnnnnnnnnnnnnnnnnnnnnnnnnnnnnnnnnnnnnnnnnnnnnnnnnnnnnnnnnnnnnnnnnnnnnnnnnnnnnnnnnnnnnnnnnnnnnnnnnnnnnnnnnnnnnnnnnnnnnnnnnnnnnnnnnnnnnnnnnnnnnnnnnnnnnnnnnnnnnnnnnnnnnnnnnnnnnnnnnnnnnnnnnnnnnnnnnnnnnnnnnnnnnnnnnnnnnnnnnnnnnnnnnnnnnnnnnnnnnnnnnnnnnnnnnnnnnnnnnnnnnnnnnnnnnnnnnnnnnnnnnnnnnnnnnnnnnnnnnnnnnnnnnnnnnnnnnnnnnnnnnnnnnnnnnnnnnnnnnnnnnnnnnnnnnnnnnnnnnnnnnnnnnnnnnnnnnnnnnnnnnnnnnnnnnnnnnnnnnnnnnnnnnnnnnnnnnnnnnnnnnnnnnnnnnnnnnnnnnnnnnnnnnnnnnnnnnnnnnnnnnnnnnnnnnnnnnnnnnnnnnnnnnnnnnnnnnnnnnnnnnnnnnnnnnnnnnnnnnnnnnnnnnnnnnnnnnnnnnnnnnnnnnnnnnnnnnnnnnnnnnnnnnnnnnnnnnnnnnnnnnnnnnnnnnnnnnnnnnnnnnnnnnnnnnnnnnnnnnnnnnnnnnnnnnnnnnnnnnnnnnnnnnnnnnnnnnnnnnnnnnnnnnnnnnnnnnnnnnnnnnnnnnnnnnnnnnnnnnnnnnnnnnnnnnnnnnnnnnnnnnnnnnnnnnnnnnnnnnnnnnnnnnnnnnnnnnnnnnnnnnnnnnnnnnnnnnnnnnnnnnnnnnnnnnnnnnnnnnnnnnnnnnnnnnnnnnnnnnnnnnnnnnnnnnnnnnnnnnnnnnnnnnnnnnnnnnnnnnnnnnnnnnnnnnnnnnnnnnnnnnnnnnnnnnnnnnnnnnnnnnnnnnnnnnnnnnnnnnnnnnnnnnnnnnnnnnnnnnnnnnnnnnnnnnnnnnnnnnnnnnnnnnnnnnnnnnnnnnnnnnnnnnnnnnnnnnnnnnnnnnnnnnnnnnnnnnnnnnnnnnnnnnnnnnnnnnnnnnnnnnnnnnnnnnnnnnnnnnnnnnnnnnnnnnnnnnnnnnnnnnnnnnnnnnnnnnnnnnnnnnnnnnnnnnnnnnnnnnnnnnnnnnnnnnnnnnnnnnnnnnnnnnnnnnnnnnnnnnnnnnnnnnnnnnnnnnnnnnnnnnnnnnnnnnnnnnnnnnnnnnnnnnnnnnnnnnnnnnnnnnnnnnnnnnnnnnnnnnnnnnnnnnnnnnnnnnnnnnnnnnnnnnnnnnnnnnnnnnnnnnnnnnnnnnnnnnnnnnnnnnnnnnnnnnnnnnnnnnnnnnnnnnnnnnnnnnnnnnnnnnnnnnnnngttcaatcagcatcaacacgggcaaatctcagtgggaaaagccaaagtttaaacaatgcaaattgcttcaggaacttcctgacaagattgtggatcttgctaatattaccataagtgangagaatgctcaggatgttgcagagcatattttaaatttgataaatgaatccccagtcctggataaagaagagacaaagattattgtttctaaaatatcagatatttcacaatgtgatgagataagtatgaacctaacccatattgtattacaaataatcaacgttgttttggaaaagcaaaacaattcagcctctgatctgcatgaagtaagcaatgannnnaattctgaggataattgagcgtactggtcacaagatggnnnnnnnnnnnnnnnnnnnnnnnnnnnnnnnnnnnnnnnnnnnnnnnnnnnnnnnnnnnnnnnnnnnnnnnnnnnnnnnnnnnnnnnnnnnnnnnnnnnnnnnnnnnnnnnnnnnnnnnnnnnnnnnnnnnnnnnnnnnnnnnnnnnnnnnnnnnnnnnnnnnnnnnnnnnnnnnnnnnnnnnnnnnnnnnnnnnnnnnnnnnnnnnnnnnnnnnnnnnnnnnnnnnnnnnnnnnnnnnnnnnnnnnnnnnnnnnnnnnnnnnnnnnnnnnnnnnnnnnnnnnnnnnnnnnnnnnnnnnnnnnnnnnnnnnnnnnnnnnnnnnnnnnnnnnnnnnnnnnnnnnnnnnnnnnnnnnnnnnnnnnnnnnnnnnnnnnnnnnnnnnnnnnnnnnnnnnnnnnnnnnnnnnnnnnnnnnnnnnnnnnnnnnnnnnnnnnnnnnnnnnnnnnnnnnnnnnnnnnnnnnnnnnnnnnnnnnnnnnnnnnnnnnnnnnnnnnnnnnnnnnnnnnnnnnnnnnnnnnnnnnnnnnnnnnnnnnnnnnnnnnnnnnnnnnnnnnnnnnnnnnnnnnnnnnnnnnnnnnnnnnnnnnnnnnnnnnnnnnnnnnnnnnnnnnnnnnnnnnnnnnnnnnnnnnnnnnnnnnnnnnnnnnnnnnnnnnnnnnnnnnnnnnnnnnnnnnnnnnnnnnnnnnnnnnnnnnnnnnnnnnnnnnnnnnnnnnnnnnnnnnnnnnnnnnnnnnnnnnnnnnnnnnnnnnnnnnnnnnnnnnnnnnnnnnnnnnnnnnnnnnnnnnnnnnnnnnnnnnnnnnnnnnnnnnnnnnnnnnnnnnnnnnnnnnnnnnnnnnnnnnnnnnnnnnnnnnnnnnnnnnnnnnnnnnnnnnnnnnnnnnnnnnnnnnnnnnnnnnnnnnnnnnnnnnnnnnnnnnnnnnnnnnnnnnnnnnnnnnnnnnnnnnnnnnnnnnnnnnnnnnnnnnnnnnnnnnnnnnnnnnnnnnnnnnnnnnnnnnnnnnnnnnnnnnnnnnnnnnnnnnnnnnnnnnnnnnnnnnnnnnnnnnnnnnnnnnnnnnnnnnnnnnnnnnnnnnnnnnnnnnnnnnnnnnnnnnnnnnnnnnnnnnnnnnnnnnnnnnnnnnnnnnnnnnnnnnnnnnnnnnnnnnagatgcgagcagccggtgtcagataaaagttggatataaacaggagggactaaagaaaaactttgagcacaaactgttgacaccattcctcaagtcaactgcaactagctccactttcaaatctttaggctctgcacaaggcacaccttcagaaataagctttccaaat

SEQ ID NO: 22179 - DNA, 658 bp, Macaca Mulatta
  misc_feature (1)...(658): n = A,T,C or G
gggactcttcttgtatgtgtttccatatatctctatggattacccagacaagacactacatccatccaacaaggagaaacagcttcaaaggagagagttattggtgtgtgattttagcctcatgtgagactcctgttaagactaaaccatttgcattaaactagagccttaagtcaatcccagaaggtagcataaacaaataaaaaattaactatatggcataagaattaagatcagtgctgtatgtggaaacaacaacgaacaaagctatctgagtgaactgctaatacagaaacttaatgtggacctgtttggggtcaaactattgttttagaatgaaggaattttattattgtgtatatatatataatttgtacataagaagtatggagatgatacggtgttaaaaaaaaatcatggtgaggctacaatactcaagtaacaaggtttgggacaatgtctaagggttaaagtgccaaagccatttctgtactaactgttctcttgttcaggtaccaggggagaaggatgacccctccttattctccaattcatgtacagtattttgtcctagcagcagtaaagacttagttctttacttacnagaggcagaanacagacagactatgtcatnaacaaactgaatgtgtaacttctn

SEQ ID NO: 22180 - DNA, 1084 bp, Macaca Mulatta
gggattccagcggcggacagcacccgggccgagatgtctcgctcagtggccttagccgtgctggcgctactctctctttctggcctggaggctatccagcgtactccaaagattcaggtttactcacgccatccaccagagaatggaatgccaaatttcctgaattgctatgtgtctggatttcatccatctgatattgaagttgacttactgacagagtggagagaaaatgggaaaagtggagcattcagacttgtctttcagcaaagactggtctttctatctcttgtactacactgaattcacccccaatgaaaaagatgagtatgcctgccgcgtgaaacatgtgactttgtcagggcccaggactgttaagtgggatcgagaaatgtaagcagcatcatggaggttttgaataatgacgccatttggaattaggatgtaattccaaaattccaggctgtcccgggccttgtgtaagtaaattggatatgggcttgatcaccacaattaacttgcccgacaaccaactggcccactaagttcttcaccttacgattaaaaggggttttgaaaaacaaaccagtgggcgcctagaggggataaacgtcctttacccattatttctaaatcatgaaaatttttccctcgaacaaatatatcttggacaaaaacaagggggcccgtacaaatccccatccccccgcggccggattatttactcgaaataacaaggttaacaatccttgaggcggactctaatacgtctctcttcgacactctgtgtttacgtcgcgcaaagcgggacgctatgggggagcacgagcagttcgttatagaaacaggggtctggggggagtgacaaataaaaacgagaggagaaaaatgcgcccacgcccccaaagtgagcccaatgaaccaagtaggaggtcaactggaaattatgcgagaggagatcaaggaatatataagggaagcgctcgcgcccgtgcgaaaagtactccgcagatagaccaagcgcaccacatgatgaccgagctgtgtactaaagcgagatgaactatagagatggccgatagaataa

SEQ ID NO: 22181 - DNA, 788 bp, Macaca Mulatta
  misc_feature (1)...(788): n = A,T,C or G
gggccacagttaacccattgtgcttctttttaatcaaagtttgtgggggaatgggcttattgaatgtctaaaaactaagtttaaagtgtttgttaccctaagttttttacatttgtaaactctaattatatatgtgaatgttattactctcagtgaattgttattgtttgcaaaaatgcactgggcagtaacattttgtgataaatcctacaagatataagtcattgagatgtctaagatgctttttattttaaccccaattagtaaccaccttatggaaaataatatttgctaatattgtttattgtgaactaagaatcaaagtttttgtatgcatcaatgcacttaatcctcacaacaaccttatgaggtagttctattacctttttatagctaaagagattggggtacagagaagttagccccaacgttatataccgcaagtaagtggcaaagcaaggattcatacaaaggccatctcactcaacagtcttcactctttactattcctacacttannnnnnnnnnnnnnnnnnnnnggctgggcgccgtggctannnnnnnnnnnnnnnnnnnnnnnnnnnncccgaagccggtgggatcatgaaattcagggaaatttaaaaccgttcctgggccaaacccgggtgaaaaatctccgtcctctttccttgaataagaataagatattcacatataattattacaagcaccctgtttccaggccggcacctcagagcccctttaaaataaaaactttttccttaaataaaaaatatattcttata

SEQ ID NO: 22182 - DNA, 583 bp, Macaca Mulatta
agctgtttctggaagatgggaaataatggtgatgggcaatgggaaagcaggaaggagaaagtgaacgtggttactttttgagatggtgagctaattggaaaactaggatccacggtgtgtaattacacatttacaggtggattctgaagagccagtctttgaggctgtcatcaactgggtgaagcatgccaagaaggagcgggaagaatccttgcctaacctgctacagtatgtgcgtatgcccctgctgacccccaggtatatcacggatgtaatagatgctgaggtaagtggtgcaacactctcaggatccaaaaccttgacaaactcttaccttagtgttctgtattcaaaactgattattttaacgtaggcacagagtctcctggtttgcctgtctaggaatgccagtgagagtggtgctgggtagttcccaagcatatttctaagaaaagtgaatttcttggcagactcttgacacaaatgaaaatctgtggttcaattttgtgttttgctgtatatgttttacatgcccctaagtgttttgtataaacacctgataataaactttgtccccttctcc

SEQ ID NO: 22183 - DNA, 452 bp, Macaca Mulatta
gcccacgcacagccaactccagtgcagcacccaggccgtaggcggccagtggaccggagcccgtcagggccctctcaggaggacagtcctctggcagccccccaccgtccctgcaccttcccctccccaggtcatcagccagaaggagggagacttcttcttcgattccctgaggcaggtgtctgactgggtgaagaagaacaagccccagaaagaaggtgaggaggcctctgtggagctgggcgagggtgcggctgggtggggtgagggggcaccgtcggcctccgtgtggcccatgcccattcatccatccattccttcctgtgtgtccctgggttgtggggacaaccaggccctggggcctggtagtgagggcctcccagctcaggcaggaaccggtggctgcaccatggggtgatgaaggatgccccagggctgaggggcatgacccc

SEQ ID NO: 22184 - DNA, 221 bp, Macaca Mulatta
atccaaggatccactctctcttcctttccgagatcagaatatttgggttgccatgtgtagcttccacgtcccctgcggcgttatatcatatatgcaaacctacaatctgttcaacttccacctaccacatcctgcacccctttgactggggacttactggttgcaagagctcattttgcaggctggaagtaccagggaattaattcccccagtctaccaat

SEQ ID NO: 22185 - DNA, 803 bp, Macaca Mulatta
  misc_feature (1)...(803): n = A,T,C or G
agataaaagctgaggatgaccagcccctcccgggagtcctcttatccctgagcggtggcgtctttcgttccaacctcttgacccaggacaacggcattctgacattctcaaacctgnnnnnnnnnnnnnnnnnnnnnnnnnnnnnnnnnnnnnnnnnnnnnnnnnnnnnnnnnnnnnnnnnnnnnnnnnnnnnnnnnnnnnnnnnnnnnnnnnnnnnnnnnnnnnnnnnnnnnnnnnnnnnnnnnnnnnnnnnnnnnnnnnnnnnnnnnnnnnnnnnnnnnnnnnnnnnnnnnnnnnnnnnnnnnnnnnnnnnnnnnnnnnnnnnnnnnnnnnnnnnnnnnnnnnnnnnnnnnnnnnnnnnnnnnnnnnnnnnnnnnnnnnnnnnnnnnnnnnnnnnnnnnnnnnnnnnnnnnnnnnnnnnnnnnnnnnnnnnnnnnnnnnnnnnnnnnnnnnnnnnnnnnnnnnnnnnnnnnnnnnnnnnnnnnnnnnnnnnnnnnnnnnnnnnnnnnnnnnnnnnnnnnnnnnnnnnnnnnnnnnnnnnnnnnnnnnnnnnnnnnnnnnnnnnnnnnnnnnnnnnnnnnnnnnnnnnnnnnnnnnnnnnnnnnnnnnnnnnnnnnnnnnnnnnnnnnnnnnnnnnnnnnnnnnnnnnnnnnnnnnnnnnnnnnnnnnnnnnnnnnnnnnagaactatgttgtgcttctggactccacactccccagatcccagtatgactacatcttgcctcaagtttctttcaccgcagtgggctaccataaacacatcaccttgatttttaatcccacg

SEQ ID NO: 22186 - DNA, 948 bp, Macaca Mulatta
  misc_feature (1)...(948): n = A,T,C or G
tgcataacatcctggatgtcgctgcggaacacaatctgcgattgtttgtgcctagcacgatcggggcctttggacccacctctccgcggaacccaacccccgatctcgtattcagagacccaggaccatctacggggtgtccaaggtccacgcggagctcatgggagaactatgcagtccagatttttcatgatgccgcaaagcatggcaaattcgagtgcaacctggaagcccgcacaaggctgcccatgatgtacattgacgactgcctcagggccaccctggaggtcatggaggccccggccgagtccctctccatgaggacctacaatgtcagcgccatgagcttcacacctgaggagctggcccaggaggtcctcaagcacgtaccggaattccagatcacatacaacgtggatgccgttcggcaggccatanntagcggatagttggccgatgaaatttgatgacagcaatgctcggaaggactgggggtggaaacatgattttgatcttccagagttggtgactaccatgttgaacttccatggttctgaaaccagagttgcccaagccaactgaaagaatctgaaagaggagctcctgtgtcctggtccactgtcaaaggagaactgtcacgactccaaggttatagactccaaggagcctacattatttggaactgactaattggactaaattttggcagctcatattgaactgctagacaaagaatggagtttaacatttaagcattttcagaatgttgtaggtatggtggggggacttctcagtttttggtgtttgcctgaacttttctaaacacattccacagaataaggcttaagtcatcattagtttccatttccttaattaggatgaagtgaccatttctgggacgaagggagtgtgtgacatttgtatttaattaaattcaatttaaatatt

SEQ ID NO: 22187 - DNA, 135 bp, Macaca Mulatta
aggcgctgcggtccctccgacggtacccactgccgctgcgcagcgggaaggaagctaagatcctacagcacttcggagacgggctctgccggatgctggacgagcggctgcagcggcaccgaacatcgggcggtg

SEQ ID NO: 22188 - DNA, 11461 bp, Macaca Mulatta
  misc_feature (1)...(11461): n = A,T,C or G
gccaggaggtgagttttaacatgttagatgtggcagatggaggcctgctcaacagcgtgagacgtttgctgtccgacatcttcattcctgctctcagagccacgagccatggctggggcgagctcgagggtcttcaggacgcagctaacattcggcaggagttcttgagctccctggaaggctttgtgaacgtccnnnnnnnnnnnnnnnnnnnnnnnnnnnnnnnnnnnnnnnnnnnnnnnnnnnnnnnnnnnnnnnnnnnnnnnnnnnnnnnnnnnnnnnnnnnnnnnnnnnnnnnnnnnnnnnnnnnnnnnnnnnnnnnnnnnnnnnnnnnnnnnnnnnnnnnnnnnnnnnnnnnnnnnnnnnnnnnnnnnnnnnnnnnnnnnnnnnnnnnnnnnnnnnnnnnnnnnnnnnnnnnnnnnnnnnnnnnnnnnnnnnnnnnnnnnnnnnnnnnnnnnnnnnnnnnnnnnnnnnnnnnnnnnnnnnnnnnnnnnnnnnnnnnnnnnnnnnnnnnnnnnnnnnnnnnnnnnnnnnnnnnnnnnnnnnnnnnnnnnnnnnnnnnnnnnnnnnnnnnnnnnnnnnnnnnnnnnnnnnnnnnnnnnnnnnnnnnnnnnnnnnnnnnnnnnnnnnnnnnnnnnnnnnnnnnnnnnnnnnnnnnnnnnnnnnnnnnnnnnnnnnnnnnnnnnnnnnnnnnnnnnnnnnnnnnnnnnnnnnnnnnnnnnnnnnnnnnnnnnnnnnnnnnnnnnnnnnnnnnnnnnnnnnnnnnnnnnnnnnnnnnnnnnnnnnnnnnnnnnnnnnnnnnnnnnnnnnnnnnnnnnnnnnnnnnnnnnnnnnnnnnnnnnnnnnnnnnnnnnnnnnnnnnnnnnnnnnnnnnnnnnnnnnnnnnnnnnnnnnnnnnnnnnnnnnnnnnnnnnnnnnnnnnnnnnnnnnnnnnnnnnnnnnnnnnnnnnnnnnnnnnnnnnnnnnnnnnnnnnnnnnnnnnnnnnnnnnnnnnnnnnnnnnnnnnnnnnnnnnnnnnnnnnnnnnnnnnnnnnnnnnnnnnnnnnnnnnnnnnnnnnnnnnnnnnnnnnnnnnnnnnnnnnnnnnnnnnnnnnnnnnnnnnnnnnnnnnnnnnnnnnnnnnnnnnnnnnnnnnnnnnnnnnnnnnnnnnnnnnnnnnnnnnnnnnnnnnnnnnnnnnnnnnnnnnnnnnnnnnnnnnnnnnnnnnnnnnnnnnnnnnnnnnnnnnnnnnnnnnnnnnnnnnnnnnnnnnnnnnnnnnnnnnnnnnnnnnnnnnnnnnnnnnnnnnnnnnnnnnnnnnnnnnnnnnnnnnnnnnnnnnnnnnnnnnnnnnnnnnnnnnnnnnnnnnnnnnnnnnnnnnnnnnnnnnnnnnnnnnnnnnnnnnnnnnnnnnnnnnnnnnnnnnnnnnnnnnnnnnnnnnnnnnnnnnnnnnnnnnnnnnnnnnnnnnnnnnnnnnnnnnnnnnnnnnnnnnnnnnnnnnnnnnnnnnnnnnnnnnnnnnnnnnnnnnnnnnnnnnnnnnnnnnnnnnnnnnnnnnnnnnnnnnnnnnnnnnnnnnnnnnnnnnnnnnnnnnnnnnnnnnnnnnnnnnnnnnnnnnnnnnnnnnnnnnnnnnnnnnnnnnnnnnnnnnnnnnnnnnnnnnnnnnnnnnnnnnnnnnnnnnnnnnnnnnnnnnnnnnnnnnnnnnnnnnnnnnnnnnnnnnnnnnnnnnnnnnnnnnnnnnnnnnnnnnnnnnnnnnnnnnnnnnnnnnnnnnnnnnnnnnnnnnnnnnnnnnnnnnnnnnnnnnnnnnnnnnnnnnnnnnnnnnnnnnnnnnnnnnnnnnnnnnnnnnnnnnnnnnnnnnnnnnnnnnnnnnnnnnnnnnnnnnnnnnnnnnnnnnnnnnnnnnnnnnnnnnnnnnnnnnnnnnnnnnnnnnnnnnnnnnnnnnnnnnnnnnnnnnnnnnnnnnnnnnnnnnnnnnnnnnnnnnnnnnnnnnnnnnnnnnnnnnnnnnnnnnnnnnnnnaggacctggagttgctgcttgacagggtcaatgatttgattgagttccgcgttgatgccattctagaagaaatgnnnnnnnnnnnnnnnnnnnnnnnnnnnnnnnnnnnnnnnnnnnnnnnnnnnnnnnnnnnnnnnnnnnnnnnnnnnnnnnnnnnnnnnnnnnnnnnnnnnnnnnnnnnnnnnnnnnnnnnnnnnnnnnnnnnnnnnnnnnnnnnnnnnnnnnnnnnnnnnnnnnnnnnnnnnnnnnnnnnnnnnnnnnnnnnnnnnnnnnnnnnnnnnnnnnnnnnnnnnnnnnnnnnnnnnnnnnnnnnnnnnnnnnnnnnnnnnnnnnnnnnnnnnnnnnnnnnnnnnnnnnnnnnnnnnnnnnnnnnnnnnnnnnnnnnnnnnnnnnnnnnnnnnnnnnnnnnnnnnnnnnnnnnnnnnnnnnnnnnnnnnnnnnnnnnnnnnnnnnnnnnnnnnnnnnnnnnnnnnnnnnnnnnnnnnnnnnnnnnnnnnnnnnnnnnnnnnnnnnnnnnnnnnnnnnnnnnnnnnnnnnnnnnnnnnnnnnnnnnnnnnnnnnnnnnnnnnnnnnnnnnnnnnnnnnnnnnnnnnnnnnnnnnnnnnnnnnnnnnnnnnnnnnnnnnnnnnnnnnnnnnnnnnnnnnnnnnnnnnnnnnnnnnnnnnnnnnnnnnnnnnnnnnnnnnnnnnnnnnnnnnnnnnnnnnnnnnnnnnnnnnnnnnnnnnnnnnnnnnnnnnnnnnnnnnnnnnnnnnnnnnnnnnnnnnnnnnnnnnnnnnnnnnnnnnnnnnnnnnnnnnnnnnnnnnnnnnnnnnnnnnnnnnnnnnnnnagataccttggagatagcatctgtaaatttacccattcccgtgcaaaccaagaactattataagaatgtttctgaaaacaaagagattgtaaaattagtttctnnnnnnnnnnnnnnnnnnnnnnnnnnnnnnnnnnnnnnnnnnnnnnnnnnnnnnnnnnnnnnnnnnnnnnnnnnnnnnnnnnnnnnnnnnnnnnnnnnnnnnnnnnnnnnnnnnnnnnnnnnnnnnnnnnnnnnnnnnnnnnnnnnnnnnnnnnnnnnnnnnnnnnnnnnnnnnnnnnnnnnnnnnnnnnnnnnnnnnnnnnnnnnnnnnnnnnnnnnnnnnnnnnnnnncagctgacttgaagtttgccctgactgctgagacaaaggcctggatggttgtcattggacgccactgtaacaaaaaataccggagtgagatggaaaacatttttatgcttattgaagaattcaataagaaactaaatcgtccaattaaggacctagacgatattcggattgcaatggcagcactgaaagaaataagggagcaacaaatctacattgattttcaagtaggacctattgaggnnnnnnnnnnnnnnnnnnnnnnnnnnnnnnnnnnnnnnnnnnnnnnnnnnnnnnnnnnnnnnnnnnnnnnnnnnnnnnnnnnnnnnnnnnnnnnnnnnnnnnnnnnnnnnnnnnnnnnnnnnnnnnnnnnnnnnnnnnnnnnnnnnnnnnnnnnnnnnnnnnnnnnnnnnnnnnnnnnnnnnnnnnnnnnnnnnnnnnnnnnnnnnnnnnnnnnnnnnnnnnnnnnnnnnnnnnnnnnnnnnnnnnnnnnnnnnnnnnnnnnnnnnnnnnnnnnnnnnnnnnnnnnnnnnnnnnnnnnnnnnnnnnnnnnnnnnnnnnnnnnnnnnnnnnnnnnnnnnnnnnnnnnnnnnnnnnnnnnnnnnnnnnnnnnnnnnnnnnnnnnnnnnnnnnnnnnnnnnnnnnnnnnnnnnnnnnnnnnnnnnnnnnnnnnnnnnnnnnnnnnnnnnnnnnnnnnnnnnnnnnnnnnnnnnnnnnnnnnnnnnnnnnnnnnnnnnnnnnnnnnnnnnnnnnnnnnnnnnnnnnnnnnnnnnnnnnnnnnnnnnnnnnnnnnnnnnnnnnnnnnnnnnnnnnnnnnnnnnnnnnnnnnnnnnnnnnnnnnnnnnnnnnnnnnnnnnnnnnnnnnnnnnnnnnnnnnnnnnnnnnnnnnnnnnnnnnnnnnnnnnnnnnnnnnnnnnnnnnnnnnnnnnnnnnnnnnnnnnnnnnnnnnnnnnnnnnnnnnnnnnnnnnnnnnnnnnnnnnnnnnnnnnnnnnnnnnnnnnnaggacatctgtatcagtgcggtgaaagagagagacattgagcaaaagctgaagcaagtgatcaatgaatgggacaataaaacattcaccttcggcagctttaaaacccgtggagagctcctcttgcgaggagacagtacctcagaaatcatcgccaacatggaggacagcttgatgttgctgggttccctactgagcaacaggnnnnnnnnnnnnnnnnnnnnnnnnnnnnnnnnnnnnnnnnnnnnnnnnnnnnnnnnnnnnnnnnnnnnnnnnnnnnnnnnnnnnnnnnnnnnnnnnnnnnnnnnnnnnnnnnnnnnnnnnnnnnnnnnnnnnnnnnnnnnnnnnnnnnnnggaagccaagcgcttttctaacatagataaatcttgggtgaagatcatgactcgggcacatgaagtgcccaatgtagttcagtgctgtgttggagatgagaccctggggcagctgttaccgcacttgctggaccagttggagatatgccagaaatcccttactgggtannnnnnnnnnnnnnnnnnnnnnnnnnnnnnnnnnnnnnnnnnnnnnnnnnnnnnnnnnnnnnnnnnnnnnnnnnnnnnnnnnnnnnnnnnnnnnnnnnnnnnnnnnnnnnnnnnnnnnnnnnnnnnnnnnnnnnnnnnnnnnnnnnnnnnnnnnnnnnnnnnnnnnnnnnnnnnnnnnnnnnnnnnnnnnnnnnnnnnnnnnnnnnnnnnnnnnnnnnnnnnnnnnnnnnnnnnnnnnnnnnnnnnnnnnnnnnnnnnnnnnnnnnnnnnnnnnnnnnnnnnnnnnnnnnnnnnnnnnnnnnnnnnnnnnnnnnnnnnnnnnnnnnnnnnnnnnnnnnnnnnnnnnnnnnnnnnnnnnnnnnnnnnnnnnnnnnnnnnnnnnnnnnnnnnnnnnnnnnnnnnnnnnnnnnnnnnnnnnnnnnnnnnnnnnnnnnnnnnnnnnnnnnnnnnnnnnnnnnnnnnnnnnnnnnnnnnnnnnnnnnnnnnnnnnnnnnnnnnnnnnnnnnnnnnnnnnnnnnnnnnnnnnnnnnnnnnnnnnnnnnnnnnnnnnnnnnnnnnnnnnnnnnnnnnnnnnnnnnnnnnnnnnnnnnnnnnnnnnnnnnnnnnnnnnnnnnnnnnnnnnnnnnnnnnnnnnnnnnnnnnnnnnnnnnnnnnnnnnnnnnnnnnnnnnnnnnnnnnnnnnnnnnnnnnnnnnnnnnnnnnnnnnnnnnnnnnnnnnnnnnnnnnnnnnnnnnnnnnnnnnnnnnnnnnnnnnnnnnnnnnnnnnnnnnnnnnnnnnnnnnnnnnnnnnnnnnnnnnnnnnnnnnnnnnnnnnnnnnnnnnnnnnnnnnnnnnnnnnnnnnnnnnnnnnnnnnnnnnnnnnnnnnnnnnnnnnnnnnnnnnnnnnnnnnnnnnnnnnnnnnnnnnnnnnnnnnnnnnnnnnnnnnnnnnnnnnnnnnnnnnnnnnnnnnnnnnnnnnnnnnnnnnnnnnnnnnnnnnnnnnnnnnnnnnnnnnnnnnnnnnnnnnnnnnnnnnnnnnnnnnnnnnnnnnnnnnnnnnnnnnnnnnnnnnnnnnnnnnnnnnnnnnnnnnnnnnnnnnnnnnnnnnnnnnnnnnnnnnnnnnnnnnnnnnnnnnnnnnnnnnnnnnnnnnnnnnnnnnnnnnnnnnnnnnnnnnnnnnnnnnnnnnnnnnnnnnnnnnnnnnnnnnnnnnnnnnnnnnnnnnnnnnnnnnnnnnnnnnnnnnnnnnnnnnnngaagttggctagttgtgccttcattgacaatgttgttttggccaggaagtttttcacgctctacaaactgtgtgaggagcagctttctaagcaggtnnnnnnnnnnnnnnnnnnnnnnnnnnnnnnnnnnnnnnnnnnnnnnnnnnnnnnnnnnnnnnnnnnnnnnnnnnnnnnnnnnnnnnnnnnnnnnnnnnnnnnnnnnnnnnnnnnnnnnnnnnnnnnnnnnnngattgatgaggatgagcccttgtttttgagtttgattgaagatctctttccaaatattcttctggacaaggcaggttaccctgaactggaagcagcaatcagtagacaggnnnncaggttgaagaagctggtttaatcaaccatcctccttggaaactgaaggtcatccagctattcgaaacgcagagggtgcggcatggggtgatgaccctggggcccagtggggctgggaagaccacctgcatccacacgttgatgagagccatgacannnnnnnnnnnnnnnnnnnnnnnnnnnnnnnnnnnnnnnnnnnnnnnnnnnnnnnnnnnnnnnnnnnnnnnnnnnnnnnnnnnnnnnnnnnnnnnnnnnnnnnnnnnnnnnnnnnnnnnnnnnnnnnnnnnnnnnnnnnnnnnnnnnnnnnnnnnnnnnnnnnnnnnnnnnnnnnnnnnnnnnnnnnnnnnnnnnnnnnnnnnnnnnnnnnnnnnnnnnnnnnnnnnnnnnnnnnnnnnnnnnnnnnnnnnnnnnnnnnnnnnnnnnnnnnnnnnnnnnnnnnnnnnnnnnnnnnnnnnnnnnnnnnnnnnnnnnnnnnnnnnnnnnnnnnnnnnnnnnnnnnnnnnnnnnnnnnnnnnnnnnnnnnnnnnnnnnnnnnnnnnnnnnnnnnnnnnnnnnnnnnnnnnnnnnnnnnnnnnnnnnnnnnnnnnnnnnnnnnnnnnnnnnnnnnnnnnnnnnnnnnnnnnnnnnnnnnnnnnnnnnnnnnnnnnnnnnnnnnnnnnnnnnnnnnnnnnnnnnnnnnnnnnnnnnnnnnnnnnnnnnnnnnnnnnnnnnnnnnnnnnnnnnnnnnnnnnnnnnnnnnnnnnnnnnnnnnnnnnnnnnnnnnnnnnnnnnnnnnnnnnnnnnnnnnnnnnnnnnnnnnnnnnnnnnnnnnnnnnnnnnnnnnnnnnnnnnnnnnnnnnnnnnnnnnnnnnnnnnnnnnnnnnnnnnnnnnnnnnnnnnnnnnnnnnnnnnnnnnnnnnnnnnnnnnnnnnnnnnnnnnnnnnnnnnnnnnnnnnnnnnnnnnnnnnnnnnnnnnnnnnnnnnnnnnnnnnnnnnnnnnnnnnnnnnnnnnnnnnnnnnnnnnnnnnnnnnnnnnnnnnnnnnnnnnnnnnnnnnnnnnnnnnnnnnnnnnnnnnnnnnnnnnnnnnnnnnnnnnnnnnnnnnnnnnnnnnnnnnnnnnnnnnnnnnnnnnnnnnnnnnnnnnnnnnnnnnnnnnnnnnnnnnnnnnnnnnnnnnnnnnnnnnnnnnnnnnnnnnnnnnnnnnnnnnnnnnnnnnnnnnagaggacaatagagagctatgtggataaacgaatgggtacaacgtatggccctcctgcgggaaagaagatgactgtttttattgatgatgtgaatatgccagtaatcaatgagtggggagaccaggtnnnnnnnnnnnnnnnnnnnnnnnnnnnnnnnnnnnnnnnnnnnnnnnnnnnnnnnnnnnnnnnnnnnnnnnnnnnnnnnnnnnnnnnnnnnnnnnnnnnnnnnnnnnnnnnnnnnnnnnnnnnnnnnnnnnnnnnnnnnnnnnnnnnnnnnnnnnnnnnnnnnnnnnnnnnnnnnnnnnnnnnnnnnnnnnnnnnnnnnnnnnnnnnnnnnggtgtgattggggtaggctactactgtactcagaggggtttctcagaagaagtgagagattctgtcacaaaattggtgcccctgacgcgccgactgtggcagatgaccaagatgaaaatgcttcctacccctgcaaaattccattatgtgtttaacctacgagatctttctcggatctggcagggaatgctgaacactgcttcagaggtcatcaaggaaccaaatnnnnnnnnnnnnnnnnnnnnnnnnnnnnnnnnnnnnnnnnnnnnnnnnnnnnnnnnnnnnnnnnnnnnnnnnnnnnnnnnnnnnnnnnnnnnnnnnnnnnnnnnnnnnnnnnnnnnnnnnnnnnnnnnnnnnnnnnnnnnnnnnnnnnnnnnnnnnnnnnnnnnnnnnnnnnnnnnnnnnnnnnnnnnnnnnnnnnnnnnnnnnnnnnnnnnnnnnnnnnnnnnnnnnnnnnnnnnnnnnnnnnnnnnnnnnnnnnnnnnnnnnnnnnnnnnnnnnnnnnnnnnnnnnnnnnnnnnnnnnnnnnnnnnnnnnnnnnnnnnnnnnnnnnnnnnnnnnnnnnnnnnnnnnnnnnnnnnnnnnnnnnnnnnnagatctctcgtgtcattcgtactcctcggggaaatgccctcctggttggagtgggcggatcaggaaagcagagcctgacgaggttggcatcattcattgccggctacatttccnnnnnnnnnnnnnnnnnnnnnnnnnnnnnnnnnnnnnnnnnnnnnnnnnnnnnnnnnnnnnnnnnnnnnnnnnnnnnnnnnnnnnnnnnnnnnnnnnnnnnnnnnnnnnnnnnnnnnnnnnnnnnnnnnnnnnnnnnnnnnnnnnnnnnnnnnnnnnnnnnnnnnnnnnnnnnnnnnnnnnnnnnnnnnnnnnnnnnnnnnnnnnnnnnnnnnnnnnnnnnnnnnnnnnnnnnnnnnnnnnnnnnnnnnnnnnnnnnnnnnnnnnnnnnnnnnnnnnnnnnnnnnnnnnnnnnnnnnnnnnnnnnnnnnnnnnnnnnnnnnnnnnnnnnnnnnnnnnnnnnnnnnnnnnnnnnnnnnnnnnnnnnnnnnnnnnnnnnnnnnnnnnnnnnnnnnnnnnnnnnnnnnnnnnnnnnnnnnnnnnnnnnnnnnnnnnnnnnnnnnnnnnnnnnnnnnnnnnnnnnnnnnnnnnnnnnnnnnnnnnnnnnnnnnnnnnnnnnnnnnnnnnnnnnnnnnnnnnnnnnnnnnnnnnnnnnnnnnnnnnnnnnnnnnnnnnnnnnnnnnnnnnnnnnnnnnnnnnnnnnnnnnnnnnnnnnnnnnnnnnnnnnnnnnnnnnnnnnnnnnnnnnnnnnnnnnnnnnnnnnnnnnnnnnnnnnnnnnnnnnnnnnnnnnnnnnnnnnnnnnnnnnnnnnnnnnnnnnnnnnnnnnnnnnnnnnnnnnnnnnnnnnnnnnnnnnnnnnnnnnnnnnnnnnnnnnnnnnnnnnnnnnnnnnnnnnnnnnnnnnnnnnnnnnnnnnnnnnnnnnnnnnnnnnnnnnnnnnnnnnnnnnnnnnnnnnnnnnnnnnnnnnnnnnnnnnnnnnnnnnnnnnnnnnnnnnnnnnnnnnnnnnnnnnnnnnnnnnnnnnnnnnnnnnnnnnnnnnnnnnnnnnnnnnnnnnnnnnnnnnnnnnnnnnnnnnnnnnnnnnncagaccattaggccttcggacatcgccactgtccgcacgttgggccgtccccctcatctcatcatgcggatcatggatagcgtactgctgctgtttcaaaggaaagtcaatgctgtcaaaattgacctggaannnnnnnnnnnnnnnnnnnnnnnnnnnnnnnnnnnnnnnnnnnnnnnnnnnnnnnnnnnnnnnnnnnnnnnnagcaattcccaaaagacaaagtcaatgaagaggtgatagagtttttgagtccttacttaaagtgcctgactataacannnnnnnnnnnnnnnnnnnnnnnnnnnnnnnnnnnnnnnnnnnnnnnnnnnnnnnnnnnnnnnnnnnnnnnnnnnnnnnnnnnnnnnnnnnnnnnnnnnnnggctaacttggtggtgcaagagaatcgccatctcctggccatgcaggatctgcagaaagcccaggccgagttggatgacaagcaggcggaactcgacgtggtgcaggctgagtatgaacaggccatgactgaaaagcagnnnnnnnnnnnnnnnnnnnnnnnnnnnnnnnnnnnnnnnnnnnnnnnnnnnnnnnnnnnnnnnnnnnnnnnnnnnnnnnnnnnnnnnnnnnnnnnnnnnnnnnnnnnnnnnnnnnnnnnnnnnnnnnnnnnnnnnnnnnnnnnnnnnnnnnnnnnnnnnnnnnnnnnnnnnnnnnnnnnnnnnnnnnnnnnnnnnnnnnnnnnnnnnnnnnnnnnnnnnnnnnnnnnnnnnnnnnnnnnnnnnnnnnnnnnnnnnnnnnnnnnnnnnnnnnnnnnnnnnnnnnnnnnnnnnnnnnnnnnnnnnnnnnnnnnnnnnnnnnnnnnnnnnnnnnnnnnnnnnnnnnnnnnnnnnnnnnnnnnnnnnnnnnnnnnnnnnnnnnnnnnnnnnnnnnnnnnnnnnnnnnnnnnnnnnnnnnnnnnnnnnnnnnnnnnnnnnnnnnnnnnnnnnnnnngatcacgtctttaaatcacaagtacttcagaaaccacctggaagacagcctttctcttggaaggcccttgcttattgaagatgttggagaggaactagatccagcactagataatgttttggaaagaaacttcattaaaactgggtctacctttaaggtnaaggtgaaagttggtgacaaggaagtagatgtgttggatggctttagactctacattaccaccaaactgcctaacccagcctatacccctgagataagtgcccgtacctccatcattgacttcactgtcaccatgaaaggtctagaagatcagttacttgggagggtcattctcacagagaagcaggnnnnnnnnnnnnnnnnnnnnnnnnnnnnnnnnnnnnnnnnnnnnnnnnnnnnnnnnnnnnnnnnnnnnnnnnnnnnnnnnnnnnnnnnnnnnnnnnnnnnnnnnnnnnnnnnnnnnnnnnnnnnnnnnnnnnnnnnnnnnnnnnnnnnnnnnnnnnnnnnnnnnnnnnnnnnnnnnnnnnnnnnnnnnnnnnnnnnnnnnnnnnnnnnnnnnnnnnnnnnnnnnnnnnnnnnnnnnnnnnnnnnnnnnnnnnnnnnnnnnnnnnnnnnnnnnnnnnnnnnnnnnnnnnnnnnnnnnnnnnnnnnnnnnnnnnnnnnnnnnnnnnnnnnnnnnnnnnnnnnnnnnnnnnnnnnnnggaataccagcactgctttcacaagacaaaacaaaaacttaaacaaaatccaaatgcttttttatttgattttagcgagatgtatatttttggaaaatttgaaacttttcaccgacgccttggcgagataatagacatctttacaaccctcaagacgtattcagtcctgcaagattccacaatcgaagggctggaagacatggtcactaaataccaggncagggcattgtggcaaccataaagaaaaaggaatacaatttcttagaccagcggaaaatggattttgaccaagattatgaagagttttgcaagcagactaatgaccttcat

SEQ ID NO: 22189 - DNA, 430 bp, Macaca Mulatta
  misc_feature (1)...(430): n = A,T,C or G
agccctgcctctgaggccccgccctccccgccctgaggtgggggcccaccaggatgagcaagctgcccggggagctggcccgagacttggagtgcagcctgcctgccgtggcctccctgggctcctcgctgtcccacagccagagcctctcctcgcacctccttccaccacctgagaagcgcagggccatctctgatgttcgccgcaccttctgtctctttgtcaccttcgacctgctcttcatctccctgctctggatcatcgaactgaatnnnnnnnnnnnnnnnnnnnnnnnnnnnnnnnnnnnnnnnnnnnnnnnnnnnnnnnnnnnnnnnnnnnnnnnnnnnnnnngtcctggccttcttccgcttctctggactgctcctgggctatgctgtgctgcggctccagcactggtgggtgattgcgg

SEQ ID NO: 22190 - DNA, 246 bp, Macaca Mulatta
gttctcttctgcctctcacctccacttcagactttacttggcatctaaaattaagcattttaccaggtgaagtgcaagaagggctcagaactcatctggtcagtgagggcttcctggaggagtgggggctagagccagggcttaggtgggattaggaaaggcaagaagaagggaaggcatcggggtggagcaagtggcttaatcaaaggtgaggacactcttttattcatctaagtgacaaatact

SEQ ID NO: 22191 - DNA, 1182 bp, Macaca Mulatta
  misc_feature (1)...(1182): n = A,T,C or G
agcatggcggcggcggcgttcgtggtccctcgggtgaaacagaaagcgggagctacgcggagagggagcgaagagaggggctgaggcggcggcgtcactgccaggaaacaaccccaacagtcagcgcgccggcggccgcggcggccctcagaggtgactctgcagctgaggtagagagaaaacgatcaggaaccctaagaagaggcgccagaggagccgccttcttctgcctcagaacggcgtgannnnnnnnnnnnnnnnnnnnnnnnnnnnnnnnnnnnnnnnnnnnnnnnnnnnnnnnnnnnnnnnnnnnnnnnnnnnnnnnnnnnnnnnnnnnnnnnnnnnnnnnnnnnnnnnnnnnnnnnnnnnnnnnnnnnnnnnnnnnnnnnnnnnnnnnnnnnnnnnnnnnnnnnnnnnnnnnnnnnnnnnnnnnnnnnnnnnnnnnnnnnnnnnnnnnnnnnnnnnnnnnnnnnnnnnnnnnnnnnnnnnnnnnnnnnnnnnnnnnnnnnnnnnnnnnnnnnnnnnnnnnnnnnnnnnnnnnggttattgaagacaatggtgttcgaagagttgtcgtggtccctcaggcaccagagtttcaccctggtggtcacacagttctccaccgttctccacatcctcctctgcctggtttcattcctgtcccaaccatgatgccccctccaccacgtcatatgtactcaccagtgactggagctggagacatgacaacacagtatatgccacagtatcagtcttcacaagtctacggagatgtagnnnnnnnnnnnnnnnnnnnnnnnnnnnnnnnnnnnnnnnnnnnnnnnnnnnnnnnnnnnnnnnnnnnnnnnnnnnnnnnnnnnnnnnnnnnnnnnnnnnnnnnnnnnnnnnnnnnnnnnnnnnnnnnnnnnnnnnnnnnnnnnnnnnnnnnnnnnnnnnnnnnnnnnnnnnnnnnnnnnnnnnnnnnnnnnnnnnnnnnnnnnnnnnnnnnnnnnnnnnnnnnnnnnnnnnnnnnnnnnnnnnnnnnnnnnnnnnnnnnnnnnnnnnaagaagaaaatgaagaaactaaagcatttgaagcnnnnnnnnnnnnnnnnnnnnnnnnnngcctctgacatccaggcaaggacagtagtacttacctggtcaccaccttccagcctcattaatggtgaaacagat

SEQ ID NO: 22192 - DNA, 703 bp, Macaca Mulatta
  misc_feature (1)...(703): n = A,T,C or G
acaacttccccaagaaccaaacccctgtaaggatgagaaggaacagctttacgcctctgtccagttcgaatacaataaggcgtccaagaaattacagtgttgggagccggcccctcaagcccctcagccctctccgtgcccaggacttgcaagaaggggccgactagccgaagacccaagtcagcattccggtggtgtaaccgtgtgtttccctccagccctggcctcctgcctttgccactaatcaccaaggagtcatttaacttcctccctccacccccacccctgacacttcaccatgaatcttaacacagaacatgaggttannnnnnnnnnnnnnnnnnnnnnnnnnnnnnnnnnnnnnnnnnnnnnnnnnnnnnnnnnnnnnnnnnnnnnnnnnnnnnnnnnnnnnnnnnnnnnnnnnnnnnnnnnnnnnnnnnnnnnnnnnnnnnnnnnnnnnnnnnnnnnnnntgttggtgaagtgttgggggatggagggcgggtgagcagtgcggggacaaaagttgatttttccttcactttcgtctcttcattgtgtgttttcctcacagtctttacttgactgctttctttccccactttcatgtcccctctggattgtccagtgtaatgcatgacattgtggtgtctgtctaggaaggaaggggtgattggcaagagacaagtctggcccagttgatgc

SEQ ID NO: 22193 - DNA, 370 bp, Macaca Mulatta
gcctagtggaggccagtataagattcagatctttgagaaaggggattttaatggtcagatgtatgaaaccactgaagattgcccttccatcatggagcaatttcatatgcgagagatccactcctgtaaggtgctggagggtgtctggattttctatgagctacccaactaccgtggcaggcagtacctcctggacaagaaggagtaccggaagcccatcgattggggtgcagtttccccagctgtccagtctttccgccgcattgtggagtaatgacatgaatggggccatattcttcctgaggcccaaatgctggctggccttgtggtccaaataggcatcatcaataaaacagttggcatgcatccc

SEQ ID NO: 22194 - DNA, 704 bp, Macaca Mulatta
atttgtacacagcaaacgtgatgggaccgtgattgcctggtgtcggaaggaccagcagcgcttgaaacagccaatgttctattccttccttagcagctatgcagccgggtgaatgcaaataaactttgcgttctccaaagcactttaactccaaactagatttgttgacttcaccagttttaggaggttgaacctaaagaaatggatgactgaacaaaccatccaaataatgataaagtctattcatctgcacaaaattctaaagatgtacatgatcctaagaggaaagttctgttctgttttaatgataatctggaagattgtgtcaatatgcactagctaacaagttttaagccttgcatggtatattaaaatgatattcttaaaattttttcccaccaaggtattccaaagaaaatattaaggtctctcctttttctatgattccaaaagaaccagtagaatttaaattggttagctaattgtttatataaaacacactaaaattatattttaaaagttttctgccatgaaatactcctcccaacagacacacatgctccaaaagaggaaagaaaaactgataatttttaggacttgataattgctttatttgagaagcaaattattcagtaggtgcctctgtaccaaatatcttatggagtatctgaatactaaaaataaactatgaatgaatctcaaag

SEQ ID NO: 22195 - DNA, 1075 bp, Macaca Mulatta
  misc_feature (1)...(1075): n = A,T,C or G
tgattctgagcccattggatggaactccctgttcagactacatcaatgcttcctatatagatgnggttacaaagagaagaataaattcatagcagctcaaggtnnnnnnnnnnnnnnnnnnnnnnnnnnnnnnnnnnnnnnnnnnnnnnnnnnnnnnnnnnnnnnnnnnnnnnnnnnnnnnnnnnnnnnnnnnnnnnnnnnnnnnnnnnnnnnnnnnnnnnnnnnnnnnnnnnnnnnnnnnnnnnnnnnnnnnnnnnnnnnnnnnnnnnnnnnnnnnnnnnnnnnnnnnnnnnnnnnnnnnnnnnnnnnnnnnnnnnnnnnnnnnnnnnnnnnnnnnnnnnnnnnnnnnnnnnnnnnnnnnnnnnnnnnnnnnnnnnnnnnnnnnnnnnnnnnnnnnnnnnnnnnnnnnnnnnnnnnnnnnnnnnnnnnnnnnnnnnnnnnnnnnnnnnnnnnnnnnnnnnnnnnnnnnnnnnnnnnnnnnagcgcgggcgtgggccggacgggcaccttcattgtgatcgatgccatgatggccatgatgcacgcggagcagaaggtggatgtgtttgaatttgtgtctcgaatccgtaatcagcgccctcagatggttcaaacggatnnnnnnnnnnnnnnnnnnnnnnnnnnnnnnnnnnnnnnnnnnnnnnnnnnnnnnnnnnnnnnnnnnnnnnnnnnnnnnnnnnnnnnnnnnnnnnnnnnnnnnnnnnnnnnnnnnnnnnnnnnnnnnnnnnnnnnnnnnnnnnnnnnnnnnnnnnnnnnnnnnnnnnnnnnnnnnnnnnnnnnnnnnnnnnnnnnnnnnnnnnnnnnnnnnnnnnnnnnnnnnnnnnnnnnnnnnnnnnnnnnnntgactttaaccgagtgatcctttccatgaaaaggggtcaagaatacacagactacatcaatgcatccttcataganggctaccgacagaaggactatttcatcgccacccaggggccactggcccacacggttgaggacttctggaggatgatctgggaatggaaatcccacactatcgtgatgctgacggaggtgcaggagagagagcagg

SEQ ID NO: 22196 - DNA, 1002 bp, Macaca Mulatta
  misc_feature (1)...(1002): n = A,T,C or G
aggcgacagctggccaagctggccatcatcttcagccacatgcacgcagagctgcacgcactcttccccggggggaagtactgtggacacgtgtaccagctcaccaaggccccagcccacatcttctggagggannnnnnnnnnnnnnnnnnnnnnnnnnnnnnnnnnnnnnnnnnnnnnnnnnnnnnnnnnnnnnnnnnnnnnnnnnnnnnnnnnnnnnnnnnnnnnnnnnnnnnnnnnnnnnnnnnnnnnnnnnnnnnnnnnnnnnnnnnnnnnnnnnnnnnnnnnnnnnnnnnnnnnnnnnnnnnnnnnnnnnnnnnnnnnnnnnnnnnnnnnnnnnnnnnnnnnnnnnnnnnnnnnnnnnnnnnnnnnntcacctatgatgaggtccaagagcgtctgcaggcctgcagggacaagccagnnnnnnnnnnnnnnnnnnnnnnnnnnnnnnnnnnnnnnnnnnnnnnnnnnnnnnnnnnnnnnnnnnnnnnnnnnnnnnnnnnnnnnnnnnnnnnnnnnnnnnnnnnnnnnnnnnnnnnnnnnnnnnnnnnnnnnnnnnnnnnnnnnnnnnnnnnnnnnnnnnnnnnnnnnnnnnnnnnnnnnnnnnnnnnnnnnnnnnnnnnnnnnnnnnnnnnnnnnnnnnnnnnnaggagcagctgcagctctactgggccatggactccacatttgagctctgcaagatctgtgctgagagcaacaaggatgtgaagatcgagccgtgcgggcacctgctctgcagccgctgcctggctgcctggcannnnnnnnnnnnnnnnnnnnnnnnnnnnnnnnnnnnnnnnnnnnnnnnnnnnnnnnnnnnnnnnnnnnnnnnnnnnnnnnnnnnnnnnnnnnnnnnnnnnnnnnnnnnnnnnnnnnnnnnnnnnnnnnnnnnnnnnnnnnnnnnnnnnncccgttttggctcctcagttgcccccacggccagatctgccccccaggaaacccagaaatgcccagcca

SEQ ID NO: 22197 - DNA, 971 bp, Macaca Mulatta
  misc_feature (1)...(971): n = A,T,C or G
atggctgctgcctccgagcccgtggattcgggtgcactctggggacctgcgcgcccggagccccctcccacccgcttccattgggaacacggtgacaacatccgcgtggacccctctgggacgcgggccacacgcgtggagagcttcgcccacggcgtgtgcttcagccgtgagcccctggccccgggccaagtcttcctggtcgagatcgaagagaaagagctgggctggtgcggacatctgcgtctcggtctgacggcgctggaccccgccagtctggcggccgtacacgagttttctctgcccgacctagtcaacctgggccacacnnnnnnnnnnnnnnnnnnnnnnnnnnnnnnnnnnnnnnnnnnnnnnnnnnnnnnnnnnnnnnnnnnnnnnnnnnnnnnnnnnnnnnnnnnnnnnnnnnnnnnnnnnnnnnnnnnnnnnnnnnnnnnnnnnnnnnnnnnnnnnnnnnnnnnnnnnnnnnnnnnnnnnnnnnnnnnnnnnnnnnnnnnnnnnnnnnnnnnnnnnnnnnnnnnnnnnnnnnnnnnnnnnnnnnnnnnnnnnnnnnnnnnnnnnnnnnnnnnnnnnnnnnnnnnnnnnnnnnnnnnnnnnnnnnnnnnnnnnnnnnnnnnnnnnnnnnnnnnnnnnnnnnnnnnnnnnnnnnnnnnnnnnnnnnnnnnnnnnnnnnnnnnnnnnnnnnnnnnnnnnnnnnnnnnnnnnnnnnnnnnnnnnnnnnnngccgtccctgcagactctgtgccgcctagtgatacagagaagcatggtgcaccggctggccattgatgggctccacctgcccaaagaacttaaggatttctgcaagtatgagtgaagacccgcagcgcaccggagcagagctgcatcctggggcctcagacctgtggctggctggtctgaagttggccatattgctgccaaccaggaccagaaataaacagccaatgctg

SEQ ID NO: 22198 - DNA, 437 bp, Macaca Mulatta
  misc_feature (1)...(437): n = A,T,C or G
tgagaatttgttgcattttcagcaaattttaaaacatttttaggttttacagagattttaacctttaaacaacagatctttaaacaggtgaatacaagtgagtttaacaaagaaacatttagaatagatctgaatgtaagaactacagaactgtttcagaaataaaacatactaccttgatgtgacatttttttcttaaccttgttgagctggttttgttcagcttaatttactgttcaaaggcattatctgttggtcacaccagtgggtatatgattgaatttagggaacagggttgacacagcagggctagtcctgcatattttttcttaaatatttcccaaattgtgttattcattatttcttttcanatatataacttttataacaaattattagctttgatgtaatagtttaaaattgcagggaactggggt

SEQ ID NO: 22199 - DNA, 683 bp, Macaca Mulatta
tccttcagcctgtgagcgtctggacgcgccaggaaacagcccagcaggaccttcggccatcctgtgccgcctcctctctagagacccctgtgactccagcccaccctctgctgccacacccattcctcaggttcaagtggctcatgaccaggccagtcaggggccgactccctgggaaggagggcacagggtcgggtcaggcctgtccctgatcctgaagggcttggcccagttggggagaaaacttcacataagcagccgaggatgctgcggggtgcccaggcacaaccgcgggtcacgaggggctgcggctcccagggaaggggcagctcattctgatggaggctcctgggaaagacctagaggagccagggggagagaggggccttctgggtggcagggacagccaggacaggcctctggagtgccggtcgccagggtgcatcagggcaaaagatggggtcaggaaaggtggctggagagtggccgtcagcttgaactgacctgagcctgagggctctgggccaccacttggttctcaccctgcctctctcaactggaagcccgcagggcctcggccccaccccgcccagccctcaccaaagatccctgggagtcggttggcctgcggcagctcgttggttttcttcggctgcctccttctcagtggcctcactgcccga

SEQ ID NO: 22200 - DNA, 682 bp, Macaca Mulatta
gtgggtgcctcatgagctgactgaaaatcaaaaaaatcgtcgttttgaagtgtcatcttctcttattctacgcaaccacaacgaaccatttctcgatcggattgtgacgtgcgatgaaaagtggattttatatgacaaccggcgacgatcagctcagtggttggatcaagaagcagctccaaagcacttctcaaagccaatcttgcacccaaaaaagatcatggtcactatttggtggtctgctgctggtgtgatccactacagctttctgaatcccggtgaaaccattacatctgagaagtatgctcaggaaatcgatgagatgcaccaaaaactgcaacacctgcagctggcattggtcaacagaaagggcccaattcttctccacgacaatgcccgaccgcatgttgcacaacccacacttcaaaagttgaatgaattgggctatgaagttttgcctcatccaccgtattcacctgacctcttgccaaccaactaccacatcttcaagcatctcaacaactttttgcagggaaaacgcttccacaaccagcaggatgcagaaaatgctttccaagagtttgtcaaatcccgaagcacggatttttacgctacaggaataaaccaacttatttctcgttggcaaaaatgtgttgattgtaatggtgcctattttgattaa

SEQ ID NO: 22201 - DNA, 182 bp, Macaca Mulatta
aatctcttgcctgcaccatctcataggctaagtaagctgaatcccgatagtactaggcccccttccctccacatcccatcagctggaaaagtcctgtagcccagagccttctccaaaggaagggtgacatgctggcttttgtgcccaagctcaccagccctgccccatctcactgcagtagc

SEQ ID NO: 22202 - DNA, 1146 bp, Macaca Mulatta
caaaagtatatttaaccaagttgctataaagtataaatagcttaaaagagaaagttcacgaatctggagaataaaacattcaaagaatcagcacattctcaaataaaaagttatgaaaacgttattattttgattatttagtccaataaaagttacggtttttttcttctttgtcttgaatttcatgaaggtatcagactgttcattaaaagtttgaaagttctcagagagtccaggggtatgatcttgaagttatcagaaacttatattcaagagttgttgtcagagtcttttccatatatctgccagtcttcccaaaatacagaaatgacatcacggctgctatatcggattaatgccaggatggacgtcctattcctgaacgagagaggagattcaaggtgactgggtcactgcggctggagctcactgggttcttcatttcacattcatagggtcctgcagtatcctttctgacaccagatagaacgagggtcctgttgttttcggacagctgcaacttgcgactgatagggaggctctgtccatttatccaccacaagtagcttacgtcctgagtgtcaggatcacaggataagatcacagtctccgtgccctccctggggtttaagttgctgctgttgatggagggcttgggagtctccaggtataaagtgaaatgtccagttactcttttagtcccatcacctcgctttgtgatttgaatggtgtaggatcctgtgtccttctgggtgacattctggatcagcagggatgcattggaatatactgtctctcgtccactgtatgcaggcccaaatataatgatttcagtgtctattacatatgatgtaatgtaatggtggaggtccaattatttgccctttgtaccagctatagccagcaacattctggggcaaattgtggacaagtagcagaacatccttcccctcagaaactttggctggctgtgcttcgatcgtgacttgggcagtggtgggcgggttccagaagattaaaagtgatgctgtgagcaggagctccttccaggtgatgtgcagtgtgcagggaggcactgagaggggccccatggcactgtgctgcctgcatgttctctgtggtagaccctgggatccagaactttct

SEQ ID NO: 22203 - DNA, 703 bp, Macaca Mulatta
  misc_feature (1)...(703): n = A,T,C or G
gcagtttttggttctcaaaacgaagtatcgccctgagatgggctattaactagtggtctcagtctcttggaagttaggagtaggatgntgtgctccaactttcaacagcatctttccagtgtttctngcagtcttcatctctgtccctgggtctgtctgggtaacaatggagaatattgagtcatccttttctgacttccaaatctcatgggaggacctcttatcgggcaactctaaaatattttcccaacacagtggagctccaagggtatgactagaacaaattttgactaatgttgaatatcaaccattgcatcctatgaaagcctccgttatgttcatgcccacagtgatgatatgccaaatagagttctcacagcaatggatgctggatggagtcacatcagtgccattgtcaaggaagcccttgaaaatgagctgtagactcatcaccgttatgccaactaaacagcttgaaatactctatttctatttactcagggctgtggttttctggttgatggttcggaaaatggactctgctcttctgcagtccccttgagattaaggaggagtagctaatctctgaggggcaatgaggtaagaggtggatgggactcaacccgggaccagattgaaggctgggtgacacaaggaagagacactggaagcacctgtccataagacatgcccaccagtcccc

SEQ ID NO: 22204 - DNA, 3888 bp, Macaca Mulatta
  misc_feature (1)...(3888): n = A,T,C or G
atcagagatgcacttgtcatgggaaatctgcgtgtgatgccaggtgagcctcagaaaaacaatggaaccacaaaagtgccaagcagggtaagggccctgtcagacaagcagttggagtaagaattaagannnnnnnnnnnnnnnnnnnnnnnnnnnnnnnnnnnnnnnnnnnnnnnnnnnnnnnnnnnnnnnnnnnnnnnnnnnnnnnnnnnnnnnnnnnnnnnnnnnnnnnnnnnnnnnnnnnnnnnnnnnnnnnnnnnnnnnnnnnnnnnnnnnnnnnnnnnnnnnnnnnnnnnnnnnnnnnnnnnnnnnnnnnnnnnnnnnnnnnnnnnnnnnnnnnnnnnnnnnnnnnnnnnnnnnnnnnnnnnnnnnnnnnnnnnnnnnnnnnnnnnnnnnnnnnnnnnnnnnnnnnnnnnnnnnnnnnnnnnnnnnnnnnnnnnnnnnnnnnnnnnnnnnnnnnnnnnnnnnnnnnnnnnnnnnnnnnnnnnnnnnnnnnnnnnnnnnnnnnnnnnnnnnnnnnnnnnnnnnnnnnnnnnnnnnnnnnnnnnnnnnnnnnnnnnnnnnnnnnnnnnnnnnnnnnnnnnnnnnnnnnnnnnnnnnnnnnnnnnnnnnnnnnnnnnnnnnnnnnnnnnnnnnnnnnnnnnnnnnnnnnnnnnnnnnnnnnnnnnnnnnnnnnnnnnnnnnnnnnnnnnnnnnnnnnnnnnnnnnnnnnnnnnnnnnnnnnnnnnnnnnnnnnnnnnnnnnnnnnnnnnnnnnnnnnnnnnnnnnnnnnnnnnnnnnnnnnnnnnnnnnnnnnnnnnnnnnnnnnnnnnnnnnnnnnnnnnnnnnnnnnnnnnnnnnnnnnnnnnnnnnnnnnnnnnnnnnnnnnnnnnnnnnnnnnnnnnnnnnnnnnnnnnnnnnnnnnnnnnnnnnnnnnnnnnnnnnnnnnnnnnnnnnnnnnnnnnnnnnnnnnnnnnnnnnnnnnnnnnnnnnnnnnnnnnnnnnnnnnnnnnnnnnnnnnnnnnnnnnnnnnnnnnnnnnnnnnnnnnnnnnnnnnnnnnnnnnnnnnnnnnnnnnnnnnnnnnnnnnnnnnnnnnnnnnnnnnnnnnnnnnnnnnnnnnnnnnnnnnnnnnnnnnnnnnnnnnnnnnnnnnnnnnnnnnnnnnnnnnnnnnnnnnnnnnnnnnnnnnnnnnnnnnnnnnnnnnnnnnnnnnnnnnnnnnnnnnnnnnnnnnnnnnnnnnnnnnnnnnnnnnnnnnnnnnnnnnnnnnnnnnnnnnnnnnnnnnnnnnnnnnnnnnnnnnnnnnnnnnnnnnnnnnnnnnnnnnnnnnnnnnnnnnnnnnnnnnnnnnnnnnnnnnnnnnnnnnnnnnnnnnnnnnnnnnnnnnnnnnnnnnnnnnnnnnnnnnnnnnnnnnnnnnnnnnnnnnnnnnnnnnnnnnnnnnnnnnnnnnnnnnnnnnnnnnnnnnnnnnnnnnnnnnnnnnnnnnnnnnnnnnnnnnnnnnnnnnnnnnnnnnnnnnnnnnnnnnnnnnnnnnnnnnnnnnnnnnnnnnnnnnnnnnnnnnnnnnnnnnnnnnnnnnnnnnnnnnnnnnnnnnnnnnnnnnnnnnnnnnnnnnnnnnnnnnnnnnnnnnnnnnnnnnnnnnnnnnnnnnnnnnnnnnnnnnnnnnnnnnnnnnnnnnnnnnnnnnnnnnnnnnnnnnnnnnnnnnnnnnnnnnnnnnnnnnnnnnnnnnnnnnnnnnnnnnnnnnnnnnnnnnnnnnnnnnnnnnnnnnnnnnnnnnnnnnnnnnnnnnnnnnnnnnnnnnnnnnnnnnnnnnnnnnnnnnnnnnnnnnnnnnnnnnnnnnnnnnnnnnnnnnnnnnnnnnnnnnnnnnnnnnnnnnnnnnnnnnnnnnnnnnnnnnnnnnnnnnnnnnnnnnnnnnnnnnnnnnnnnnnnnnnnnnnnnnnnnnnnnnnnnnnnnnnnnnnnnnnnnnnnnnnnnnnnnnnnnnnnnnnnnnnnnnnnnnnnnnnnnnnnnnnnnnnnnnnnnnnnnnnnnnnnnnnnnnnnnnnnnnnnnnnnnnnnnnnnnnnnnnnnnnnnnnnnnnnnnnnnnnnnnnnnnnnnnnnnnnnnnnnnnnnnnnnnnnnnnnnnnnnnnnnnnnnnnnnnnnnnnnnnnnnnnnnnnnnnnnnnnnnnnnnnnnnnnnnnnnnnnnnnnnnnnnnnnnnnnnnnnnnnnnnnnnnnnnnnnnnnnnnnnnnnnnnnnnnnnnnnnnnnnnnnnnnnnnnnnnnnnnnnnnnnnnnnnnnnnnnnnnnnnnnnnnnnnnnnnnnnnnnnnnnnnnnnnnnnnnnnnnnnnnnnnnnnnnnnnnnnnnnnnnnnnnnnnnnnnnnnnnnnnnnnnnnnnnnnnnnnnnnnnnnnnnnnnnnnnnnnnnnnnnnnnnnnnnnnnnnnnnnnnnnnnnnnnnnnnnnnnnnnnnnnnnnnnnnnnnnnnnnnnnnnnnnnnnnnnnnnnnnnnnnnnnnnnnnnnnnnnnnnnnnnnnnnnnnnnnnnnnnnnnnnnnnnnnnnnnnnnnnnnnnnnnnnnnnnnnnnnnnnnnnnnnnnnnnnnnnnnnnnnnnnnnnnnnnnnnnnnnnnnnnnnnnnnnnnnnnnnnnnnnnnnnnnnnnnnnnnnnnnnnnnnnnnnnnnnnnnnnnnnnnnnnnnnnnnnnnnnnnnnnnnnnnnnnnnnnnnnnnnnnnnnnnnnnnnnnnnnnnnnnnnnnnnnnnnnnnnnnnnnnnnnnnnnnnnnnnnnnnnnnnnnnnnnnnnnnnnnnnnnnnnnnnnnnnnnnnnnnnnnnnnnnnnnnnnnnnnnnnnnnnnnnnnnnnnnnnnnnnnnnnnnnnnnnnnnnnnnnnnnnnnnnnnnnnnnnnnnnnnnnnnnnnnnnnnnnnnnnnnnnnnnnnnnnnnnnnnnnnnnnnnnnnnnnnnnnnnnnnnnnnnnnnnnnnnnnnnnnnnnnnnnnnnnnnnnnnnnnnnnnnnnnnnnnnnnnnnnnnnnnnnnnnnnnnnnaaccaaagatagatttgctttgctatatattataactacacttgcttttgcaataaaacaacttgtaattcaaaaatgaagattatctgcatgtagtatttatgtgtgtgaataacatcttggcatgcagaaaataattttggctgcttttaacagaattgttcattctacacttccctgaaattccatttttgggagtgtctgtccttcaatggctgaatagttccttaaatcagtcaagctcctggctatcttcataactaacagtgagtgggtcttcttaatataggtgtctgaccacatgtggaaggcagctagacttattgtatttacagcctggccactctagacatatgaatccaggctgactgcttaagtgcccatctcgtttgatataaactgtagaaaaggcaagcactttgttctgagtcttttatctccaaatacatagttgtctcaaaccaagcaagctttatcaaaatggcttatttgtagaatagtttcaatgatacaaatgccaactggcaagtcattccaaactgcttgaaggagtagatggaccagaatctgagaatttggaaataggtcacagaaaaagcctccatttggctaaatatgacaatgtctgagtatggttaaacatacacaattaaaagtctgaagccaacgagttgtttattctaacttgaaatatatttttgtgagaaaaaatgttagaaaagttagtttatttaaaaaacttgctgtgaaaggaaattctaagggcttaacatgaagctgtctgcatttttacctgttagacaatggtcgcccttgggctcttgttatacattcacatggctacgcgtttatgtaaagtttgcaaaaatttggtgttttgattta

SEQ ID NO: 22205 - DNA, 576 bp, Macaca Mulatta
  misc_feature (1)...(576): n = A,T,C or G
cccaggccaccccacaggccagcccaggcctgccggaagggccgccctgctgtgtccctgcgggacatcaccgcacgtttcaggggccagcagcccacactgcccacggctgatgctgtggaccccctggactggctttttggggagtcccaggaaaagcagccaagccagagggacctgccgaggaggactggcccctctgctggcctctggggtccgcacagacagatggacagcagcaaggccaggggggcccccagagggaggctctgtgaagccaggatgcctgggcactccctagcaagaccattgcgggatgggcagcagagctctgacctaagaagctggactttggggcagcctgcccaagccatggcctnnnnnnnnnnnnnnnnnnnngcagtgtcctcagaactctctactcgcacctcccggtgatccatgaactctgacccctgcccaataaaggcttctgtaaagagctcggtgggtctacatctcccgtcttcccccatggtggtcactgtccctggcaggtctctggaacagaaatgcttttctgcagaggcccctgct

SEQ ID NO: 22206 - DNA, 143 bp, Macaca Mulatta
  misc_feature (1)...(143): n = A,T,C or G
nccagagtggagcctctgaggatctgctgttacttctgaaaacttggagtcctccagctgaggaattagatgctccgttgaccctgcaggatgcccagggattgaaggatgtcctcctgacagcatttgcctaccgccgaggt

SEQ ID NO: 22207 - DNA, 874 bp, Macaca Mulatta
aaactgggcattacttgcagaagactctgtctctctgagaggaaagagagtaatttcccattagcatattaagctttcaacctatattagctcctcagaggaaacagtgggctgtacagaaggcccccgcagagcctgtttcatagggaacaagattcagaaggctggaattcagcaagagggaaaggagggaggctccaggaaagatcagaagtgggtattgaaagcagagtgatggacactgaagatgccttttaaccctggggcccactcaagatcctagagtcaaccctccctccctgtcattcctcccaggatcctgatgggctgagggagctcctagaagactgttgggatgcagacccagaagcacggctgacggctgagtgtgtacagcagcgcctggctgccctggcccatcctcaggagagcccctttccggagagctgtccacgtggctgcacacctctctgcccagaagactgtacttcaactcctgcccctaccatcctgccctgtaggcctcagcggagtgcctgccacttcaatgttcagcaaggcccttgttccaggaatcctcagcctgcctgtaccctttctcctatgtaaatatgcagtttatgtgtaatcaatgtacatgccaacctaaacatggcgattgcatagctgtcttgtctgcctcatcactgcctttcccacctgccgaatccttggattcttctgcgggcatccagtccacagcagttctgaccagtgactcggtgtaggtgtgcaggaaacagaataaagtcagctttcctgacgcatatccttgggccttcctctattcctggtatccaggaaccctcttgtctctcttctcttccactaacat

SEQ ID NO: 22208 - DNA, 349 bp, Macaca Mulatta
aagcctggatgtttgtcttaataagaaagcttgcaataaccagttcaatattcatgttgcaagaaaagctcttaggggaaaaatgaggtcagctagcagcctaagatagaaaataccaaaagcagacgaaaaggtgaatccttaaaaaactacatctgatacatccagcttgtcaggcatgatcaatcatcagaccttgggcagatctgctgattcaaccaagaaaaagttatagaataagaagattaacacttacattactcattacctcagcagttatgtaagtccggtctttgatgaccattgtgtctacatcaggttcataacttttcacctttacaatctgctt

SEQ ID NO: 22209 - DNA, 1840 bp, Macaca Mulatta
  misc_feature (1)...(1840): n = A,T,C or G
gtttcttctgggtccattcaagagagtgtaaaagaccgagtaattgactcaagactgcagctgtttatcaccaagccaggactctacacatgcatagctaccaataagcatggggagaagttcagtactgccaaggctgcagccactgtcagcatagcagnnnnnnnnnnnnnnnnnnnnnnnnnnnnnnnnnnnnnnnnnnnnnnnnnnnnnnnnnnnnnnnnnnnnnnnnnnnnnnnnnnnnnnnnnnnnnnnnnnnnnnnnnnnnnnnnnnnnnnnnnnnnnnnnnnnnnnnnnnnnnnnnnnnnnnnnnnnnnnnnnnnnnnnnnnnnnnnnnnnnnnnnnnnnnnnnnnnnnnnnnnnnnnnnnnnnnnnnnnnnnnnnnnnnnnnnccacgtcttccaggagtgcagtcctggagtagtgccgactcctattcccatttgcagnnnnnnnnnnnnnnnnnnnnnnnnnnnnnnnnnnnnnnnnnnnnnnnnnnnnnnnnnnnnnnnnnnnnnnnnnnnnnnnnnnnnnnnnnnnnnnnnnnnnnnnnnnnnnnnnnnnnnnnnnnnnnnnnnnnnnnnnnnnnnnnnnnnnnnnnnnnnnnnnnnnnnnnnnnnnnnnnnnnnnnnnnnnnnnnnnnnnnnnnnnnnnnnnnnnnnnnnnnnnnnnnnnnnnnnnnnnnnnnttccaattttgccttcctcctcctcttcttccttctctgtctcacctacatactccatgactgtaataatctccatcatgtccagctttgcaatatttgcgcttcttaccatcactactctctattgctgccgaagaagaaaacaatggaaaaataagaaaagnagagaatcagcagcaataaccctcaccacactgccttctgagcttcttactagatagacttcatcccaaccccatgtaccagaggatggccgctccttctgaaccccaaaatttgcttcagcctggagtattccaagaaataacattggaatattgggagagacattggagagggagcgtttggaaggggtgtttcaagcaaggnnnnnnnnnnnnnnnnnnnnnnnnnnnnnnnnnnnnnnnnnnnnnnnnnnnnnnnnnnnnnnnnnnnnnnnnnnnnnnnnnnnnnnnnnnnnnnnnnnnnnnnnnnnnnnnnnnnnnnnnnnnnnnnnnnnnnnnnnnnnnnnnnnnnnngtgtgtgctgtcgggaagccaatgtgcctgctctttgaatacatggcctatggtgatctcaatgagttcctccgcagcatgtcccctcacaccgtgtgcagcctcagtcacagtgacttgtctatgagggcccaggtctccagccctggacccccacccctctcctgtgctgagcagctttgcattgccaggcaagtggcagctggtatggcttacctctcagaacgtaagtttgttcaccgagatttagccaccaggaactgcctggtgggcgagaacatggtggtaaaaattgccgactttggcctctccaggaacatctactcagcagactactacaaagctaatgaaaacgacgctatccctatccgttggatgccaccagagtccattttttataaccgctacactacagagtctgatgtgtgggcctacggcgtggtcctctgggagatcttctcctatggcctgcagccctactatgggatggcccatgaggaggtcatttactacgtgcgagatggcaacatcctctcctgccctgagaactgccctgtggagctgtacaatctcatgcgtctatgttggagcaagctgcctgcagacagacccagtttcaccagtatcaccgaat

SEQ ID NO: 22210 - DNA, 636 bp, Macaca Mulatta
atagtgttttgttatgtagactatttacatgaacaaataaacaggaaataggagtcatcagtctttgctttcttgcttctgagttttgttgctgtttgaaaatgtctggtttatacctttttctggtctatataaatcatttttcactgcacctgctgtttctctgttagaattgtttaaaaaatgaattttactttattttacttaaggcataagaagttctccatggttaaaatgttagtacgtgaactttgtcatctgtgaacaggttcctttagaagctgagctctttctgctggtgatatcaaatagccacctgctacttaaggatgatgtttacatacctggccttctttatcactgctgttgctgccattgttgatgacatgatgtggcagggcagtgagaagtttgatacttgttccatctatctgttggactcaactagtgttgctttagtttttaatctttttatctgaaaaggagagtcttataatttgtcattttattcattgcagcggttgtggaacaggaaatgaaaaaggactggctttttgcccctcattatcgatactatgtaagagaaatgagaattcctgcatacagtcagctgctggaattctacaggtcattaac

SEQ ID NO: 22211 - DNA, 142 bp, Macaca Mulatta
actgaggagagcgagccaatcaggtttttaagttcatgaaaggcaaatccttccagcatgagaaaaccaagaagaagcggggcagctactagggagattcaatccctgtccaggtcaattctgtcaagtttgacagcgagtg

SEQ ID NO: 22212 - DNA, 775 bp, Macaca Mulatta
  misc_feature (1)...(775): n = A,T,C or G
taagggctgttcagaagccagttcgaagttatgagttgtctattttaaacactaggacactgaattattaaaatgacgggtntcagttggcacatggatgtgtctccctccagtaaccaggagcggggtttccagcctcacattctgaggagtcacgtggccctcactgtgcactgtgcattctccctgtgtgtgtcttctgtttcacaacccattgacttaaaaccaggttcctctgtaggacgcccttgctaactgcgctctgctcctgagaaatcgtcctctgacttccttaagtggtaactgccctttctgtcattccccaagataaagaacaatcatttgaatcaagcaattcatgaggagcgcgaggcgatcatcgagctgcgagtgcagctgcggctgctccagatgcagcgggccaaggccgagcagcaggcacaggaggaccaggagcctgagtggcgcgggggtgccgtccagccgcccagagacggcgtcctcgagctgaaagcagctaaagagcagccaaaggcaggcaaggagccggcgaagccatcgcccagcagggacaggaaggagacgtccatctgagcagcctgcgcggccgtctggagtccgcgagactgaaaggacccgtgcatcttactgtaacccgggggccaggccggctctcccgctgtacattctgtaaaggtgtcttctcttctcagactcttcctctgtcacacgtctgactcatgcgcgtcaggctcaggttccatgggaggacgaa

SEQ ID NO: 22213 - DNA, 205 bp, Macaca Mulatta
  misc_feature (1)...(205): n = A,T,C or G
agcttctttggtttctatgatgcaaatgagacggtcctggagatggaggagcaactggtnggtttatctgcgggattcttttgggttgaagactctattggcccggggggccatagtgaggtgtccgatggccgggatctcccacacagcctggcactccaaccgtaccctttatgagacctgcattgaaccttggctctcctga

SEQ ID NO: 22214 - DNA, 731 bp, Macaca Mulatta
taaccgctatactgtggatggcttccgctactttctcctgcggcagggcgtccccaactgggactgtgactactatgatgaaaaggtggttaagttgctgaactccgagttggcagatgccttgggaggtctcttgaaccgatgcactgccaaaagaataaatccttctgagacctacccagccttctgcactacctgcttccccagtgagccagggttggtggggccatcagttcgtgctcaggcagaggattatgctctggtgagctcagtggccactttgccaaagcaggtagcagaccactatgataactttcagatatataaggctctagaggctgtgtccagctgtgtccggcaaactaatggttttgtccaaaggcatgcaccatggaagctgaactgggagagcccagtggatgctccctggctgggtactgtgcttcatgtggccttggaatgtttgcgagtctttgggactttgctgcagcctgtcaccccaagcctagctgacaagctgctgtccaggctgggggtttctgcctcagagaggaatcttggagagctctatttcttgcctcgattctatggacatccatgcccttttgaagggaggaggctgggacctgaaactgggcttttgtttccaagactagacccgtccaggacttggctggtgaaagcccaccggacctagaaactcagttcttaccggcttgtggtaaaaaagc

SEQ ID NO: 22215 - DNA, 1169 bp, Macaca Mulatta
  misc_feature (1)...(1169): n = A,T,C or G
tgcagaacgtcaacacgccgctgatgaggaagctggcgcgcctcaagctcagcctcgtggagatggctctggacatgctccagttcatctgggaggaggcccgcgggcagcagagtaggcagggctccctggagaagctgctggcggactatctgcagaacaccagtgactgcacttccgtcggnnnnnnnnnnnnnnnnnnnnnnnnnnnnnnnnnnnnnnnnnnnnnnnnnnnnnnnnnnnnnnnnnnnnnnnnnnnnnnnnnnnnnnnnnnnnnnnnnnnnnnnnnnnnnnnnnnnnnnnnnnnnnnnnnnnnnnnnnnnnnnnnnnnnnnnnnnnnnnnnnnnnnnnnnnnnnnnnnnnnnnnnnnnnnnnnnnnnnnnnnnnnnnnnnnnnnnnnnnnnnnnnnnnnnnnnnnnnnnnnnnnnnnnnnnnnnnnnnnnnnnnnnnnnnnnnnnnnnnnnnnnnnnnnnnnnnnnnnnnnnnnnnnnnnnnnnnnnnnnnnnnnnnnnnnnnnnnnnnnnnnnnnnnnnnnnnnnnnnnnnnnnnnnnnnnnnnnnnnnnnnnnnnnnnnnnnnnnnnnnnnnnnnnnnnnnnnnnnnnnnnnnnnnnnnnnnnnnnnnnnnnnnnnnnnnnnnnnnnnnnnnnnnnnnnnnnnnnnnnnnnnnnnnnnnnnnnnnnnnnnnnnnnnnnnnnnnnnnnnnnnnnnnnnnnnnnnnnnnnnnnnnnnnnnnnnnnnnnnnnnnnnnnnnnnnnnnnnnnnnnnnnnnnnnnnnnnnnnnnnnnnnnnnnnnnnnnnnnnnnnnnnnnnnnnnnnnnnnnnnnnnnnnnnnnnnnnnnnnnnnnnnnnnnnnnnnnnnnnnnnnnnnnnnnnnnnnnnnnnnnnnnnnnnnnnnnnnnnnnnnnnnnnnnnnnnnnnnnnnnnnnnnnnnnnnnnnnnnnnnnnnnnnnnnnnnnnnnnnnnnnnnnnnnnnnnnnnnnnnnnnnnnnnnnnnnnnnnnnnnnnnnnnnnnnnnnnnnnnnnnnnnnnnnnnnnggcttctgcaaggtgatgcgtctggccgtgagtcccaccgccttctcccacctgctggcctgtgcccagcagttccggaagcagacccaggcccaggtgtacagcgaggacatggccctgaacgcaggctcgg

SEQ ID NO: 22216 - DNA, 879 bp, Macaca Mulatta
gctccttgctagagcaggggagtatgatcttggcactgtcggacacggagcagagactagaagcccaagtcaacaggaacaccatctacagcaccctggtcacctgtgtgacatttgtggccacactacctgtgctctacatgctattcagagccagctaacccctggcccctcctccagagggtctgaggcaatatctgtaaatgtggatttagttagagacttgtagcaatgaagtgagcctttgggggtgtgtataacctcaatctgaaggagcagcatctgtgtcactcaccagcaggcacacttcactttgcagacaaggttcatttacattaattatcaaaactttgtgctaatgtccaattaaaatatcctgagttttattatttaaaacaatcagactgagtttttttcattgagaatcaagatccaagacttgaaggttgggcctggagttggggtagtcaccccctttagttcctctctcatctcctgtctgtcctcttttctgaactgttatggatgcactcctgaggcctagattttcattttgaatttcctggcctgccctccacttacctgactgtccgatgtcagatggcctgggagttccagcgagtggaacctagccagctgcctactcattggtgaccacggttacttcccatctcctggatcactttctctaccatgtgggggagaacttcctggttctagtactggaggagtgatcagaggaaagcagggaagaaagactgggagaatggttgataaatgttgctggggacataagtatgggaattgatggccaatctggatccctggtatagagagtgctttgggcagcactggtgtgccactggggctgggtgcacc

SEQ ID NO: 22217 - DNA, 1050 bp, Macaca Mulatta
  misc_feature (1)...(1050): n = A,T,C or G
aaacagcagagctgacagtcacagcagccctgcgtgaagcgttcctggagcccaagctctcctccacaggtgaagacagggccagtagcagacaccatggggtacctctcaaccccacttcacagagtgcgtgtcccctggcaggggcttctgctcacagnnnnnnnnnnnnnnnnnnnnnnnnnnnnnnnnnnnnnnnnnnnnnnnnnnnnnnnnnnnnnnnnnnnnnnnnnnnnnnnnnnnnnnnnnnnnnnnnnnnnnnnnnnnnnnnnnnnnnnnnnnnnnnnnnnnnnnnnnnnnnnnnnnnnnnnnnnnnnnnnnnnnnnnnnnnnnnnnnnnnnnnnnnnnnnnnnnnnnnnnnnnnnnnnnnnnnnnnnnnnnnnnnnnnnnnnnnnnnnnnnnnnnnnnnnnnnnnnnnnnnnnnnnnnnnnnnnnnnnnnnnnnnnnnnnnnnnnnnnnnnnnnnnnnnnnnnnnnnnnnnnnnnnnnnnnnnnnnnnnnnnnnnnnnnnnnnnnnnnnnnnnnnnnnnnnnnnnnnnnnnnnnnnnnnnnnnnnnnnnnnnnnnnnnnnnnnnnnnnnnnnnnnnnnnnnnnnnnnnnnnnnnnnnnnnnnnnnnnnnnnnnnnnnnnnnnnnnnnnnnnnnnnnnnnnnnnnnnnnnnnnnnnnnnnnnnnnnnnnnnnnnnnnnnnnnnnnnnnnnnnnnnnnnnnnnnnnnnnnnnnnnnnnnnnnnnnnnnnnnnnnnnnnnnnnnnnnnnnnnnnnnnnnnnnnnnnnnnnnnnnnnnnnnnnnnnnnnnnnnatggcccggatacccccaccatttccccttcagacacctattaccgtccaggggcaaacctcagcctctcctgctctgcggcctctaacccacctgcacaatattcctggcttattaatgaaacattccagcaaagcacacaagagctgtttatccccaacatcactgtgaataatagtggatcctatacctgccacgccaataactcagtcactggccgcaacaggaccacagtcaagatgatcatagtc

SEQ ID NO: 22218 - DNA, 744 bp, Macaca Mulatta
ctcctgatagatgcttctctgtatggattggtgcatccatcatgacctctatgagcagtttcaagcagatgtgggtcacctctgcggatttcaaggagtatgggacatctgtggttcaaagaaggtgcttttaaagatccttgagcagaggagacatctttaagcgccagattacaggagtaccagtgggagatggcattttcttctgggcttcagcatgatgttcaataaaagttttgccatttcaagtttcagtttattcttagtagcaccatgatatattgagtcaggtcatgaatctttaggttactctattactctcttatttcccatgggcctgttaagtttttttctcctaagaaaatcttaggttatatgttgaggttatgttcatagagaggatttgtagcaaatggtgcctgggactcatacctaggaacttgatttggtagaatctcaagaatctttaaattattatcttaggtggttctaacagacccagtttccaggagaataaatcacgaagaaaagtgtgggaaaaggaaggaaatgaagcagaaccagaaatccttcactagtcttacggttcaagtccttttacctggtttatcatttagttagggcaatagggttcttgctctgctgtcatgagatcaaaaaggctaattagaatggaaaaaaatttggcatagaaatcacaattttctaaggctttctaagctcaaggtccttgttcccagttgg

SEQ ID NO: 22219 - DNA, 1213 bp, Macaca Mulatta
  misc_feature (1)...(1213): n = A,T,C or G
ttgaaagaggaactctctgcaagctctgcttgtacccagcatctgaaagctgatcttcagaggaaggaagaagattatgctgagctgaaagagaaactgactgatgccaaaaagcagattgagcaagtacaaaaagaggtannnnnnnnnnnnnnnnnnnnnnnnnnnnnnnnnnnnnnnnnnnnnnnnnnnnnnnnnnnnnnnnnnnnnnnnnnnnnnnnnnnnnnnnnnnnnnnnnnnnnnnnnnnnnnnnnnnnnnnnnnnnnnnnnnnnnnnnnnnnnnnnnnnnnnnnnnnnnnnnnnnnnnnnnnnnnnnnnnnnnnnnnnnnnnnnnnnnnnnnnnnnnnnnnnnnnnnnnnnnnnnnnnnnnnnnnnnnnnnnnnnnnnnnnnnnnnnnnnnnnnnnnnnnnnnnnnnnnnnnnnnnnnnnnnnnnnnnnnnnnnnnnnnnnnnnnnnnnnnnnnnnnnnnnnnnnnnnnnnnnnnnnnnnnnnnnnnnnnnnnnnnnnnnnnnnnnnnnnnnnnnnnnnnnnnnnnnnnnnnnnnnnnnnnnnnnnnnnnnnnnnnnnnnnnnnnnnnnnnnnnnnnnnnnnnnnnnnnnnnnnnnnnnnnnnnnnnnnnnnnnnnnnnnnnnnnnnnnnnnnnnnnnnnnnnnnnnnnnnnnnnnnnnnnnnnnnnnnnnnnnnnnnnnnnnnnnnnnnnnnnnnnnnnnnnnnnnnnnnnnnnnnnnnnnnnnnnnnnnnnnnnnnnnnnnnnnnnnnnnnnnnnnnnnnnnnnnnnnnnnnnnnnnnnnnnnnnnnnnnnnnnnnnnnnnnnnnnnnnnnnnnnnnnnnnnnnnnnnnnnnnnnnnnnnnnnnnnnnnnnnnnnnnnnnnnnnnnnnnnnnnnnnnnnnnnnnnnnnnnnnnnnnnnnnnnnnnnnnnnnnnnnnnnnnnnnnnnnnnnnnnnnnnnnnnnnnnnnnnnnnnnnnnnnnnnnnnnnnnnnnnnnnnnnnnnnnnnnnnnnnnnnnnnnnnnaggatggatctgtagtccttgactcttgtgaagtgtcaacagaaaatgatcaaagcactcgatttccaaaacctgaattagagattcagtttacacctttacaaccaaacaaaatggcagtgaaacaccctggttgtaccacaccagtgacagttaagattcctaaggctcggaagaggaagagtaatgaaatggaggag

SEQ ID NO: 22220 - DNA, 689 bp, Macaca Mulatta
ctcctctgtgcatattggcttacagtatatgcaatgcctgctgaataggccatactcacacctgtccctggcactttaatttttataatatttccccctcatcaaaagcttcttctattttttccatcctttaatctcactcctctgtgaagccttctctcaccccttctgccattttctgaatttctacatctgcgtggcctttggccatactttgtcttgtgttgctgctgagcctttcctgtgtgtttattttgtcttttcactcagatgcctagagcagggtttgcaaagccccactccaccgtacctctcagaagaccacctgcagagtaggaattcagcaaataactatggaatgagtaaacattttctgtggcctgaggtcatagcttctaattgttatggtgcatatgagaaaatgtgagaatagttcttattgctagtgcgttactcttgaaactttttccctttgctaggtgcaggacgatttccttagaaactggagctcagaatattcagatgtgcatcaccatgctccagttatctttcactactgagcacttggtccagatgttgagtttcccactggcctatggactcttccagctgatagatggatttcttattgttgcaggtgggcgaactcccattgggtaggaaataactgacagaaaattgttcaccca

SEQ ID NO: 22221 - DNA, 691 bp, Macaca Mulatta
ggggactaatattaggcagttgcttaacaaattttaacacaaagccaacatttatgtacttgctgtatacgtgaattgttttccttctttataggttccctggcttcaaggaagtgcgtctggtaccagggaggcatgacattgcttttgttgaatttgaaaatgatgggcaggctggagctgccagggatgctttacagggatttaagatcacaccgtcccatgctatgaagatcacctatgccaagaaataacatttgggacagtcgtctttaaaggacttggtgttatttatagtgtttgttttgataacatttggctgggtcattttaatagttagagattagggggagtaaaagtgaaatttttgtgaaggacttaaattatccagtgtttctttagccttggtgaactatgaaatatgaagaccttaattttgtacaataaactttgtattctgtgtatataatgctttcttttttgactcattgccctatcatcaaatgactgttctggtctagaacacattttaaagtttataataattgtgtaataaggatgctttttctagtggttatttttgatgggagctaaatgaatacaacaatccatttgaacccatttttaaataaaaagtttaaaagtaagaaattttaaaatccaccaagaaagctttaggtaagggtgggaa

SEQ ID NO: 22222 - DNA, 283 bp, Macaca Mulatta
gtggccagtgccactggtgactgcagaaggccccatgatgtgagtgttttgtacaccatctgactggaccacattcagaagcccttaaactcccctccctgcctcttccctcctaggacctcctgcagctccagtatgagggtgtggctgtcatgaaactcttcaacaaggccaaagtcaatgtcaaccttctcatcttcctcctcaacaagaagtttttgcggaagtgacagaagcaaagagtgctacccaagcccctcttaccttgctggatgctttcttc

SEQ ID NO: 22223 - DNA, 119 bp, Macaca Mulatta
gagtgattgcaccaagctcttcagccagggcattggaggggagcaggctcaggccaagtttgacagctgcctttctgacttggccgccgtgtccaacaaattccgagacctcttgcagg

SEQ ID NO: 22224 - DNA, 1777 bp, Macaca Mulatta
  misc_feature (1)...(1777): n = A,T,C or G
tggatgaacacgaccgtcccatccgcacataccaagtgtgcaatgttctggcgcccaaccaagacaactggctgcagactggctggatcagccgcggccgcgggcagcgcatcttcgtggagctgcagttcacactccgtgactgcagcagcatccctggcgccgcaggcacctgcaaggagaccttcaacgtctactacctggaaactgaggccgacctgggccgcgggcgtccccgcctaggcggcagccggccccgcaaaatcgacacgatcgcggcggacgagagtttcacgcagggcgacctgggtgagcgcaagatgaagctgaacacagaggtgcgcgagatcggcccactcagccggcggggtttccacctggcctttcaggacgtgggcgcatgcgtggcgcttgtctccgtacgcgtctactacaagcagtgccgtgccactgtgcggggcctggccgcgttcccagccaccgcagccgagagcgccttctccacactggtggaagtggccggaacgtgcgtggcgcactcggannnnnnnnnnnnnnnnnnnnnnnnnnnnnnnnnnnnnnnnnnnnnnnnnnnnnnnnnnnnnnnnnnnnnnnnnnnnnnnnnnnnnnnnnnnnnnnnnnnnnnnnnnnnnnnnnnnnnnnnnnnnnnnnnnnnnnnnnnnnnnnnnnnnnnnnnnnnnnnnnnnnnnnnnnnnnnnnnnnnnnnnnnnnnnnnnnnnnnnnnnnnnnnnnnnnnnnnnnnnnnnnnnnnnnnnnnnnnnnnnnnnnnnnnnnnnnnnnnnnnnnnnnnnnnnnnnnnnnnnnnnnnnnnnnnnnnnnnnnnnnnnnnnnnnnnnnnnnnnnnnnnnnnnnnnnnnnnnnnnnnnnnnnnnnnnnnnnnnnnnnnnnnnnnnnnnnnnnnnnnnnnnnnnnnnnnnnnnnnnnnnnnnnnnnnnnnnnnnnnnnnnnnnnnnnnnnnnnnnnnnnnnnnnnnnnnnnnnnnnnnnnnnnnnnnnnnnnnnnnnnnnnnnnnnnnnnnnnnnnnnnnnnnnnnnnnnnnnnnnnnnnnnnnnnnnnnnnnnnnnnnnnnnnnnnnnnnnnnnnnnnnnnnnnnnnnnnnnnnnnnnnnnnnnnnnnnnnnnnagtagagacggggtttcatcgtgttagccagaatggtctcgatctcctgagctcgtgatctgcccgtctcggcctcccaaagtgctggaattacaggcgtgagccacggcgcctggccaaggaagtcattcttatctctatttcacagatgaagaaacagagcctcagagagattagtacctcacttgcaaagttaggaaatggggagctaggacttgaattcaggcttgcccaactctcacattctttgtatgacaccatgcggtctcccctgtgcataaggaagaactctacaacagcccaagcttcagactagtgggattggtagcatacagagaggaatatcccagtcacggaccacatacttggagttagagactggcgaggggatttttatgctggagagagggattgggaggttgcactagatggttactaagatcacatcccactctctgaactacaatcagtgtgctccctgggggagatccttcatgttgagggttttgctgggttcttaggctggtgggggcattaggaacagacctctcattctctctcctgcctgtggctttggacccagagggtgaggatggggttatgaatgtgtatacttaatatagaaagatcaagg

SEQ ID NO: 22225 - DNA, 1262 bp, Macaca Mulatta
  misc_feature (1)...(1262): n = A,T,C or G
tgttagatcagtaatattgagtagatcccagcagactcagctgaacacagatctgactgcattcctgcaaaaacattgtcatggagatgtttgtatactgaatgccacggagtgggttagagaacacgcgtctggctatgtcagcagagatacttcatcttcaccccccacaggaagcacagtccagtcagttgacctcatcttcacaagactctggatctacagccatcatatctacaacaaatgcaaaagaaagaatattctagagtgggcaaaggagctttccctgtctgggtttagcatgcctggaaaacctggtgttgtttgtgtggaaggcccacaaagtgcctgtgaagaattctggtcaagnnnnnnnnnnnnnnnnnnnnnnnnnnnnnnnnnnnnnnnnnnnnnnnnnnnnnnnnnnnnnnnnnnnnnnnnnnnnnnnnnnnnnnnnnnnnnnnnnnnnnnnnnnnnnnnnnnnnnnnnnnnnnnnnnnnnnnnnnnnnnnnnnnnnnnnnnnnnnnnnnnnnnnnnnnnnnnnnnnnnnnnnnnnnnnnnnnnnnnnnnnnnnnnnnnnnnnnnnnnnnnnnnnnnnnnnnnnnnnnnnnnnnnnnnnnnnnnnnnnnnnnnnnnnnnnnnnnnnnnnnnnnnnnnnnnnnnnnnnnnnnnnnnnnnnnnnnnnnnnnnnnnnnnnnnnnnnnnnnnnnnnnnnnnnnnnnnnnnnnnnnnnnnnnnnnnnnnnnnnnnnnnnnnnnnnnnnnnnnnnnnnnnnnnnnnnnnnnnnnnnnnnnnnnnnnnnnnnnnnnnnnnnnnnnnnnnnnnnnnnnnnnnnnnnnnnnnnnnnnnnnnnnnnnnnnnnnnnnnnnnnnnnnnnnnnnnnnnnnnnnnnnnnnnnnnnnnnnnnnnnnnntctcccttacctgccttcactaaagaacccagaaaagctaattgtttccctttcagcctctgttgcaactaacaactctcagtggcctcaggacacagctttggccttgggaattctgggaaaacttttgcttcctgattaaagaaacatatgcagctaggccacctcctccccctcttttataaacgccaaagtgatggctggagctggaggagttatttgaactatgatagaaggaaggactaagagaaccacgaagatgccagttgccatgttgttgagctgctgacccaacaccagccactgcctatctctagacgtcttatgaaataaaaccagttttgtttaa

SEQ ID NO: 22226 - DNA, 723 bp, Macaca Mulatta
  misc_feature (1)...(723): n = A,T,C or G
gggctctttccttgcctaacgcagccatggctcgtggtcccaagaagcatctgaagcgggtagcagctccaaagcattggatgctggataaattgaccggtgtgtttgctcctcgtccatccaccggtccccacaagttgagagagtgtctccccctcatcatcttcctaaggaacagacttaagtatgccctgacaggagatgaagtaaagaagatttgcatgcagcggttcattaagatcgatggcaaggtccgaactgatataacctaccctgctggattcatggatgtcatcagcattgacaagacgggagagaatttccgtctgatctatgacaccaagggtcgctttgctgtacatcgtattacacctgagaggccaagtacagttatgcaagtgagaaagatctttgtgggcacaagaatccctcatctgggactcatgatgcccacatcgctacccgaccctcatcaggatgatacatcaatgattgaactgcaatactgatctcagtcacctgtactggtatggactgagtgcactggagatgtggtccacgaaagatctgacttgactgtcctgagagcatgcacactgcccactcacntgtatgagcaacagatctccagagtcctctcaaacaatgcacatgagctgcgtactctaatgcgaaacnnnaaaantgcgcatactggcggaggtatgtgcacgcaagttaacc

SEQ ID NO: 22227 - DNA, 785 bp, Macaca Mulatta
  misc_feature (1)...(785): n = A,T,C or G
ggaagggataaagaacgagaacgccagagggattgggaagacaaagacaaaggacgagatgaccgcagagaaaagcgagaagagatccgagaagataggaatccaagagatggacatgatgaaagaaaatcaaagaagcgctatagaaatgaagggagtcccagccctagacagtccccgaagcgccggcgtgaacattctccggacagtgatgcctacaacagtggagatgataaaaatgaaaagcacagactcttgagccaagttgtacgacctcaagaatctcgttctcttagtccctcgtgcctcacagaagacagacagggtagatggaaagaggaagatcgtaaaccagaaaggaaagagagttcaaggcgctatgaagaacaggaactcaaggagaaagtttcttctgtagataaacagagagaacagacagaaatcctggaaagctcaagaatgcgtgcacaggacattataggacaccaccagtctgaagatcgagagacatctgatcgagctcatgatgaaaaccagaagaaagccnnnannnnnnnnnnnnnnnnnnnnnnnnnnttggtcggccgccttcgggccctcgaagaagcttttctaagaccaattcgtttttggccgcgccgggcccccaggtagggttaagttggaaccatgggttcattaagcctggttttcccctaaggggagaatccccctggggcccattgaaaccaaaggtgggcccttgtgtggatattctctctcccccccccaaatatataaaaaaa

SEQ ID NO: 22228 - DNA, 113 bp, Macaca Mulatta
gcctatttgatggctttgcagatggactaggagttgccgaagctatttcatatgtggatcctcagttccttacctacatggcattagaagaacgcttagcccaggctatggag

SEQ ID NO: 22229 - DNA, 815 bp, Macaca Mulatta
  misc_feature (1)...(815): n = A,T,C or G
cagaagatcacctggccccaagtcctcagtggtgtggtgggcaactgtgtcaacggtgtggccaactatgtcctggtttctgtgctgaacctggggatcaggnnnnnnnnnnnnnnnnnnnnnnnnnnnnnnnnnnnnnnnnnnnnnnnnnnnnnnnnnnnnnnnnnnnnnnnnnnnnnnnnnnnnnnnnnnnnnnnnnnnnnnnnnnnnnnnnnnnnnnnnnnnnnnnnnnnnnnnnnnnnnnnnnnnnnnnnnnnnnnnnnnnnnnnnnnnnnnnnnnnnnnnnnnnnnnnnnnnnnnnnnnnnnnnnnnnnnnnnnnnnnnnnnnnnnnnnnnnnnnnnnnnnnnnnnnnnnnnnnnnnnnnnnnnnnnnnnnnnnnnnnnnnnnnnnnnnnnnnnnnnnnnnnnnnnnnnnnnnnnnnnnnnattcccttggggctcagcatcggggtctgtgtccgagtggggatggctctgggggctgcggacactgtgcaggccaagcgctcggccgtctcgggcgtgctctgcatagnnnnnnnnnnnnnnnnnnnnnnnnnnnnnnnnnnnnnnnnnnnnnnnnnnnnnnnnnnnnnnnnnnnnnnnnnnnnnnnnnnnnnnnnnnnnnnnnnnnnnnnnnnnnnnnnnnnnnnnnnnnnnnnnnnnnnnnnnnnnnnnnnnntgtgtctatggcggagtcctaagaggaactgggaagcaggcctttggtgccgctgtgaatgccatcacctactacatcatcggcctaccactgggcatccttctgacctttctggtcagaatgagaatcatgg

SEQ ID NO: 22230 - DNA, 101 bp, Macaca Mulatta
cagtctgtggctgcttttgctgtttcggccgtggcttcccagtgggagaggactggcaaaccatttaatccactcttgggagaaacgtatgaattaatcag

SEQ ID NO: 22231 - DNA, 85 bp, Macaca Mulatta
agattaacttttttaagaagggagcagagatgttttccaagcatatggacagctttttatcctccgttgcagacatggttcaaag

SEQ ID NO: 22232 - DNA, 782 bp, Macaca Mulatta
ccgagcgcctgcggcacgatgctgcccagcttcagccttttttcctcggtttggtgagagcttcttggcgggcagacgggcgggagtctcagtggttgggtgggagacgagggctggcgcgagaccctaccccgacgtgctcagggcctggaggagaacgcgcactgcgcgccggtgctgctcgccctgagagagctgctaaacctccgcgaccccgcgctgctgggcctggaggtggctggcctgcagcaacagtttcccgacgtgaggtgcggacgggggtccaggagggaggagaagccggagggcggggagaacggggctgacacgcctccttggtgcccctgcagcgaggaccacgtctccgccctcttgggcctgcgcggtgacttgtcccgggagcagcaactggccgctctcagctcgcttcaggctgcgctgccgccctcgccccgcgctagccgccgcgccctcttcagcctcgtgcccgccccagcacccgcgccggcctcctgcctgccctcggggtcctgcgcccgagcccggctgctctcagaataaaccacggctcccggacgcctgagtgtgtgtgtgttggggaaggtgggatggaataaaagtgcccacgagggttcagggaatccttgcatagtgacacgcttaaagtatcctggctcccgacctggtacacgggctgcgccccgcctatgcaggcatttgccctctgtgcggactgcgttcccgaggccgcgggctacgcccccacgtctcagcgcccaggc

SEQ ID NO: 22233 - DNA, 2864 bp, Macaca Mulatta
  misc_feature (1)...(2864): n = A,T,C or G
aatcattcttatagtcactctcatggaatgaagaagaagtcttctggttctcataaagacctactnnnnnnnnnnnnnnnnnnnnnnnnnnnnnnnnnnnnnnnnnnnnnnnnnnnnnnnnnnnnnnnnnnnnnnnnnnnnnnnnnnnnnnnnnnnnnnnnnnnnnnnnnnnnnnnnnnnnnnnnnnnnnnnnnnnnnnnnnnnnnnnnnnnnnnnnnnnnnnnnnnnnnnnnnnnnnnnnnnnnnnnnnnnnnnnnnnnnnnnnnnnnnnnnnnnnnnnnnnnnnnnnnnnnnnnnnnnnnnnnnnnnnnnnnnnnnnnnnnnnnnnnnnnnnnnnnnnnnnnnnnnnnnnnnnnnnnnnnnnnnnnnnnnnnnnnnnnnnnnnnnnnnnnnnnnnnnnnnnnnnnnnnnnnnnnnnnnnnnnnnnnnnnnnnnnnnnnnnnnnnnnnnnnnnnnnnnnnnnnnnnnnnnnnnnnnnnnnnnnnnnnnnnnnnnnnnnnnnnnnnnnnnnnnnnnnnnnnnnnnnnnnnnnnnnnnnnnnnnnnccttcatctcgaaattctgcctcagcaacaacccctctaagtggaaactcatccagacgaggaagtggggacaccagcagcttaatagatccagacacctcattaagtgaattgcggnnnnnnnnnnnnnnnnnnnnnnnnnnnnnnnnnnnnnnnnnnnnnnnnnnnnnnnnnnnnnnnnnnnnnaggaatctttgtctgaagtggaagaaaaatacaagaaagccatggtttccaatgcacagttagacaatgagaagaacaatttgatctaccaagtagacacactcaaggatgttattgaagagcaggaggaacagatggcagaattttatagagaaaatgaagaaaaatcaaagnnaggagttagaaaggcagaaacatatgtgtagtgtgctgcagcataagatggaagaacttaaagaaggccttcggcaaagagatgagcttattgagnnnnnnnnnnnnnnnnnnnnnnnnnnnnnnnnnnnnnnnnnnnnnnnnnnnnnnnnnnnnnnnnnnnnnnnnnnnnnnnnnnnnnnnnnnnnnnnnnnnnnnnnnnnnnnnnnnnnnnnnnnnnnnnnnnnnnnnnnnnnnnnnnnnnnnnnnnnnnnnnnnnnnnnnnnnnnnnnnnnnnnnnnnnnnnnnnnnnnnnnnnnnnnnnnnnnnnnnnnnnnnnnnnnnnnnnnnnnnnnnnnnnnnnnnnnnnnnnnnnnnnnnnnnnnnnnnnnnnnnnnnnnnnnnnnnnnnnnnnnnnnnnnnnnnnnnnnnnnnnnnnnnnnnnnnnnnnnnnnnnnnnnnnnnnnnnnnnnnnnnnnnnnnnnnnnnnnnnnnnnnnnnnnnnnnnnnnnnnnnnnnnnnnnnnnnnnnnnnnnnnnnnnnnnnnnnnnnnnnnnnnnnnnnnnnnnnnnnnnnnnnnnnnnnnnnnnnnnnnnnnnnnnnnnnnnnnnnnnnnnnnnnnnnnnnnnnnnnnnnnnnnnnnnnnnnnnnnnnnnnnnnnnnnnnnnnnnnnnnnnnnnnnnnnnnnnnnnnnnttagccggcttgagggacaggttctgagatataaaactgctgctgagaatgctgagaaagttgaagatgaactgaaagcagaaaaaaggaagctacnnnnnngttacgaacagcactggacaagattgaggagatggagatgaccaacagccacctggccaagcggctggagaagatgaaggccaacaggacagcacttttggcccagcagtaggaaaaccacccttcaacctgggtgatgctccttggggccctacctagagggactgacttttgtccattgacacaaaccccttttnnnnnnnnnnnnnnnnnnnnnnnnnnnnnnnnnnnnnnnnnnnnnnnnnnnnnnnnnnnnnnnnnnnnnnnnnnnnnnnnnnnnnnnnnnnnnnnnnnnnnnnnnnnnnnnnnnnnnnnnnnnnnnnnnnnnnnnnnnnnnnnnnnnnnnnnnnnnnncgtaattgtagaatcatgtttactcaatatttttccccagctgcctcagtaactgggcactcggaggtcttggcacgggttctggaggacagacagcaattctatgagtgctcactgagatacttgctggagacctcagaaaacacaagtgccttctccacggtgcaattcagacttcagtgatctccagtggtcaaaagactaaatttacccttaatatcagacgacatttgtattttagtgaagaaacaagttcttgggtggggaatctatgtttcactcaaatttatatgtttggaggaaaaaagcctttttttttgtaaaatatttaaatttatataagaaaatgttagaaaaaaatatgggggagtgtatataaaactcgctttattgcatggggcaggggaagtccaggcctaatactcttaaagtttaagagttgggtccttttttcttcaatacaactgtgctgtaccttgtaaagtattttatctgctgcttatttgtggaatgaaacctcaaacaaacccaaagggggagggtagggcagggtgggcagatcagaaatctgcctgcagattctattaaatacacccttttgccaaccacaattggctactgacatgttcattttgttacaggagactttaaaacaaatcatggcaaccacatccctcttcttttgtctccttctcgaggaaaaacaatctggaatgtagaacttttaaagactttagtttcatctttagaggtaccctgtccaagaggttttttaaaatcatgaagtgcaattactttgcagaatttatgcttctcttttgctcttagt

SEQ ID NO: 22234 - DNA, 222 bp, Macaca Mulatta
gtaccgccgcttcctccgccctcgctaccgtgtggcctacaagacagtgaccgacatggagtggaggtgctgtcagggttacgggggcgatgactgtgctgagagtcctgctccagcgctggggcctgcatcttccacaccacggcccctgccccggcctgcccgtcccaacctctctggctccagtgcgggcagccccctcagtggactggggggagaagg

SEQ ID NO: 22235 - DNA, 502 bp, Macaca Mulatta
ggttccagcttccaataggcacggagctggatcccgctctccctagtccggcccctattctaggttgagtccagcctccgccaatcaacgcagagccaggttcctcccctttttaactctggccacagttcaaccctgccctctgaaggcatttcgtttctgccactcaatgctccttcgtgtgcctgatagccatcctgccctcctaccgccgctgtgttctaaattcgtcttctacccagctctatggtcttctctaaccaaagaattgccctgcccgcctacgcggagcccagcccgacccactcccgccgactgctacgcccatttctatacaagtcctgcttccgctgagcagcgtggcgtgcggcaccacccccttggtgttttggcaggggtctaggagtccctcatccgccaatcagagaaaaacagggctacccacccccgtccttggaggctgtcttccatcaatcccatgtaagccaatcagtgtgaggca

SEQ ID NO: 22236 - DNA, 1545 bp, Macaca Mulatta
  misc_feature (1)...(1545): n = A,T,C or G
tctctctaaagagcctcgttcatttcccatcagttaaggaatgggaaccagagtgttttaggacctgaagaatctttatgactttctctctctcactcnnnnnnnnnnnntcactaagttaaaagcaaagtgagagtattaacgtttttgttctcctccaaccccctgttacaatgaaggggcgaaagtatttgctcttagtttattcctcccttaacttctgtgactaattttaatttcctttctagatttgcccaattaatactagggtgcagtgtatcctggagaggtagggtcggggggaggaatcccttgggggagatattaggggtgctcccttgtttacaaactcaggttcccgcagggcttagcaagagacttaaatgagtgacaagaaccatgagaaacaagttgcttccaggcttgatttcgacttttcnnnnnnnnnnnnnnnnnnnnnnnnnnnnnnnnnnnnnnnnnagacagaatctcactttgtcaccaggctggagtgcagtggtgtaatctcggctcactgcaacctccgcctcctgggttcaagcgattctcctgcctcagcctcccaagtagcttggactacaggcgcccaccatcacgcctggctaatttttgtatttttagtagagatggggtgtcaccgtgttggtcaggatggtctcgatctcttgacctcgtggtctgctcacttggccttggaaagtgctgaattacagnnnnnnnnnnnnnnnnnnnnnnnnnnnnnnnnnnnnnnnnnnnnnnnnnnnnnnnnnnnnnnnnnnnnnnnnnnnnnnnnnnnnnnnnnnnnnnnnnnnnnnnnnnnnnnnnnnnnnnnnnnnnnnnnnnnnnnnnnnnnnnnnnnnnnnnnnnnnnnnnnnnnnnnnnnnnnnnnnnnnnnnnnnnnnnnnnnnnnnnnnnnnnnnnnnnnnnnnnnnnnnnnnnnnnnnnnnnnnnnnnnnnnnnnnnnnnnnnnnnnnnnnnnnnnnnnnnnnnnnnnnnnnnnnnnnnnnnnnnnnnnnnnnnnnnnnnnnnnnnnnnnnnnnnnnnnnnnnnnnnnnnnnnnnnnnnnnnnnnnnnnnnnnnnnnnnnnnnnnnnnnnnnnnnnnnnnnnnnnnnnnnnnnnnnnnnnnnnnnnnnnnnnnnnnnnnnnnnnnnnnnnnnnnnnnnnnnnnnnnnnnnnnnnnnnnnnnnnnnacagggccaaagccatagagtccggtcccaaggagaaggcacttccagtgctaggagaggtatggacagcctctcacctgtgagctgtgnnnnnnnnnnnnnnnctgcctcagtctcagagtcctgttgggtgaatgaggcagatgggcaagagttagcttcaccagcagctgcttttggagcaggggtccaaggaagagagggtggcctcgacatcaaactgcctggatttttctaccaccctgttacaccataacaacttctgaaccacacaccagccctgagttctgggctcatctgaagcctggaatagcaataaatctttttaacttg

SEQ ID NO: 22237 - DNA, 751 bp, Macaca Mulatta
  misc_feature (1)...(751): n = A,T,C or G
cctcaaactggantgctcctttctcaccacccttcaccttgtgtacacacacagaggagacctcagcctcacaccagaaatattatttttttaatacacagaatgtaagatgggattttatcaaataaaactatgaaaatgcaggtgggctcctatgccagaaaaacccacctggcgttccttatgcaagagggccagagcagaggcctggttctggggaagcctcaggatgctgcccaccaaggagtgatttccaaagagtaacccagggtgcccttttcccttctggggaagtgtggagaggtagagccccataggagaaggtaaacgagcagccagcacctctatacaggcccggcctgaatcatagagaggggagaacactgcaaggtgtgggatggagctcaacgacctccgagtgaggcggggactctctgcgggctgctctgcagcagctgctggaatatcgagtggagctggttgcgcaagttggccggggagtctagctctaccactctccccgcttgtagaacccacaacccgtctgagttcacgatcgtggttaagcctgtgatggggaaaatggtcacggtaaggcataagggaatatgacctaactgagaacactggattggtttccctcttcttccttcgggacaacacaggttgtccccacaggttttaactcctgccttggggccggggaaaggacggcaaagccccttccaaaatgggctataaagggccctat

SEQ ID NO: 22238 - DNA, 81 bp, Macaca Mulatta
aggtgggaacattctccgtggccagtgaggaagtcttgaagaatagagccataaagaaagcaaagcgcagaaatgttggat

SEQ ID NO: 22239 - DNA, 514 bp, Macaca Mulatta
gctgtggcgactgcgggaagctctacaagaccatcgcccatgtgcgtggcaccggcgcgtccactcagacgagcggccatacccttgtgccgagtgtggcaagcgctacaagactaagaacgcacagcaggtgcacttccggacacatctggaggagaagccgcatgtgtgccagttctgcagccgtggcttccgagagaagggctcgctggtgcggcacgtgcgacaccacacaggcgagacgccatcaagtgctacaagtgcggccgtggctttgctgagcacggcacgctgaaccggcacctgcgcaccaaagggggctgcctgctggaggtggaggagttgctggtgtccgaggagagccccgcggcagccaccaccgtcctcgcggaggacccgcacacggtgttggtggagttctcgtccgtggtagccgacacccaggagtctatcattgaggccacagcggatgatgcggagaccagtgaggccacggagatcatcgagggcaccc

SEQ ID NO: 22240 - DNA, 892 bp, Macaca Mulatta
  misc_feature (1)...(892): n = A,T,C or G
gcggccgtgggggtgaccaggcacaaatcgaaggagctgagtcgcaaacagagtcaacagctagagttactggaaagcgagctccggaaagagannnnnnnnnnnnnnnnnnnnnnnnnnnnnnnnnnnnnnnnnnnnnnnnnnnnnnnnnnnnnnnnnnnnnnnnnnnnnnnnnnnnnnnnnnnnnnnnnnnnnnnnnnnnnnnnnnnnnnnnnnnnnnnnnnnnnnnnnnnnnnnnnnnnnnnaacagagacgccaatgacaagaatgaaagtctcacagctttggatgccctaatctgtaataaaagctttcttgttactgtcatccacacccttgaaaagcagaagaacttttctgtgaaggacaggnnnnnnnnnnnnnnnnnnnnnnnnnnnnnnnnnnnnnnnnnnnnnnnnnnnnnnnnnnnnnnnnnnnnnnnnnnnnnnnnnnnnnnnnnnnnnnnnnnnnnnnnnnnnnnnnnnnnnnnnnnnnnnnnnnnnnnnnnnnnnnnnnnnnnnnnnnnnnnnnnnnnnnnnnnnnnnnnnnnnnnnnnnnnnnnnnnnnnnnnnnnnnnnnnnnnnnnnnnnnnnnnnnnnnnnnnnnnnnnnnnnnnnnnnnnnnnnnnnnnnnnnnnnnnnnnnnnnnnnnnnnnnnnnnnnnnnnnnnnnnnnnnnnnnnnnnnnnnnnnnnnnnnnnnnnnnnnnnnnnnnnnnnnttaaacgtcgtctttgaaaaaatcccggaaaacgagagtgcagatgtctgtcggaatatttcagtcaatgttctcgactgtgacaccataggccaagccaaagaaaagattttccaagcattcctaagcaaaaatggttctccttatggactacagcttaatgaaattggtctt

SEQ ID NO: 22241 - DNA, 552 bp, Macaca Mulatta
tataaggagtcctgtttgtcacaatgaatgttctcctgggcggcttcgtgatctttgccaccttcgtgactttatgcaatgcatcgtgctctttcatacctaatgagagatttccaggagattctaccagggaatgcacggatctcaaaggaaacaaacacccgataaactcgaagtggaagactgacaactgtgagagatgcacttgctacaaaacagaaattatctgttgcactcttattgctacacctgtgggttatgacaaaaaaaaatgccagagaatcttcaagaaggaggactgcaagtatattgtggtggagaagaagaacccaaaaaagacctgtcctatcgatcaatggatactctaatgtgcttctagtaggcacaaggctcccaggccaggcgtcattctcctctgatctatgattgtgtagccatgcctatcagtaaaaagatttttgagcaaacacttgaatatgtgtgtacttttaatttataacttgtgtatgcattgatttaatacacattataaagaatataaacatttaaaga

SEQ ID NO: 22242 - DNA, 787 bp, Macaca Mulatta
  misc_feature (1)...(787): n = A,T,C or G
gggtaactggtgaagcagatgtcgagtttgcaactcatgaagatgccgtggcagctatgtcaaaagacaaagcaaatatgcaacacagatatgtagaactcttcttgaattctacagcaggagcaagcggtggtgcttacgaacacagatatgtagaactcttcttgaattctacagcaggagcaagcggtggtgcttatggtagccaaatgatgggaggcatgggcttgtcaaaccagtccagttacggtggcccagccagccagcagctgagtggaggttacggaggcggctatggtggccagagcagcatgagtggatacgaccaagttttacaggaaaactccagtgattttcaatcaaacattgcataggtaaccaaagagcaatgaacagcagctactacagtagtggaagccgtgcatctatgggcgtgaacggaatgggagggatgtctagcatgtccagtatgagtggtggatggggaaagtaattgatctgtcctgatcaccgactcttggtcaaccccctttttttttacgcagannnnnnnnnnnnnnnnnnnnnnnagtttaacagtttccggcaataaagccttgggatttatgcctcaccccaaggggaaatcagggatggttttaaaaaatttaaggcccagttttttttggaaaacaaaaccccaaacctcgggaggtaaccactgaagaccggaaataaactactaacgggttaaaactataaattcccaacctttttctccagtttagtttcaaaggaaggccctctc

SEQ ID NO: 22243 - DNA, 413 bp, Macaca Mulatta
  misc_feature (1)...(413): n = A,T,C or G
caacacggtgaccggctcctggagcagggctgccnnnnnnnnnnnnnnnnnnnnnnnnnnnnnnnntgcaccaccctgggtaacaccatttactgcctcaacccccaggtcactgccacgttcacggtctctggggggactgcacagttccaggccaaggagctgcagcccttccccttggggagcacaggggtcctcagcccattcatcctgactctgcccgatgaggaccggctgcagacctcactctgagtggcaggcagagaaaaaaaaatgcttcacggctctgcagggagactctcctgggatgggcctgagaggccagggctcagggaggggctgggatcggaacctcctgctcttgtttctggacaactttccccttctgctttaaaggttgtcaattattttga

SEQ ID NO: 22244 - DNA, 2358 bp, Macaca Mulatta
  misc_feature (1)...(2358): n = A,T,C or G
gctcgcgctgtctccacgctatcgtgcgcttccccacggatcagctgaccccggaccactaacgctcactcatgttcatgcaatggggccagctgttggaccacgacctcgacttcacccctgagccggctgcccgggcctccttcctcactggcgtcaactgcgagaccagctgcgtgcagcagccgccctgcttcccactcaagngatcccgcccaacgacccccgcatcaagaaccaagccgactgcatcccattcttccgctcctgcccggcctgccccaacaacaacatcaccatccgcaaccagatcaacgcgctcacctccttcgtggacgccagcatggtatacggcagcgaggagcccctggccaggaacctgcgcaacacgtccaaccagctggggctgctggccgtcaaccagcgcttccaagacaacggccgggccctgctgccctttgacaagctgcacgatgacccctgtctccttaccaaccgctcagcgagcatcccctgcttcctggcaggnnnnnnnnnnnnnnnnnnnnnnnnnnnnnnnnnnnnnnnnnnnnnnnnnnnnnnnnnnnnnnnnnnnnnnnnnnnnnnnnnnnnnnnnnnnnnnnnnnnnnnnnnnnnnnnnnnnnnnnnnnnnnnnnnnnnnnnnnnnnnnnnnnnnnnnnnnnnnnnnnnnnnnnnnnnnnnnnnnnnnnnnnnnnnnnnnnnnnnnnnnnnnnnnnnnnnnnnnnnnnnnnnnnnnnnnnnnnnnnnnnnnnnnnnnnnnnnnnnnnnnnnnnnnnnnnnnnnnnnnnnnnnnnnnnnnnnnnnnnnnnnnnnnnnnnnnnnnnnnnnnnnnnnnnnnnnnnnnnnnnnnnnnnnnnnnnnnnnnnnnnnnnnnnnnnnnnnnnnnnnnnnnnnnnnnnnnnnnnnnnnnnnnnnnnnnnnnnnnnnnnnnnnnnnnnnnnnnnnnnnnnnnnnnnnnnnnnnnnnnnnnnnnnnnnnnnnnnnnnnnnnnnnnnnnnnnnnnnnnnnnnnnnnnnnnnnnnnnnnnnnnnnnnnnnnnnnnnnnnnnnnnnnnnnnnnnnnnnnnnnnnnnnnnnnnnnnnnnnnnnnnncagggtacaatgcctggaggcgcttctgtgggctcccgcagcccaacacggtaggcgagctgggcacggtgctgaggaacctggaattggcgaggaagctgatggagcagtatggcacgcccaacaacatcgacatctggatgggcggcgtgtctgagcccctggagagcaatggccgcgtgggcccactcctcgcctgcatcatcggcatacagttcaggaagctccgggatggtgatcggnnnnnnnnnnnnnnnnnnnnnnnnnnnnnnnnnnnnnnnnnnnnnnnnnnnnnnnnnnnnnnnnnnnnnnnnnnnnnnnnnnnnnnnnnnnnnnnnnnnnnnnnnnnnnnnnnnnnnnnnnnnnnnnnnnnnnnnnnnnnnnnnnnnnnnnnnnnnnnnnnnnnnnnnnnnnnnnnnnnnnngcttcctggagggaagcctcctagaggctaggtaagggggtgcagcagtgaggggtatatcttggctggccgattgaaccacggagatctccttgccctaggtgagcccagccctgttctgggtgcagctgagaaaatgaatgactagacattcatttgtgtgctcatgtatctgcaaagtatataaattggcatttcatgtgtgtgtgttgtctgaacatggggagtgtttcatgggttatgtgtatgtgccatttatgtgagtgtgtgtttgtgccgatgagaatactgagtatgtggaaggcagcagaacggactggtgaggcgcacagctcaggaattagactgcctgggttccaatcctggctctgtggcttgctagctatgtgaacttgagcaaattaccctcattaaacaagagttttcttccttgtaaattacatctgtcatggtttcttggagggcccacttgtatcctcttgttcttcatttattgagcacctactacatgcaaggcactgtactgggcatgagaaacatatagaggcaagaaagagataccaagatgccatctgtgtcttggttagcagagctggaccagtggtgccctggagggatgagccagctgcagctgggctctgtggttgacttatgggcccagccagccagactcaggccatggctcccctttttcttcctcaccctgatttcttgcttattcactggagtcctcctgaagaggaactgggcctgttgtactttctgtaccatttatttgttcccaatgtttatagtaataaaggcaccgctgatggggacctc

SEQ ID NO: 22245 - DNA, 5185 bp, Macaca Mulatta
  misc_feature (1)...(5185): n = A,T,C or G
taaaatattgtatattgacagcaatatcccagtggctgatttattgataatatctttgaccnnnnnnnnnnnnnnnnnnnnnnnnnnnnnnnnnnnnnnnnnnnnnnnnnnnnnnnnnnnnnnnnnnnnnnnnnnnnnnnnnnnnnnnnnnnnnnnnnnnnnnnnnnnnnnnnnnnnnnnnnnnnnnnnnnnnnnnnnnnnnnnnnnagctttatcttatcaagctttggcattgaagaccatgtgaattcatctacaaccctggtagtgaaataagaacattttttgtttctgaaattttaagctctttgcggacacactttttacttaatctgcatgacatcagagaaaggnagggaacaatttgaccaaagaaagaagaaaaagtggattagcagatctcatggaccgacagtctctggatggtaggagatccatttagcagaaataaaaatgagaatacaatgtttctgatgtatttaatttggagaaaaacattttcatgttctttcaataaacaaagttaatcacattacattttacttctggtaaaagaatattaattaaattgattatgttcacattagagaacaatataacatatcatagtcaaataacatttatgtttatattcattattacaagcactaaaaggaaataaatagtgttgtggcaaatactacttaaacaggcagagtctcccatatctggaaatttatcatctatactgctagagagagttaagaatattttaatagtatttaattaactaaaatttaagagattattgctttcagccatttaaaaattattaattgaacnnnnnnnnnnnnnnnnnnnnnnnnnnnnnnnnnnnnnnnnnnnnnnnnnnnnnnnnnnnnnnnnnnnnnnnnnnnnnnnnnnnnnnnnnnnnnnnnnnnnnnnnnnnnnnnnnnnnnnnnnnnnnnnnnnnnnnnnnnnnnnnnnnnnnnnnnnnnnnnnnnnnnnnnnnnnnnnnnnnnnnnnnnnnnnnnnnnnnnnnnnnnnnnnnnnnnnnnnnnnnnnnnnnnnnnnnnnnnnnnnnnnnnnnnnnnnnnnnnnnnnnnnnnnnnnnnnnnnnnnnnnnnnnnnnnnnnnnnnnnnnnnnnnnnnnnnnnnnnnnnnnnnnnnnnnnnnnnnnnnnnnnnnnnnnnnnnnnnnnnnnnnnnnnnnnnnnnnnnnnnnnnnnnnnnnnnnnnnnnnnnnnnnnnnnnnnnnnnnnnnnnnnnnnnnnnnnnnnnnnnnnnnnnnnnnnnnnnnnnnnnnnnnnnnnnnnnnnnnnnnnnnnnnnnnnnnnnnnnnnnnnnnnnnnnnnnnnnnnnnnnnnnnnnnnnnnnnnnnnnnnnnnnnnnnnnnnnnnnnnnnnnnnnnnnnnnnnnnnnnnnnnnnnnnnnnnnnnnnnnnnnnnnnnnnnnnnnnnnnnnnnnnnnnnnnnnnnnnnnnnnnnnnnnnnnnnnnnnnnnnnnnnnnnnnnnnnnnnnnnnnnnnnnnnnnnnnnnnnnnnnnnnnnnnnnnnnnnnnnnnnnnnnnnnnnnnnnnnnnnnnnnnnnnnnnnnnnnnnnnnnnnnnnnnnnnnnnnnnnnnnnnnnnnnnnnnnnnnnnnnnnnnnnnnnnnnnnnnnnnnnnnnnnnnnnnnnnnnnnnnnnnnnnnnnnnnnnnnnnnnnnnnnnnnnnnnnnnnnnnnnnnnnnnnnnnnnnnnnnnnnnnnnnnnnnnnnnnnnnnnnnnnnnnnnnnnnnnnnnnnnnnnnnnnnnnnnnnnnnnnnnnnnnnnnnnnnnnnnnnnnnnnnnnnnnnnnnnnnnnnnnnnnnnnnnnnnnnnnnnnnnnnnnnnnnnnnnnnnnnnnnnnnnnnnnnnnnnnnnnnnnnnnnnnnnnnnnnnnnnnnnnnnnnnnnnnnnnnnnnnnnnnnnnnnnnnnnnnnnnnnnnnnnnnnnnnnnnnnnnnnnnnnnnnnnnnnnnnnnnnnnnnnnnnnnnnnnnnnnnnnnnnnnnnnnnnnnnnnnnnnnnnnnnnnnnnnnnnnnnnnnnnnnnnnnnnnnnnnnnnnnnnnnnnnnnnnnnnnnnnnnnnnnnnnnnnnnnnnnnnnnnnnnnnnnnnnnnnnnnnnnnnnnnnnnnnnnnnnnnnnnnnnnnnnnnnnnnnnnnnnnnnnnnnnnnnnnnnnnnnnnnnnnnnnnnnnnnnnnnnnnnnnnnnnnnnnnnnnnnnnnnnnnnnnnnnnnnnnnnnnnnnnnnnnnnnnnnnnnnnnnnnnnnnnnnnnnnnnnnnnnnnnnnnnnnnnnnnnnnnnnnnnnnnnnnnnnnnnnnnnnnnnnnnnnnnnnnnnnnnnnnnnnnnnnnnnnnnnnnnnnnnnnnnnnnnnnnnnnnnnnnnnnnnnnnnnnnnnnnnnnnnnnnnnnnnnnnnnnnnnnnnnnnnnnnnnnnnnnnnnnnnnnnnnnnnnnnnnnnnnnnnnnnnnnnnnnnnnnnnnnnnnnnnnnnnnnnnnnnnnnnnnnnnnnnnnnnnnnnnnnnnnnnnnnnnnnnnnnnnnnnnnnnnnnnnnnnnnnnnnnnnnnnnnnnnnnnnnnnnnnnnnnnnnnnnnnnnnnnnnnnnnnnnnnnnnnnnnnnnnnnnnnnnnnnnnnnnnnnnnnnnnnnnnnnnnnnnnnnnnnnnnnnnnnnnnnnnnnnnnnnttgtgaaggtgaagatcgccataagagacatcaatgacaatgccccacagttccctgtttcccaaatctcggtgtgggtcccggaaaatgcacctgtaaacacccgattggccatagagcatcctgctgtggacccagatgtaggcattaatggggtacagacctatcgcttactggactaccatggtatgttcaccctggacgtggaggaaaatgagaacggggagcgcaccccctacctaattgtcatgggtgctttggacagggaaacccaggaccaatatgtgagcatcatcatagctgaggatggtggatctccaccacttttgggcagtgccaccctcaccattggcataagtgacattaatgacaattgccctctcttcgcagactaacaaatcaatgtcactgtgtatgggaatgctacagtgggcaccccaattgcaaaaaaaacaggctgtggataaagacttggggaccaatgctcaaattacttattcttacagtcagaaagttccacaagcatctaaggatttatttcacctggatgaaaacactggagtcattaaacttttcaataagattgggggaagtgttctgcagtctcacaagctcaccatccttgctaatggaccaggctgcatccctgctgtaatcactgctcttgtctcttttagaaaagttattttcagaccccctgagattgtcccnnnnnnnnnnnnnnnnnnnnnnnnnnnnnnnnnnnnnnnnnnnnnnnnnnnnnnnnnnnnnnnnnnnnnnnnnnnnnnnnnnnnnnnnnnnnnnnnnnnnnnnnnnnnnnnnnnnnnnnnnnnnnnnnnnnnnnnnnnnnnnnnnnnnnnnnnnnnnnnnnnnnnnnnnnnnnnnnnnnnnnnnnnnnnnnnnnnnnnnnnnnnnnnnnnnnnnnnnnnnnnnnnnnnnnnnnnnnnnnnnnnnnnnnnnnnnnnnnnnnnnnnnnnnnnnnnnnnnnnnnnnnnnnnnnnnnnnnnnnnnnnnnnnnnnnnnnnnnnnnnnnnnnnnnnnnnnnnnnnnnnnnnnnnnnnnnnnnnnnnnnnnnnnnnnnnnnnnnnnnnnnnnnnnnnnnnnnnnnnnnnnnnnnnnnnnnnnnnnnnnnnnnnnnnnnnnnnnnnnnnnnnnnnnnnnnnnnnnnnnnnnnnnnnnnnnnnnnnnnnnnnnnnnnnnnnnnnnnnnnnnnnnnnnnnnnnnnnnnnnnnnnnnnnnnnnnnnnnnnnnnnnnnnnnnnnnnnnnnnnnnnnnnnnnnnnnnnnnnnnnnnnnnnnnnnnnnnnnnnnnnnnnnnnnnnnnnnnnnnnnnnnnnnnnnnnnnnnnnnnnnnnnnnnnnnnnnnnnnnnnnnnnnnnnnnnnnnnnnnnnnnnnnnnnnnnnnnnnnnnnnnnnnnnnnnnnnnnnnnnnnnnnnnnnnnnnnnnnnnnnnnnnnnnnnnnnnnnnnnnnnnnnnnnnnnnnnnnnnnnnnnnnnnnnnnnnnnnnnnnnnnnnnnnnnnnnnnnnnnnnnnnnnnnnnnnnnnnnnnnnnnnnnnnnnnnnnnnnnnnnnnnnnnnnnnnnnnnnnnnnnnnnnnnnnnnnnnnnnnnnnnnnnnnnnnnnnnnnnnnnnnnnnnnnnnnnnnnnnnnnnnnnnnnnnnnnnnnnnnnnnnnnnnnnnnnnnnnnnnnnnnnnnnnnnnnnnnnnnnnnnnnnnnnnnnnnnnnnnnnnnnnnnnnnnnnnnnnnnnnnnnnnnnnnnnnnnnnnnnnnnnnnnnnnnnnnnnnnnnnnnnnnnnnnnnnnnnnnnnnnnnnnnnnnnnnnnnnnnnnnnnnnnnnnnnnnnnnnnnnnnnnnnnnnnnnnnnnnnnnnnnnnnnnnnnnnnnnnnnnnnnnnnnnnnnnnnnnnnnnnnnnnnnnnnnnnnnnnnnnnnnnnnnnnnnnnnnnnnnnnnnnnnnnnnnnnnnnnnnnnnnnnnnnnnnnnnnnnnnnnnnnnnnnnnnnnnnnnnnnnnnnnnnnnnnnnnnnnnnnnnnnnnnnnnnnnnnnnnnnnnnnnnnnnnnnnnnnnnnnnnnnnnnnnnnnnnnnnnnnnnnnnnnnnnnnnnnnnnnnnnnnnnnnnnnnnnnnnnnnnnnnnnnnnnnnnnnnnnnnnnnnnnnnnnnnnnnnnnnnnnnnnnnnnnnnnnnnnnnnnnnnnnnaatttggaagtcagattccactgaaaggaaaaattgacttgcacatgcgagagagaaagccaatggatatttctaatatttgatatttcatggtggaataacacggagaaatgttttaactgactttggatcttcatcacctaaaaaaggagcgtgttgatggcagttacaatgaaggacgactaatttataacttgttctatattgtaaatagctgtttacaggtttttaaatttaaattcagaggttataaaatgtgtacagcatttttaagtgaaaattagtactaacagccataggact

SEQ ID NO: 22246 - DNA, 904 bp, Macaca Mulatta
gacgaggacttttctcctctggagttaactttttgctgtaaacagaataaaatttaacaaattagggggtagaaaggagcagtggtgtcgttcaccataagagtgtgcatagcactaagcagtgtgccctgctgtgtcttggaccctgcccctgacaggagttgtacagtccctggccctgttccctacctcctcttttcaccccagttacgctgttttcaatgtaatgctgccgtccttctcttgcactgccttctgcgctaacacctccattcctgtttataaccgtgtatttattacttaatgtatataatgtaatgttttgtaagttattaatttatatatctaacattgcctgccaatggtggtgttaaatttgtgtagaaaactctgcctaagagttacgactttttcttgtaatgttttgtattgtgtattatataacccaaacatcacttaggagagacatacggcccccttggcagagaggacaggggtgggcttttgttcacagggtctgccctttccctgcctgagttgctacttctgcacaacccctttatgaaccagttttggaaacaagattctcacattagatgctaaatggtttatactgagcttttacttttgtatagcttgataggggcagggggcaatgggatgtagtttttacccaggttctatccaaatctgtgtgggcatgagttgggttataactgaagtctactatccatgtggctttggttcaaaaaacaacactacattgctcgcagatgatgctctgaatgtcccaaatattgatttgagaagtaactctgctgccatagagaagttggtccatcttcaagaacatgacacggcttctaaaggacggtgcatggaaaacttctaagtgtcagggaag

SEQ ID NO: 22247 - DNA, 414 bp, Macaca Mulatta
  misc_feature (1)...(414): n = A,T,C or G
tcagggcaggtcgggcctaggccagcccccgtgcaggaagagtccccttcctctgaagcaaagagcagaggacccaccccaccagccacgggcccacgggatgccagacctcctggaaggagcagccagccatctccaacagcagtgccagcctctgacagccctcccaccaagcaagnagaggtgaagaaggcaggagagagacacaagctggcaaaggagcggcgagaagagcgggccaagtacctggnnnnnnnnnnnnnnnnnnnnnnnnnnnnnnnnnnnnnnnnnnnnnnnnnnnnnnnnnnncagctccaggagcgccggcgccggctggaggagcaacgtcttaaagccgagcaacgtcgtgcagccctggaggaacggcagcggcagaagctcgagaaaaacaag

SEQ ID NO: 22248 - DNA, 536 bp, Macaca Mulatta
  misc_feature (1)...(536): n = A,T,C or G
agcaagatgaagcccaacatcatcttcgtactttctctgctcctcatcttggagaggcaagcagctgtgatgggacaaaaaggtgnaggtggatcaaaaggccagttaccaagtggatcttcccaatttccacaaagacaaaagggccagcactattctggacaaaaagacaaacaacatactgaatccaaaggcagtttttctattcaacacacatatcatgtagatgccaatgatcgtgaccggacccgaaaaagtcagcagtattattcgaatgcccaacataaaacgacaaaatcagaacaacacctacgtggaagtcaagaactgctcaattataaactagaaggcagagacagtgctaaatcaaaaggtcattttcatgtgatagttatacatcataaaggaggccaagatcatcatgggacacaaaatccttctcaagatcaggggaatagcccatctggaaagggaatatccagtcaatattcaaacacagaagaaaggctacgggttcgtgactaagtaaagaacaa

SEQ ID NO: 22249 - DNA, 2145 bp, Macaca Mulatta
  misc_feature (1)...(2145): n = A,T,C or G
atggcggctgcgccggcgctaaagcactggcgcaccannnnnnnnnnnnnnnnnnnnnnnnnnnnnnnnnnnnnnnnnnnnnnnnnnnnnnnnnnngcaggctttttggggccagctgccctgtggctgcgctctccagcttcctgacgccagataggcttccctaccaggaggcagtccagcgggacttccgcccagcacaggtcggctgcagcttcggacccaatggtggacctgctggttccgggtggaactgaccatcccagaggcatgggtaggccaggaagttcacctttgctgggaaagtgatggagaaggtctggtgtggcgtgatggggaacctgtccagnnnnnnnnnnnnnnnnnnnnnnnnnnnnnnnnnnnnnnnnnnnnnnnnnnnnnnnnnnnnnnnnnnnngcctcaccctctatgtggaagtagcctgcaatgggctcctgggggccgggaagggaagcatcattgcagcccctgatcctgagaagatgttccagctgagccgggctgagctggctgtgttccaccgagatgtccacatgctcctggtggatctggagctgctgctgggcatagccaaggnagggcctcgggaaggacaaccagcgcagctttcaggccctgtacacagccaaccagatggtgaacgtctgtgaccctgcccagcccgagaccttcccagtggcccaggccctggcctccaggttctttggccaacgtggaggtgaaagccaacacaccattcatgccacagggcactgccacattgatacagnctgcnnnnnnnnnnnnnnnnnnnnnnnnnnnnnnnnnnnnnnnnnnnnnnnnnnnnnnnnnnnnnnnnnnnnnnnnnnnnnnnnnnnnnnnnnnnnnnnnnnnnnnnnnnnnnnnnnnnnnnnnnnnnnnnnnnnnnnnnnnnnnnnnnnnnnnnnnnnnnnnnnnnnnnnnnnnnnnnnnnnnnnnnnnnnnnnnnnnnnnnnnnnnnnnnnnnnnnnnnnnnnnnnnnnnnnnnnnnnnnnnnnnnnnnnnnnnnnnnnnnnnnnnnnnnnnnnnnnnnnnnnnnnnnnnnnnnnnnnnnnnnnnnnnnnnnnnnnnnnnnnnnnnnnnnnnnnnnnnnnnnnnnnnnnnnnnnnnnnnnnnnnnnnnnnnnnnnnnnnnnnnnnnnnnnnnnnnnnnnnnnnnnnnnnnnnnnnnnnnnnnnnnnnnnnnnnnnnnnnnnnnnnnnnnnnnnnnnnnnnnnnnnnnnnnnnnnnnnnnnnnnnnnnnnnnnnnnnnnnnnnnnnnnnnnnnnnnnnnnnnnnnnnnnnnnnnnnnnnnnnnnnnnnnnnnnnnnnnnnnnnnnnnnnnnnnnnnnnnnnnnnnnnnnnnnnnnnnnnnnnnnnnnnnnnnnnnnnnnnnnnnnnnnnnnnnnnnnnnnnnnnnnnnnnnnnnnnnnnnnnnnnnnnnnnnnnnnnnnnnnnnnnnnnnnnnnnnnnnnnnnnnnnnnnnnnnnnnnnnnnnnnnnnnnnnnnnnnnnnnnnnnnnnnnnnnnnnnnnnnnnnnnnnnnnnnnnnnnnnnnnnnnnnnnnnnnnnnnnnnnnnnnnnnnnnnnnnnnnnnnnnnnnnnnnnnnnnnnnnnnnnnnnnnnnnnnnnnnnnnnnnnnnnnnnnnnnnnnnnnnnnnnnnnnnnnnnnnnnnnnnnnnnnnnnnnnnnnnnnnnnnnnnnnnnnnnnnnnnnnnnnnnnnnnnnnnnnnnnnnnnnnnnnnnnnnnnnnnnnnnnnnnnnnnnnnnnnnnnnnnnnnnnnnnnnnnnnnnnnnnnnnnnnnnnnnnnnnnnnnnnnnnnnnnnnnnnnnnnnnnnnnnnnnnnnnnnnnnnnnnnnnnnnnnnnnnnnnnnnnnnnnnnnnnnnnnnnnnnnnnnnnnnnnnnnnnnnnnnnnnnnnnnnnnnnnnngccctggtgacggtgcccagcatgggctatgctcctgttcctccccccacctcactgcagcccctgctgccccagcagcctgtgttcgtactgcaagagnagactgatggctccgtgactctggacaatggcatcatccgagtgaagctggacccgactggccgcctgacatccttggtcctggtggcctctggcagg

SEQ ID NO: 22250 - DNA, 812 bp, Macaca Mulatta
  misc_feature (1)...(812): n = A,T,C or G
gagctgagccggcgagctaacccgagccatccggcgggcgtcccggaggcggcggcacagggaggggcccaacgcgcgcacgtggccccggcggccgccannnnnnnnnnnnnnnnnnnnnnnnnnnnnnnnnnnnnnnnnnnnnnnnnnnnnnnnnnnnnnnnnnnnnnnnnnnnnnnnnnnnnnnnnnnnnnnnnnnnnnnnnnnnnnnnnnnnnnnnnnnnnnnnnnnnnnnnnnnnnnnnnnnnnnnnnnnnnnnnnnnnnnnnnnnnnnnnnnnnnnnnnnnnnnnnnnnnnnnnnnnnnnnnnnnnnnnnnnnnnnnnnnnnnnnnnnnnnnnnnnnnnnnnnnnnnnnnnnnnnnnnnnnnnnnnnnnnnnnnnnnnnnnnnnnnnnnnnnnnnnnnnnnnnnnnnnnnnnnnnnnnnnnnnnnnnnnnnnnnnnnnnnnnnnnnnnnnnnnnnnnnnnnnnnnnaggccttcatctctggcctgctggacaagatccggggcatgcagaagctgagcacaccgcagaagaagtgagggtccccgacccaggcgaacggcggctcccacaggacaatcgctgccccctgacctcgtagcaacagcaataccgggggaccctgcggccaggcctggtgccatgagcagggctcctcgtgcccctggcccaggggtctcttcccctgccccctcagttttccacttttggggttttttattgttattaaactgatgggactttttgtgtttttatattgactctgcagcgcgggcccgttaataaagctaggagatgcctttggtgc

SEQ ID NO: 22251 - DNA, 746 bp, Macaca Mulatta
  misc_feature (1)...(746): n = A,T,C or G
gcaacctctgtcagtagtctgtctgaatctttaccagttcaatgcacagatggcagtgtcccagaagcccagtcaacattagactctacatcttcatctatgcagcnnnnnnnnnnnnnnnnnnnnnnnnnnnnnnnnnnnnnnnnnnnnnnnnnnnnnnnnnnnnnnnnnnnnnnnnnnnnnnnnnnnnnnnnnnnnnnnnnnnnnnnnnnnnnnnnnnnnnnnnnnnnnnnnnnnnnnnnnnnnnnnnnnnnnnnnnnnnnnnnnnnnnnnnnnnnnnnnnnnnnnnnnnnnnnnnnnnnnnnnnnnnnnnnnnnnnnnnngggtttgaatgccggtgtggaaatgtttactgtggtgtacaccgttactcagatgtacacaattgctcttacaattacaaagctgatgctgctgagaaaatcagaaaagaaaatccagtagttgttggcgaaaagatccaaaagatttgaactcctgctggaatacaaaatccttgagcatctgcaaactaaaaattgacttgaggttttttttttcctagtcattgggaatgtagagcagtgtgtcttgcatgtcatcggaagaatagnnnnnnnnnnnnnnnnnnnnnnnaaatgactctgaacatttatttccattgcaatttctgtggctgagaagacttaaacgttacaagtattatccttttaagatcattttaattttagttgagtgcagagggcttttataacaaatgtgcagaa

SEQ ID NO: 22252 - DNA, 378 bp, Macaca Mulatta
taaaggatgtgtttctgaagaagttggttttagagggaaaggttcaacaaatagggagaatccaaggtttctgctttcagtttcttggcttgatagcctctaagtgaatctgaatgctctgctgaataatttcatggcctctgctcacgcctgtcgaatatgaaattggaagggcccttttcaggctgggttccctgtgggtctttgcttagtaaatgcctgttgatggttttgcaagagagttcagcagctcaacagtaatgaaagtgaagaacagagtcctttttccttcctggggccattggggatgacattcaagatacttgccagcctctccagtgtgggcaccagctggccagaacagatgcgagcagtcca

SEQ ID NO: 22253 - DNA, 1713 bp, Macaca Mulatta
  misc_feature (1)...(1713): n = A,T,C or G
catgtattcgatgggaagacagctggatgggatttaatgcgaggctttcttatgtgtacttaattaccaaaaatctttaaaaactcatactctgcgtggcttgtggaggttgttaaagtagcgagattttgaagctaaatacattttaaagcttannnnnnnnnnnnnnnnnnnnnnnnnacatataatcaatcaaaaatgcctgaagcaaactatttactgtcagtgtcttggggctacataaannnnnnnnnnnnnnnnnnnnnnnnnnnnnnnnnnnnnnnnnnnnnnnnnnnnnnnnnnnnnnnnnnnnnnnnnnnnnnnnnnnnnnnnnnnngataagcaacatgaagtggaaattccttctccaactcagaaggaaaaggagaaaaagaaaagaccaatgtctcagatcagtggagtcaagaaattgatgcacagctctagcctgactaattcaagtattccaaggtttggagttaaaactgaacaagaagatgtccttgccaaggnnnggaactagaagatgtgaacaaatggggtcttcatgttttcagaatagcagagttgtctggtaaccggcccttgactgttatcatgcacaccatttttcaggnnnnnnnnnnttttccaggccgtgtttacagatttggagattcttgcagcaatttttgccagtgcaatacatgatgtagatcatcctggtgtgtccaatcaatttctgatcaatacaannnnnnnnnnnnnnnnnnnnnnnnnnnnnnnnnnnnnnnnnnnnnnnnnnnnnnnnnnnnnnnnnnnnnnnnnnnnnnnnnnnnnnnnnnnnnnnnnnnnnnnnnnnnnnnnnnnnnnnnnnnnnnnnnnnnnnnnnnnnnnnnnnnnnnnnnnnnnnnnnnnnnnnnnnnnnnnnnnnnnnnnnnnnnnnnnnnnnnnnnnnnnnnnnnnnnnnnnnnnnnnnnnnnnnnnnnnnnnnnnnnnnnnnnnnnnnnnnnnnnnnnnnnnnnnnnnnnnnnnnnnnnnnnnnnnnnnnnnnnnnnnnnnnnnnnnnnnnnnnnnnnnnnnnnnnnnnnnnnnnnnnnnnnnnnnnnnnnnnnnnnnnnnnnnnnnnnnnnnnnnnnnnnnnnnnnnnnnnnnnnnnnnnnnnnnnnnnnnnnnnnnnnnnnnnnnnnnnnnnnnnnnnnnnnnnnnnnnnnnnnnnnnnnnnnnnnnnnnnnnnnnnnnnnnnnnnnnnnnnnnnnnnnnnnnnnnnnnnnnnnnnnnnnnnnnnnnnnnnnnnnnnnnnnnnnnnnnnnnnnnnnnnnnnnnnnnnnnnnnnnnnnnnnnnnnnnnnnnnnnnnnnnnnnnnnnnnnnnnnnnnnnnnnnnnnnnnnnnnnnnnnnnnnnnnnnnnnnnnnnnnnnnnnnnnnnnnnnnnnnnnnnnnnnnnnnnnnnnnnnnnnnnnnnnnnnnnnnnnnnnnnnnnnnnnnnnnnnnnnnnnnnnnnnnttgtactcaagactcggagtctactgaacttcccctcgatgaacaggttgaagaggaggcagtaggggaagaagaggaaagccatcctgaagcctgtgtcatagatgatcgttctcctgacacgtaacagtgcaaaaactttcatgccnnnnnnnnnnnnnnnngaaaaattgtttccaaagtgcatgtcacatgccacaaccacggtcacacctcactgtcatctgcc

SEQ ID NO: 22254 - DNA, 8347 bp, Macaca Mulatta
  misc_feature (1)...(8347): n = A,T,C or G
gttctaagaacggaagcatctgggctgaatggaatttagcatcaagcannnnnnnnnnnnnnnnnnnnnnnnnnnnnnnnnnnnnnnnnnnnnnnnnnnnnnnnnnnnnnnnnnnnnnnnnnnnnnnnnnnnnnnnnnnnnnnnnnnnnnnnnnnnnnnnnnnnnnnnnnnnnnnnnnnnnnnnnnnnnnnnnnnnnnnnnnnnnnnnnnnnnnnnnnnnnnnnnnnnnnnnnnnnnnnnnnnnnnnnnnnnnnnnnnnnnnnnnnnnnnnnnnnnnnnnnnnnnnnnnnnnnnnnnnnnnnnnnnnnnnnnnnnnnnnnnnnnnnnnnnnnnnnnnnnnnnnnnnnnnnnnnnnnnnnnnnnnnnnnnnnnnnnnnnnnnnnnnnnnnnnnnnnnnnnnnnnnnnnnnnnnnnnnnnnnnnnnnnnnnnnnnnnnnnnnnnnnnnnnnnnnnnnnnnnnnnnnnnnnnnnnnnnnnnnnnnnnnnnnnnnnnnnnnnnnnnnnnnnnnnnnnnnnnnnnnnnnnnnnnnnnnnnnnnnnnnnnnnnnnnnnnnnnnnnnnnnnnnnnnnnnnnnnnnnnnnnnnnnnnnnnnnnnnnnnnnnnnnnnnnnnnnnnnnnnnnnnnnnnnnnnnnnnnnnnnnnnnnnnnnnnnnnnnnnnnnnnnnnnnnnnnnnnnnnnnnnnnnnnnnnnnnnnnnnnnnnnnnnnnnnnnnnnnnnnnnnnnnnnnnnnnnnnnnnnnnnnnnnnnnnnnnnnnnnnnnnnnnnnnnnnnnnnnnnnnnnnnnnnnnnnnnnnnnnnnnnnnnnnnnnnnnnnnnnnnnnnnnnnnnnnnnnnnnnnnnnnnnnnnnnnnnnnnnnnnnnnnnnnnnnnnnnnnnnnnnnnnnnnnnnnnnnnnnnnnnnnnnnnnnnnnnnnnnnnnnnnnnnnnnnnnnnnnnnnnnnnnnnnnnnnnnnnnnnnnnnnnnnnnnnnnnnnnnnnnnnnnnnnnnnnnnnnnnnnnnnnnnnnnnnnnnnnnnnnnnnnnnnnnnnnnnnnnnnnnnnnnnnnnnnnnnnnnnnnnnnnnnnnnnnnnnnnnnnnnnnnnnnnnnnnnnnnnnnnnnnnnnnnnnnnnnnnnnnnnnnnnnnnnnnnnnnnnnnnnnnnnnnnnnnnnnnnnnnnnnnnnnnnnnnnnnnnnnnnnnnnnnnnnnnnnnnnnnnnnnnnnnnnnnnnnnnnnnnnnnnnnnnnnnnnnnnnnnnnnnnnnnnnnnnnnnnnnnnnnnnnnnnnnnnnnnnnnnnnnnnnnnnnnnnnnnnnnnnnnnnnnnnnnnnnnnnnnnnnnnnnnnnnnnnnnnnnnnnnnnnnnnnnnnnnnnnnnnnnnnnnnnnnnnnnnnnnnnnnnnnnnnnnnnnnnnnnnnnnnnnnnnnnnnnnnnnnnnnnnnnnnnnnnnnnnnnnggtggtggctgaccacccacatgcttcaggtgaggagattgaagagctgctcaagtcacagtggagtctgctgagtgataagcagagagcgcgctataacaccaagtttgccctggtggcccctgtccaggctgaagaacactctggtnnnnnnnnnnnnnnnnnnnnnnnnnnnnnnnnnnnnnnnnnnnnnnnnnnnnnnnnnnnnnnnnnnnnnnnnnnnnnnnnnnnnnnnnnnnnnnnnnnnnnnnnnnnnnnnnnnnnnnnnnnnnnnnnnnnnnnnnnnnnnnnnnnnnnnnnnnnnnnnnnnnnnnnnnnnnnnnnnnnnnnnnnnnnnnnnnnnnnnnnnnnnnnnnnnnnnnnnnnnnnnnnnnnnnnnnnnnnnnnnnnnnnnnnnnnnnnnnnnnnnnnnnnnnnnnnnnnnnnnnnnnnnnnnnnnnnnnnnnnnnnnnnnnnnnnnnnnnnnnnnnagcttttgtgggagcccacaccagtcaagttggatttgaacccagctgccctgtactgcacttagaatgatgtaatattccaggatgctgctgcaggtggcgtatcatcgtacacactcagtgacatttctatcacaatcattttatggaagatgtgtgataatctgtttttactggtattaataaacacatacaatgaagaaaacagataacaaattttaagaccaaggtaagatacctaatcaaggcaatttaatcaatcacattnnnnnnnnnnnnnnnnnnnnnnnnnnnnnnnnnnnnnnnnnnnnnnnnnnnnnnnnnnnnnnnnnnnnnnnnnnnnnnnnnnnnnnnnnnnnnnnnnnnnnnnnnnnnnnnnnnnnnnnnnnnnnnnnnnnnnnnnnnnnnnnnnnnnnnnnnnnnnnnnnnnnnnnnnnnnnnnnnnnnnnnnnnnnnnnnnnnnnnnnnnnnnnnnnnnnnnnnnnnnnnnnnnnnnnnnnnnnnnnnnnnnnnnnnnnnnnnnnnnnnnnnnnnnnnnnnnnnnnnnnnnnnnnnnnnnnnnnnnnnnnnnnnnnnnnnnnnnnnnnnnnnnnnnnnnnnnnnnnnnnnnnnnnnnnnnnnnnnnnnnnnnnnnnnnnnnnnnnnnnnnnnnnnnnnnnnnnnnnnnnnnnnnnnnnnnnnnnnnnnnnnnnnnnnnnnnnnnnnnnnnnnnnnnnnnnnnnnnnnnnnnnnnnnnnnnnnnnnnnnnnnnnnnnnnnnnnnnnnnnnnnnnnnnnnnnnnnnnnnnnnnnnnnnnnnnnnnnnnnnnnnnnnnnnnnnnnnnnnnnnnnnnnnnnnnnnnnnnnnnnnnnnnnnnnnnnnnnnnnnnnnnnnnnnnnnnnnnnnnnnnnnnnnnnnnnnnnnnnnnnnnnnnnnnnnnnnnnnnnnnnnnnnnnnnnnnnnnnnnnnnnnnnnnnnnnnnnnnnnnnnnnnnnnnnnnnnnnnnnnnnnnnnnnnnnnnnnnnnnnnnnnnnnnnnnnnnnnnnnnnnnnnnnnnnnnnnnnnnnnnnnnnnnnnnnnnnnnnnnnnnnnnnnnnnnnnnnnnnnnnnnnnnnnnnnnnnnnnnnnnnnnnnnnnnnnnnnnnnnnnnnnnnnnnnnnnnnnnnnnnnnnnnnnnnnnnnnnnnnnnnnnnnnnnnnnnnnnnnnnnnnnnnnnnnnnnnnnnnnnnnnnnnnnnnnnnnnnnnnnnnnnnnnnnnnnnnnnnnnnnnnnnnnnnnnnnnnnnnnnnnnnnnnnnnnnnnnnnnnnnnnnnnnnnnnnnnnnnnnnnnnnnnnnnnnnnnnnnnnnnnnnnnnnnnnnnnnnnnnnnnnnnnnnnnnnnnnnnnnnnnnnnnnnnnnnnnnnnnnnnnnnnnnnnnnnnnnnnnnnnnnnnnnnnnnnnnnnnnnnnnnnnnnnnnnnnnnnnnnnnnnnnnnnnnnnnnnnnnnnnnnnnnnnnnnnnnnnnnnnnnnnnnnnnnnnnnnnnnnnnnnnnnnnnnnnnnnnnnnnnnnnnnnnnnnnnnnnnnnnnnnnnnnnnnnnnnnnnnnnnnnnnnnnnnnnnnnnnnnnnnnnnnnnnnnnnnnnnnnnnnnnnnnnnnnnnnnnnnnnnnnnnnnnnnnnnnnnnnnnnnnnnnnnnnnnnnnnnnnnnnnnnnnnnnnnnnnnnnnnnnnnnnnnnnnnnnnnnnnnnnnnnnnnnnnnnnnnnnnnnnnnnnnnnnnnnnnnnnnnnnnnnnnnnnnnnnnnnnnnnnnnnnnnnnnnnnnnnnnnnnnnnnnnnnnnnnnnnnnnnnnnnnnnnnnnnnnnnnnnnnnnnnnnnnnnnnnnnnnnnnnnnnnnnnnnnnnnnnnnnnnnnnnnnnnnnnnnnnnnnnnnnnnnnnnnnnnnnnnnnnnnnnnnnnnnnnnnnnnnnnnnnnnnnnnnnnnnnnnnnnnnnnnnnnnnnnnnnnnnnnnnnnnnnnnnnnnnnnnnnnnnnnnnnnnnnnnnnnnnnnnnnnnnnnnnnnnnnnnnnnnnnnnnnnnnnnnnnnnaacctcaaaataatggtgatacattctagccttaagacatttgaattgccggttgttgagatgaattttggttgtcatacatggaaccatnttagtcccatttgactcgcttcggacaccacaccatgtctgtgcctggcgaggggaggtggctctctagtgtaaaacttgaggcattcacaagaggcgaaaacttgtcagaatatatagaagattagattgtagctgttctaaaaatgtaagtactccattgtaatagggtggcatcttgaggtagtgcacgtattggcaatagaggtcctgaattgtttttctaagactgatctgagagccactggaccatcaagcctttatatatctgcttctaaaattgccccacctgctctagatggatctgtgggcctttcctcagtgttcatgcaaaaattaaatgtcttttttcagtcatacggactctaggtgtagttgcatctcagtgctatcttgagtatacattttatttcttatacctgtatctcccaactagaaacagctccagtgtttttaagagactgttccttaaaaccagtaggaaacttaagtgaggtttcatgacacacaatctttcatatggtgaaaggcacagggtgactgtgtgtgatgtgcagagtcctcggataggagtccgtgggtcttatgtcccactgctgcttcttgagtgggtggagtggtgcttagaggatctccgaagggtccctgcagctctagggggatctgattttgtgttttttgtttaagtacttcacacagaagcctaggtagatttaaaatggggtgctcagggactggggaacaagacgcgggtggggtgggaagatgggcatttggagagtttcatgtagctggagactttaagagctgagcacaccagaggaaaggagggaggatgctgtgtgagagccatgctgtcaggagcaaatttgctgctcccatgctgccctgaccctggccnnnnnnnnnnnnnnnnnnnnnnnnnnnnnnnnnnnnnnnnnnnnnnnnnnnnnnnnnnnnnnnnnnnnnnnnnnnnnnnnnnnnnnnnnnnnnnnnnnnnnnnnnnnnnnnnnnnnnnnnnnnnnnnnnnnnnnnnnnnnnnnnnnnnnnnnnnnnnnnnnnnnnnnnnnnnnnnnnnnnnnnnnnnnnnnnnnnnnnnnnnnnnnnnnnnnnnnnnnnnnnnnnnnnnnnnnnnnnnnnnnnnnnnnnnnnnnnnnnnnnnnnnnnnnnnnnnnnnnnnnnnnnnnnnnnnnnnnnnnnnnnnnnnnnnnnnnnnnnnnnnnnnnnnnnnnnnnnnnnnnnnnnnnnnnnnnnnnnnnnnnnnnnnnnnnnnnnnnnnnnnnnnnnnnnnnnnnnnnnnnnnnnnnnnnnnnnnnnnnnnnnnnnnnnnnnnnnnnnnnnnnnnnnnnnnnnnnnnnnnnnnnnnnnnnnnnnnnnnnnnnnnnnnnnnnnnnnnnnnnnnnnnnnnnnnnnnnnnnnnnnnnnnnnnnnnnnnnnnnnnnnnnnnnnnnnnnnnnnnnnnnnnnnnnnnnnnnnnnnnnnnnnnnnnnnnnnnnnnnnnnnnnnnnnnnnnnnnnnnnnnnnnnnnnnnnnnnnnnnnnnnnnnnnnnnnnnnnnnnnnnnttaaaatcaataggttcatcaccttagttttaaaaaaatctataaacagagtaattgctgaggtttgcagtttatatttgagattataaagctaaattatagtcttttgccagagaaactgaagtaactatcattagaaaaggtttctcaaaatactctcaaagctgttattggcttnnnnnnnnnnnnnnnnnnnnnnnnnnnnnnnnnnnnnnnnnnnnnnnnnnnnnnnnnnnnnnnnnnnnagtctcactctgttgcccaggctggagtgcagtaagtggcacaatctcggctcactgcaacctccgcctccttggttctggcaattctgcctcagcctcccaagtagctgggatacaggcggccgccaccacacctggctaagttttgtatttttagtggagacagggtttcgccatattggccaggctggtcttgaactcctgacctcatgatctgcctgcctcaccctcccaaaatgctgggattacaggcatgagccactgcacctggcggatcttgcttattttaaaagaaatattctgactcatattttaggactttgtgtcaacgaaattgattttgatcactttgggtaccatttttattgttttacctggagtattagaaattaccactaatttacctggcagtgatgtcaaattgactagcaggtagaaaattatttgtattatattcatctgattcctttactggatgagcaaggggcatgcttcctttgggacattctcacagcagggtgtctccccaacagccctcatcttgttggttggatacctttgaactccatggttacgtgttaggtccacatttatgtttttttctagcctacctgtagttgttggcctttttgcatataactctcgggtaatattttgaagcatgctgaccatccaggcatatagaattttcaagaaacgactnnnnnnnnnnnnnnnnnnnnnnnnnnnnnnnnnnnnnnnnnnnnnnnnnnnnnnnnnnnnnnnnnnnnnnnnnnnnnnnnnnnnnnnnnnnnnnnnnnnnnnnnnnnnnnnnnnnnnnnnnnnnnnnnnnnnnnnnnnnnnnnnnnnnnnnnnnnnnnnnnnnnnnnnnnnnnnnnnnnnnnnnnnnnnnnnnnnnnnnnnnnnnnnnnnnnnnnnnnnnnnnnnnnnnnnnnnnnnnnnnnnnnnnnnnnnnnnnnnnnnnnnnnnnnnnnnnnnnnnnnnnnnnnnnnnnnnnnnnnnnnnnnnnnnnnnnnnnnnnnnnnnnnnnnnnnnnnnnnnnnnnnnnnnnnnnnnnnnnnnnnnnnnnnnnnnnnnnnnnnnnnnnnnnnnnnnnnnnnnnnnnnnnnnnnnnnnnnnnnnnnnnnnnnnnnnnnnnnnnnnnnnnnnnnnnnnnnnnnnnnnnnnnnnnnnnnnnnnnnnnnnnnnnnnnnnnnnnnnnnnntcattttaataaatattgttatgaactatagtattttagatgatgagtgactaattttgactaacattttactgtgctgttaacttggaagacctgtttgagattagtcttgatttcacactcatttaatctgctgagcacagggctgttgtcatttgtaaacgcaaacactgtggaggtacttctcgccatcaacttccttctttacaaaagcatcacttcaacatgaaaattatgtcagtttatagaaatatttattgttcaaggtctgtaattgtatttcaaaaacgatgtcgtattcaagttgtgaagggatttgttttgtcnnnnnnnnnnnnntcaatgtgtatgacaccactctgaagagtaggggactgctttgcagtcacagaaggtggcatctgactgcggctcatacaggtcaccctgaagggccatgtgcttttagcagttggctggaatgtgttcactaggttccattatgtttggtaatatcatcttgaaaagtccctgtaatagatcaaggagactgcattccctgccctgaaggaatgtatttctaaggcaaataggcaacttggtactatcttattctgagtagagagtggagaaagtattttcagactgaagaaaactttgaaaagtcaggagctaagctgctcggagctcagtgccgcagcatggctgtggtggacgtgggaagcaacgggaaagttcttgacagtctgtgtctgctcagtccctgcagttttcctttccaaatgcatcccgttggatatggaatagatcgtagatattgtagactgagatttgggactgtgttgggaccgtacaggtgaatgtgccacctccacaaatggcttctccgagtgagtcacgtcacctggtgcgtggaggtggagcctgcggctggagtaaggctcgctgtgggacgccctcgtactttgctctccttgcgggtggttgccgagccgagagcgttggatcctccccgactgtggctagttgtctgtccagtggctgggagggggtgtggtgggaaaaagtcggaatctttacaatctgtgtcatggactgtactattgtaaggtctgtattctgtatgtgggtcccagaccctgatcaggaaatgagcctcatgtgtgtctttaacatttatatatttccattcaaaatatgtattcagtgtttatttcctcaaaacagactttgttaatgtaggaaatctctccaagtggaaacgtgctaactttttctgtaaatctgaaataaaaggtgctgttccttcctctg

SEQ ID NO: 22255 - DNA, 206 bp, Macaca Mulatta
acattgagtacatacggtcacattacaacattgaagatttcatctacttcagtcaccaccagcgcgaagaacacgggcacatgcatcactttgccctcaaccccattttccggcactacaccaagttctttctgaaggagatcctgcgtttaggctttaaatcctgtctctactaccctgtttacccaaaatccagagaaggcaag

SEQ ID NO: 22256 - DNA, 949 bp, Macaca Mulatta
  misc_feature (1)...(949): n = A,T,C or G
gagagcacctgtctcagaaaggcccacatgtgcggccttgcaggactaacccaggttcccttgaggctccagattctacaccaggggcagctactgcgagaacttcaggccaatgtctcagcccaggtgagcggggatctggctcttgctgccacctgtcttggcctcttgctattgcccatcacaccctgctctgtccccaggaaccaggctttgctgaggtgctgcccaacctgacagtccaggagatggactggctggtgctaggggagctacagatggccctggagagggcaggcaggccagggctgcgcatcagtggacacattgctaccaggaagagctgcgacgnnnnnnnnnnnnnnnnnnnnnnnnnnnnnnnnnnnnnnnnnnnnnnnnnnnnnnnnnnnnnnnnnnnnnnnnnnnnnnnnnnnnnnnnnnnnnnnnnnnnnnnnnnnnnnnnnnnnnnnnnnnnnnnnnnnnnnnnnnnnnnnnnnnnnnnnnnnnnnnnnnnnnnnnnnnnnnnnnnnnnnnnnnnnnnnnnnnnnnnnnnnnnnnnnnnnnnnnnnnnnnnnnnnnnnnnnnnnnnnnnnnnnnnnnnnnnnnnnnnnnnnnnnnnnnnnnnnnnnnnnnnnnnnnnnnnnnnnnnnnnnnnnnnnnnnnnnnnnnnnnnnnnnnnnnnnnnnnnnnnnnnnnnnnnnnnnnnnnnnnnnnnnnnnnnnnnnnnnnnnnnnnngctgcctgtgcccctagcaggagccctggtgctaccccctgtgaagagccaggcagcagggcatgcctggctctccctggatacccactgtcacctgcactatgaagtgctgctggctgggcttggtggctcagaacaaggcactgtcactgcccaccttcttgggcctcctggaacgccagggcctcggcggctgctgaagggattctatgg

SEQ ID NO: 22257 - DNA, 175 bp, Macaca Mulatta
gtagccaggcctatacaatgtggtaaccaaaatgctttgagtactacattcaggaagttttctgaccctgttttcttagaaaaacttgatcctaaagtatttgtattaataatagtatgtattaattaatctcactaaaatgaacctcaatcagttttagagcagattttaggcc

SEQ ID NO: 22258 - DNA, 246 bp, Macaca Mulatta
  misc_feature (1)...(246): n = A,T,C or G
agaattttttagacaacttccctagcagtgacaccctgtccttcattgcaaggatattcctgctgttccagatgatgactgtatacccactcttaggctacctggctcgtgtccagcttttgggccatatcttcggtgacatttatcctagnctagcattttccacgtgctgattcttaatctaattattgtgggagctggagtgatcatggcctgtttctacccaaacataggagggatcataag

SEQ ID NO: 22259 - DNA, 803 bp, Macaca Mulatta
  misc_feature (1)...(803): n = A,T,C or G
actggtttaacaactgggctttttcaagaatggtatgataagtttaaaatctgggtttttcctttaaatgcnnnnnnnnnnnnnnnnnnnnnaggtgtagaaaatcggaaggagaagtcccttgggtgggggattacatacattttgcacaagagtatttggtaaaaaatagtttttttttttccacatcctatcggaacaatattaaatactagataaccaagacaattatttcagaaaaacagtctagcaagagtccccttctgtatgtaaaaagcacattataaatatgagaatgcagcacacaaagagatagagcatctcttttacttgaaaggccctgtctgaccttaattacactattctttgaagatttgaaaataaaatgaaagaaaatgctctgcccaaataaaatgtgcatataataggcccaaaacatttaagaaaatgtataaagttcagaatctttaattgaatgttctactttactaataattatgttgcataattttttacttataagattacttagtttttaataatttagaaacttttcagtaagagtaactcatttctaaaaataaaatttagaccattagatttatgttttgataaactttgcagtacaaataaagaaaatcaaaatatttccaaataaatcaagtatcttaattcttgttgatagatctttctttccctgttaattgcagctggcattcctgcacctatatatttcggtgctttaatggattccacatgtttacactggggaactttgaaatgtggtgagtcaggggcatgcc

SEQ ID NO: 22260 - DNA, 547 bp, Macaca Mulatta
catcttacatccgggacagaggcggcgtcccttttccccgccttggcaagcttcgacgtgccaccagaaatcagccccgaaagaggggaccccgattccacgtcaccggagtgctgaggcaacgggcgatgccctccgtcggctcagtggggaaaagtggagtccgaaactttttttggcctttgcccgcaaagaagatggcggcgcataccgccacctaagcggacacgttgtaccctggccgtggtttgaagtttccggcacctcctttcccatccagcaaggacacaatcatacgagccccacccacggggggtggctgctgagctacattccgcagaaaacaggcgggaaggctgcggcacagctcgctttaaacgcaagcttctgggactcgtggttttggctttttctttttaaaccaagttagggagaaggctgactgccatggagccacttctacttttggcccagacaacttacgggattttttttttcctcccatttagagatttttttgtaggaagttaacaaattattttaaaga

SEQ ID NO: 22261 - DNA, 437 bp, Macaca Mulatta
aatacctattttgaatttaaaggagataagaggcataaagtaggatgttcactacagtcataggtagggtttcatctcgtatcttaaaagataaaaggtactattacataacctatacacaaactataggagaaaatatgcttaatttttatttggcagggggctaggttgtatgggagtaaaaaaaagattgagaatttttaaattgtccaaagaaacattttaagactctttaacaaaaaaggccagtagtaaatctctatattaacattactatttattttgttttggaagtgggacatgattctatttgttataaaataaaattgatgtgattgtcactttatttgaataactgtaattcttgttttactgaaagtatgtgcattttcttttcatttatttttaaaagtgcatacagttccatttataaaagc

SEQ ID NO: 22262 - DNA, 767 bp, Macaca Mulatta
gagccagtactctctccccagttcaggctccctctgtaagggagatttgggggctttattggctcagggaacaatggaaggggacataactgggatccctgcttcttgcctaggcatctaataaagtcttgattgtaagtcaggacttgtcttgacctttccagctcctgcaggaaattctgagaatttctaaggttgcattaactaagaagtgtctttctttggttttattttcacacagcagctgagacttatgggccagaagatactggaagatggtgtggccttctcttgcaagaggtaaggagtgagatttgcagttttctgaggctgtgtcatgagggcccagaggaatccaagggaaggagctgcagggatgcactgggtcacctggcggctctgcagctgcatcaacttgtggtgcacctggtgcttctgggggaattgtcctccatttgcttagacgataaggtgaagagcattgaccgggaactttctcaatgtctccatgattgtcctcaattctaagaggaagtactgcagctcttcaaggcagagaaaactcagtttaacctcaagggccaggattggcctgaaaggacaggctgccagcaagatcagaggtgtggagtctgagagcctttggcctgaactgggacctcacctcagcccatgaatatagcccttgaggaaaaggggaatttggagaggtaacatcatcctcatgagataccaagagacctggaaatgtttcagaaccttcattt

SEQ ID NO: 22263 - DNA, 466 bp, Macaca Mulatta
cttctgtgacagtggcccactgttacgcctggcatgcaccaacaccaagaagctggaggagactgactttgtcctggcctcccttgtcattgtatcttccttgctgatcagtgttgtgtcgttcggcttcatcgtcctggctatcctgagtatcccctctgcttcaggccgtcagaagacgttctctacctgtaccttccacctgatagtgctgaccctcttataccgaagcgccacttttctctattcgaggtcatcactgagtggttcggtggacgctacttgggcagtcacagtaataacgacatttgcggcccccttgctgaatccattcatatatgcctcacgtaatgagcaagtcaaggaatctttgaatgacatgtttaggaaggtattggctgcttttctaatgaatctcttacttgataactgtctcaatgagaaagcagtaaggtgagagtgaaga

SEQ ID NO: 22264 - DNA, 948 bp, Macaca Mulatta
cctacccctcctgctggccagccaccggcgcgtgcactcgggcgagcggccctatgcctgcgacctttgctccaagcgctttgctcagtggagccacctggcccagcaccagctgctgcacacgggggagaagcctttcccctgcctcgagtgtggccggtgcttccgccagaggtggtctctggctgtccacaagtgtagccccaaggccccaaactgtagccctagatctgctctcgggggctccagtcagaggggcaatgcccattagaaggggaaggactgcctacgttcatttcattttatggaaggacccagaaaagggaaggaggagccccaggtcatacagggcagagtcagaactaaacccaggtctcctgctgcacagagctgaactttagtatcttgcactgcactgactgcctccctgtgcgtgtctggaacagtcccattaggagaggtgacatcatttggttaaagtttttcaagctaccctatccttaaatagtttgtctggatatcagggctaaaagttctccccatctattttaggggctgtctgcttttctagtctgtgcacacagggattacctgtcatcttgcatgcaatcaggagaatctcatttataggtgcaggaccttcccctactctgcctcttcctccatactaggttggaaaagtctggtttagcccactttttacaacactcctgccaagtggtctctaccccttgcttgaaaatctcccttgacagggagctcactacctcacaaggcaggtcatttcattgtgggatctatagaaagttaagtaccacattctcatctgtaaaccttgcctatgacatgtttaatacttctacttggcagcccttcagataacttaatcacaacaaatttgccccccaattttcaggttaagtagcatgaatttggtcattccttaaa

SEQ ID NO: 22265 - DNA, 944 bp, Macaca Mulatta
gtcagacattgtgttcctctctgcacagctctccagcactctgccccccacactgtatcgctcactgagaaaaggtggtcccatggtttgtctttaatattttctataacattttcctttccaattcatttccccatatttttacttctgcttagagactgatctgtgttgatatctcacaggcacattgatttttcttgtcttatacaagagtcactaatctataggattaatatgtaaggagaaagggatgactgagctgcttaaaatctgaacgatatctttggggaaaataaagtgagctacatgtccttcctcttatcttcatttctcactgggtgtctgtttctgcctccatgctggcgctgatggaggggactcgcttggtctttggcaggaggggctcagattccctgggaggtattaatggtggtggcaggccttggcttcactctgaggctgtgctttgtgaattacaggccctgaaaaccagaatcagcaacctgcccacggtgaagaagtttctgcaacctggcagccccaggaagcctcccatggatgtgaaaagtttagaaaaagtaaggaagattttcaggttgtaataaagcagccatggaggccaaggacatgcaagacccatattccaaagtttgcaacaatgaagtgctttacctatgtgtggactgtgcctcttgtaaagctaataaactctttccaattacatgctaattaaataataaataactcttatttgtcgacttagttaaaattgatttgttttcattaggatctgatatgaattcagatttccaatctcctcctaacctaccacttccttggaattaaaaatttgataagaagaagaaactagagattatgtggtttgtttgaccttttcaagaattgtcttataacatttgtcataccatctattaaaatgtcat

SEQ ID NO: 22266 - DNA, 2508 bp, Macaca Mulatta
  misc_feature (1)...(2508): n = A,T,C or G
gtcagcccagagtataggaccagatgatgccaaagttggagtgacacaagaccaggaggcagtgctgggtgannnnnnnnnnnnnnnnnnnnnnnnnnnnnnnnnnnnnnnnnnnnnnnnnnnnnnnnnnnnnnnnnnnnnnnnnnnnnnnnnnnnnnnnnnnnnnnnnnnnnnnnnnnnnnnnnnnnnnnnnnnnnnnnnnnnnnnnnnnnnnnnnnnnnnnnnnnnnnnnnnnnnnnnnnnnnnnnnnnnnnnnnnnnnnnnnnnnnnnnnnnnnnnnnnnnnnnnnnnnnnnnnnnnnnnnnnnnnnnnnnnnnnnnnnnnnnnnnnnnnnnnnnnnnnnnnnnnnnnnnnnnnnnnnnnnnnnnnnnnnnnnnnnnnnnnnnnnnnnnnnnnnnnnnnnnnnnnnnnnnnnnnnnnnnnnnnnnnnnnnnnnnnnnnnnnnnnnnnnnnnnnnnnnnnnnnnnnnnnnnnnnnnnnnnnnnnnnnnnnnnnnnnnnnnnnnnnnnnnnnnnnnnnnnnnnnnnnnnnnnnnnnnnnnnnnnnnnnnnnnnnnnnnnnnnnnnnnnnnnnnnnnnnnnnnnnnnnnnnnnnnnnnnnnnnnnnnnnnnnnnnnnnnnnnnnnnnnnnnnnnnnnnnnnnnnnnnnnnnnnnnnnnnnnnnnnnnnnnnnnnnnnnnnnnnnnnnnnnnnnnnnnnnnnnnnnnnnnnnnnnnnnnnnnnnnnnnnnnnnnnnnnnnnnnnnnnnnnnnnnnnnnnnnnnnnnnnnnnnnnnnnnnnnnnnnnnnnnnnnnnnnnnnnnnnnnnnnnnnnnnnnnnnnnnnnnnnnnnnnnnnnnnnnnnnnnnnnnnnnnnnnnnnnnnnnnnnnnnnnnnnnnnnnnnnnnnnnnnnnnnnnnnnnnnnnnnnnnnnnnnnnnnnnnnnnnnnnnnnnnnnnnnnnnnnnnnnnnnnnnnnnnnnnnnnnnnnnnnnnnnnnnnnnnnnnnnnnnnnnnnnnnnnnnnnnnnnnnnnnnnnnnnnnnnnnnnnnnnnnnnnnnnnnnnnnnnnnnnnnnnnnnnnnnnnnnnnnnnnnnnnnnnnnnnnnnnnnnnnnnnnnnnnnnnnnnnnnnnnnnnnnnnnnnnnnnnnnnnnnnnnnnnnnnnnnnnnnnnnnnnnnnnnnnnnnnnnnnnnnnnnnnnnnnnnnnnnnnnnnnnnnnnnnnnnnnnnnnnnnncttcctgccagccttttgaagacttgaagtcattacttcaaagcacaagttataaagacccccaactgagacagatgaagtgctttttgtttggccttttgaatgaagatcgagtaaaacaactggagaggacttttaactgtaaaatgtcactgaagataaaatcaaagttacttcagtgtatggaagtattaggaaacagtgactattctccatcacagctggggtttctggagctgtttcactatctgtatgagactcaagataaagcctttataagccaggcaatgagatatttctcaaaggttgccattaatatttgtgagaaaatacatttgcttgtatcttccttctgccttaagcactgccggtgtttgcggaccatcaggctgtctgtaactacagtatttgagaagaagacattgaaaacaagcctcccaactaacacttggnnnnnnnnnnnnnnnnnnnnnnnnnnnnnnnnnnnnnnnnnnnnnnnnnnnnnnnnnnnnnnnnnnnnnnnnnnnnnnnnnnnnnnnnnnnnnnnnnnnnnnnnnnnnnnnnnnnnnnnnnnnnnnnnnnnnnnnnnnnnnnnnnnnnnnnnnnnnnnnnnnnnnnnnnnnnnnnnnnnnnnnnnnnnnnnnnnnnnnnnnnnnnnnnnnnnnnnnnnnnnnnnnnnnnnnnnnnnnnnnnnnnnnnnnnnnnnnnnnnnnnnnnnnnnnnnnnnnnnnnnnnnnnnnnnnnnnnnnnnnnnnnnnnnnnnnnnnnnnnnnnnnnnnnnnnnnnnnnnnnnnnnnnnnnnnnnnnnnnnnnnnnnnnnnnnnnnnnnnnnnnnnnnnnnnnnnnnnnnnnnnnnnnnnnnnnnnnnnnnnnnnnnnnnnnnnnnnnnnnnnnnnnnnnnnnnnnnnnnnnnnnnnnnnnnnnnnnnnnnnnnnnnnnnnnnnnnnnnnnnnnnnnnnnnnnnnnnnnnnnnnnnnnnnnnnnnnnnnnnnnnnnnnnnnnnnnnnnnnnnnnnnnnnnnnnnnnnnnnnnnnnnnnnnnnnnnnnnnnnnnnnnnnnnnnnnnnnnnnnnnnnnnnnnnnnnnnnnnnnnnnnnnnnnnnnnnnnnnnnnnnnnnnnnnnnnnnnnnnnnnnnnnnnnnnnnnnnnnnacttagcagtgaatatctgtcacttcccttctacacaacaagagcctgacgcatctggatctaggatcaaactggctacaagacaatggaatgaagcttctgtgtgatgtctttcggcatccaagctgtaatcttcaggacttgg

SEQ ID NO: 22267 - DNA, 1066 bp, Macaca Mulatta
  misc_feature (1)...(1066): n = A,T,C or G
cgggtccgctgggtggcactgcaggcggcgggccatggtggtttggattgagccgggcccggccggggcgccgagtcggagggggtggcagtgagcggcggcagaggctgcggggctcggtttggctgactggggagtcggcaggcggcaggnnggaaccatgcgaggccagcggagcctgctgctgggcccagcccgcctctgcctccgcctgcttctgctgctgggctacaggcgccgctgtccacctctgctccggggtctagtacagcgctggcgctacggcaaggtctgcctgcgctccctgctctacaactcctttgggggcagtgacactgctgttgatgctgcctttgagcctgtctactggctggtagacaatgtgatccgctggtttggagtggtgnggtgttcgtagtcctggtgatcgtgctgacaggctccattgtggctatcgcctacctatgtgtcctgcctctcatcctccgaacctactcagtgccacgactctgctggcatttcttctatagccactggaatctgatcctgattgtcttccactactaccaggccatcaccactccgcctgggtacccaccccaggnnnnnnnnnnnnnnnnnnnnnnnnnnnnnnnnnnnnnnnnnnnnnnnnnnnnnnnnnnnnnnnnnnnnnnnnnnnnnnnnnnnnnnnnnnnnnnnnnnnnnnnnnnnnnnnnnnnnncctggctaaacaattgtgtgggccactataaccatcgatacttcttctcattctgctttttcatgactctgggctgtgtctactgcagctatggaagttgggaccttttccgggaggcttatgctgccattgannnnnnnnnnnnnnnnnnnnnnnnnnnnnnnnnnnnnnnnnnnnnnnnnnnnnnnnnnnnnnnnnnnnnnnnnnnnnnnnnnnnnnnnnnnnnnnnnnnnnnnnnnnnnnnnntaactgtatggcatgctgttctcatcagtcgaggtgagactagcatcgaaaggcacatcaacaagaaggagagacgtcggctacaggccaagggcagag

SEQ ID NO: 22268 - DNA, 573 bp, Macaca Mulatta
tctgaggaatgccattatccataaagcagcctctgatgccaactgaaggtttaggggcactgggctgggtgtctgtctgttgctatgtcgatgaactctaaatgacacagaattgtagtactttcccacactttgcacttgatgtttcttttttgccatatttgccccaagttcaacaattcatgcttatttttctgagtgctttgactaagatatgaaaatttgggcagaacttacagtgtaggaatgttagtttacttagctctactttaaggatttgcagctcacccatgtcaagtgctgtattaggaacaccccatacgtactatgaataaaggctgatagacttgctgcctcctgaggagatgatgcaatttaccctgtgaacgttgcctcaagtaaggaatattcataaagacatattttgctcaaataaacacagcttattattgttttgggtatcagtatatgacaaacaacagattacttaatgcattaatttcctttgtgccatacatcccaactggctgctttcattttcttcatgccagaaaggggctaggaattttcttc

SEQ ID NO: 22269 - DNA, 3257 bp, Macaca Mulatta
  misc_feature (1)...(3257): n = A,T,C or G
ctcctgtccagtgtgccagcagccaggagctggcggtgagctcgagggaggctannnnnnnnnnnnnnnnnnnnnnnnnnnnnnnnnnnnnnnnnnnnnnnnnnnnnnnnnnnnnnnnnnnnnnnnnnnnnnnnnnnnnnnnnnnnnnnnnnnnnnnnnnnnnnnnnnnnnnnnnnnnnnnnnnnnnnnnnnnnnnnnnnnnnnnnnnnnnnnnnnnnnnnnnnnnnnnnnnnnnnnnnnnnnnnnnnnnnnnnnnnnnnnnnnnnnnnnnnnnnnnnnnnnnnnnnnnnnnnnnnnnnnnnnnnnnnnnnnnnnnnnnnnnnnnnnnnnnnnnnnnnnnnnnnnnnnnnnnnnnnnnnnnnnnnnnnnnnnnnnnnnnnnnnnnnnnnnnnnnnnnnnnnnnnnnnnnnnnnnnnnnnnnnnnnnnnnnnnnnnnnnnnnnnnnnnnnnnnnnnnnnnnnnnnnnnnnnnnnnnnnnnnnnnnnnnnnnnnnnnnnnnnnnnnnnnnnnnnnnnnnnnnnnnnnnnnnnnnnnnnnnnnnnnnnnnnnnnnnnnnnnnnnnnnnnnnnnnnnnnnnnnnnnnnnnnnnnnnnnnnnnnnnnnnnnnnnnnnnnnnnnnnnnnnnnnnnnnnnnnnnnnnnnnnnnnnnnnnnnnnnnnnnnnnnnnnnnnnnnnnnnnnnnnnnnnnnnnnnnnnnnnnnnnnnnnnnnnnnnnnnnnnnnnnnnnnnnnnnnnnnnnnnnnnnnnnnnnnnnnnnnnnnnnnnnnnnnnnnnnnnnnnnnnnnnnnnnnnnnnnnnnnnnnnnnnnnnnaatgacattttcctcagacattatgacaaagggccatgcaggaataaacttggccactcaagagcgtcagtgatgtggaaccgaacacaggtnnnnnnnnnnnnnnnnnnnnnnnnnnnnnnnnnnnnnnnnnnnnnnnnnnnnnnnnnnnnnnnnnnnnnnnnnnnnnnnnnnnnnnnnnnnnnnnnnnnnnnnnnnnnnnnnnnnnnnnnnnnnnnnnnnnnnnnnnnnnnnnnnnnnnnnnnnnnnnnnnnnnnnnnnnnnnnnnnnnnnnnnnnnnnnnnnnnnnnnnnnnnnnnnnnnnnnnnnnnnnnnnnnnnnnnnnnnnnnnnnnnnnnnnnnnnnnnnnnnnnnnnnnnnnnnnnnnnnnnnnnnnnnnnnnnnnnnnnnnnnnnnnnnnnnnnnnnnnnnnnnnnnnnnnnnnnnnnnnnnnnnnnnnnnnnnnnnnnnnnnnnnnnnnnnnnnnnnnnnnnnnnnnnnnnnnnnnnnnnnnnnnnnnnnnnnnnnnnnnnnnnnnnnnnnnnnnnnnnnnnnnnnnnnnnnnnnnnnnnnnnnnnnnnnnnnnnnnnnnnnnnnnnnnnnnnnnnnnnnnnnnnnnnnnnnnnnnnnnnnnnnnnnnnnnnnnnnnnnnnnnnnnnnnnnnnnnnnnnnnnnnnnnnnnnnnnnnnnnnnnnnnnnnnnnnnnnnnnnnnnnnnnnnnnnnnnnnnnnnnnnnnnnnnnnnnnnnnnnnnnnnnnnnnnnnnnnnnnnnnnnnnnnnnnnnnnnnnnnnnnnnnnnnnnnnnnnnnnnnnnnnnnnnnnnnnnnnnnnnnnnnnnnnnnnnnnnnnnnnnnnnnnnnnnnnnnnnnnnnnnnnnnnnnnnnnnnnnnnnnnnnnnnnnnnnnnnnnnnnnnnnnnnnnnnnnnnnnnnnnnnnnnnnnnnnnnnnnnnnnnnnnnnnnnnnnnnnnnnnnnnnnnnnnnnnnnnnnnnnnnnnnnnnnnnnnnnnnnnnnnnnnnnnnnnnnnnnnnnnnnnnnnnnnnnnnnnnnnnnnnnnnnnnnnnnnnnnnnnnnnnnnnnnnnnnnnnnnnnnnnnnnnnnnnnnnnnnnnnnnnnnnnnnnnnnnnnnnnnnnnnnnnnnnnnnnnnnnnnnnnnnnnnnnnnnnnnnnnnnnnnnnnnnnnnnnnnnnnnnnnnnnnnnnnnnnnnnnnnnnnnnnnnnnnnnnnnnnnnnnnnnnnnnnnnnnnnnnnnnnnnnnnnnnnnnnnnnnnnnnnnnnnnnnnnnnnnnnnnnnnnnnnnnnnnnnnnnnnnnnnnnnnnnnnnnnnnnnnnnnnnnnnnnnnnnnnnnnnnnnnnnnnnnnnnnnnnnnnnnnnnnnnnnnnnnnnnnnnnnnnnnnnnnnnnnnnnnnnnnnnnnnnnnnnnnnnnnnnnnnnnnnnnnnnnnnnnnnnnnnnnnnnnnnnnnnnnnnnnnnnnnnnnnnnnnnnnnnnnnnnnnnnnnnnnnnnnnnnnnnnnnnnnnnnnnnnnnnnnnnnnnnnnnnnnnnnnnnnnnnnnnnnnnnnnnnnnnnnnnnnnnnnnnnnnnnnnnnnnnnnnnnnnnnnnnnnnnnnnnnnnnnnnnnnnnnnnnnnnnnnnnnnnnnnnnnnnnnnnnnnnnnnnnnnnnnnnnnnnnnnnnnnnnnnnnnnnnnnnnnnnnnnnnnnnnnnnnnnnnnnnnnnnnnnnnnnnnnnnnnnnnnnnnnnnnnnnnnnnnnnnnnnnnnnnnnnnnagcctgatgcttcatgagacctatgctaaatgttactgtagagttcttgaagccaggtaccatatcaggaactattcaggatctatattttctgaggtaactgggtaatagaatatcaaattgctgctatcttggacctattattaaaggatgatgctttgcctatgtaataggatatatcctaagtggggatgtgtatatttaaggaactttaattcacgtgtatatattgatatctgatgtatgtgtagtacatcaattggtcatgtacattttaatttacacattgtatagaacatagatgagaactctgggaaaacctgggaatggcaaccaaccaaaatcctttttaatcatctattagaaatttcttaatattgtgtctttttcttttgaaactctaaatatttcagnnnnnnnnctatcagtgtagttcatgttagtataattatagatttacatatatttgaacgttctttgctttgttttacacatagcctactgcctcattataggtaaaaggcatttataactgctcaggggaactcaactgaaactgaatttttgtaacaagaatgttaatagtggcgatgtcctctgtcagtaaactctttaagcttggtgccacaaagagtcttaaaatgggggctgatttcaagtaacataaaatactgttaacgggaggaagaggtcccaaat

SEQ ID NO: 22270 - DNA, 618 bp, Macaca Mulatta
ccatccctttcttaacccctctttgatctcctttatcaaaaaccagagttttagtagatctgtgacttggtgtcttctacccaagccacctccctccaggttctttcaagggaaagtgaatatgaaacccgaggggtatagagtgggaacacgtgttcaatcatgtaacacaaagtggaatctcagggaaaggggtttgcccttgtcttcccacccttacctggggcaactggaagtggcaggaggtggcctagaagtgagaattcatctttgtcatgaagtgatgtttgggagtgatatgggaattgatctttccttaccactttcccaaacagccgccaccaacggccctccagtgctggtgaagaaggagaaggaaatggtgggggcgttggtgtcagacgggctggatcggaaggagccccgagccggggaggtgatctgtatagacgactgactggatcccaggcctgcccttcacccaggccccgtccccgaggccgacccccagctcaagcgctggggcctgctgccagccctccaccttccccaccccttgggccatcactgggctaggaacccctttgcccctctctgcagctcctctcttcaagaagg

SEQ ID NO: 22271 - DNA, 915 bp, Macaca Mulatta
  misc_feature (1)...(915): n = A,T,C or G
tttttttttttcttttgttttaacatgtttattacaacagatacaattcacatctgactagctctgtttcctctttcccctcccacaaccatgttcattgggccatttccttatatttgagcaatcaatgtactttaagcacacatgcctgtccagcagtactcttaagtccattcttacggggtgcaaatggatttcaataatttatacaaacaagtaggttatgctcaatcactgcaattttaagctactgtacacaggaatgaaaaggttatagaaaagtgccatagcaacagtgccttaagaaaggagataaagaggagccttaaaaaaatggataaaatcagaatttcagagggaaatggaacacacgggaaatgaaaaacatttctctgcaaaacaaatggagaagcactgctcttgatcaggtgcaagtgtggaaacagttgtttcatattttgtacactgcccatatggttcaaaaatcgtatccttagacacagatcgcctggcgcttgcacttgaatttttgaaaatgcaagatttctgaatgataaattaaccccccaannnnnnnnnnnnnnnnnnnnnctaattttgcagacaggtttacatgtaaaaggctaggtatttagccacctcagcattgattagttttggatgtctaagctctgttacacatggcttcccatggcttcactctacaaaacatatttacaacgtgaaggatacatctacaagaaatctacatttcaagggttttacaaatcaatcttgtatctttcccctgaattgactctcacagaccccatccccttgtcatttcctttgcccaccttaacggtccaaagtctacttaaatgcagcttcaaaaatgttaagactgggcaacatactacagtgccntgttctcaa

SEQ ID NO: 22272 - DNA, 207 bp, Macaca Mulatta
gcatgtctcactgtttaaataaaacgtcatggatatttcatgtcaggatcacaagcattatcttcacagcaaaggattcctagcatattcttactctacagtgtcttaagcaatattaaagattccttttcccagaagttgtgtctttatgtttcctgagcaaaggcacagaaaagatagtttcaagctcttgtccctcagttttaa

SEQ ID NO: 22273 - DNA, 796 bp, Macaca Mulatta
tggtacaccctgctttttccctcgaggctgtcacatgatcattttctcatattaagaatcaaccttgaactgcttttaaaacactgcctcccactgcatgctgtggatgttctttatcatttctgctgctggctcttttctgcctccctctttggtattttgattttggcttctctcggaaactcattttaatttttatctccctgcagctggaacagctttgggtcttggggttgtgaacatcctccataccatgaatccctcccttgtgatcctctctggagtcctggccagtcactatatccacattgtcaaagacatcattcgccagcaggccttgtcctccgtgcaggacgtggacgtggtggtttcggatttggttgaccccgccctcctgggtgctgccagcatggttctggactacacaacgcgcaggatctactagacctccaggaacagacatggaccatctctcaagagctcctgagtggaatcaagtttttgtctttaggatgaccatttcttaacaatcaaatctggtattgaactgcaggtgactttggcagagaaattttttgcttttggtctcctcttccaaagtcacctttcccaactcctatttttgtagatgctgttctttctgatattttcctagtaggggtcattttagcttcaaaccctgtaagttccagtcacaattttctgtgccaaagtagctacaataatagagaggaggccttagaactctgcttactaatgtattaatatcactgaaacctgcaggccttgcctggga

SEQ ID NO: 22274 - DNA, 520 bp, Macaca Mulatta
  misc_feature (1)...(520): n = A,T,C or G
gatccttaactgaccagtagaggatggtgccaatattgacctgngactcccagaggaagggcaagtgtgctgtgatcaaaacctcgtacgggacagacgtacttccttcctgtgattgggttggtggatgctgaaaagctaaagccaggagacctggtgggtgtgaacaaagactcctatctgatcctggagacgctgcccacagagtacgactcgcgggtgaaggccatggaagtggacgagaggcccagcggagcaatacagtgacattgggggcttggacaagcagatccaagagctggtggaggccattgtcttgccaatgaatcacaaggagaagtttgagaacttgggggtccaacctcctaaaggggtgctgatgtatgggcctccagggacagggaagaacctcctggcccgggcctgtgccgcacagactaaggccaccttcctaaagctggctggtccccagctggtgcagatgttccttggagacggtgccaagctagtccgggacgcc

SEQ ID NO: 22275 - DNA, 945 bp, Macaca Mulatta
tgacagatcgtgctgaactaaagatggtcctcttcatgttgttcctgttgatctatatcatttccctggtggggaatctaggaatactctttctaatctatgtaactcccaaacttcacacacccatgtattatttccttagctgtctgtcatttgttgatgcctgctattcatcagtttttgcccccaaaatgctgctgaacttctttgttgagcaggagacaatctcattctctgcatgcattgtgcaatattttttattcgtgtctctccttaccactgagggcttcttgctagccacaatggcttatgaccgttacgtggccattgtgaaccctttactttataaagtagctatgactaaaatggtttgtattgtgctcttatttgggtcatgtgtgggaggtttaatcaactcattgacacatacaattggcttggtgaaactgtctttctgtgggccaaatgtcatcagtcacttcttctgtgatcttcccccactgttgaaactgtcatgttctgacacatctatgaatgaattgttgcttttgatcttctccggcattattgccatgctcacttttttgactgtggtgatctcctacatcttcattgttgctgctatcctgaggatccgctcagcagcaggtagacataaagccttctccacctgcgcctctcacctgactgccgtgaccttattctatggatcgataagctttagttacattcaaccaaactcccagtattccttagaacaagaaaaggtggtgtctgtattttataccctggtgattcctatgttaaacccattgatttacagcttaagaaacaaggaagtgaaggaagctgtgaaaagggctacagaaattaaatattttccttgttaatttcatatttccacgtccaaaaatagactacagtggtttatctaatgatatctat

SEQ ID NO: 22276 - DNA, 678 bp, Macaca Mulatta
  misc_feature (1)...(678): n = A,T,C or G
caggtctcaccaacggctttgggggtacgaggagcgagcaggagccagggggcggcctggggaggaaagccacacccggacgacgcnnnnnnnnnnnnnnnnnnnnnnnnnnnnnnnnnnnnnnnnnnnnnnnnnnnnnnnnnnnnnnnnnnnnnnnnnnnnnnnnnnnnnnnnnnnnnnnnnnnnnnnnnnnnnnnnnnnnnnnnnnnnnnnnnnnnnnnnnnnnnnnnnnnnnnnnnnnnnnnnnnnnnnnnnnnnnnnnnnnnnnnnnnnnnnnnnnnnnnnnnnnnnnnnnnnnnnnnnnnnnnnnnnnnnnnnnnnnnnnnnnnnnnnnnnnnnnnnnnnnnnnnnnnnnnnnnnnnnnnnnnnnnnnnnnnnnnnnnnnnnnnnnnnnnnnnnnnnnnnnnnnnnnnnnnnnnnnnnnnnnnnnnnnnnnnnnnnnnnnnnnnnnnnnnnnnnnnnnnnnnnnnnnnnnnnnnnnnnnnnnnnnnnnnnnnnnnnnnnnnnnnnnnnnnnnnnnnnnnnnnnnngcagtggcttcctaagtccaaaatggttccccttggtatcgacgaaactatagacaagttaaagatgatggaagggaggaactccagcatccggaaggccgtgcggatcgcttttgaccgcgctatgaaccacctgagccgcgtccac

SEQ ID NO: 22277 - DNA, 87 bp, Macaca Mulatta
agatccgcctgacggacacgctgggcaggctctcgcacatcctggagatggaccacttcgccctggtggtgcacgagcagatccagt

SEQ ID NO: 22278 - DNA, 594 bp, Macaca Mulatta
gaacacatacagttttttgtcctttaaatatcatttttgtaaataccataagattttccctttttaaaacatgtcagggcatttagatgggactgatttttgttttccctacatgaaatttgtatatttcctcccatgaagtttgagtgacatgaataggaaatataagagtgttcccttatgttgataaggaaaaggatactgttttttgaagatgcataacatcttgtaggatgtggggagttaggaaaattttttaaaatgtctgcattactgtaaggcatttataaaatcaggaggtaaccaatggagctccattgacttatgccaacaatgacttcagctttactctaagaatgggaccaaatgaattctctgtagttttatcagcttcaaccatatagtttaattgtgtttcatttattgtcactaatgcagtgacatatggaaagggggaatgattgtagtcattcttagaagaattttcaagaaagcttgttttgtcttttgcttcagtgttttttcttgtgttttaaatctttaatgggtacaatgataatgggtgagtgttgatgtaagtaaagattaaattga

SEQ ID NO: 22279 - DNA, 651 bp, Macaca Mulatta
  misc_feature (1)...(651): n = A,T,C or G
agaactagcatttatttagatcttcattaaactgttggaattgagaaccagacatacgtaataaacctccaaaaatagatcctgaaaggcactttctgcttagggcaagcagtcatggaataagcatgtaaacaagctggcttctctgtaccacaccagccaagtcagctttctccatggccagccgcaccagctctgccctcccttctgttaacaccagccagaccccctgtaggtctaacccaaggtttttctgtaggacaccttggcctacctgggaatgctggaaacatgttaaaggaatcatggtgttnnnnnnnnnnnnnnnnnnnnnaaaagctgccatctgaggtgatggcttctctgtacttacgccataccccagaatacaataaataagcaattagaaaacgttcaagtatgaagggatttcctcctccccggcaaaagcactgctctctgaaggaagctggtttctctgtagctacaccagctgttcagaaagctcattggacctggttttgaaaataaaacaaagtttaaaccctgggaggagttattgtgcagtgtggagtactcaggcttgcttataaagacaacaaacagttatctggtaccaaagtgtgaacctacagacccctcaggtactgc

SEQ ID NO: 22280 - DNA, 1107 bp, Macaca Mulatta
  misc_feature (1)...(1107): n = A,T,C or G
agattgttgtacttgcttcagcaagaaacctcaagcacagagctgaaaactgaatgtgcagtggtgttgggaagtcttgctatgggtactgaaaacaatgtcaagtctctactggactgccatattatccctgccttattgcaagnnnnnnnnnnnnnnnnnnnnnnnnnnnnnnnnnnnnnnnnnnnnnnnnnnnnnnnnnnnnnnnnnnnnnnnnnnnnnnnnnnnnnnnnnnnnnnnnnnnnnnnnnnnnnnnnnnnnnnnnnnnnnnnnnnnnnnnnnnnnnnnnnnnnnnnnnnnnnnnnnnnnnnnnnnnnnnnnnnnnnnnnnnnnnnnnnnnnnnnnnnnnnnnnnnnnnnnnnnnnnnnnnnnnnnnnnnnnnnnnnnnnnnnnnnnnnnnnnnnnnnnnnnnnnnnnnnnnnnnnnnnnnnnnnnnnnnnnnnnnnnnnnnnnnnnnnnnnnnnnnnnnnnnnnnnnnnnnnnnnnnnnnnnnnnnnnnnnnnnnnnnnnnnnnnnnnnnnnnnnnnnnnnnnnnnnnnnnnnnnnnnnnnnnnnnnnnnnnnnnnnnnnnnnnnnnnnnnnnnnnnnnnnnnnnnnnnnnnnnnnnnnnnnnnnnnnnnnnnnnnnnnnnnnnnnnnnnnnnnnnnnnnnnnnnnnnnnnnnnnnnnnnnnnnnnnnnnnnnnnnnnnnnnnnnnnnnnnnnnnnnnnnnnnnnnnnnnnnnnnnnnnnnnnnnnnnnnnnnnnnnnnnnnnnnnnnnnnnnnnnnnnnnnnnnnnnnnnnnnnnnnnnnnnnnnnnnnnnnnnnnnnnnnnnnnnnnnnnnnnnnnnnnnnnnnnnnnnnnnnnnnnnnnnnnnnnnnnnnnnnnnnnnnnnnnnnnnnnnnnnnnnnnnnnnnnnnnnnnnnnnnnnnnnnnnnnnnnnnnnnnnnnnnnnnnnnnnnnnnnnnnnnnnnnnnnnnnnnnnnnnnnnnnnnnnnnnnnnnnnnnnnnnnnnnnnnnnnnnnnnnnnnnnnnnnnnnnnngatgtttgcacagtttatccagatctgtgcagcagcttcgaaccagtttccaggatcacgctgtatggaaacctttaatgaaggt

SEQ ID NO: 22281 - DNA, 4163 bp, Macaca Mulatta
  misc_feature (1)...(4163): n = A,T,C or G
ngggacccggactcaaatccttctgtcactgagccaacaagaagccattgagaaacacctggattttgacagccgctgtgctctgctagcactgtttgcacaggccacgctctctgaacatcccatgtctttcgagggcattcagctaccacaggtnccannnnnnnnnnnnnnnnnnnnnnnnnnnnnnnnnnnnnnnnnnnnnnnnnnnnnnnnnnnnnnnnnnnnnnnnnnnnnnnnnnnnnnnnnnnnnnnnnnnnnnnnnnnnnnnnnnnnnnnnnnnnnnnnnnnnnnnnnnnnnnnnnnnnnnnnnnnnnnnnnnnnnnnnnnnnnnnnnnnnnnnnnnnnnnnnnnnnnnnnnnnnnnnnnnnnnnnnnnnnnnnnnnnnnnnnnnnnnnnnnnnnnnnnnnnnnnnnnnnnnnnnnnnnnnnnnnnnnnnnnnnnnnnnnnnnnnnnnnnnnnnnnnnnnnnnnnnnnnnnnnnnnnnnnnnnnnnnnnnnnnnnnnnnnnnnnnnnnnnnnnnnnnnnnnnnnnnnnnnnnnnnnnnnnnnnnnnnnnnnnnnnnnnnnnnnnnnnnnnnnnnnnnnnnnnnnnnnnnnnnnnnnnnnnnnnnnnnnnnnnnnnnnnnnnnnnnnnnnnnnnnnnnnnnnnnnnnnnnnnnnnnnnnnnnnnnnnnnnnnnnnnnnnnnnnnnnnnnnnnnnnnnnnnnnnnnnnnnnnnnnnnnnnnnnnnnnnnnnnnnnnnnnnnnnnnnnnnnnnnnnnnnnnnnnnnnnnnnnnnnnnnnnnnnnnagccctgcccgcctggcgctggaggcccatgacggaactctatgctgtgccttatgtgctgcctgaggatgaggacactgaggagtgtgaacacctgaccctggctgagtggtgggaactcctcttcttcatcaagaagctggatggacctgaccatcaggaggttctccagatcctccaggagaacctagatggggannnnnnnnnnnnnnnnnnnnnnnnnnnnnnnnnnnnnnnnnnnnnnnnnnnnnnnnnnnnnnnnnnnnnnnnnnnnnnnnnnnnnnnnnnnnnnnnnnnnnnnnnnnnnnnnnnnnnnnnnnnnnnnnnnnnnnnnnnnnnnnnnnnnnnnnnnnnnnnnnnnnnnnnnnnnnnnnnnnnnnnnnnnnnnnnnnnnnnnnnnnnnnnnnnnnnnnnnnnnnnnnnnnnnnnnnnnnnnnnnnnnnnnnnnnnnnnnnnnnnnnnnnnnnnnnnnnnnnnnnnnnnnnnnnnnnnnnnnnnnnntggaggattatggtccagctgggaaaatcctcctggatctagagcaagccctcagctcggaggggacgcaggagaacaaggtcaagccactcctgctgcagctgcagcggcagccccagcccttcctggcactgatgcagagcctggacactccagagactaacagggccctgcacctgactgtgctgagnagaatcctgaagcagctggtagacttccctgaggcactgctgctcccctggcacgaggccgtggatgcctgcatggcctgcctgcggtccccaaacactgatcgagaggtnnnnnnnnnnnnnnnnnnnnnnnnnnnnnnnnnnnnnnnnnnnnnnnnnnnnnnnnnnnnnnnnnnnnnnnnnnnnnnnnnnnnnnnnnnnnnnnnnnnnnnnnnnnnnnnnnnnnnnnnnnnnnnnnnnnnnnnnnnnnnnnnnnnnnnnnnnnnnnnnnnnnnnnnnnnnnnnnnnnnnnnnnnnnnnnnnnnnnnnnnnnnnnnnnnnnnnnnnnnnnnncagatggtgctgggccagattgaagaccacagacgaacccaccggtccatcaacatccctttctttgatgtgttcctcagatacttatgccaggnnnnnnnnnnnnnnnnnnnnnnnnnnnnnnnnnnnnnnnnnnnngaggcgtcctccaaaccacaccgggccagcaagctgacggaccacaaccccaagacctactgggagtccaacggcagcgccggctcccactacatcaccctgcacatgcaccagggcgtcctcatcagnnnnnnnnnnnnnnnnnnnnnnnnnnnnnnnnnnnnnnnnnnnnnnnnnnnnnnnnnnnnnnnnnnnnnnnnnnnnnnnnnnnnnnnnnnnnnnnnnnnnnnnnnnnnnnnnnnnnnnnnnnnnnnnnnnnnnnnnnnnnnnnnnnnnnnnnnnnnnnnnnnnnnnnnnnnnnnnnnnnnnnnnnnnnnnnnnnnnnnnnnnnnnnnnnnnnnnnnnnnnnnnnnnnnnnnnnnnnnnnnnnnnnnnnnnnnnnnnnnnnnnnnnnnnnnnnnnnnnnnnnnnnnnnnnnnnnnnnnnnnnnnnnnnnnnnnnnnnnnnnnnnnnnnnnnnnnnnnnnnnnnnnnnnnnnnnnnnnnnnnnnnnnnnnnnnnnnnnnnnnnnnnnnnnnnnnnnnnnnnnnnnnnnnnnnnnnnnnnnnnnnnnnnnnnnnnnnnnnnnnnnnnnnnnnnnnnnnnnnnnnnnnnnnnnnnnnnnnnnnnnnnnnnnnnnnnnnnnnnnnnnnnnnnnnnntgaggatggcgttagccccctgggttggctgctggagcagtacctggagtgtcaggaagctgtcttcaacccccagagccgcggcccagctttcttctcgcgggtgcgccgtctcactcacctgctggtgcatgtcgagccctgcgaggcaccccctcctgtggcggccactcctcggcccannnnnnnnnnnnnnnnnnnnnnnnnnnnnnnnnnnnnnnnnnnnnnnnnnnnnnnnnnnnnnnnnnnnnnnnnnnnnnnnnnnnnnnnnnnnnnnnnnnnnnnnnnnnnnnnnnnnnnnnnnnnnnnnnnnnnnnnnnnnnnnnnnnnnnnnnnnnnnnnnnnnnnnnnnnnnnnnnnnnnnnnnnnnnnnnnnnnnnnnnnnnnnnnnnnnnnnnnnnnnnnnnnnnnnnnnnnnnnnnnnnnnnnnnnnnnnnnnnnnnnnnnnnnnnnnnnnnnnnnnnnnnnnnnnnnnnnnnnnnnnnnnnnnnnnnnnnnnnnnnnnnnnnnnnnnnnnnnnnnnnnnnnnnnnnnnnnnnnnnnnnnnnnnnnnnnnnnnnnnnnnnnnnnnnnnnnnnnnnnnnnnnnnnnnnnnnnnnnnnnnnnnnnnnnnnnnnnnnnnnnnnnnnnnnnnnnnnnnnnnnnnnnnnnnnnnnnnnnnnnnnnnnnnnnnnnnnnnnnnnnnnnnnnnnnnnnnnnnnnnnnnnnnnnnnnnnnnnnnnnnnnnnnnnnnnnnnnnnnnnnnnnnnnnnnnnnnnnnnnnnnnnnnnnnnnnnnnnnnnnnnnnnnnnnnnnnnnnnnnnnnnnnnnnnnnnnnnnnnnnnnnnnnnnnnnnnnnnnnnnnnnnnnnnnnnnnnnnnnnnnnnnnnnnnnnnnnnnnnnnnnnnnnnnnnnnnnnnnnnnnnnnnnnnnnnnnnnnnnnnnnnnnnnnnnnnnnnnnnnnnnnnnnnnnnnnnnnnnnnnnnnnnnnnnnnnnnnnnnnnnnnnnnnnnnnnnnnnnnnnnnnnnnnnnnnnnnnnnnnnnnnnnnnnnnnnnnnnnnnnnnnnnnnnnnnnnnnnnnnnnnnnnnnnnnnnnnnnnnnnnnnnnnnnnnnnnnnnnnnnnnnnnnnnnnnnnnnnnnnnnnnnnnnnnnnnnnnnnnnnnnnnnnnnnnnnnnnnnnnnnnnnnnnnnnnnnnnnnnnnnnnnnnnnnnnnnnnnnnnnnnnnnnnnnnnnnnnnnnnnnnnnnnnnnnnnnnnnnnnnnnnnnnnnnnnnnnnnnnnnnnnnnnnnnnnnnnnnnnnnnnnnnnnnnnnnnnnnnnnnnnnnnnnnnnnnnnnnnnnnnnnnnnnnnnnnnnnnnnnnnnnnnnnnnnnnnnnnnnnnnnnnnnnnnnnnnnnnnnnnnnnnnnnnnaggggtcctcaagattcgagatggcagcaaggaacccaggtcgagatgggacattgtgcggctcatcccacctcagacatacctgcaagctgagggtgaagagggccggaacttggagaagagacggaatcttatgaactgcctcatcgtccgaatcctcaaggcccatggggatgag

SEQ ID NO: 22282 - DNA, 765 bp, Macaca Mulatta
  misc_feature (1)...(765): n = A,T,C or G
atgcaaatcttcaccagcaccagaaggagcatagtggagggaagcccttcagatggtacaaggacagggatgcacttatgaagagctctaaagtccatctgtcagagaaccccttcacttgcagggaaggtgggaaggtcatcctggatagccaggacctcctccagcttcaagctgttgacagcgggcagaagccgtattccaatcttgggcagcttccagaagtctgtaccacacagaaactcttcaagtgcagtaactgtggaaaagccttcctgaagagctccactctcctcagccatctgagaactcactctgaagagacaccatttgcatgcccaacaggtggaaatttcttagaggagaaatcaacccttggtaatcaaaaatttcacactgcagaaatacccagtgtgtgtaaggagtgtgggaaggcctttagtcacccatctaagctgaggaagcaccagaaatttcacactgaagtaagatattatgagtgcattgcgtgtgggaaaaccttcaatcacaaactcacatttgttcatcatcagagaagtcactcaggagaaagaccttatgagtgcagtgaatgtgggaaagccatcagtaacagatcacacctcattcggcatgagaaagttaacactggagaaaggccttnnnnnnnnnnnnnnnnnnnnnnnnnnnnnnnnnnnnnnnnnnnnnnnnnnnnnnnnnnnnnnnnnnnnnnnnnnnaaagaccttatgagtgcagtgaatgtg

SEQ ID NO: 22283 - DNA, 744 bp, Macaca Mulatta
cagcctctccccacaccatacttggtatcagaaaagtctaggacctatcatttcatcagagacatgctcagaaaagaaactgcttctgccccatttcttgttttggagattactccatctgtccatcaaaagaaacctgtaaatatgaacgaacaaaggttatttcctggaggaaagacaatttgttcaacaccaacaagggactcatcatatgggcacaactctggtgtccttctatggagaaaacctcgagtaaagttttattctgcctttgaaaatgcttccaaaagtagaccctgtccccacacaggtcaagactacagagaaggctttgtagaaatgtgtcacttacgtacacctgctacttacacatttcctcttttggaaaaatgagatatttaggataacaagaaaattaagacatactggcctggtgccagcagatggcttttctatagacaaattaggttagtctggaagatataggttaaaataaactatgctgttttatttatcttcccaacctgattggcagctagactttttttagggtctcatttagtggccctgtttttttcattattatatttaatgatagggcaggatttcgtatgcaagctcttgtttctcaggctgcctgcagaagtcactataaattatctgctgtctacatggtacaaggcccattgactcatttgatgcttgttttgttaatttctttaatatttttatcacaggggcagt

SEQ ID NO: 22284 - DNA, 114 bp, Macaca Mulatta
tcagcagtgccatttctcgtcttggtggccctcatggagagtaacctcatcatcacatatgtggtagctgtggcagctggcatcagtgtggcagctgccttcttactaccctgg

SEQ ID NO: 22285 - DNA, 946 bp, Macaca Mulatta
  misc_feature (1)...(946): n = A,T,C or G
tcacttgctgaggcaacccaatgagggttccagcagccaagaagaggaggggccaagcacctctcctgacccagagtccttgttccgagaagcactcagtaagaaggtggatgagttggttcattttctgctcctcaagtatcgagccaaggagctggtcacaaaggcagaaatgctggagagagtcatcaaaaattacaagcactgctttcctgtgatcttcggcaaagcctctgagtccctgaagatgatctttggcattgatgtgaaggaagtggaccccaccagcaacacctacacccttgtcacctgcctgggcctctcctacgatggcctgctgggtggtaatcatatctttcccaagacaggcctcttgataatcgtcctgggcactatcgcaatggagggcgactctgcatctgaggaggaaatctgggaggagctgagtgtgatggatgtgtatgatgggagggagcacagtgtctatggggagcccaggaaactgctcacccaagagtgggtgcaggagaactacctggagtaccggaaggtacccggcagtgatcctgcacgctacgagttcctgtggggtccaagggccctggctgaaaccagctatgtgaaggtcctggagcatgtggtcagggtcaatgcaagagttcgcatttcctacccatcccttcgtgaagcagctttgagagaggaggaagagggagtctgagcatgagttgcagccagggcnnnnnnnnnnnnnnnnnnnnnnnnnnnnnnnnnnnnnngccctgtgcagcagcttcccctgccttgtgtagcatgaggcccattcttcactgtttgaagagagtagtcagcattcttagtagtgagtttctgttttattgggtgacttggagatttatctctgtttccttttagaattgttcaaatgttccttttaatggatggt

SEQ ID NO: 22286 - DNA, 1962 bp, Macaca Mulatta
  misc_feature (1)...(1962): n = A,T,C or G
atggcaacacaggcgtatactgagctacaggcnnnnnnnnnnnnnnnnnnnnnnnnnnnnnnnnnnnnnnnnnnnnnnnnnnnnnnnnnnnnnnnnnnnnnnnnnnnnnnnnnnnnnnnnnnnnnnnnnnnnnnnnnnnnnnnnnnnnnnnnnnnnnnatatgtcaccgagctgcagagcccccaaccccaggcacagccaccgggcagccagaagcagtacgtgacagagctcccggctgtacccgcaccctcacagccgactggtgcacccaccccgtcgcctgcaccccagcagtacatcgtggtcactgtctctgnnnnnnnnnnnnnnnnnnnnnnnnnnnnnnnnnnnnnnnnnnnnnnnnnnnnnnnnnnnnnnnnnnnnnnnnnnnnnnnnnnnnnnnnnnnnnnnnnnnnnnnnnnnnnnnnnnnnnnnnnnnnnnnnnnnnnnnnnnnnnnnnnnnnnnnnnnnnnnnnnnnnnnnnnnnnnnnnnnnnnnnnnnnnnnnnnnnnnnnnnnnnnnnnnnnnnnnnnnnnnnnnnnnnnnnnnnnnnnnnnnnnnnnnnnnnnnnnnnnnnnnnnnnnnnnnnnnnnnnnnnnnnnnnnnnnnnnnnnnnnnnnnnnnnnnnnnnnnnnnnnnnnnnnnnnnnnnnnnnnnnnnnnnnnnnnnnnnnnnnnnnnnnnnnnnnnnnnnnnnnnnnnnnnnnnnnnnnnnnnnnnnnnnnnnnnnnnnnnnnnnnnnnnnnnnnnnnnnnnnnnnnnnnnnnnnnnnnnnnnnnnnnnnnnnnnnnnnnnnnnnnnnnnnnnnnnnnnnnnnnnnnnnnnnnnnnnnnnnnnnnnnnnnnnnnnnnnnnnnnnnnnnnnnnnnnnnnnnnnnnnnnnnnnnnnnnnnnnnnnnnnnnnnnnnnnnnnnnnnnnnnnnnnnnnnnnnnnnnnnnnnnnnnnnnnnnnnnnnnnnnnnnnnnnnnnnnnnnnnnnnnnnnnnnnnnnnnnnnnnnnnnnnnnnnnnnnnnnnnnnnnnnnnnnnnnnnnnnnnnnnnnnnnnnnnnnnnnnnnnnnnnnnnnnnnnnnnnnnnnnnnnnnnnnnnnnnnnnnnnnnnnnnnnnnnnnnnnnnnnnnnnnnnnnnnnnnnnnnnnnnnnnnnnnnnnnnnnnnnnnnnnnnnnnnnnnnnnnnnnnnnnnnnnnnnnnnnnnnnnnnnnnnnnnnnnnnnnnnnnnnnnnnnnnnnnnnnnnnnnnnnnnnnnnnnnnnnnnnnnnnnnnnnnnnnnnnnnnnnnnnnnnnnnnnnnnnnnnnnnnnnnnnnnnnnnnnnnnnnnnnnnnnnnnnnnnnnnnnnnnnnnnnnnnnnnnnnnnnnnnnnnnnnnnnnnnnnnnnnnnnnnnnnnnnnnnnnnnnnnnnnnnnnnnnnnnnnnnnnnnnnnnnnnnnnnnnnnnnnnnnnnnnnnnnnnnnnnnnnnnnnnnnnnnnnnnnnnnnnnnnnnnnnnnnnnnnnnnnnnnnnnnnnnnnnnnnnnnnnnnnnnnnnnnnnnnnnnnnnnnnnnnnnnnnnnnnnnnnnnnnnnnnnnnnnnnnnnnnnnnnnnnnnnnnnnnnnnnnnnnnnnnnnnnnnnnnnnnnnnnnnnnnnnnnnnnnnnnnnnnnnnnnnnnnnnnnnnnnnnnnnnnnnnnnnnnnnnnnnnnnnnnnnnnnnnnnnnnnnnnnnnnnnnnnnnnnnnnnnnnnnnnnnnnnnngatgcctctcggagcctccctgacttcacagagctcgacctccagggcaaggtgctgcctgagggcgtcgggcccggtgacatcaaagccttccaggtcctgtaccgggaacactgtgaggnaggccattgtcgacgtcatggtgaacctgcagttcaccctggtggagacgctgtggaagacgttctggaggtacaacctcagccagcccagcgaggcaccgccgctggc

SEQ ID NO: 22287 - DNA, 1288 bp, Macaca Mulatta
  misc_feature (1)...(1288): n = A,T,C or G
gagggggccctggagctgcacacacaccatctcatcccgtccctacgccaagtgatgttccagggggatcgnnnnnnnnnnnnnnnnnnnnnnnnnnnnnnnnnnnnnnnnnnnnnnnnnnnnnnnnnnnnnnnnnnnnnnnnnnnnnnnnnnnnnnnnnnnnnnnnnnnnnnnnnnnnnnnnnnnnnnnnnnnnnnnnnnnnnnnnnnnnnnnnnnnnnnnnnnnnnnnnnnnnnnnnnnnnnnnnnnnnnnnnnnnnnnnnnnnnnnnnnnnnnnnnnnnnnnnnnnnnnnnnnnnnnnnnnnnnnnnnnnnnnnnnnnnnnnnnnnnnnnnnnnnnnnnnnnnnnnnnnnnnnnnnnnnnnnnnnnnnnnnnnnnnnnnnnnnnnnnnnnnnnnnnnnnnnnnnnnnnnnnnnnnnnnnnnnnnnnnnnnnnnnnnnnnnnnnnnnnnnnnnnnnnnnnnnnnnnnnnnnnnnnnnnnnnnnnnnnnnnnnnnnnnnnnnnnnnnnnnnnnnnnnnnnnnnnnnnnnnnnnnnnnnnnnnnnnnnnnnnnnnnnnnnnnnnnnnnnnnnnnnnnatgcccatcaatgcttccaatgcgctgacgctggctcaccagctgcgcgtgtacacagctgaggctgccagcttttcagacatgatggatgtagtctatgtggctcagatgatccagaaatttttgggttatgtcgaccagatcaaagagnnnnnnnnnnnnnnnnnnnnnnnnnnnnnnnnnnnnnnnnnnnnnnnnnnnnnnnnnnnnnnnnnnnnnnnnnnnnnnnnnnnnnnnnnnnnnnnnnnnnnnnnnnnnnnnnnnnnnnnnnnnnnnnnnnnnnnnnnnnnnnnnnnnnnnnnnnnnnnnnnnnnnnnnnnnnnnnnnnnnnnnnnnnnnnnnnnnnnnnnnnnnnnnnnnnnnnnnnnnnnnnnnnnnnnnnnnnnnnnnnnnnnnnnnnnnnnnnnnnnnnnnnnnnnnnnnnnnnnnnnnnnnnnnnnnnnnnnnnnnnnnnnnnnnnnnnnnnnnnnnnnnnnnnnnnnnnnnnnnnnnnnnnnnnnnnnnnnnnnnnnnnnnnnnnnnnnnnnnnnnnnnnnnnnnnnnnnnnnnnnnnnnnnnnnnnnggtgggcatcaccctgcactactcctccctgtccacgctgctctggatgggggtgaaggcgcgagtgttccacaaggagctcacctggagggcaccccctccgcaagaaggggaccccgccctgcctgctcccagtcctatgctccgg

SEQ ID NO: 22288 - DNA, 3531 bp, Macaca Mulatta
  misc_feature (1)...(3531): n = A,T,C or G
ctggagccctacgcggggccccagcagaactctcacgaccacggcttccccaaccacccttacaactcctactaccccaaccgcagcgcctaccccccgcccgccccggcctacgcgctgagctccccgagaggtggcactccgggctccggcgcggcggcggctcccggctccaagccgcctccctcctccagcgcctccgcctcttcgtcgtcttcgtccttcgctcagcagcgcttcggggccatggggggaggcggcccctccgcggccggcgggggaactccccagcccaccgccacccccaccctcaaccaactgctcacgtcgcccagctcggcccggggctaccagggctaccccgggggcgactacggcggcgggccccaggacgggggcgccggcaagggcccggcggacatggcctcgcagtgctggggggctnnnnnnnnnnnnnnnnnnnnnnnnnngcctcgggaggggcccaacaaaggagccaccacgcgcccatgagccccgggagcagcggcggcggggggcagccgctcgcccggacccctcagnnnnnnnnnnnnnnnnnnnnnnnnnnnnnnnnnnnnnnnnnnnnnnnnnnnnnnnnnnnnnnnnnnnnnnnnnnnnnnnnnnnnnnnnnnnnnnnnnnnnnnnnnnnnnnnnnnnnnnnnnnnnnnnnnnnnnnnnnnnnnnnnnnnnnnnnnnnnnnnnnnnnnnnnnnnnnnnnnnnnnnnnnnnnnnnnnnnnnnnnnnnnnnnnnnnnnnnnnnnnnnnnnnnnnnnnnnnnnnnnnnnnnnnnnnnnnnnnnnnnnnnnnnnnnnnnnnnnnnnnnnnnnnnnnnnnnnnnnnnnnnnnnnnnnnnnnnnnnnnnnnnnnnnnnnnnnnnnnnnnnnnnnnnnnnnnnnnnnnnnnnnnnnnnnnnnnnnnnnnnnnnnnnnnnnnnnnnnnnnnnnnnnnnnnnnnnnnnnnnnnnnnnnnnnnnnnnnnnnnnnnnnnnnnnnnnnnnnnnnnnnnnnnnnnnnnnnnnnnnnnnnnnnnnnnnnnnnnnnnnnnnnnnnnnnnnnnnnnnnnnnnnnnnnnnnnnnnnnnnnnnnnnnnnnnnnnnnnnnnnnnnnnnnnnnnnnnnnnnnnnnnnnnnnnnnnnnnnnnnnnnnnnnnnnnnnnnnnnnnnnnnnnnnnnnnnnnnnnnnnnnnnnnnnnnnnnnnnnnnnnnnnnnnnnnnnnnnnnnnnnnnnnnnnnnnnnnnnnnnnnnnnnnnnnnnnnnnnnnnnnnnnnnnnnnnnnnnnnnnnnnnnnnnnnnnnnnnnnnnnnnnnnnnnnnnnnnnnnnnnnnnnnnnnnnnnnnnnnnnnnnnnnnnnnnnnnnnnnnnnnnnnnnnnnnnnnnnnnnnnnnnnnnnnnnnnnnnnnnnnnnnnnnnnnnnnnnnnnnnnnnnnnnnnnnnnnnnnnnnnnnnnnnnnnnnnnnnnnnnnnnnnnnnnnnnnnnnnnnnnnnnnnnnnnnnnnnnnnnnnnnnnnnnnnnnnnnnnnnnnnnnnnnnnnnnnnnnnnnnnnnnnnnnnnnnnnnnnnnnnnnnnnnnnnnnnnnnnnnnnnnnnnnnnnnnnnnnnnnnnnnnnnnnnnnnnnnnnnnnnnnnnnnnnnnnnnnnnnnnnnnnnnnnnnnnnnnnnnnnnnnnnnnnnnnnnnnnnnnnnnnnnnnnnnnnnnnnnnnnnnnnnnnnnnnnnnnnnnnnnnnnnnnnnnnnnnnnnnnnnnnnnnnnnnnnnnnnnnnnnnnnnnnnnnnnnnnnnnnnnnnnnnnnnnnnnnnnnnnnnnnnnnnnnnnnnnnnnnnnnnnnnnnnnnnnnnnnnnnnnnnnnnnnnnnnnnnnnnnnnnnnnnnnnnnnnnnnnnnnnnnnnnnnnnnnnnnnnnnnnnnnnnnnnnnnnnnnnnnnnnnnnnnnnnnnnnnnnnnnnnnnnnnnnnnnnnnnnnnnnnnnnnnnnnnnnnnnnnnnnnnnnnnnnnnnnnnnnnnnnnnnnnnnnnnnnnnnnnnnnnnnnnnnnnnnnnnnnnnnnnnnnnnnnnnnnnnnnnnnnnnnnnnnnnnnnnnnnnnnnnnnnnnnnnnnnnnnnnnnnnnnnnnnnnnnnnnnnnnnnnnnnnnnnnnnnnnnnnnnnnnnnnnnnnnnnnnnnnnnnnnnnnnnnnnnnnnnnnnnnnnnnnnnnnnnnnnnnnnnnnnnnnnnnnnnnnnnnnnnnnnnnnnnnnnnnnnnnnnnnnnnnnnnnnnnnnnnnnnnnnnnnnnnnnnnnnnnnnnnnnnnnnnnnnnnnnnnnnnnnnnnnnnnnnnnnnnnnnnnnnnnnnnnnnnnnnnnnnnnnnnnnnnnnnnnnnnnnnnnnnnnnnnnnnnnnnnnnnnnnnnnnnnnnnnnnnnnnnnnnnnnnnnnnnnnnnnnnnnnnnnnnnnnnnnnnnnnnnnnnnnnnnnnnnnnnnnnnnnnnnnnnnnnnnnnnnnnnnnnnnnnnnnnnnnnnnnnnnnnnnnnnnnnnnnnnnnnnnnnnnnnnnnnnnnnnnnnnnnnnnnnnnnnnnnnnnnnnnnnnnnnnnnnnnnnnnnnnnnnnnnnnnnnnnnnnnnnnnnnnnnnnnnnnnnnnnnnnnnnnnnnnnnnnnnnnnnnnnnnnnnnnnnnnnnnnnnnnnnnnnnnnnnnnnnnnnnnnnnnnnnnnnnnnnnnnnnnnnnnnnnnnnnnnnnnnnnnnnnnnnnnnnnnnnnnnnnnnnnnnnnnnnnnnnnnnnnnnnnnnnnnnnnnnnnnnnnnnnnnnnnnnnnnnnnnnnnnnnnnnnnnnnnnnnnnnnnnnnnnnnnnnnnnnnnnnnnnnnnnnnnnnnnnnnnnnnnnnnnnnnnnnnnnnnnnnnnnnnnnnnnnnnnnnnnnnnnnnnnnnnnnnnnnnnnnnnnnnnnnnnnnnnnnnnnnnnnnnnnnnnnnnnnnnnnnnnnnnnnnnnnnnnnnnnnnnnnnnnnnnnnnnnnnnnnnnnnnnnnnnnnnnnnnnnnnnnnnnnnnnnnnnnnnnnnnnnnnnnnnnnnnnnnnnnnnnnnnnnnnnnnnnnnnnnnnnnnnnnnnnnnnnnnnnnnnnnnnnnnnnnnnnnnnnnnnnnnnnnnnnnnnnnnnnnnnnnnnnnnnnnnnnnnnnnnnnnnncccaacggcgggatgtgcgacccctacagtcgtgctgctggccctgggctaggaaatgtggcgatgggaccacgacagcactatccctatggaggtccttatgacagagtgaggnaggacggagcctggaatagggcctgagggaaacatgagcactggggccccacagcctaatctcatgccttccaacccagactcggggatgtattctcctagccgctaccccccnnnnnnnnnnnnnnnnnnnnnnnnnnacatgattcctatggcaatcagttctccacccaaggtaccccttctggcagccccttccccagccagcagaccacaatgtatcaacagcagcagcaggn

SEQ ID NO: 22289 - DNA, 1181 bp, Macaca Mulatta
  misc_feature (1)...(1181): n = A,T,C or G
ggcctcctcctcccgcagatccgaacggcctgggcggggtcaccccggctgggacaagaagccgccgcctgcctgcccgggcccggggagggggctggggccggaggcggggtgtgagtgggtgtgtgcggggggcggaggcttgatgcaatcccgataagaaatgctcgggtgtcttgggcacctacccgcggggcccgtaaggcgctactatataaggttgccggcccggagccgccgcgccgtcggagcaggagcgctgcgtccaggatcgagggccacggccatcccaatccggcactcacagccccgcagcgcatcccggtcgccgcccagcctcccgcacccccatcgccggaactgcgccgagagccccagggaggtgccatgaggagcgggtgtgtggtggtccacgcctggatcctggccagcctctggctggccgtggccgggcgtcccctcgccttctcggacgcggggccccacgtgcactacggctggggcgaccccatccgcctgcggcacctgtacacctccggcccccatgggctctccagctgcttcctgcgcatccgcaccgacggcgtcgtggactgcgcgcggggccaaagcgcgcacagtnnnnnnnnnnnnnnnnnnnnnnnnnnnnnnnnnnnnnnnnnnnnnnnnnnnnnnnnnnnnnnnnnnnnnnnnnnnnnnnnnnnnnnnnnnnnnnnnnnnnngcttcagtactcagaggaagactgtgcttttgaggaggagatccgccctgatggctacaacgtataccgatccgagaagcaccgcctcccggtctctctgagcagtgccaaacagaggcagctgtacaagaacagaggctttcttccgctctctcatttcctacccatgctgcccatggccccagaggagcctgaggacctcaggggccacttggaatctgacatgttctcttcgcccctggagactgacagcatggacccatttgggcttgtcaccggactggaggcggtgaggagtcccagctttgagaaataactgaggccatgcccgggcctcttcactgctgccaggggctgtggtacctgcagagtggaggccgtgcttctacaagagctgtcccgagtccacgttctgtttagctttaggaagaaacatctagaagttgtacatattcagag

SEQ ID NO: 22290 - DNA, 636 bp, Macaca Mulatta
cagatcatgatcccgcttcaggtcatcacggtaaagatgtctttgaagcatttataaaaaagatttggcaaaaagactccttgttgggaaaagtgcctcagtcgatgctgaaaagtctatgttgtcaaagctcaagcatgagtgtggtgcagccttcaccagcaagctggaaggcatgttcaaggacatggagctttcgaaggacatcatggttcattttaagcagcatatgcagaatcagagtgactcaggccctatagacctcacagtgaacatactcacaatgggctactggccaacgtacacgcccatggaagtgcacttaaccccagaaatggttaaacttcaggaagtatttaaggcattttatcttggaaagcacagtggtcgaaaacttcagtggcaaactactttgggacatgctgttttaaaagcggagtttaaagaagggaagaaggaattccaggtgtccctcttccagacactggtgctcctcatgttcaacgagggagatggcttcagctttgaggagataaaaatggccacggggatagaggatagtgaattgcgcagaacgctgcagtccctggcctgtggcaaagcgcgtgtgctgattaaaagtcccaaaggaaagga

SEQ ID NO: 22291 - DNA, 893 bp, Macaca Mulatta
gggggagtataaagggagcagggaaggcgggagacggggcagtttgaatcgcggtgcgacgaaggagtaggtggtgggatctcaccgtgggtccgattagccttttctctgccttgcttgcttgagcttcagcagaattcgaaatggctggcggtaaggctggaaaggactccggaaaggccaagacaaaggcggtttcccgctcgcagagagccggcttgcagttcccagtgggccgtattcatcgacacctgaaatctaggacgaccagtcatggacgtgtgggcgcgactgccgctgtgtacagcgcagccatcctggagtacctcaccgcagaggtacttgaactggcaggaaatgcatcaaaagacttaaaggtaaagcgtattacccctcgtcacttgcaacttgctattcgtggagatgaagaattggattcgctcatcaaggctacaattgctggtggtggtgtcattccacacatccacaaatctctgattgggaagaaaggacaacagaagactgtctaaaggatgcctggattccttgttatctcaggactctaaatactctaacagctgtccagtgttggtgattccagtggactgtatctctgtgaaaaacacaattttgcctttttgtaattctatttgagcaagttgggaagtttaattagctttccaaccaaccaaaatttctgcattcgagtcttaaccatatttaagtgttactgggggcttcaaagaaagctatttgattcttgaagtagtggggtttttgattggagttgactggtttttaaaatgttgattatggtgcatatacacatgttcgatatcctcgtgagcatagcatccaaaaaaaaaaactggcctgccgagttaatctgccgc

SEQ ID NO: 22292 - DNA, 647 bp, Macaca Mulatta
tcccgggatggacaaacagtggcatctgagatgcctgaagtgctgtgaatgtaagctggccctcgagtccgagctcacctgctttgccaaggacggtagcatttactgcaaggaggattactacagaaggttctctgtgcagagatgtgcccgctgccaccttggcatttccgcctcggagatggtcatgcgcgcccgagactcagtctaccacctgagctgcttcacctgctccacttgcaacaagactctgaccacgggcgaccatttcggcatgaaggacagcctggtgtactgccgcgcccacttcgagaccctcttgcaaggagagtatccaccgcagctgagctacacggagctggcggccaagagcggcggcctggccctgccttacttcaatggtaccggcaccgtgcagaaggggcggccccggaagcggaagagcccagcgctgggagtagacatcgtcaattacaactcaggttgtaatgagaatgaggcagaccacttggaccgggaccagcagccttatccaccctcacagaagaccaagcgcatgcgaacctctttcaagcatcaccagctccggaccatgaaatcctactttgccatcaaccacaatccggatgccaaggacctcaagcagc

SEQ ID NO: 22293 - DNA, 2018 bp, Macaca Mulatta
  misc_feature (1)...(2018): n = A,T,C or G
tgtttcctaggcggggagcccctcactgggtgtcgcagggcctgnnnnnnnnnnnnnnnnnnnnnnnnnnnnnnnnnnnnnnnnnnnnnnnctgtggcctggggacgcctgcccttctgtctccagatgctgtaggcctcaagttcagcttggggctgtgagtgagacagcttgccagctgcatccccacagacagaggatgtgtgtctacatgagttcagtgtttctgtgtgggaaacgcttcctggctctgggaaactctctgtccattctgtggttccccgggagcatggccctggtgggcaggtgtggtttgacctcttcacgccatctggtggcctggaggccagaggctctcctaagtatctctacccctgcggtggcttcttgtctcctgctaccgggcctgatgtcgctggaggtgctggcnnnnnnnnnnnnnnnnnnnnnnnnnnnnnnnnnnnnnnnnnnnnnnnnnnnnnnnnnnnnnnnnnnnnnnnnnnnnnnnnnnnnnnnnnnnnnnnnnnnnnnnnnnnnnnnnnnnnnnnnnnnnnnnnnnnnnnnnnnnnnnnnnnnnnnnnnnnnnnnnnnnnnnnnnnnnnnnnnnnnnnnnnnnnnnnnnnnnnnnnnnnnnnnnnnnnnnnnnnnnnnnnnnnnnnnnnnnnnnnnnnnnnnnnnnnnnnnnnnnnnnnnnnnnnnnnnnnnnnnnnnnnnnnnnnnnnnnnnnnnnnnnnnnnnnnnnnnnnnnnnnnnnnnnnnnnnnnnnnnnnnnnnnnnnnnnnnnnnnnnnnnnnnnnnnnnnnnnnnnnnnnnnnnnnnnnnnnnnnnnnnnnnnnnnnnnnnnnnnnnnnnnnnnnnnnnnnnnnnnnnnnnnnnnnnnnnnnnnnnnnnnnnnnnnnnnnnnnnnnnnnnnnnnnnnnnnnnnnnnnnnnnnnnnnnnnnnnnnnnnnnnnnnnnnnnnnnnnnnnnnnnnnnnnnnnnnnnnnnnnnnnnnnnnnnnnnnnnnnnnnnnnnnnnnnnnnnnnnnnnnnnnnnnnnnnnnnnnnnnnnnnnnnnnnnnnnnnnnnnnnnnnnnnnnnnnnnnnnnnnnnnnnnnnnnnnnnnnnnnnnnnnnnnnnnnnnnnnnnnnnnnnnnnnnnnnnnnnnnnnnnnnnnnnnnnnnnnnnnnnnnnnnnnnnnnnnnnnnnnnnnnnnnnnnnnnnnnnnnnnnnnnnnnnnnnnnnnnnnnnnnnnnnnnnnnnnnnnnnnnnnnnnnnnnnnnnnnnnnnnnnnnnnnnnnnnnnnnnnnnnnnnnnnnnnnnnnnnnnnnnnnnnnnnnnnnnnnnnnnnnnnnnnnnnnnnnnnnnnnnnnnnnnnnnnnnnnnnnnnnnnnnnnnnnnnnnnnnnnnnnnnnnnnnnnnnnnnnnnnnnnnnnnnnnnnnnnnnnnnnnnnnnnnnnnnnnnnnnnnnnnnnnnnnnnnnnnnnnnnnnnnnnnnnnnnnnnnnnnnnnnnnnnnnnnnnnnnnnnnnnnnnnnnnnnnnnnnnnnnnnnnnncctactcctggcaaggagttgggtttggatcaaaagtgtttaaaattaatatgttgtcagtgattataacaacactgtttacataaaagccattttttctaattctaacaagttagaagtgaggaaggaatgaacacgcatgtttaggaaactgccctttggtgctgggctggtgtcctgcactggggtgtcgctgctgtccgggggctgctctgctgccccggcccaggtcgccttgtggtgttgccagacaggcctcacggtctgctgtgcagagacaggcaggaaggatccctgaagagtcttggagaaaaggttctgtgccctcaggtggggcttcccccctcgtatttataatcttaatttatatagtgaccaccgtggaaacaaatgcctcttgtattgttatgtacatagtccatacctgagtgctgtacataagttggtctgtgtataaataaaacaagcctgtttttgatcttcc

SEQ ID NO: 22294 - DNA, 146 bp, Macaca Mulatta
agggaagtcccacctggccatcgtgcagaaggtgaacaacgagggtgagggcgaccccttctacgaggtcctgggcctggtcaccctggaggacgtgatcgaggagatcatcaggtccgagatcctggacgagtctgaagactacc

SEQ ID NO: 22295 - DNA, 946 bp, Macaca Mulatta
gcgacgatgtagatttccggcagatcaacttgaacaagctgaagaacctatgcagcaagacgatcggagagaaaatgaagaaaaaagagccaggggaagatgatgagtctgtcccagagaacgtgttgaatttcgatgaccttactgcagacgctttagctaacctgaaagtctcacaaatcaaaaaagtccgactcctcattgacgaagccatcctgaagtgtgacgcagagcggataaagctggaagcagagcgatttgagaacctccgagagattgggaaccttctgcacccttctgtgcccatcagtaacgatgaagatgcggacaacaaagtagagaggatttggggtgattgtactgtcaggaagaagtactctcatgtggacctggtggtgatggtagatggctttgaaggcgaaaagggggccgtggtggctgggagtcgagggtacttcttgaagggggtcctggtgttcctggaacaggctctcatccagtatgcccttcgcaccttgggaagtcggggctacgctcccatttataccccctttttcatgagaaaggaggtcatgcaggaggtggcacagctcagccagtttgatgaagaagatgatggacaaggtggagtttgtccatatgctcaatgctaccatgtgcgccactacccgtaccatctgcgccatcctggagaactaccagacagagaagggcatcactgtgcctgagaaattgaaggagttcatgccgccaggactgcaagaactgatcccctttgtgaagcctgcgcccattgaccaggagccatccaagaagcagaagaaagcacatgagggcagcaaaaaagaaagcggcagcaagaagacgtcacccctagaaaggaagcctgcagaaacatggaaggtcaccggatgccctggaacatttcctggccgtcccggtttta

SEQ ID NO: 22296 - DNA, 1234 bp, Macaca Mulatta
  misc_feature (1)...(1234): n = A,T,C or G
ctagatttgcgtagctttataactaaaatgagtactactagtgacatcatgnttctacatagctatccgctgccgccatactttatatgtctgtatggctatcatattgcttttataattattatggatacgagtatcaccctggagggttacaaatacgacggcttaatgaagttgtgaaaaaatattctagtaggatatacgattgatttatatggtttgtgagtattctaccggtggtgtgaataaaataatgatggtttaggtcttattttgtaatacaatagtgaatggaattaaatatggggcgatattacaaaaaagggagggggggggaaaatatcctgcggtgtttaatctggtacggggagttttaccggacgttaaatacaaatactctagactaccgttgcagtgtattcattttttcaatctctaatttattttcccggcgactattttttaattccatatcctgtttctccgagaaagtaggggtaggaattaagcagagagcaaagaggagggctcgggtatatcaatttaggctccaatcttcgtaaaaatttaggcttataggtcaccaaggagcgaaaaagggaaccacaaagaaaattgcagtacaaagaagcccagaaaagcattcccatatatcacagtatatccaataaatctaaggtcattttctgtattggggataattgtcactcggtctgaaaaaataatccgtttaattaaaaaacctggaggatactatccactcccccagatgaggaggctgaggagaccagacccctacatcacctcgtagccacttctgatactcttcacgaggcagcaggcaaagacaattcccaaaacctcaacaaaagcaattccaagagctgctgcagccaccaccagcacatttttcctcagccagcccccaatcttctccacacagccctccttatggatggccttctcgttgaaattaattccacagcccacagtgacattaatgcagcaggagtcagggactcggttcttcgacatggaagggattttctcccaatctgtgtagttagcagccccacagcacttaaaatctgcctgcatcctgtccaggatcgaagcagtgtggttgtttttcgggtaattctccatctgctgccggaagttgttattaaactctgacatcaccttatctctaaacacatagccagcaatggctgcggccacctccaccaacccc

SEQ ID NO: 22297 - DNA, 826 bp, Macaca Mulatta
ggagagcttctagtttagcaggggagacagacatgtatagaatctgtcgtacaactaattatttaataaaagtataattgttataaagacctcaaaggaaatgtatcaggtgttgtaagatcatgtaacaggtggttttgcttagttgaggagaaaaactttaggggcatgaggaattagaaagagctagtgaaaagaaggtgtagcaaccaaagaggtaggtaaagaaacaaatttgtggtacattaagaaaccaagaaggaggaatttccagagcatatttgtggtcatgaaagtcaaatggtgccatgatggaaaggaatatgggggttgagactggtttgctacatatggtgatgaaaactgttctagaaaagtttcaagattaataggaccaaacacagattacaggtggttaacaaatgagaaggtggtgaaatcctaagtactataatgagctcttacactcactttttggccacttaacatgaagtactttgtaatattctggctgtgcttgctttgtctccctagctagattgacagcttcttgaaggttatgatgataaacctagcccctagcactatatcaacatgtagcattagagtcaccacctggaaatctaagaccttggatctatctggtgctggttctggcccacacaagccatgtaccttggggcatgatcatctgtttcctcatctctaaaatggtgatatttcttaactttactatcacttgggcttttgaaaggatcaaatagggccgttttatagaaatgaactttggtgaattgaaatttattattctgtaaaaaaatattgg

SEQ ID NO: 22298 - DNA, 754 bp, Macaca Mulatta
  misc_feature (1)...(754): n = A,T,C or G
gctgttaacgtcggcttcgcctgcgagctgctgtcagagaatatgctcattctggaggagaaggagattannnnnnnnnnnnnnnnnnnnnnnnnnnnnnnnnnnnnnnnnnnnnnnnnnnnnnnnnnnnnnnnnnnnnnnnnnnnnnnnnnnnnnnnnnnnnnnnnnnnnnnnnnnnnnnnnnnnnnnnnnnnnnnnnnnnnnnnnnnnnnnnnnnnnnnnnnnnnnnnnnnnnnnnnnnnnnnnnnnnnnnnnnnnnnnnnnnnnnnnnnnnnnnnnnnnnnnnnnnnnnnnnnnnnnnnnnnnnnnnnnnnnnnnnnnnnnnnnnnnnnnnnnnnnnnnnnnnnnnnnnnnnnnnnnnnnnncgaggtgctgcaggagcgcgccttcgtggactggcgtccactgccaggcggtcatctgctgccgcgtgacgcccaagcagaaggccctgatcgtggccctggtcaagaagtaccaccaggtggtgaccctggccatcggggacggcgccaacgacgtcaacatgattaaganccgcggacgtgggcgtggggctggccggccaggagggcatgcaggctgttcagaacagcgacttcgtgctgggccagttctgcttcctgcagcgcctcctgctggtgcacggccgctggtcctacgtgcggatctgcaagttcctgcgctacttcttctataagaccatggccagcatgatggtgcaggtctggttcgcctgctacaatggcttcac

SEQ ID NO: 22299 - DNA, 938 bp, Macaca Mulatta
  misc_feature (1)...(938): n = A,T,C or G
attctgtcaatatgctctccagcctctgacacatgacgcgttcttaatacagacttgtttgcaaagaaaaaaaaatgtatattattaaaatcttgtaaatatctatggtacattaataaaacaattttaaacacttttgaattttaaagttcgcacatgattacacgcattcctaggtgcaacattaatctggggggttgtaactgctgtgtcttttaagtgacttatatggagagtataaataacacccctcaatgatggtgataatgaatacaaatttgcctcatagttaccatagctcacatgcacattttcatgtactccagacaatcacttcagtatttgaaattttcaccctacttcaaaataaaatacaattatttgtttatagttgggattctttaaaaatataaactattccaaagcacagtgtgcttttatctctgaatcaagttggaataagaaatctttttactcaataatatttcaatatacatgctgttcttctcagctcacttttcagaaggttcagtcataataaaggcagaaaaggtattttatggcaaagaaaaataaatgatggaaggtgagcacccacctaaaataatcttctaacaacttggtgtatattaagcagtcgctcatggcaaagtttaacatttgaactgttgcatgaacaaatctcaggtaattattacaagttgattgcaatgtatgtggccttatttttagaataaaacaatgtgggaacagaattattntgatcagttttctacactttggtcaaaatattatttttttgcaattttctcggcagctatgaaaataattctacatgaactanggttttagaaagaatttgcgggttgacttttnctctaggtgagcctggttcagcanggggccctcactccttaggattgtatagtctggagaag

SEQ ID NO: 22300 - DNA, 509 bp, Macaca Mulatta
acagtgatggcaacaaactcatagagtttaataatggccaaagagaactacatactgcccagttcaagagacgggaatacccagatggcactgttaaaaccgtatatgcaaacggtcatcaagaaacgaagtacagatctggtcggataagagttaaggacaaggagggtaatgtgctaatggacacggagctgtgacgatccctgtgtgatcatgaagtaacagtaactgatttttcttgttaaaaaatgtacatttattgtggattctgtttaatttattgtgtatgtgtggggaaaagattggattctaaaataaatgtttatcctgtggcatcttcatttttatattctttgaaatgcaatgatagctgtcatttataattcacctaccctgcctttcaacagagtaaggaaagcatttttactctttagaaactgtgtacaggtttttacaataagtgggtgtgtttattggttagaaatggctataaaaaccaagaagtacag

SEQ ID NO: 22301 - DNA, 565 bp, Macaca Mulatta
tccaacagcttctcaccacatattttccctttttcttctttccagggtgattcagggggccccttgatttgtaaaggtgtcttccatgccatagtctctggaggtcatgaatgtggtgtcgccaaaaagcctggaatctacaccctgctaaacaagaaataccagacttggatcaaaagcaaccttgccccacctcatacaaattaagttacaaatgattttcttggatgcacttgcttcttttttcctaatatgctcacaggttagagttggatgtaagtaaagcagaacacaagatggggtccatttttgtacttgtaagtcattttattaaggaatcaagttctttttctcttgtatcactgatgtatttctaccatgctggttttattctaaataaaatttagaagactctctgtttgtcttttatcacatgaagtaatatctacccccattccacccacactccccaaagggcaataaggtcactgaacaaaacagtaatggtaccaccttcaaccaggtgtgacttctgctggatcatcctaagttgttgggttgtttt

SEQ ID NO: 22302 - DNA, 199 bp, Macaca Mulatta
  misc_feature (1)...(199): n = A,T,C or G
tagcaccaaaggtgaagagctgataaaataatttttttaacttccttacttctccatgtactgccttttcanaggggtctcagaatttcgtgatattccactttcctttcctagtcaagggaatatctcttaattacctggagataggaatagactangaaccagctccnaactgattttcagagggacgtaagtgcac

SEQ ID NO: 22303 - DNA, 3677 bp, Macaca Mulatta
  misc_feature (1)...(3677): n = A,T,C or G
ttgatctgtgactgtttggaaggtggagcggcgcctgacatctccccccggcgcatnnnnnnnnnnnnnnnnnnnnnnnnnnnnnnnnnnnnnnnnnnnnnnnnnnnnnnnnnnnnnnnnnnnnnnnnnnnnnnnnnnnnnnnnnnnnnnnnnnnnnnnnnnnnnnnnnnnnnnnnnnnnnnnnnnnnnnnnnnnnnnnnnnnnnnnnnnnnnnnnnnnnnnnnnnnnnnnnnnnnnnnnnnnnnnnnnnnnnnnnnnnnnnnnnnnnnnnnnnnnnnnnnnnnnnnnnnnnnnnnnnnnnnnnnnnnnnnnnnnnnnnnnnnnnnnnnnnnnnnnnnnnnnnnnnnnnnnnnnnnnnnnnnnnnnnnnnnnnnnnnnnnnnnnnnnnnnnnnnnnnnnnnnnnnnnnnnnnnnnnnnnnnnnnnnnnnnnnnnnnnnnnnnnnnnnnnnnnnnnnnnnnnnnnnnnnnnnnnnnnnnnnnnnnnnnnnnnnnnnnnnnnnnnnnnnnnnnnnnnnnnnnnnnnnnnnnnnnnnnnnnnnnnnnnnnnnnnnnnnnnnnnnnnnnnnnnnnnnnnnnnnnnnnnnnnnnnnnnnnnnnnnnnnnnnnnnnnnnnnnnnnnnnnnnnnnnnnnnnnnnnnnnnnnnnnnnnnnnnnnnnnnnnnnnnnnnnnnnnnnnnnnnnnnnnnnnnnnnnnnnnnnnnnnnnnnnnnnnnnnnnnnnnnnnnnnnnnnnnnnnnnnnnnnnnnnnnnnnnnnnnnnnnnnnnnnnnnnnnnnnnnnnnnnnnnnnnnnnnnnnnnnnnnnnnnnnnnnnnnnnnnnnnnnnnnnnnnnnnnnnnnnnnnnnnnnnnnnnnnnnnnnnnnnnnnnnnnnnnnnnnnnnnnnnnnnnnnnnnnnnnnnnnnnnnnnnnnnnnnnnnnnnnnnnnnnnnnnnnnnnnnnnnnnnnnnnnnnnnnnnnnnnnnnnnnnnnnnnnnnnnnnnnnnnnnnnnnnnnnnnnnnnnnnnnnnnnnnnnnnnnnnnnnnnnnnnnnnnnnnnnnnnnnnnnnnnnnnnnnnnnnnnnnnnnnnnnnnnnnnnnnnnnnnnnnncctggcgcccccctgttcccctgagccagcaggaatggccgcagaggtggccctgattgagtcagccaaggatcagaaagcggcgaacccatacgtcacgcccaataaccgctacggctaccagaacggtgccagctacacctggcagttcgaggcccgcaaggcgcagatcctcaagtgcatggagtgcggcagctcccacgacaccctgcagcagctcaccgcccacatgatggtcaccgggcacttcctgaaagtgaccacctcagcctcaaagaagggcaagcagctggtgctggaccccgtggtggaagagaagatccagtccatccccctgccgcccaccacccacacgcggctgccggcctccagcatcaaaaagcagcccgagtctcccgcagggtccacagcttcggaagacaagaaagagccggagaaggagaagccgcccgtggctggtgatgcggagaagatcaaggaggagagtgaggacagctcggagaaatttgagcccagcaccctgtacccctacctgcgcgaggaggacctggacgacagccccaagggagggctggacattctcaagtccctggagaataccgtctccacggccattagcaaagcccagaatggcgcaccctcgtggggtggttaccccagcatccacgcggcctaccagctgccgggcaccgtgaagccactcccggcggccgtgcagagtgtgcaggtgcagccgtcctatgctggcggcgtgaagtcgctgtcttccaccgagcacaacgccctcctgcactcgccggggagcctcacgcccccaccgcacaagagcaatgtgtctgccatggaggagctggtggagaaggtcacgggcaaggtcagcatcaagaaggaggagaggccccctgagaaggagaagagctccccggccaaagctgcgtcccccgtagcaaaagagaataaagatttccctaaaacggaggaagtcagcggcaaacagcagaagaagggccctgaggccgagactgggaaggccaaaaaggagggaccgctggacgttcacaccccaaacggcacagagcctctcaaagcaaaggtcaccaacggctgtaacaacctggggatcatcaccgaccactcgccagagccttccttcatcaaccctctgagcgctttgcagtccatcatgaacacccacctgggcaaggtgtccaagcccgtgggcgcctcgctggacccgctggccatgctctacaagatcagcaacagcatgctggacaggccggcgcgccccgctgccccggtgaagcaggccgacgccatcgaccgctactactacgaaaacagcgaccagcccattgacttaaccaagtccaagaacaagccgctggggtccggcatggccgatccagtggcgtcacctctgcgggagagcgcgcttatggacatctctgacatggtaaaaaatctcacaggccgcctgacgcccaagtcctccacgccctctacagtgtcggagaagtctgatgctgatggcagcagctttgaggaggcactggatgagctgtcaccggtccacaagaggaagggccggcagtccaactggaacccgcagcacctgctcatcctgcaggcccagttcgcctcgagcttgcgggagaccacagagggcaagtacatcatgtcggacctgggcccacaggagagggtgcacatctcgaagtttaccggcctctccatgaccaccatcagccactggctggccaatgtgaagtaccagttgaggaggacagggggaacgaaattcctaaagaacctggacacagggcatcctgttttcttttgcaacgattgtgcctctcagttcagaactgcatctacatacataagtcatttggagacgcacttgggcttcagcctgaaggatctatccaagctgccactcaatcagattcaagaacagcagaatgtttcgaaagtcctcgccaacaaaactctgggcccgctgggggccactgaggaagacttgggctccacattccaatgtaagctctgcaaccggacttttgcgagcaagcacgcagtcaaactgcaccttagcaagactcatggcaagtcccccgaggaccacctgatctatgtgactgagttggagaaacagtagcgtccaggtatgcaagagaccgcggaacattgcactaaacgtcgtcgagctgcactaggcctggcctgagcctctaaaatcagtctttcctttgttaatggcccgcctctctggaccttggttttcttacacatattttgtatatttatatgctctctgtccgatctgtgcatgttatttttctttttccgtgagtcaaagtctgacctttattttcaacatctgttcttgatgttaagctatcttttgtaggaaatagtggggcacactactcagagacattatttagcagtaaagaaagacacaaataacaatgataaaaagacatcctaaaatgacgaagttgccatgacaataaaggtcatagaacctggtagtgtcaaatttaacgctttgaggactgtaattgcatttctgtgcctttcact

SEQ ID NO: 22304 - DNA, 623 bp, Macaca Mulatta
gggctctaaagaaggaagtttatgaaatagaattatgccagagggagataatgggacttacaaagcatggccttgagtactccagttttggagatgttttggaatatagaagccgccttgcaaaacaactgggatatccaaatgggcatttcagtcaagaaatattcactcctgaatacatgcccacatttattcaacagacattccttactctccagcaaataatgaataatgaagacagaccctttgaatgtaagaaatgtggaaaggcctttagtcagaactcacaatttattcaacatcagagaattcatattggtgaaaaatcttatgaatgcaaagagtgtgggaaattctttagttgtggttcacatgttactcggcatctgaaaattcatactggcgaaaaaccctttgagtgtaaggagtgtggaaaggccttcagttgtagctcatacctttctcaacatcagagaatccataccggtaagaaaccctatgaatgtaaggaatgtgggaaggcctttagttattgctcaaatcttattgaccatcagcgaattcacaccggtgaaaagccttatgcatgtaaggtatgtgggaaagccttactaaaagtcaca

SEQ ID NO: 22305 - DNA, 685 bp, Macaca Mulatta
  misc_feature (1)...(685): n = A,T,C or G
ccccaacatccttccagagcttggccatcctcctaaagaccgctttcctacccatattaccggccttccctagagtctgccctaaaggtcccaacaggcatttccatctggttccgtggctccctgaagcccagggctgcgcttggccagctcttctgatgcctgtgtgaactaatctgggcccagcctttctccagtgggccacgagcgcagccccaccctaaccaggtgccaagggcacacaccacagacctgaccttgttggctttgtggtgtgataaaacactctccatggccacttggcacagaggccagcagcccgaagcaactgtaattaaagcctggcactgaatgttccctttccttgtcattgcacaaaatctgtgctgctgaggttaggagcagaagaaggtggggaagctagggggagggaagacaagaaggcactagaatgctcttatctgctgacctcccacccccaccacacgggatccaagatggactcagccaggcctcggcacacgtggtgctgcctcctcatgcggtgccaatcctgtgacgccagaacctcgcccctcgacacaactgtctgctcacaggcccaatggcctgnggaaggtaaggggggccgggtgggcagatagcgggttaatgggctgatttactgttatcctcatcttcttgg

SEQ ID NO: 22306 - DNA, 631 bp, Macaca Mulatta
  misc_feature (1)...(631): n = A,T,C or G
agattaccttctatgaagacaaaaattttcaaggccgtcgctatgactgtgactgcgactgtgcagatttccacacatacttaagtcgctgcaactccataaaagtggaaggaggcacctgggctgtttacgaaaggcccaactttgctgggtacatgtacatcttaccccagggagagtaccctgaataccagcgttggatgggcctcaatgaccgcctcagctcctgcagagctgttcatctgngcctagtggaggccagtataagattcagatctttgagaaaggggattttaatggtcagatgtatgaaaccactgaagattgcccttccatcatggagcaatttcatatgcgagagatccactcctgtaaggtgctggagggtgtctggattttctatgagctacccaactaccgtggcaggcagtacctcctggacaagaaggagtaccggaagcccatcgattggggtgcagtttccccagctgtccagtctttccgccgcattgtggagtaatgacatgaatggggccatattcttcctgaggcccaaatgctggctggccttgtggtccaaataggcatcatcaataaaacagttggcatgcatccccactgctgactataa

SEQ ID NO: 22307 - DNA, 149 bp, Macaca Mulatta
ctctcccttgggctgctggttgctgactttggtgccatggtcaataacccacacctgagtgatgtccagttccagacagacagcggggaggtgctttacgcccacaagttcgtgctttatgcccgatgcccgctcctcatccagtatgt

SEQ ID NO: 22308 - DNA, 640 bp, Macaca Mulatta
  misc_feature (1)...(640): n = A,T,C or G
tgtcggagnttgctgcgaagaaaggcgtgagcgagcaatggccaagggagaattgcgaagatgcgagatgctggtcgagccgtctggcgaataaaaagcgagtctcttgaaggaggaaatcggcggtaggtcggaaactcgcggggaaagggccgttgcgatggaactcagtagtcgccctaagcatggttaaaccgcgccctgtaaaaagttatgttctaggcctgcatcccccattttatcgcatcaaaaattgagcattgggaacaaagttggggtcaagaggaaagaatgcgtgctggttttgttaggtgttagtataccgtgtttttgtgggctctccctcccacactggtaattagagaaaaataaaagtaacttcgggtttgtttttgtgaaacgtaagtcagttctaatagggcagtcgccaggaagtagacctgtctcggcactaagggagtttggggaaagccacagaagacctaggctgtggagcacaatggaacgcaggctgagaacgcatggaaagaaataaaagagtaaagccagaggccattacctgaaatttccagactgttctatgagacaggtatgtcagatgaccgtgtctcacagaagtggcatacttcttggtggttca

SEQ ID NO: 22309 - DNA, 419 bp, Macaca Mulatta
  misc_feature (1)...(419): n = A,T,C or G
gggctccgccagacagccgctgtgccgccatcatggacaccagccgtgtgcagcctatcaagctcgccagggtcactaaggtcctgggcaggaccggctctcagggacagtgcacgcaggtgcgcgtggaattcatggacgacacgagccgctctatcatccgcaatgtgaaaggccccgtgcgcgagggcgacgtgctcaccctgttggagtcagagcgagaagcccggaggttgcgctgagcttgcctgctcgctgggtcttggatgttgggttcgaccacttggccgatgggattggtgtgtcacaatctgctcctttattttttgcccgccacgcggaattgagatgctcctttaaataaagcgtttgtgtttcaagccnnnnnnnnnnnnnnnnnnnnnnnnnnnnnnnnnnnn

SEQ ID NO: 22310 - DNA, 464 bp, Macaca Mulatta
  misc_feature (1)...(464): n = A,T,C or G
ttcatctatagcagttgaagcactacaaatagatagctttggttcagttacatgctttcaacaagagtctcttgatggttctcgaatgatacttggaaaatctcagcaacctgagtctaaaatgctatctgaatttataaaagaaaaaagtgctacttgctcaaatgaggaaaaagataactgtaaacgagtcaataataatctgaagagaaagaaacagatggagatcacctatcttcattactgaacaaaactacagttcacaatatacctggatttgacagcataaaagaaaccaatatgcaggatggtagtgtacaggtcattaaagatcatgtgaccaattgtgcattcaattttcagaattctttgctatatgatctggattaattctatataattttggacttttaaatattaaggttaaatatgcctgtatctaatagattctgttanctgttgtc

SEQ ID NO: 22311 - DNA, 868 bp, Macaca Mulatta
gcgttggttcataaaggaattgaaatgcaccagcggttgtctaacatagaaaggaattggccttactactttgggtttggtttgcccttggcttttctcacagcaatgcagtcctcatatattatcagtggctgccttttctctatcctctttcctttattcattatcagcgccaatgaagcaaagacccctggcaaagcgtatctcttccagttgcgcctcttctccttggtggtcttcttaagcaacagactcttccacaagacagtctatctgcagtcagccctgagcagctccacttctgcagagaagttcccttcaccgcatccatcacctgccaaactgaaggctgctgcaggccactgagttgcctgccatccaaaggggatgggcgggattggaagaaagctgtggcagctcttttccctgttcacctccccctgccagggaaggcaggacccactctgccaagggccctctgcgtattcccttctctctgaggaattgaaatttttgtctctggtgcacgtaaggcagaatgttccctgacaccagtgtgtggatttttaacatcaccgtgagtctgaaaggaccacaagtttttctgcagctattttctagcatttgccagtccctgtgcctggactgatttgaatactttgtttttctccctgtgccatttaccttccacctttcatcctgccttcttacaccttggatgatggatttcgtaatctagctgttgatccgcgggatcgtatccacgtgcttctgtgagccatactggattggagcaagaagtccaatgcccggcctcctttacctacggtggtctttaccactcggtggcactgccctgcaaaaaaaa

SEQ ID NO: 22312 - DNA, 892 bp, Macaca Mulatta
  misc_feature (1)...(892): n = A,T,C or G
gggagatgagtaatgtgttttattttatatgccaatctactttgtttaaaaaaggtttaaatcaggacttgtgaaaacctgtagtgaaataccttaagctgttaactgtaaggcgtggaataggagttgctcagtggattggttatatgttgtggactacttaagtctgcatttgttactgtgttaataaacaatattaaaaaccnnnnnnnnnnnnnnnnnnnnnnnnnnnnnnnnnnnnnnnnnnnnnnnnnnnnnnnnnnnnnnnnnnnnnnnnnnnnnnnnnnnnnnnnnnnnnnnnnnnnnnnnnnnnnnnnnnnnnnnnnnnnnnnnnnnnnttttnnnnnnnnnnnnnnnnnnnnnnnnnnnnnnnnnnnnnnnnnnnnnnngttggggccgcgcccccnnnnnnnnnnnnnnnnnnnnnntcctaattttttttccccaaaaagaaaacccnnnnnnnnnnnnnnnnnngtggtttttctnnnnnnnnnnnnnnnnnnnnnnnnnncgggggaacaaacnnnnnnnnnnnnnnnnnnnnnacccccgaggaggtgtttttcgtgggagctcttttatggggggttattcacacacaggggttttccccgagccgcccttctttatatattannnnnnnnnnnnnnnnnnnccgccctcttaaaagaaggtgtgggtggttttaattaaaaataaacaccctccccgccccgaggtgagacccctccccacacaggcgggggtaaaaaaaacaataaataacgcccgggagggacaacaccaccttgttgggcccgccgggggaaaaataataattcttccccccggggagagaaaagacgggggccnnnnnnnnnnnnnnnnnntcgctatatgtgccccccca

SEQ ID NO: 22313 - DNA, 780 bp, Macaca Mulatta
  misc_feature (1)...(780): n = A,T,C or G
ggatagagttttgcaccacggcaagaaaaaccaaaaaccaaagaacccgaaacaaagcaaaacccagcagactgtacttagcattgtctaaatccattctcaaattccaaacatcacagacacctttcacacaagaaatacaaaaaccaccaccctccagcctgggcaacgtagtgaaaccttgtctatccaaaaatttaaaaataagctgggcgtggtggtacacgcctgtcgtcccagctactacagaggctgagccaggaggatcgctcgagcccaggagttcgaaaatgcagtgagctgtaattgcatcactgtnnnnnnnnnnnnnnnnnnnnnagcctgtctcaacaacccccacccccactacccctgttattctaggtataaattgaatttcatctgatgtaagggacgagaaaaacccaacaggaaacagacacatcctccagttctatggattgtgcagacattgagtttctagaaaaacatatccatggtaactggtccctggcaattttgtttacatgaaatggggagaaagtcaccgaaatgggtgtcgccgccacccccccccccttcattccctaacctgcgaaccctttcaacttctcacatcaggccctttgagacttctttctccctctccgggtttccaccacctccaaacacgcacagtttcaccaagtggccttctggtaaccccttgtaattggaaaaggagaacgctggctcccacggaaaggggaaccagggaatggctggcccggtttttacccc

SEQ ID NO: 22314 - DNA, 118 bp, Macaca Mulatta
ggaagcccgtcagcctgagctacagatgcccatgccgattcttcgaaagccatgttgccagagccaacgtcaagcatctcaaaattctcaacactccgaactgtgcccttcagattgt

SEQ ID NO: 22315 - DNA, 3543 bp, Macaca Mulatta
  misc_feature (1)...(3543): n = A,T,C or G
cagatgtcccggtagtcgcggctctggcgctccgcaccctccgtctgcggcagcggaggctggcggtcccggcccctgcccggccccctcccccaacctcatgcctcagccctaaccccgccgccctcccctgcggggggcatttctccgtgtcccccgcccactccgtccacttcgggcgccatgaacgaccagtaccaccgggcagcccgggatggctacctggagctcctcaaggaggccacccggaaggagctgaatgcccccgatgaggatggcatgaccccaactctctgggctgcctaccacggccacctggagtcgctgcgcctcattgtgagccgcgggnnnnnnnnnnnnnnnnnnnnnnnnnnnnnnnnnnnnnnnnnnnnnnnnnnnnnnnnnnnnnnnnnnnnnnnnnnnnnnnnnnnnnnnnnnnnnnnnnnnnnnnnnnnnnnnnnnnnnnnnnnnnnnnnnnnnnnnnnnnnnnnnnnnnnnnnnnnnnnnnnnnnnnnnnnnnnnnnnnnnnnnnnnnnnnnnnnnnnnnnnnnnnnnnnnnnnnnnnnnnnnnnnnnnnnnnnnnnnnnnnnnnnnnnnnnnnnnnnnnnnnnnnnnnnnnnnnnnnnnnnnnnnnnnnnnnnnnnnnnnnnnnnnnnnnnnnnnnnnnnnnnnnnnnnnnnnnnnnnnnnnnnnnnnnnnnnnnnnnnnnnnnnnnnnnnnnnnnnnnnnnnnnnnnnnnnnnnnnnnnnnnnnnnnnnnnnnnnnnnnnnnnnnnnnnnnnnnnnnnnnnnnnnnnnnnnnnnnnnnnnnnnnnnnnnnnnnnnnnnnnnnnnnnnnnnnnnnnnnnnnnnnnnnnnnnnnnnnnnnnnnnnnnnnnnnnnnnnnnnnnnnnnnnnnnnnnnnnnnnnnnnnnnnnnnnnnnnnnnnnnnnnnnnnnnnnnnnnnnnnnnnnnnnnnnnnnnnnnnnnnnnnnnnnnnnnnnnnnnnnnnnnnnnnnnnnnnnnnnnnnnnnnnnnnnnnnnnnnnnnnnnnnnnnnnnnnnnnnnnnnnnnnnnnnnnnnnnnnnnnnnnnnnnnnnnnnnnnnnnnnnnnnnnnnnnnnnnnnnnnnnnnnnnnnnnnnnnnnnnnnnnnnnnnnnnnnnnnnnnnnnnnnnnnnnnnnnnnnnnnnnnnnnnnnnnnnnnnnnnnnnnnnnnnnnnnnnnnnnnnnnnnnnnnnnnnnnnnnnnnnnnnnnnnnnnnnnnnnnnnnnnnnnnnnnnnnnnnnnnnnnnnnnnnnnnnnnnnnnnnnnnnnnnnnnnnnnnnnnnnnnnnnnnnnnnnnnnnnnnnnnnnnnnnnnnnnnnnnnnnnnnnnnnnnnnnnnnnnnnnnnnnnnnnnnnnnnnnnnnnnnnnnnnnnnnnnnnnnnnnnnnnnnnnnnnnnnnnnnnnnnnnnnnnnnnnnnnnnnnnnnnnnnnnnnnnnnnnnnnnnnnnnnnnnnnnnnnnnnnnnnnnnnnnnnnnnnnnnnnnnnnnnnnnnnnnnnnnnnnnnnnnnnnnnnnnnnnnnnnnnnnnnnnnnnnnnnnnnataacggggggctcctctccccagaccaaaatgaattgcaagttgccacaacctgtggtggggcctcaaggtcctcacagtcgccagtcctgcagcccccttccccaggagcaaggaccacgtgggtcgactcctttgaaaggctgtccacaccttgaagcagagggtgtagcctggaggcaccagaggggcaagagaatgtcccctccagttctgaggggtcacaaaggccctgagccacccattctgagcagccctaaaggacatgtagacttgggggaggcttaccccagagggagggcaggggcatggaactggatgggagtgtgggaggtgaatgccggagggnnnnnnnnnnnnnnnnnnnnnnnnnnnnnnnnncccctcccctgatggtcttgttctcttgtgctcaggccggagacttgctcacttcctgcatttttgtgaagggaagagtttgggctgcctcccctcttccagtccaccccagaggggaagttcctcagccagactcttcagccaaatgccccaactttcagtctgcacccattccaagcacagccagcatcccctccttcagccagtggccaaggcccggagctggagagccnnnnnnnnnnnnnnnnnnnnnactgacgccctttccagctcatccagggatggagcctggcctgtcttcctccgcctcccgctttttcattgggcagcctggccccgcccagggaccccagaggggcagggnnnnnnnnnnnnnnnnnnnnnnnnnnnnnnnnnnnnnnnnnnnnnnnnnnnnnnnnnnnnnnnnnnnnnnnnnnnnnnnnnnnnnnnnnnnnnnnnnnnnnnnnnnnnnnnnnnnnnnnnnnnnnnnnnnnnnnnnnnnnnnnnnnnnnnnnnnnnnnnnnnnnnnnnnnnnnnnnnnnnnnnnnnnnnnnnnnnnnnnnnnnnnnnnnnnnnnnnnnnnnnnnnnnnnnnnnnnnnnnnnnnnnnnnnnnnnnnnnnnnnnnnnnnnnnnnnnnnnnnnnnnnnnnnnnnnnnnnnnnnnnnnnnnnnnnnnnnnnnnnnnnnnnnnnnnnnnnnnnnnnnnnnnnnnnnnnnnnnnnnnnnnnnnnnnnnnnnnnnnnnnnnnnnnnnnnnnnnnnnnnnnnnnnnnnnnnnnnnnnnnnnnnnnnnnnnnnnnnnnnnnnnnnnnnnnnnnnnnnnnnnnnnnnnnnnnnnnnnnnnnnnnnnnnnnnnnnnnnnnnnnnnnnnnnnnnnnnnnnnnnnnnnnnnnntggatcggggctaagggagagcttgcctgtgtcccagccctgtgatggtgagaccaggggaaaggccagctcagagggtggtcagagcatgtgtcctcagacatgtgcccccagagctctccagccagaccgaggtcacagatatgggagagtccctcaggagcccgctgacatgtgtgtgccccttcgcaccccatgcagaggtgctctcctccttcctcagccatggccccccatccctgacctcagcttgggaagcagctcctgctgggagcatggccacagtccccagctcctcccggggcccccttggctggggtaggggaaagagagccctcaaaggcctctttttggtctgtccgggggttcccattcccatatacatgcccagagtgggggcatggaggagatggtccctgtcctattgcaggacactgagggcttggctgcctgccactgctatctggagcccaccgcagtgcttctccctgttctctgggcctgagcctggggccacccccaagtgccgacttgtttttcccagagccccaggtgctgccccttctctcccattccttgtccatttactgccgcagcccctcctgattctagccagtgctggggtggagcaggctctgtgtgcccaccactgtagcccgaatccctcttgcaggctcattaccacttttgtaaagaatgttctc

SEQ ID NO: 22316 - DNA, 814 bp, Macaca Mulatta
  misc_feature (1)...(814): n = A,T,C or G
cgagtttgtaagaaagcacagccaggcgtggtggctcatgtttgtaatcctagcacttagggaggctgaggcaggtggatcatctgaggtcaggagtttgagaccagcctgctcaacatgacgaaaccccgtctctactaaaaatacaaaaattagccaggtgtggtggtgaatgcctgtaatcccagctacttgggaagctgaggcaggagaatcacttgaacccagaagacggaggttgcagtgagccgagatcacgccactgcactccagcctgggtgacaagagtgaaactctgtctcnnnnnnnnnnnnnnnnnnnnnnnnnnnnnnnnnngaaattaagagtctcaggccctgccccagacctagaatcaggacctgtgtgttaacaagccccgcatctgtgatccatgtacaccatgaaggctgagaaagcttaactcccaaacaccttctacctcccagagtgtgtggctttgatgccatttgtctgaacatcacaaggaaccacatgggaaaacaggacttggtggcgtgcccctggcaggcgagacaaagcagctgtgggcgtcaggctgtggggnnnnnnnnnnnnnnnnnnnnnnnnnnnnnnnnnnnnnnnnnnnnnnnnnnnnnnnnnnnnnnnnnnnnnnnnnnnnnnnnnnnnnnnnnnnnnnnnnnnnnnnnnnggtggctcatgtttgtaatcctagcacttagggaggctgaggcaggtggatcatctgaggtcaggagtttgagaccagcctgctcaacatgacgaaaccccgtctctactaaaaatacaaaaa

SEQ ID NO: 22317 - DNA, 614 bp, Macaca Mulatta
  misc_feature (1)...(614): n = A,T,C or G
tgggaccagtggaagcggtacagcagcaagtcttggaagaggttcctggagaaggctcgagagatgacgacccacctggagctgtggcgggaggacattcgcagcatagaagnnnnnnnnnnnnnnnnnnnnnnnnnnnnnnnnnnnnnnnnnnnnnnnnnnnnnnnnnnnnnnnnnnnnnnnnnnnnnnnnnnnnnnnnnnnnnnnnnnnnnnnnnnnnnnnnnnnnnnnnnnnnnnnnnnnnnnnnnnnnnnnnnnnnnnnnnnnnnnnnnnnnnnnnnnnnnnnnnnnnnnnnnnnnnnnnnnnnnnnnnnnnnnnnnnnnnnnnnnnnnnnnnnnnnnnnnnnnnnnnnnnnnnnnnnnnnnnnnnnnnnnnnnnnnnnnnnnnnnnnnnnnnnnnnnnnnnnnnnnnnnnnnnnnnnnnnnnnnnnnnnnnnnnnnnnnnnnnnnnnnnnnnnnnnaggtcggtggaaggattcaaaatcaacctgattcggagtgaggagcactttcagagttactgcaacaagatctttgccggctgggacttctgcatcactaaccgcagcatggcggatctgaagcacagcagcttgcggtacgagctccgagtg

SEQ ID NO: 22318 - DNA, 227 bp, Macaca Mulatta
  misc_feature (1)...(227): n = A,T,C or G
gtgaatgcatcccggcaggatattgaagacgctgaagaaacagcaactcaaacttgtggtgggacagattccacagaaggattgtttaatatggngggattcgcagaggcatttttggaacatctctggaaaaaattgcaggatccaagtaatcctgccatcatcaggcaggctgctggaaattatattggaagctttttggcaagagctaaatttattcctcttat

SEQ ID NO: 22319 - DNA, 349 bp, Macaca Mulatta
  misc_feature (1)...(349): n = A,T,C or G
agctgtcaaagcttgaaaaacagcagcagagaaaagaaaagaccagagctaagggaccttccgaatcaagcaaggaaagaaacactccccgaaaagaagaccgcagtgccagcagcggggcggagggtgacgtgtcctctgaacgggagccgtagctcaggaggcagaattcagnagtgtgttatcattgggcagaactggaccctgaaaaattcaagatgctaagcacctacactactttaagaatttggaactgaaacatgaagaggaagacagaaataagaagttgggaacctgaatggctctgcaaaagacaccaaaggaccgttttgtcattttctgttgttgc

SEQ ID NO: 22320 - DNA, 793 bp, Macaca Mulatta
gggggacctttggtcgagagggaaagcagaaggaagtctgctggtcacagcggggcacctcgaggagaggacgactagaagcacacggcccggaaaggtccaggtcagggaagggaataactgtgcttgaagaagaaaattcccaacatggacaaaccacgcaaagaaaatgaagaagagccgcagagcgcgcccaagaccgatgaggagaggcctccggtggagcactctcccgaaaagcagtccctcgaggagcagtcttcggaggagcagtcctcggaggaggagttctttcctgaggagctcctgcctgagctcctgcctgagatgcttctctcggaggagcgccctccgcaggagggcctttccaggaaggacctgtttgaggggcgccctcccatggagcagcctccttgtggagtaggaaaacataagcttgaagaaggaagctttaaagaaaggttggctcgttctcgcccgcaatttagaggggacatacatggcagaaatttaagcaatgaggagatgatacaggcagcagatgagctagaagagatgaaaagagtaagaaacaaactgatgataatgcattggaaggcaaaacggagccgtccttatcctatttaatgtgttcgcccttttattctgtttttgcctgctaatagtattgccattgccacctggaactttctgtgcgtttttcttaatgcccttttccccatattctgaatttttaacttttttgtgaaggattttattttaaaatgttttagcttgtgtactccgctttaaa

SEQ ID NO: 22321 - DNA, 394 bp, Macaca Mulatta
ctggtgtttggtttggaacactttattatgcggccttgaaaggagtgaatgtcgttccttttcttgaactcattgggttacctgacagtgtggtaagcatcctgaaaaactcccagagtggaaatgcactcacagcatatgccttgtttaagattgcaacacctgctcggtacaccgtgactttggaaggaacatccttcactgtgaagtatctgcgcagtcatggctacatgtccacgccaccacccatcaaggaatatctacaggacaggatggaggagacaaaggagcttatcacagagaagatggaagaaacaaaagacagactcactgaaaagttacaagaaaccaaagaaaattttttctttaagaaaaaagtggaataaggtgcctt

SEQ ID NO: 22322 - DNA, 783 bp, Macaca Mulatta
gggacacagaaaactaagcatagcacaccagtgtgctttcaacttttactttctcttttcctaggttatccagaaaatcagtgctgtggataaagatgagccatccaatggacatcagttttacttcagcttaacaacggatgcaacaaataaccacaacttttcattgaaagataacaaagacaatacagcctcaatattgaccaggagaaacggcttccggagacaagaacaatcggtttactatctgccaattttcattgtggacagtggatctccttcacttagcagcgccaacaccctcaccatccgcgtgtgtgactgtgatgccgacggtgtagcccagacctgcaatgcagaggcctatgtcttaccagctggccgcagtacaggagccctgatagcaatactcgcctgggtcttgacattattggtgttgatccgccttatcggcaccatgagaaagacggaaaaagaaccgccttatttttgacgaagaaagagacatcagagaaaatattgtgagatacgatgaccagggcgggggaaaaaaaggacacggaaaccctttgacatgggctgcactgggagaaccgccaccgggatccgagaacaccgaagaccgccgaggggatggaaaccgccgaaaatttccggggccgggaagccggggcggctttgtagaaagccatccgcggggtagaggggccagcttgtgagggaaaaggtggttttggggagaagaaatggaaaaaaagacccgcgaaagagtgaaaccgcaag

SEQ ID NO: 22323 - DNA, 751 bp, Macaca Mulatta
  misc_feature (1)...(751): n = A,T,C or G
gaaatcgaccagagggcaaagtgttggagacagttggtgtgtttgaggtgccaaaacagaagggaaaatatgagaccgggcannnnnnnnnnnnnnnnnnnnnnnnnnnnnnnnnnnnnnnnnnnnnnnnnnnnnnnnnnnnnnnnnnnnnnnnnnnnnnnnnnnnnnnnnnnnnnnnnnnnnnnnnnnnnnnnnnnnnnnnnnnnnnnnnnnnnnnnnnnnnnnnnnnnnnnnnnnnnnnnnnnnnnnnnnnnnnnnnnnnnnnnnnnnnnnnnnnnnnnnnnnnnnnnnnnnnnnnnnnnnnnnnnnnnnnnnnnnnnnnnnnnnnnnnnnnnnnnnnnnnnnnnnnnnnnnnnnnnnnnnnnnnnnnnnnnnnnnnnnnnnnnnnnnnnnnnnnnnnnnnnnnnnnnnnnnnnnnnnnnnnnnnnnnnnnnnnnnnnnnnnnnnnnnnnnnnnnnngcacctccttttgtggctcgggagacactaagggcctggcaagagaagaatcatccctggctggagctctctgatgttcatcgggaaacaactgagaacatacgtgtcactgtcatccccttctacatgggcatgagnnnnnnnnnnnnnnnnnnnnnnnnnnnngtggcgctactgtatccgtttggagaaccttgacagtgacgtggtacagctccgggagcggcactggaggatattcagtctctccggcaccttggagacagtgcgaggccgaggggtagtgggcagg

SEQ ID NO: 22324 - DNA, 829 bp, Macaca Mulatta
gggatgctttattaagcgcttgactttcttctttacgaaggtctgggggttgttgctcccaccgggttctggagaacgccatcacctcgctgcttaaaattaaaccacaggttccattatgggtcgacttgatgggaaagtcatcatcctgacagccgctgctcaggggattggccaagcagctgccttagcttttgcaagagaaggtgccaaagtcatagccacagacattaatgagtccaaacttcaggaactggaaaagtacccgggcattcaaactcgtgtccttgatgtcacaaagaagaaacaaattgatcagtttgccaatgaagttgagagagttgatgttctctttaatgttgctggttttgtccatcatggaacagtcctggattgtgaggagaaagactgggacttctcgatgaatctcaatgtgcgcagcatgtacctgatgatcaaggcattccttcctaaaatgcttgctcagaaatctggcaatattatcaacatgtcttctgtggcttccagcatcaaaggagttgtgaacagatgtgtgtacagcacaaccaaggcagctgtgattggcctcacaaaatctgtggctgcagatttcatccagcagggcatcaggtgcaactgtgggtgcccagggaacggttgaataccccatcttctacaagaaagaattccaggccgcgaggaaattcctgaaaaaggcacggaatggaatttccttgaggaagaataatagacggggccacaatttgctgcctgcgagagaaaaaagtcagggctcgggatgttgcgagcggaagtctcgggcctttcc

SEQ ID NO: 22325 - DNA, 100 bp, Macaca Mulatta
gacctctgactgacgaaagaaaacgggacctgggacgcttgcacaaaagaacccgacaaaaaccagaaccggcactcactctcgtaccggagaggtggac

SEQ ID NO: 22326 - DNA, 714 bp, Macaca Mulatta
  misc_feature (1)...(714): n = A,T,C or G
ggttcttgtcattgtgggaagtgcatttgttctgctgaagaatggtatatttctggggaattctgtgactgtgatgacagagactgcgacaaacatgatggtctcatttgtacaggncagggaatggaatctgtagctgtggaaactgtgaatgctgggatggatggaatggaaatgcatgtgaaatctggcttggctcagaatatccttaacaattacacgagagaggtctggattcttgttttttctaggccattagaacatttaaatgcaaagaaaatcctgtataatcaccactaggacaggttaaaaagaccattgtatatttttctattctgaattacgaaggaaatctgagtacctattagaaacgagttatgcaaattcagatgcaaataacactagaaaaaaatgtttcttccataattaacataagtggttcctaacgagagcaatttttccacccaaaagacatttggcaacatctacagacaactttgattgtcacactgggtggggtggggaagtatgtcgtaggcatttggtgggtagaggccagggatgctgctcagcatcctgcagtgcacaggacagcccccaaacaaggagttagccagccccatgtgtcagtggcgcccaaattgagaaacattgaattatatggctattagaaatccacattcttacacaataaagaccatattagaatctaag

SEQ ID NO: 22327 - DNA, 146 bp, Macaca Mulatta
agagaaggctgcaaagctgggaagcccggggtgtgctcctcccgcccttttggacccccgggcttgcaccggctgcactctgagaaccagctgcgcgccgagcggtgcaatgcagcacccaccctgcgggcctggcaattgcttgt

SEQ ID NO: 22328 - DNA, 4544 bp, Macaca Mulatta
  misc_feature (1)...(4544): n = A,T,C or G
tattgaccaaggtcaaatgacctatgatggtcaacattggcatgcnnnnnnnnnnnnnnnnnnnnnnnnnnnnnnnnnnnnnnnnnnnnnnnnnnnnnnnnnnnnnnnnnnnnnnnnnnnnnnnnnnnnnnnnnnnnnnnnnnnnnnnnnnnnnnnnnnnnnnnnnnnnnnnnnnnnnnnnnnnnnnnnnnnnnnnnnnnnnnnnnnnnnnnnnnnnnnnnnnnnnnnnnnnnnnnnnnnnnnnnnnnnnnnnnnnnnnnnnnnnnnnnnnnnnnnnnnnnnnnnnnnnnnnnnnnnnnnnnnnnnnnnnnnnnnnnnnnnnnnnnnnnnnnnnnnnnnnnnnnnnnnnnnnnnnnnnnnnnnnnnnnnnnnnnnnnnnnnnnnnnnnnnnnnnnnnnnnnnnnnnnnnnnnnnnnnnnnnnnnnnnnnnnnnnnnnnnnnnnnnnnnnnnnnnnnnnnnnnnnnnnnnnnnnnnnnnnnnnnnnnnnnnnnnnnngtccaggagggcaaggggctggggcccattcatgaaatgtggggcaagcacttcagcaaccccaaaagcatctcgtcactggccatgacaggacatgctggcagcttcatcaaagaatgccgagaagactattacccagggaggctgagatctcaggagagctacagtgatatgtctagtcagagtttcagtgagacccgaggcagcatccaagtccccaaatatgaggaggannnnnnnnnnnnnnnnnnnnnnnnnnnnnnnnnnnnnnnnnnnnnnnnnnnnnnnnnnnnnnnnnnnnnnnnnnnnnnnnnnnnnnnnnnnnnnnnnnnnnnnnnnnnnnnnnnnnnnnnnnnnnnnnnnnnnnnnnnnnnnnnnnnnnnnnnnnnnnnnnnnnnnnnnnnnnnnnnnnnnnnnnnnnnnnnnnnnnnnnnnnnnnnnnnnnnnnnnnnnnnnnnnnnnnnnnnnnnnnnnnnnnnnnnnnnnnnnnnnnnnnnnnnnnnnnnnnnnnnnnnnnnnnnnnnnnnnnnnnnnnnnnnnnnnnnnnnnnnnnnnnnnnnnnnnnnnnnnnnnnnnnnnnnnnnnnnnnnnnnnnnnnnnnnnnnnnnnnnnnnnnnnnnnnnnnnnnnnnnnnnnnnnnnnnnnnnnnnnnnnnnnnnnnnnnnnnnnnnnnnnnnnnnnnnnnnnnnnnnnnnnnnnnnnnnnnnnnnnnnnnnnnnnnnnnnnnnnnnnnnnnnnnnnnnnnnnnnnnnnnnnnnnnnnnnnnnnnnnnnnnnnnnnnnnnnnnnnnnnnnnnnnnnnnnnnnnnnnnnnnnnnnnnnnnnnnnnnnnnnnnnnnnnnnnnnnnnnnnnnnnnnnnnnnnnnnnnnnnnnnnnnnnnnnnnnnnnnnnnnnnnnnnnnnnnnnnnnnnnnnnnnnnnnnnnnnnnnnnnnnnnnnnnnnnnnnnnnnnnnnnnnnnnnnnnnnnnnnnnnnnnnnnnnnnnnnnnnnnnnnnnnnnnnnnnnnnnnnnnnnnnnnnnnnnnnnnnnnnnnnnnnnnnnnnnnnnnnnnnnnnnnnnnnnnnnnnnnnnnnnnnnnnnnnnnnnnnnnnnnnnnnnnnnnnnnnnnnnnnnnnnnnnnnnnnnnnnnnnnnnnnnnnnnnnnnnnnnnnnnnnnnnnnnnnnnnnnnnnnnnnnnnnnnnnnnnnnnnnnnnnnnnnnnnnnnnnnnnnnnnnnnnnnnnnnnnnnnnnnnnnnnnnnnnnnnnnnnnnnnnnnnnnnnnnnnnnnnnnnnnnnnnnnnnnnnnnnnnnnnnnnnnnnnnnnnnnnnnnnnnnnnnnnnnnnnnnnnnnnnnnnnnnnnnnnnnnnnnnnnnnnnnnnnnnnnnnnnnnnnnnnnnnnnnnnnnnnnnnnnnnnnnnnnnnnnnnnnnnnnnnnnnnnnnnnnnnnnnnnnnnnnnnnnnnnnnnnnnnnnnnnnnnnnnnnnnnnnnnnnnnnnnnnnnnnnnnnnnnnnnnnnnnnnnnnnnnnnnnnnnnnnnnnnnnnnnnnnnnnnnnnnnnnnnnnnnnnnnnnnnnnnnnnnnnnnnnnnnnnnnnnnnnnnnnnnnnnnnnnnnnnnnnnnnnnnnnnnnnnnnnnnnnnnnnnnnnnnnnnnnnnnnnnnnnntatttacatgtccattgtaaatgcaatgtaaatgagagctttgataaaatatttttgtattttgtaatatcaaaggaatttctatatcgtaggactcagtggggacttgcatgcacatccaccattgtctttgagtagtattaaaaggtggcccggtaccaccnnnnnnnnnnnnnnnnnnnnnntatacaaatttgttacatgtcagtgagacctttttcaaaggaatatattcaatttggctttttgtggctgaaaaaaaataactattagacccaaagcattttatgctccattccatcttaaggagccatccttaagtctgttcccaccctcagtagaatttattttctacaaagtggaagtaattttttttaaattgcaaatgtaatttttgccaattagagaaaccaaccagtgtcagtaaaattctgtgagaaatgccatccctgctgggaatgttgaagttacttaatgttgatgtatcccttggggaaagtgaaagtgactgtgagtggtgctgttgtgtgatgtcagcatgacgttgttttgaatgtggcattatgttctggtgctcatgtttcctggattgtattatctgctttcctttaccaaggcagacagagctgctgccttagcctgacaaccggttgtcctcaaagcaaatgaacttaagcatttgggattgagggacagaaggattctgagggggctctgggagggacggtgtgtgacatgtcatgcctggagaaggaacaaggctatttgaaaacagaaagcaggtcaagggtagaagttaaaggagaatctgaaggcaggtcagggaaaagaagaactggaaatgaaacagaggacaggtgacaaccacgtctcgaagagctcccagaggttgtagaaagaatccagtgtaaccagctcagtaaccagagtatctgggttactcaggaaggttgggctactgagatttcagtggtgcagtgactttgaaaaacaggctttgtcgggaggggatttccattttgaactttgaggaccgttggtcagaaannnnnnnnnnnnnnnnnnnnnnnnnnnnnnnnnnnnnnnnnnnnnnnnnnnnnnnnnnnnnnnnnnnnnnnnnnnnnnnnnnnnnnnnnnnnnnnnnnnnnnnnnnnnnnnnnnnnnnnnnnnnnnnnnnnnnnnnnnnnnnnnnnnnnnnnnnnnnnnnnnnnnnnnnnnnnnnnnnnnnnnnnnnnnnnnnnnnnnnnnnnnnnnnnnnnnnnnnnnnnnnnnnnnnnnnnnnnnnnnnnnnnnnnnnnnnnnnnnnnnnnnnnnnnnnnnnnnnnnnnnnnnnnnnnnnnnnnnnnnnnnnnnnnnnnnnnnnnnnnnnnnnnnnnnnnnnnnnnnnnnnnnnnnnnnnnnnnnnnnnnnnnnnnnnnnnnnnnnnnnnnnnnnnnnnnnnnnnnnnnnnnnnnnnnnnnnnnnnnnnnnnnnnnnnnnnnnnnnnnnnnnnnnnnnnnnnnnnnnnnnnnnnnnnnnnnnnnnnnnnnnnnnnnnnnnnnnnnnnnnnnnnnnnnnnnnnnnnnnnnnnnnnntccggagaattaactctattacgtttgtatagtaagtttgtaaactgcttggcaaactgattaagaaataatttgcaacaccgtgctactaaagtggcaggtttctggtagaaattgtgcgggtccaatttggagttttaagttccttgattgatgaaactaaaaaggcaattttggaaaaagaaaagagaaggggaaaagtagatcacttatcttagcaaacagttgaaaatatgtctgtcctctgtggccccaaatccagtgaaagaaattctcccagtaaaagttgcttcctaactctgtttttctcagaatacctcttacgtttctcaaagaaagcttcaactaccatcagcagaaagaaggtggcctaaaaactgacacatggccagtgcccagaggggtctagaggcataagtctagatgcccagagagcatccagggactgaactgctcaaagcttgagatgaaatgacatacaagcttcagggtaaagctgtctactagcaagattacctccctctattctaccattgcagatttcttcttaccccaaatgcaaccttacagagaatgctgaatgcggaaggccagttccttgcgatgatggcagaacctccaagtgaatgccctgttgaggaaaaggacatcattgtatttggaattccacctgctagtgatagctcacacatcacatcccagaatcccattcccagtgcattcttccctgaggcaagaacttaaggtcctcacctaattcctccatcaaaaacgttaactcttattggacaagctcctcctgtgagtggggactgtactcatttcctctt

SEQ ID NO: 22329 - DNA, 129 bp, Macaca Mulatta
gtgtaaaaaaccggatcagcactttaagccttacttgaaacagcaccttcccaaacgtttgcactatgccaacaacagaagaattgaggatatccatttattggtggaacgcagatggcatgttgcaag

SEQ ID NO: 22330 - DNA, 148 bp, Macaca Mulatta
  misc_feature (1)...(148): n = A,T,C or G
attgttctgatgacagggctggaatgtgacggttaattccctgtggagtagggggctgagcaaggcctgcagctgttgaacaaacttcagtacccccttannnnnnnnnnnnnnnnnnnnnnngctactatgcttcctagtattaagg

SEQ ID NO: 22331 - DNA, 693 bp, Macaca Mulatta
  misc_feature (1)...(693): n = A,T,C or G
acatttgtgtaacaccaatactcaacttcattaaagacatgcattatgtggttgctatcaatccctatgctttcagatgatcctacttacatcttcagatgtgtgataagataaagaacaaaacatatgcatctaaacctctgggcaatccatttgacttttaaatgtaataatggaattccaaacacttaacacattcagctatatgacagaaagtaaatctatggatatggtattttgtgaatgatcttttaaataaaagaaaaccttacgtnnnnnnnnnnnnnnnnnnnnnnnnnnnnnnnnnnnnnnnnnnnnnnnnnnnnnnnnnnnnnnnnnnnnnnnnnnnnnnnnnnnnnnnnnnnnnnnnnnnnnnnnnnnnnnnnnnnnnnnnnnnnnnnnnnnnnnnnnnnnnnnnnnnnnnnnnnnnnnnnnnnnnnnnnnnnnnnnnnnnnnnnnnnnnnnnnnnnnnnnnnnnnnnnnnnnnnnnnnnnnnnnnnnnnnnnnnnnnnnnnnnnnnnnnnnnnnnnnnnnnnnnnnnnnnnnnnnnnnnnnnnnnnnnnnnnnnnnnnnnnnnnnnnnnnnnnnnnnnnnnnnnnnnnnnnnnnnnnnnnnnnnnnnnnnnnnnnnnnnnnnnnnnnnnnnnnnnnnnnnnnnnnnnnnnnnnnnnnnnnnnnnnnnnnnnnnnnnnnc

SEQ ID NO: 22332 - DNA, 691 bp, Macaca Mulatta
ggctgatgtgatgtggtagaacggtaggttgattcccttggcctccttgatgctgtttctcgccgatgctgtgaacatagaagagactttatctgcataccttgcggaaaccagttgcatggaactaacttatcattagaagttgataaggaatacaaatcggtaacaaaaccaaagccactaagtcaacctgaaatgagtcctgctgcatctgcagccgtcagaaatgatgtcacaaagcaacgtgctgcaccaaaagtctctcctcatgttaagcctgagcagaaacagagggtggcccagcaggaatctatcagagaagagtttcggaaagactgtttgccagttatggtactgaaagcaacaaagcccttcacgtttgagacccaagaaggcaagcaagagatgtttcatgctacggtggctacagagaaggaattcttctttgtaaaagtttttaatacactgctgaaagataaattcattccaaagagaatgattataatatcaagatattatcagcacagtggtttcttagaggtaaatagcgcctcatgtgtgttagatgctaaatctgaccaaaaggttgatgtcccgctgaacattatcagaaaagctggtgaaaccccaaagatcaacacgcttcaaactcagccccttggaacaattgtgaatgggttgtttgtagtcc

SEQ ID NO: 22333 - DNA, 628 bp, Macaca Mulatta
gcggacttccaggctgagaggcaggctcgggagaagctggccgagaagaaggagctcttgcaggagcagctggagcagctgcagagggagtacagcaaactgaaggccagctgtcaggagtcggccaggatcgaggacatgaggaagcggcatgttgaggtctcccaggcccccttgccccccgcccccggtgagtgagtgagcattgggcctgtgggaggaggtgggtggggagggcaggtgctgcgccgcgggaggtcacagttcgaccttcctgtcgctctccggagacttgacggcgggagctcgtataggccaccccatcggtagcccacccccttccctgaggctaagggaggcgtgccgtggtatcggcggctcctggttttacatgagtggcctgtgagaccaggcctgccattgacagtcctgccaagtctccgtccccttccatcctccccttccctctgactcttctcttttcccagcctacctctcctctcccctggccctgcctagccagaggaggagcccccctgaggagccacctgacttctgctgtcccaagtgccagtatcaggcccctgatatggacaccctgcagataccatgtcatggagtgcattga

SEQ ID NO: 22334 - DNA, 443 bp, Macaca Mulatta
ttgatgattcatatggcatgacagactgctgagattactgaatgcgacgactcttgagaagcaagttgtcattatggagtctttcagtcaataggtgatcatattacgtttaaggagtatgccgctctgtatcggcccagaaaattccattggtgctgcttctgtaatggcctcctctgtaccatactccatttaggttagaatgtgcacaggcattgtaccaccagcctcctttatgaaagtgggcgcagtttcctgcatacatatctttatctctgtccagtgtggtgaattgtttaccattatgccacatcatagaatcccctgcatttccctggtaagttcccaggcgcagtctatagaattcactttcgggttccagacgaaagctgctgtattctgcatagacttttttatcactccagtcttctaattcaatcacc

SEQ ID NO: 22335 - DNA, 702 bp, Macaca Mulatta
aacgtgggggtctcccggaggtctggccgcgacctggaccggagccgccccgcgggttcagtaactactggtacttcagagatgaatgcattcttggatgacccagaatttgcagatattatactgagagcagagcaagcaatagaagttggaatttttccagaaaggatctctcaaggttcaagtggaagttactttgtgaaggatcctaagaggaaaattattggtgtgtttaaacccaaatcagaagagccttatggtcaactcaatccaaaatggaccaaatatgtccataaggtctgctgcccttgctgctttggccgaggctgcctgattcctaatcaggggtacctttccgaagcgggtgcctattttgtggacaacaagcttcatctgggcatcgtacctaaaacaaaggtggtttggcttgtcagtgagacatttaactataatgcgattgaccgtgcaaaatcaagaggcaaaaaatatgctttagaaaaagtgccaaaagtgggtagaaagtttcataggataggactccctcctaagattggttcctttcagttatttgttgaaggttacaaggaggctgaatattggcttaggaaatttgaagctgaccctttgcctgagaatattagaaaacaatttcagtcacaatttgaaagattggttgtcttggattacattcatcgaaataca

SEQ ID NO: 22336 - DNA, 753 bp, Macaca Mulatta
gggtcctttggcggagtttttgttttcagaagatgctgggtttgttttattcagcggcagtggtgcttccccgaatctcagaatgcctcatttgatccttcaaaaatcacaaggaagaaaagttttataacttattctccaacaactggaacttgtcaaatgagtctatttgcttctcccacaagctctgaagaacaaaagcacagaaatggactatcaaatgaaaagagaaaaaaattgaatcaccccagtttaactgaaagcaaagaatcgacaataaaagacaatgatgaattgatgatgttgctatctaaagttgagaaattgtcagaagaaatcatggcgataatgcaaaatttaagtagtatacgggctttggagggcagtagagagcttgaaaatctcattggaatctcctgtgcatcacgtttcttaaaaaaagaaatgcagaaaaccaaagaactaatgacaaaaagtaattaaacaaaaactgttttgaaaggagttcaggattttcctcacaaacggcattaagaaagaaatgcacttaccatggagccccaactttttgcatctgccttgatcatattttaaaggaaacagaaaaaatattttgtaatttaattccgccccagtaaaataccaagcctccgtaccaattccgccaagggtgcaatggtctaagaataaaaattttctttgccagcttaattttaaaaccttttcttaaccccccccccggttaagaaaaac

SEQ ID NO: 22337 - DNA, 436 bp, Macaca Mulatta
agcccagcttgtcatccaccatttgggatgcctgcaaacttactgttagctcttcctgcaaacatcatatgttctgttcccttgagaaatgtatttcatgcatatggtggcagtgtccaaagaaacaacagtatcagttacattattgtattgaattttccgtagtagcaaaatctggaaaaataggtacaacattcggttttgtttagcaccacacataactcccaacatgagcaaagaggagatctaaggctgcatgatatcccattaagtgcttttgttaaatactttcagagggtgacttctaccccaggaggtctggttggccgtaaaataagatttttccctatctgtgcattagttttaaattccatatgactagcacccaaccaccacaaagagtgagtccccaggagccccactgcagtctttcctc

SEQ ID NO: 22338 - DNA, 538 bp, Macaca Mulatta
tttattatcaggaaacagtgtcattatcaaatttctcctcaaaacatatacacactatacacagcccccagcccatacctcccatccctggggcatcttgtgcaggggactgcagctgccccaatttttctggaaggatagagaccccttaggaaatgcaatctgggacggatgagattccctactctttaggcactagagttgaggaattgtgtttccccaggcaaggatctcagtaagacactcatattgcccacagccatgttggggggcccagagggaggtggggtatgtccagagctgcccccctgatcatgggaaggaggaggactcagcccctgggcctcatccagaatagccacaaagtccagctgagtgttgtcaagatcaagagagtccagagggttacatacctgtccttcgggaggagggtacaaggcaggaccccctcctaacctgcccacctcaggatggccacagctggggtttgtgcctcccactttgaggggcccatagcaagtgggcaatgggggcagaa

SEQ ID NO: 22339 - DNA, 632 bp, Macaca Mulatta
  misc_feature (1)...(632): n = A,T,C or G
agtatggtgtcccagtcattaaatatgacagaaaaggcttcaaagcacggcagcggcaactcattcttactcagaaagcagcttacgtggtggaacttgccaaaatcaagcagaaaatagagtactcagctctcaaaggtaagaagtgggcaatcttaaaacaatgcactgagttgactcaactactagaaagtccagtcatgaagctcccaaacgggaaacacaagtgtagggtgcccataaaccccggggtagcgatgcacacctgtagtctcagctactggaagcccgaggcaggaggatcagttgagcctgggagttcgaagttgcagtgagctgtgactgcgccacgcactccagcctgggcggcaaagtgagactctggctnnnnnnnnnnnnnnnnnnnnnnnccatctgccctcctcccctggcgttgcccagcctggactgcaccccttattctggcataaatattaatagcaccactttactcaagtacccagactggcaatagtcttcttccacggcgatcggagcccactagcaggctgatttctaaagtatgccaatgatccttctgggcccagctaggagaatgaagcatggggagggcagcccctgggcgtatctct

SEQ ID NO: 22340 - DNA, 2439 bp, Macaca Mulatta
  misc_feature (1)...(2439): n = A,T,C or G
agaccacagaagaaaatacagagagaagatgacggctaaacttttggagacatgggacaaaatcgattggcctaaagaccacgtatatatccgtaatacatcagagggtgaacatgaggaactgcagcgcctactggatcctaagaggactagaacccaggctcagacgatagtnnnnnnnnnnnnnnnnnnnnnnnnnnnnnnnnnnnnnnnnnnnnnnnnnnnnnnnnnnnnnnnnnnnnnnnnnnnnnnnnnnnnnnnnnnnnnnnnnnnnnnnnnnnnnnnnnnnnnnnnnnnnnnnnnnnnnnnnnnnnnnnnnnnnnnnnnnnnnnnnnnnnnnnnnnnnnnnnnnnnnnnnnnnnnnnnnnnnnnnnnnnnnnnnnnnnnnnnnnnnnnnnnnnnnnnnnnnnnnnnnnnnnnnnnnnnnnnnnnnnnnnnnnnnnnnnnnnnnnnnnnnnnnnnnnnnnnnnnnnnnnnnnnnnnnnnnnnnnnnnnnnnnnnnnnnnnnnnnnnnnnnnnnnnnnnnnnnnnnnnnnnnnnnnnnnnnnnnnnnnnnnnnnnnnnnnnnnnnnnnnnnnnnnnnnnnnnnnnnnnnnnnnnnnnnnnnnnnnnnnnnnnnnnnnnnnnnnnnnnnnnnnnnnnnnnnnnnnnnnnnnnnnnnnnnnnnnnnnnnnnnnnnnnnnnnnnnnnnnnnnnnnnnnnnnnnnnnnnnnnnnnnnnnnnnnnnnnnnnnnnnnnnnnnnnnnnnnnnnnnnnnnnnnnnnnnnnnnnnnnnnnnnnnnnnnnnnnnnnnnnnnnnnnnnnnnnnnnnnnnnnnnnnnnnnnnnnnnnnnnnnnnnnnnnnnnnnnnnnnnnnnnnnnnnnnnnnnnnnnnnnnnnnnnnnnnnnnnnnnnnnnnnnnnnnnnnnnnnnnnnnnnnnnnnnnnnnnnnnnnnnnnnnnnnnnnnnnnnnnnnnnnnnnnnnnnnnnnnnnnnnnnnnnnnnnnnnnnnnnnnnnnnnnnnnnnnnnnnnnnnnnnnnnnnnnnnnnnnnnnnnnnnnnnnnnnnnnnnnnnnnnnnnnnnnnnnnnnnnnnnnnnnnnnnnnnnnnnnnnnnnnnnnnnnnnnnnnnnnnnnnnnnnnnnnnnnnnnnnnnnnnnnnnnnnnnnnnnnnnnnnnnnnnnnnnnnnnnnnnnnnnnnnnnnnnnnnnnnnnnnnnnnnnnnnnnnnnnnnnnnnnnnnnnnnnnnnnnnnnnnnnnnnnnnnnnnnnnnnnnnnnnnnnnnnnnnnnnnnnnnnnnnnnnnnnnnnnnnnnnnnnnnnnnnnnnnnnnnnnnnnnnnnnnnnnnnnnnnnnnnnnnnnnnnnnnnnnnnnnnnnnnnnnnnnnnnnnnnnnnnnnnnnnnnnnnnnnnnnnnnnnnnnnnnnnnnnnnnnnnnnnnnnnnnnnnnnnnnnnnnnnnnnnnnnnnnnnnnnnnnnnnnnnnnnnnnnnnnnnnnnnnnnnnnnnnnnnnnnnnnnnnnnnnnnnnnnnnnnnnnnnnnnnnnnnnnnnnnnnnnnnnnnnnnnnnnnnnnnnnnnnnnnnnnnnnnnnnnnnnnnnnnnnnnnnnnnnnnnnnnnnnnnnnnnnnnnnnnnnnnnnnnnnnnnnnnnnnnnnnnnnnnnnnnnnnnnnnnnnnnnnnnnnnnnnnnnnnnnnnnnnnnnnnnnnnnnnnnnnnnnnnnnnnnnnnnnnnnnnnnnnnnnnnnnnnnnnnnnnnnnnnnnnnnnnnnnnnnnnnnnnnnnnnnnnnnnnnnnnnnnnnnnnnnnnnnnnnnnnnnnnnnnnnnnnnnnnnnnnnnnnnnnnnnnnnnnnnnnnnnnnnnnnnnnnnnnnnnnnnnnnnnnnnnnnnnnnnnnnnnnnnnnnnnnnnnnnnnnnnnnnnnnnnnnnnnnnnnnnnnnnnnnnnnnnnnnnnnnnnnnnnnnnnnnnnnnnnnnnnnnnnnnnnnnnnnnnnnnnnnnnnnnnnnnnnnnnnnnnnnnnnnnnnnnnnnnnnnnnnnnnnnnnnnnnnnnnnnnnnnnnnnnnnnnnnnnnnnnnnnnnnnnnnnnnnnnnnnnnnnnnnnnnnnnnnnnnnnnnnnnnnnnnnnnnnnnnnnnnnnnnnnnnnnnnnnnnnnnnnnnnnnnnnnnnnnnnnnnnnnnnnnnnnnnnnnnnnnnnnnnnnnnnnnnnnnnnnnnnnnnnnnnnnnnnnnnnnnnnnnnnnnnnnnnnnnnnnnnnnnnnnnnnnnnnnnnnnnnnnnnnnnnnnnnnnntttgtcaggttgttctttcacaagagagggctgtcgagagctggctaatgccctcaagcataatcataacgtgaaaatcttggatttgggacaaaatgatcttcaggatgatggagtgaagctactgtgtgaggctctgaaaccttcacatcgtgcgttgcacacacttggg

SEQ ID NO: 22341 - DNA, 216 bp, Macaca Mulatta
  misc_feature (1)...(216): n = A,T,C or G
ggagttatggggaaggagcatcagaaatgaggcaaggtaggagaatgagctatttttatgtaaaagaattgtagtctcagctaaaaggggtagcctctactccagccaacattttaaaattaatggataatttatagacagttaaatnnnnnnnnnnnnnnnnnnnnnnnnnnnnnnnnnnnnnnnnnnnnnnnnnnnnnnnnnnnnnnnnnnnnn

SEQ ID NO: 22342 - DNA, 1032 bp, Macaca Mulatta
gggagtgcgagatccgctgctgctgaggagaggagcgtcaacagcagcaccatggtagctcaacagaagaaccttgaaggctatgtgggatttgccaatctcccaaatcaagtatacagaaaatcagtgaagagaggttttgaattcacgcttatggtagtgggtgaatctggattgggaaagtcgacgttaatcaactcattattcctcacagatttgtattctccagagtatccaggtccttctcatagaattaaaaagactgtacaggtggaacaatctaaagttttaatcaaagaaggtggtgttcagttgctgctcacaatagttgataccccaggatttggagatgcagtggataatagtaattgctggcagcctgttatcgactacattgatagtaaatttgaggactacttaaatgcagaatcacgagtgaacagacgtcagatgcctgataacagggtgcaatgttgtttatacttcattgctccttcaggacatggacttaaaccattggatattgagtttatgaagcgtttgcatgaaaaagtgaatatcatcccacttattgccaaagcagacacactcacaccagaggaatgccaacagtttaaaaaacagataatgaaagaaatccaagaaccataaaattaaaatatatgaattttcccagaaacagattgatgaagaaagaaaataaacttggttaaaaaagataaaaggaccggtttaccctcttgctgtggtaggtagtaatactatcattgaagttaatggcaaaagggtcagaggaaggcagtatccttggggtgttgctgaagttgaaaatggtgaacattgtgattttacaatcctaagaaatatgttgataagaacacacatgcaggacttgaaagatgttactaataatgtccactatgagaactacagaagcagaaaacttgcagctgtgacttataatggagttgataacaacaagaataaagggcagctgactaagagccctctggcacaaatggaagaagaaag

SEQ ID NO: 22343 - DNA, 572 bp, Macaca Mulatta
  misc_feature (1)...(572): n = A,T,C or G
cacaggcaatggccttggagacacccacgccaggtccacccagagagggccaaagccctgcttctcaggcggggactcagcaccctcaggcccaggccactgcccattcccagagctcttcagagttcaagggctccctggcctccctctcagatagcttgggggcgtctgtcatggccaccgaccaggactcctactccactagcagcacggaggaggagctggagcagttcagcagccccagcgtgaagaagaagccctccatgatcctgggcaaggcccggcaccggctgagctttgccagtttcagcagcatgttccacgcttttcctctccnacaaccgcaagctgtacaagaaagtggtggagctggcgcangacaaggcctcgtactttggcagcctggtgcangactataangtgtacagcctggagatgatggcgcgccagacctccagcacggagatgctgcaggagattccaacatgatgacccagctcagagctacctgctgcaaagcaccgaactcaagcccctggtggaccccgccctgccctctgagaaggacctcg

SEQ ID NO: 22344 - DNA, 1746 bp, Macaca Mulatta
  misc_feature (1)...(1746): n = A,T,C or G
tgtgtagtggctgaaatatatcagcccatgttagacagaagaagtcagagaagtgaagagagatgtgtggaaatgccatgacttgtggaatttggcactcagccatgtggaaattctgaagctccctgagaatgggatgactcgtgtttgaaggatcttatttaaagttgtttttgtattttcttaaagcaatattcactgttataccttggggacttctttgtttacccattctttcatcctttatatttcatttgtaaactatatttgaacgacattcccccaaaaaattgaaatgtaaagacgaggcagagaataaagggttctatgaaatttggaactttatctctgaatgtaacatccctaataacaaccttcattctaagacagcaaaataaaaatttaacaaccaatgaatagtatttaagaaaatgttgaaataagttttttaaaatagcgttacagactgaagcagtcctgaagcaataggttttcactctcttattgagccaattaaattgacattgctatgacaatttaaaannnnnnnnnnnnnnnnnnnnnnnnnnnnnnnnnnnnnnnnnnnnnnnnnnnnnnnnnnnnnnnnnnnnnnnnnnnnnnnnntacttaatgaatcgaaattttgttttaaattctactttaggtaaataagaacaggtgttgggggaaaaaacttatgatttctagattgatatctgaattaaannnnnnnnnnnnnnnnnnnnnnnnnnnnnnnnnnnnnnnnnnnnnnnnnnnnnnnnnnnnnnnnnnnnnnnnnnnnnnnnnnnnnnnnnnnnnnnnnnnnnnnnnnnnnnnnnnnnnnnnnnnnttatcctcaaaattaaatgtaatttttttagtgacaaagaagaaaagagacctcattactcaacctttctggccaagtatgtcttgcttgtggcaccttcctcatctctatacaggaggatcccatgaatgatggtttattgggaactgctgcagtccatgcagagaactcagcttgaagctggaagcacacagtgggtagtaggagaaggactggtgttggtgggtgcctacagagattatagagctaaacaaagccctccaaactggcccctcctgcccactgcctctcctgagtagaaatctggtgacctaaggctcagtgtggtcaacagaaagttgccttcttcacttcaggctaagtctttattatgtttaaggttgtctttctagtgaggagatacgtatcaaagaacatttgtacaattccccatgaaaattgctccaaagtatgattaacaatatagtcagtgcttctggttatatacaagtactcagtgataaatggatttaaaaatattcagaaatgtattgggggctggaggagaataagaggcagagcaagagctagagaattggtttccttgcttccctgtatgctcagaaaacattgatttgagcatagatgcagagactgaaaaaaaatttcactttgatctctgtttttgaattattatttatatcttgcttactaacttttttgcattttgtcctcttgtggggagggcaatgaattaagagtaatggggtgggtggggagtaagtaaaatttcaaacagcattttagtgaatgcaattcagtagtcctgaagcctgatttaataaaacaaaattcatttatggttgtttcatgaaagttattagatagcatcaaattttgtttgtatgttgtttgcc

SEQ ID NO: 22345 - DNA, 559 bp, Macaca Mulatta
  misc_feature (1)...(559): n = A,T,C or G
ataagcttattcattttggtgggatttataggagagttccaaattttttcaagnnnnnnnnnnnnnnnnnnnnnnnnnnnnnnnnnnnnnnnnnnnnnnnnnnnnnnnnnnnnnnnnnnnnnnnnnnnnnnnnnnnnnnnnnnnnnnnnnnnnnnnnnnnnnnnnnnnnnnnnnnnnnnnnnnnnnnnnnnnnnnnnnnnnnnnnnnnnnnnnnnnnnnnnnnnnnnnnnnnnnnnnnnnnnnnnnnnnnnnnnnnnnnnnnnnnnnnnnnnnnnnnnnnnnnnnnnnnnnnnnnnnnnnnnnnnnnnnnnnnnnnnnnnnnnnnnnnnnnnnnnnnnnnnnnnnnnnnnnnnnnnnnnnnnnnnnnnnnnnnnnnnnnnnnnnnnnnnnnnnnnnnnnnnnnnnnnnnnnnnnnnnnttacaatgaactcactggccagtttaggaacagagtcatcaataccaaaagttttggtggtcaatgtagaaaggtgtttagtggggatggaaaagatttctacaggctgagcggaaatgtcctctcctatacattccaggt

SEQ ID NO: 22346 - DNA, 854 bp, Macaca Mulatta
  misc_feature (1)...(854): n = A,T,C or G
ggcgggcttttcgatccgccatctgcggtggagccgccacaaaaatgcagattttcgtgaaaacccttacggggaacaccnatcaccgctcgcaggttcgaacccatctnnnnnnnnnnnnnnnnnnnnnnnnnnnnnnnnnnnnnnnnnnnnnnnnnnnnnnnnnnnnnnnnnnnnnnnnnnnnnnnnnnnnnnnnnnnnnnnnnnnnnnnnnnnnnnnnnnnnnnnnnnnnnnnngagtcgtactcttcatcttgtgttgagacttcgtggtggtgctaagaaaaggaagaagaagtcttacaccactcccaagaagaataagcacaagagaaagaaggttaagctggctgtcctgaaatattataaggtggatgagaatggcaaaattagtcgccttcgtcgagagtgcccatctgatgaatgtggtgctggggtgtttatggcaagccactttgacagacattattgtggcaaatgttgtctgacttactgtttcaacaagccagaagacaagtaactgtatgagttaataaaagacacgaactaacctttaagtttgatgttaaaagccgtaggtagttttaaaaattgctcgggccgcctcggcccctcggagaagtctttctaagaccaattcgttttggcccgcggggccccgttagggtaaagtggaacatgggtccataacctggtttccctaaggaaaatccggggccatgaactaaggtggctggggaattctcccaccaaatcaaaaaaaacgcccggcggggaacccccaacgcgttctacacccaactcccagaaatggagtttctgagggggcctttccgggcagctttttaaggggg

SEQ ID NO: 22347 - DNA, 684 bp, Macaca Mulatta
cccccagggtcctgcaggcagggctggaggtggagcgactccggctgcggaacttctaccaccactaccactccaagaggggcatgtggagcgtccgcagcaggaagggctctcacacgggggcgtcctgaggacgggcagcccctcctagccccggtgggagtccggaggcagctgctgggggctgggctttgagcttggtcccgagggacccggcagggctggtcagaggggcacagccaccacctgtgcctgttcctctctggcccactgggccctggcgtcgtgcccctccccggagaggcagccttcacagcgggtcagggcctggccttggtccccactctgcgatgatttctgtgaaattttgctgtagcgacgacattgttttcaggatttccaagagttccgtctgttctgttttttattcagaatgaaatgaaatattttttttagttctgacttgtcctctgtgcctgttctcttgagaggtggagtcctcaccgctgggggaccctgagcacgacctcctgactcccagcggcagcccttccagaccccggcttctcccacccccgagaccactttccccttcctgcctgtgaggttcggtgcccggccctgtggggaggaggcttccgacctcttcctcctgccctgtgtctgtggggtctgtgcccgctg

SEQ ID NO: 22348 - DNA, 618 bp, Macaca Mulatta
  misc_feature (1)...(618): n = A,T,C or G
atggcaaagcaaccttctgatgtaagttctgagtgtgaccgagaaggtagacaattgcagcctgcggagaggcctccccagctcagacctggggcccctacctccctacagacagagccacaaggtaatcccgaaggcaatcacggaggtgaaggggacagctgcccccacggcagccctcagggcccgctggccccaccggccagccctggcccttttgctaccagatccccgcttttcatctttatgagaagatcctccctgctgtctcgatcctccagtgggtatttctcttttgacacagacaggagcccagcacccatgagttgtgacaaatcaacacaaaccccaagtcctccttgccaggccttcaaccactatctcagtgcaatgnnnnnnnnnnnnnnnnnnnnnnnnnnnnnnnnnnnnnnnnnnnnnnnnnnnnnnnnnnnnnnnnnnnnnnnnnnnnnnnnnnnnnnnnnnnnnnnnnnnnnnnnnnnnnnnnnnnnnnnnnnnnnnnnnnnnnnnngtatttttgaataattaccaagcagccgaagaccacccacaaatggttatcttacgactgttgcgttacattgtccgcctggtgtggag

SEQ ID NO: 22349 - DNA, 574 bp, Macaca Mulatta
ttggaggtcctttctgaaggcagggaggtggttgaaattaacttttgaggcccttttgggaaaccagagttctcaagtttatccaactccatgggagttctaactcctctgagatgataagtcttccctccacccaaaaatgtatctgagacatcagccccagtaaatagatcactcatgtgtattgtttttctctcttggacctaggctacctccgggatgtgacaggcaactacacggcttcttttgtggtggctggggccttccttctttcagggagtggaattctcctcaccctgccccacttcttctcctgcttctcaactactacctccaggccccaggaccttgtaacagaagcaccggatattaaagtttccctaccgaaggaggggctggaagaggactgaacttcacagagtcaggcccggaaagccagagcttgacagctccaggtcttctcttgccacgtcttggtctccacagaaccacagtgccttaagattctccatctgcctccccttagagcaggcctggggctcctgcaatgtgtgtgccaaccctttgtattttt

SEQ ID NO: 22350 - DNA, 545 bp, Macaca Mulatta
gggcccagcagtctctggtatccagatggagctctcacttaagcggctgtgactttcacccaggacccagggcgcagccctccgcaggcactgccggcaccttgtctgcacactggaggtcctccattacagaggcccagcgcacgatgccggccccacgagcgttcagggctacagccacagcagctccttcctctgccttgagaaaagtgcttggagtacggtttgctacacacgtgactggacagtgtccaattcaaatctttcagggcagagtcggagcagcgcttggtgccagcctgtcctctcctgctctccaaagaccccgctccctgtcctctctcactttacagcttgtgaatattctggattcagcttctcttaaacagacagtttaattatagttgtggcctggccccatcctcacttcctcttattatttcactgctgctaaaattgtatttttacctactgctctgggggttgtcctcttttcggcaaagttggagtgagtgccaagctctccatctgtggtcctttcagcc

SEQ ID NO: 22351 - DNA, 419 bp, Macaca Mulatta
  misc_feature (1)...(419): n = A,T,C or G
ggctgcagagatgaataaacaaagaggaacctactctgaagtgagtctggcccaggagccagggaggcagcaaaggaaacttaagggcaataaaagctccatttcaggaaccgaacagaaaatattccaagaagaattaaaccttcaaaatgcttcttcagatcatcaagggaatgacaagacatatcactgcaaaggtttactgccacctccagagaagctcactgctgaggtcctggggtccagtgtggatcttcaaaaagatactattagatgggatctcatcatgttgannnnnnnnnnnnnnnnnnnnnnagctcaagaaatctacacgtcttgctctcccaagttgctgggattactgacataagccaccgcacctgagtgctcatgtaccatttagcttgtgtttttaaaat

SEQ ID NO: 22352 - DNA, 396 bp, Macaca Mulatta
  misc_feature (1)...(396): n = A,T,C or G
tgaaggagcctggaccccaactttgttactgtgagaaagggtcttcattcattcaagatggcttttgtgaagcacctactntctctttctgtcacctaggctggagtgcagtggtgtaatcacggatcactgcagcctccacctcccagttcaagaaattctcatgcctcagcctcctgagcagctgggattacagnnnnnnnnnnnnnnnnnnnnnnnnnnnnnnnnnnnnnnnnnnnnnnnnnnnnnnnnnnnnnnnnnnnnnnnnnnnnnnnnnnnnnnnnnnnnnnnnnnnnnnnnnnnnnnnnnnnnnnnnnnnnnnnnnnnnnnnnnnnnnnntccatatttagtgaacatacacttaattgcaaagctgtcattaataaaaattcttat

SEQ ID NO: 22353 - DNA, 312 bp, Macaca Mulatta
  misc_feature (1)...(312): n = A,T,C or G
ggaagtctcacctcagcccgctgcatgccagtgtgtgctgcaccggcagctgctacagtgcagtgggtgccccttnnnnnnnnnnnnnnnnnnnnnnnnnnnnnnnnnnnnnnnnnnnnnnnnnnnnnnnnnnnnnnggaccctctggtgttggagtaaatgagctcagaagacaacttattgaatttaatcccagccattttcaaagtgctgtgccaacactactcgtactaaaaagagttatgaaatgaatgggcgtgagtatcactatgtgtccaaggaaacatttgaaagcctcatatatagtcacag

SEQ ID NO: 22354 - DNA, 546 bp, Macaca Mulatta
aaccccagtaataaatatcctgtactaatatggtttttgtattcatttgtttctgaaatgcttgcattatgtactacgaagaaatttctacaaagggatgaagacaattgaaagccagatatctgttgttgatctaagcactcccaacacgtctcagaccctgaaccgccggttacaccctacgttgataggtcttgaagcactttctttccatagctcctaatacagaatctgaaattgccctgaatctttctgtttaaaaaacaaagcaaacccacaaatggaaaaagcaacaataagaaagatttcccttgaacttctctctttctctagttactatctggtctttgaagtaagggttacagtttctgtctgaaagagtgataaaccctcctcccttctactttttactttctacttttcctcacccttctgcccccaccgtagcactgttttcactgaaatcatgaaggatacttctgagcatagctcatgttgacttcttagtttcatgtcttaccatatcactctgttgcatttgatact

SEQ ID NO: 22355 - DNA, 3462 bp, Macaca Mulatta
  misc_feature (1)...(3462): n = A,T,C or G
ggtggtgcggtacgaggcgggctacgtggtgtgcgccgtggtcgccggcctctacctgctgctgatgcccactgccgggctttgcttctgctgctgccgctgccgccggcgctgcggggggcgagtgaagacagagcacaaggcgctggcctgtgagtgtgcggccctcatggtcttcctgctgctgaccaccctcttgctgctgngattggtgtggtctgtgccttagtcaccaaccagcgcacgcatgaacagatgggccccagcgtggaggctgtgcctgagaccctgcttagcctccgaggcctggtctctgatgtcccccaagnnnnnnnnnnnnnnnnnnnnnnnnnnnnnnnnnnnnnnnnnnnnnnnnnnnnnnnnnnnnnnnnnnnnnnnnnnnnnnnnnnnnnnnnnnnnnnnnnnnnnnnnnnnnnnnnnnnnnnnnnnnnnnnnnnnnnnnnnnnnnnnnnnnnnnnnnnnnnnnnnnnnnnnnnnnnnnnnnnnnnnnnnnnnnnnnnnnnnnnnnnnnnnnnnnnnnnnnnnnnnnnnnnacctggagtcagcctccagggaacaacgggaccgcctcctccagctgctgcaggaggccgggtgccagggagactgtgcaggggccctgagccgggcccgcgccctggagctgggtgctgacttcagccaggtgnnnnnnnnnnnnnnnnnnnnnnnnnnnnnnnnnnnnnnnnnnnnnnnnnnnnnnnnnnnnnnnnnnnnnnnnnnnnnnnnnnnnnnnnnnnnnnnnnnnnnnnnnnnnnnnnnnnnnnnnnnnnnnnnnnnnnnnnnnnnnnnnnnnnnnnnnnnnnnnnnnnnnnnnnnnnnnnnnnnnnnnnnnnnnnnnnnnnnnnnnnnnnnnnnnnnnnnnnnnnnnnnnnnnnnnnnnnnnnnnnnnnnnnnnnnnnnnnnnnnnnnnnnnnnnnnnnnnnnnnnnnnnnnnnnnnnnnnnnnnnnnnnnnnnnnnnnnnnnnnnnnnnnnnnnnnnnnnnnnnnnnnnnnnnnnnnnnnnnnnnnnnnnnnnnnnnnnnnnnnnnnnnnnnnnnnnnnnnnnnnnnnnnnnnnnnnnnnnnnnnnnnnnnnnnnnnnnnnnnnnnnnnnnnnnnnnnnnnnnnnnnnnnnnnnnnnnnnnnnnnnnnnnnnnnnnnnnnnnnnnnnnnnnnnnnnnnnnnnnnnnnnnnnnnnnnnnnnnnnnnnnnnnnnnnnnnnnnnnnnnnnnnnnnnnnnnnnnnnnnnnnnnnnnnnnnnnnnnnnnnnnnnnnnnnnnnnnnnnnnnnnnnnnnnnnnnnnnnnnnnnnnnnnnnnnnnnnnnnnnnnnnnnnnnnnnnnnnnnnnnnnnnnnnnnnnnnnnnnnnnnnnnnnnnnnnnnnnnnnnnnnnnnnnnnnnnnnnnnnnnnnnnnnnnnnnnnnnnnnnnnnnnnnnnnnnnnnnnnnnnnnnnnnnnnnnnnnnnnnnnnnnnnnnnnnnnnnnnnnnnnnnnnnnnnnnnnnnnnnnnnnnnnnnnnnnnnnnnnnnnnnnnnnnnnnnnnnnnnnnnnnnnnnnnnnnnnnnnnnnnnnnnnnnnnnnnnnnnnnnnnnnnnnnnnnnnnnnnnnnnnnnnnnnnnnnnnnnnnnnnnnnnnnnnnnnnnnnnnnnnnnnnnnnnnnnnnnnnnnnnnnnnnnnnnnnnnnnnnnnnnnnnnnnnnnnnnnnnnnnnnnnnnnnnnnnnnnnnnnnnnnnnnnnnnnnnnnnnnnnnnnnnnnnnnnnnnnnnnnnnnnnnnnnnnnnnnnnnnnnnnnnnnnnnnnnnnnnnnnnnnnnnnnnnnnnnnnnnnnnnnnnnnnnnnnnnnnnnnnnnnnnnnnnnnnnnnnnnnnnnnnnnnnnnnnnnnnnnnnnnnnnnnnnnnnnnnnnnnnnnnnnnnnnnnnnnnnnnnnnnnnnnnnnnnnnnnnnnnnnnnnnnnnnnnnnnnnnnnnnnnnnnnnnnnnnnnnnnnnnnnnnnnnnnnnnnnnnnnnnnnnnnnnnnnnnnnnnnnnnnnnnnnnnnnnnnnnnnnnnnnnnnnnnnnnnnnnnnnnnnnnnnnnnnnnnnnnnnnnnnnnnnnnnnnnnnnnnnnnnnnnnnnnnnnnnnnnnnnnnnnnnnnnnnnnnnnnnnnnnnnnnnnnnnnnnnnnnnnnnnnnnnnnnnnnnnnnnnnnnnnnnnnnnnnnnnnnnnnnnnnnnnnnnnnnnnnnnnnnnnnnnnnnnnnnnnnnnnnnnnnnnnnnnnnnnnnnnnnnnnnnnnnnnnnnnnnnnnnnnnnnnnnnnnnnnnnnnnnnnnnnnnnnnnnnnnnnnnnnnnnnnnnnnnnnnnnnnnnnnnnnnnnnnnnnnnnnnnnnnnnnnnnnnnnnnnnnnnnnnnnnnnnnnnnnnnnnnnnnnnnnnnnnnnnnnnnnnnnnnnnnnnnnnnnnnnnnnnnnnnnnnnnnnnnnnnnnnnnnnnnnnnnnnnnnnnnnnnnnnnnnnnnnnnnnnnnnnnnnnnnnnnnnnnnnnnnnnnnnnnnnnnnnnnnnnnnnnnnnnnnnnnnnnnnnnnnnnnnnnnnnnnnnnnnnnnnnnnnnnnnnnnnnnnnnnnnnnnnnnnnnnnnnnnnnnnnnnnnnnnnnnnnnnnnnnnnnnnnnnnnnnnnnnnnnnnnnnnnnnnnnnnnnnnnnnnnnnnnnnnnnnnnnnnnnnnnnnnnnnnnnnnnnnnnnnnnnnnnnnnnnnnnnnnnnnnnnnnnnnnnnnnnnnnnnnnnnnnnnnnnnnnnnnnnnnnnnnnnnnnnnnnnnnnnnnnnnnnnnnnnnnnnnnnnnnnnnnnnnnnnnnnnnnnnnnnnnnnnnnnnnnnnnnnnnnnnnnnnnnnnnnnnnnnnnnnnnnnnnnnnnnnnnnnnnnnnnnnnnnnnnnnnnnnnnnnnnnnnnnnnnnnnnnnnnnnnnnnnnnnnnnnnnnnnnnnnnnnnnnnnnnnnnnnnnnnnnnnnnnnnnnnnnnnnnnnnnnnnnnnnnnnnnnnnnnnnnnnnnnnnnnnnnnnnnnnnnnnnnnnnnnnnnnnnnnnnnnnnnnnnnnnnnnnnnnnnnnnnnnnnnnnnnnnnnnnnnnnnnnnnnnnnnnnnnnnnnnnnnnnnnnnnnnnnnnnnnnnnnnnnnnnnnnnnnnnnnnnnnnnnnnnnnnnnnnnnnnnnnnnnnnnnnnnnnnnnnnnnnnnnnnnnnnnnnnnnnnnnnnnnnnnnnnnnnnnnnnnnnnnnnnnnnnnnnnaattagaatggtgcatgcacaatgtattgttatcactgtcagaagagcatccttgaatgtagcgtgactgcctcttttttgcctttcctagagnnnnnnnnnnnnnngttactcatctgttgacctacctgggggaagtagcacccttgcatttaaaaaataaaattgatgggattacaaat

SEQ ID NO: 22356 - DNA, 196 bp, Macaca Mulatta
cctttgatcctgctgctctgctgcctggggcctcacccaagagtcctggactctaggccatggtgtcgccgtttcatagcccaccttctacccccactacccctggtgtgcgatctcggtccaaccaggtcccataggtgcctgtcagattcgaccagccccctgaaggcagtcatctgccctgttacaacaaggt

SEQ ID NO: 22357 - DNA, 764 bp, Macaca Mulatta
acttgtgtgttgttggtctgcttggtgtgtgcgatcaggaagataagctgggaggtgtctcctgctggggtcctgattcctctatttccaaacaaggtacaggttcagtccagactctttcccctaggaccaaaagcagccagagcagtagccagttagttccctaggcctgtagccacagtcgtttctgacctgctgggccgagaatgggtaagttgtctggagtcaggtggacccaagtagcatagggtcacaaagcctgggtttgtttctggatactttgcgtctctgggatgctagaggtggagcatggtggctggaagtaaaactgccaactctggccctcagaactctcaggtatagaaacccaggatgtctaataccctgtcccagtgcctgagagctgtctggtgtcaggtagagaggacactgtacctgggtgagtgatcagaccctggtagctaagaaggaacttccccctttgggtcagtgtgcagaccccctttctggccatgcctctgtgaaccctgtattgctggggcccgaaggagcccctgagcctagccccttcccgtctgccccgtgtcctcattgcgtgtggatatgacttctgctcggtggctggtgtgtcccaactggggcaagagatggcagaggatcccccttgtgggtgtgcttggatgtgcagagccctctccatgagttttcatgcctgtaagtgccgggccccttgccccagctgacaggctgttgctgtacctgct

SEQ ID NO: 22358 - DNA, 1146 bp, Macaca Mulatta
  misc_feature (1)...(1146): n = A,T,C or G
tgtcactttacctgcttactggtcagctgtccaaagagtgaagttcgggcaaaattcaaattctccatcctgaatgccaagggagaagaaaccaaagctatggagagtcaacgggcatataggtttgtgcaaggcaaagactggggattcaagaaattcatccgtagagattttcttttggatgaggccaacgggcttctccctgatgacaagcttaccctcttctgcgaggtgagtgttgtgcaagattctgtcaacatttctggccagaataccatgaacatggtaaaggttcctgagtgccggttggcagatgagttaggaggactgtgggagaattcccggttcacagactgctgcttgtgtgttgctggccaggaattccaggctcacaaagctatcttagcagctcgttctccggtttttagtgccatgtttgaacatgaaatggaagagagcaaaaagaatcgagttgaaatcaatgatgtggagcctgaagtttttaaggaaatgatgtgcttcatatacacggggaaggctccaaacctcgacaaaatggctgatgatttgttggcagctgctgacaagtatgccctggagcgtttaaaggtcatgtgtgaggatgccctctgcagtaacctgtccgtggagaatgctgcagaaattctcatcctggctgacctccacagcgcagatcagttgaaaactccggcagtggatttcatcaactatcatgcttcggatgtcttagagacctctgggtggaagtcaatggtggtgtcacatcctcactttggttgggctgaggcattaccgctctctgggcttcagcacatggccctttttctgggacccccccgccaaacccctgatgccttccctaaaatccctgcttgtttgtaagaactcccttttaattttcccagaagccagcctcccccctggttgcctgccccctggacccacccagggttaaacagccgctaattcttgggggaacccttttaacccctggttgtggtnnnnnnnnnnnnnnnnnnncctttgtggggccccccgaacttttttataaaacagccccctcaaataaaccttgtggggggacaacagggaggggagaggaaaagggcccccaagaaattccgg

SEQ ID NO: 22359 - DNA, 437 bp, Macaca Mulatta
gataactcactggcggtccgggcgggcggctgctttccgggaaatgcaactgtgcgcctgtggagcggcgagcggaaggggctacgggaactgcaccgcggagactgggttttggctgccgatgcgtcaggccgggtggtgcccacgccggtgctgctcttcctggaccgggacttgcagcgccgggcttcatttgtggctgtggagaccgagcggcccccacgcaaactgttgctcacaccctggcacctggtgtttgcggctcgagggccggcgccctcgccaggcgactttgcaccggtgttcgcgcgccggctacgcgctggggattcggtgctggcgcccggcggggacgcgcttcggccaacgcgcgtggcccgtgtggcgcgggaggaagccgtgggggtgttcgcgccgctcacagcccacgggacgct

SEQ ID NO: 22360 - DNA, 5445 bp, Macaca Mulatta
  misc_feature (1)...(5445): n = A,T,C or G
ttctccggaggacgctaagtccgtgagcggcggcagtcgcgaccgcgggtgcatccagtnnnnnnnnnnnnnnnnnnnnnnnnnnnnnnnnnnnnnnnnnnnnnnnnnnnnnnnnnnnnnnnnnnnnnnnnnnnnnnnnnnnnnnnnnnnnnnnnnnnnnnnnnnnnnnnnnnnnnnnnnnnngaaagaagccagaaaatattatcaaccctttgagaacacgacataacgaactttgtattttaccacttccttgaatagnnnnnnnnnnnnnnnnnnnnnnnnnnnnntggcagatgaacggaaagacgaagcaaaggcgcctcactggacctcagcacagctaacagaggcatctgcacactcacatccacctgagattaaggatncaggcgnagcaggggaaggacttgtccgaagcgcccatggattcccatacagggaggatgaagaaggtgccctttgaaaagcttgggtcccagggcacctattccaataccaagnnnnnnnnnnnnnnnnnnnnnnnnnnnnnnnnnnnnnnnnnnnnnnnnnnnnnnnnnnnnnnnnnnnnnnnnnnnnnnnnnnnnnnnnnnnnnnnnnnnnnnnnnnnnnnnnnnnnnnnnnnnnnnnnnnnnnnnnnnnnnnnnnnnnnnnnnnnnnnnnnnnnnnnnnnnnnnnnnnnnnnnnnnnnnnnnnnnnnnnnnnnnnnnnnnnnnnnnnnnnnnnnnnnnnnnnnnnnnnnnnnnnnnnnnnnnnnnnnnnnnnnnnnnnnnnnnnnnnnnnnnnnnnnnnnnnnnnnnnnnnnnnnnnnnnnnnnnnnnnnnnnnnnnnnnnnnnnnnnnnnnnnnnnnnnnnnnnnnnnnnnnnnnnnnnnnnnnnnnnnnnnnnnnnnnnnnnnnnnnnnnnnnnnnnnnnnnnnnnnnnnnnnnnnnnnnnnnnnnnnnnnnnnnnnnnnnnnnnnnnnnnnnnnnnnnnnnnnnnnnnnnnnnnnnnnnnnnnnnnnnnnnnnnnnnnnnnnnnnnnnnnnnnnnnnnnnnnnnnnnnnnnnnnnnnnnnnnnnnnnnnnnnnnnnnnnnnnnnnnnnnnnnnnnnnnnnnnnnnnnnnnnnnnnnnnnnnnnnnnnnnnnnnnnnnnnnnnnnnnnnnnnnnnnnnnnnnnnnnnnnnnnnnnnnnnnnnnnnnnnnnnnnnnnnnnnnnnnnnnnnnnnnnnnnnnnnnnnnnnnnnnnnnnnnnnnnnnnnnnnnnnnnnnnnnnnnnnnnnnnnnnnnnnnnnnnnnnnnnnnnnnnnnnnnnnnnnnnnnnnnnnnnnnnnnnnnnnnnnnnnnnnnnnnnnnnnnnnnnnnnnnnnnnnnnnnnnnnnnnnnnnnnnnnnnnnnnnnnnnnnnnnnnnnnnnnnnnnnnnnnnnnnnnnnnnnnnnnnnnnnnnnnnnnnnnnnnnnnnnnnnnnnnnnnnnnnnnnnnnnnnnnnnnnnnnnnnnnnnnnnnnnnnnnnnnnnnnnnnnnnnnnnnnnnnnnnnnnnnnnnnnnnnnnnnnnnnnnnnnnnnnnnnnnnnnnnnnnnnnnnnnnnnnnnnnnnnnnnnnnnnnnnnnnnnnnnnnnnnnnnnnnnnnnnnnnnnnnnnnnnnnnnnnnnnnnnnnnnnnnnnnnnnnnnnnnnnnnnnnnnnnnnnnnnnnnnnnnnnnnnnnnnnnnnnnnnnnnnnnnnnnnnnnnnnnnnnnnnnnnnnnnnnnnnnnnnnnnnnnnnnnnnnnnnnnnnnnnnnnnnnnnnnnnnnnnnnnnnnnnnnnnnnnnnnnnnnnnnnnnnnnnnnnnnnnnnnnnnnnnnnnnnnnnnnnnnnnnnnnnnnnnnnnnnnnnnnnnnnnnnnnnnnnnnnnnnnnnnnnnnnnnnnnnnnnnnnnnnnnnnnnnnnnnnnnnnnnnnnnnnnnnnnnnnnnnnnnnnnnnnnnnnnnnnnnnnnnnnnnnnnnnnnnnnnnnnnnnnnnnnnnnnnnnnnnnnnnnnnnnnnnnnnnnnnnnnnnnnnnnnnnnnnnnnnnnnnnnnnnnnnnnnnnnnnnnnnnnnnnnnnnnnnnnnnnnnnnnnnnnnnnnnnnnnnnnnnnnnnnnntattgataccatgtctcccatgcataaaaatggtgacaaggagtttcaaacaggaaaagaaccccagcccagtcctccagcacaagaaacagggtacagcactctcgcacagagttatccatctgatttacctgaagaacccagttctcctcaagaaagaatgttcactattgatccaaaagtgtatggagagaaaagggacctccacagtaagaataaggacgatttgaccctcagcaggagtttaggacttggtggtaggtctgcaatagaacaaagaagcatgtcaatcaatttgcctatgtcttgcctagattccatagcccttggatttaactttggtcggggacatgatctttctcctctggcttccgatattctaaccaacactagtggaagtatggatgaaggggatgattaccttccagccaccacaccagcactagagaaagccccttgcttccctgtagaaagcaaagaggaggaacagatagagaaagtaaaagctaccggagaagaaagtactcaagtggagacatcatgtgagtctcctttcctagccaaagatttttacaaaaatggtactgtcatggcaccggacctgcctngaatgctagatctggcaggcacaaggtcaagactggcttctgtgagtgcagatgctnnnnnnnnnnnnnnnnnnnnnnnnnnnnnnnnnnnnnnnnnnnnnnnnnnnnnnnnnnnnnnnnnnnnnnnnnnnnnnnnnnnnnnnnnnnnnnnnnnnnnnnnnnnnnnnnnnnnnnnnnnnnnnnnnnnnnnnnnnnnnnnnnnnnnnnnnnnnnnnnnnnnnnnnnnnnnnnnnnnnnnnnnnnnnnnnnnnnnnnnnnnnnnnnnnnnnnnnnnnnnnnnnnnnnnnnnnnnnnnnnnnnnnnnnnnnnnnnnnnnnnnnnnnnnnnnnnnnnnnnnnnnnnnnnnnnnnnnnnnnnnnnnnnnnnnnnnnnnnnnnnnnnnnnnnnnnnnnnnnnnnnnnnnnnnnnnnnnnnnnnnnnnnnnnnnnnnnnnnnnnnnnnnnnnnnnnnnnnnnnnnnnnnnnnnnnnnnnnnnnnnnnnnnnnnnnnnnnnnnnnnnnnnnnnnnnnnnnnnnnnnnnnnnnnnnnnnnnnnnnnnnnnnnnnnnnnnnnnnnnnnnnnnnnnnnnnnnnnnnnnnnnnnnnnnnnnnnnnnnnnnnnnnnnnnnnnnnnnnnnnnnnnnnnnnnnnnnnnnnnnnnnnnnnnnnnnnnnnnnnnnnnnnnnnnnnnnnnnnnnnnnnnnnnnnnnnnnnnnnnnnnnnnnnnnnnnnnnnnnnnnnnnnnnnnnnnnnnnnnnnnnnnnnnnnnnnnnnnnnnnnnnnnnnnnnnnnnnnnnnnnnnnnnnnnnnaaacttgaggctacacaggacatgaccccctcatccaaagcaccgcaggaggtagatgcatttatgggtgtcgagtctggccacatgaaagaaggcatcaaagttagtgagacagaagtcaaagagaaggtggccaagcctgacttggtgcaccaggaggctgtagacaaggaggagtcctatgagtctagtggtgagcatgaaagtcttaccatggagtccttgaaagctgatgagggcaagaaggaaacatctccagaatcatctctaattcaagatgagattgctgtcaaactgtcggtggaaataccttgcccacctgctgtttcagaggctgatttagccacagatgagagagctgatgtccagatggaatttattcaggggccaaaagaagaaagcaaagagaccccagatatatccatcacgccttctgatgttgcagagccattgcatgaagcaatcatatctgaaccagcagagattcagagtgaggaagaagagatagaagcccagggagaatatgataaactgctcttccgctcagacacccttcagattactgacctgggtgtctcaggtgccagggaggaatttgtggagacctgcccaggtgaacacaaaggagtgattgagtctgttgtgaccatcgaggatgatttcatcactgtagtgcaaaccacaactgatgaaggggagtcagggtcccacagcgtgcgttttgcagcactagagcagcctgaggtggaaaggagaccatctcctcatgacgaagaagagtttgaagtagaagaggcagctgaagcccaggcagaacccaaagatggttccccagaggctccagcttcccctgagagagaagaggttgcattttctgaatataagacagaaacctatgacgattacaaagacgagaccaccattgatgactccatcatggacgctgacagnnnnnnnnnnnnnnnnnnnnnnnnnnnnnnnnnnnnnnnnnnnnnnnnnnnnnnnnnnnnnnnnnnnnnnnnnnnnnnnnnnnnnnnnnnnnnnnnnnnnnnnnnnnnnnnnnnnnnnnnnnnnnnnnnnnnnnnnnnnnnnnnnnnnnnnnnnnnnnnnnnnnnnnnnnnnnnnnnnnnnnnnnnnnnnnnnnnnnnnnnnnnnnnnnnnnnnnnnnnnnnnnnnnnnnnnnnnnnnnnnnnnnnnnnnnnnnnnnnnnnnnnnnnnnnnnnnnnnnnnnnnnnnnnnnnnnnnnnnnnnnnnnnnnnnnnnnnnnnnnnnnnnnnnnnnnnnnnnnnnnnnnnnnnnnnnnnnnnnnnnnnnnnnnnnnnnnnnnnnnnnnnnnnnnnnnnnnnnnnnnnnnnnnnnnnnnnnnnnnnnnnnnnnnnnnnnnnnnnnnnnnnnnnnnnnnnnnnnnnnnnnnnnnnnnnnnnnnnnnnnnnnnnnnnnnnnnnnnnnnnnnnnnnnnnnnnnnnnnnnnnnnnnnnnnnnnnnnnnnnnnnnnnnnnnnnnnnnnnnnnnnnnnnnnnnnnnnnnnnnnnnnnnnnnnnnnnnnnnnnnnnnnnnnnnnnnnnnnnnnnnnnnnnnnnnnnnnnnnnnnnnnnnnnnnnnnnnnnnnnnnnnnnnnnnnnnnnnnnnnnnnnnnnnnnnnnnnnnnnnnnnnnnnnnnnnnnnnnnnnnnnnnnnnnnnnnnnnnnnnnnnnnnnnnnnnnnnnnnnnnnnnnnnnnnnnnnnnnnnnnnnnnnnnnnnnnnnnnnnnnnnnnnnnnnnnnnnnnnnnnnnnnnnnnnnnnnnnnnnnnnnnnnnnnnnnnnnnnnnnnnnnnnnnnnnnnnnnnnnnnnnnnnnnnnnnnnnnnnnnnnnnnnnnnnaggtacaaattgttaccaagaaaatagacctaagccatgtgacatccaaatgtggctctctgaagaacatccgccacaggccagg

SEQ ID NO: 22361 - DNA, 79 bp, Macaca Mulatta
caggaaggtgaagcagatgcaccttaacttcatggatgaaaaggatcggatcatcacagccatgtacaatgaagcgcgg

SEQ ID NO: 22362 - DNA, 883 bp, Macaca Mulatta
tcctgtggtctaggctgggagaagggggtgcctgtcctggcctggggctctctgagcagccctcctgtctgcctgccacacagccccaggatgactactcggtcctgtttgaagacacctcctatgcagacggctattcccctcccctcaatgtagctcagaggtacgtggtggcttgtaaggagcccaagaaaatgtgacgctgcccggcggactcaacatcccccaacgacacagggcaggacagcagaggatgtgctgggattaaacagacattcctcctccactcgtctcctgggttttacttctccagaccctctcccctctccaaatagggcaagttggggagctggagtggggaggtggccgtatttggccccagtgggcgatcactctttcagctcatggtttctcttggcttgaaatggagactctgcattgaacacaaatcatactttattcttgagccgcttggtcaggcttgattcgcacactccctcagcagtgaccccgggagcccctctcacagctcagagcggaagctgaggctgcagcctgccatcttctccgcatagtccacatcgaagcgctcattctgcgccacggtgaaggtggttttccagtccccagtcattcctggaggaggaaggcagggagcaaagctggagtctcatcccaggggaggccccgagtgcctatggggaggctccagccgctgctcccacctgccccaaacccccgtgctggccggcacccacctttcctcatgaagggggagatgctgtggtccatgagctcctgggggatggtggtgtagttggccatagggttcttcttcatctccttgaatgacgtgtgttgaaccatgaggtctacggtctcc

SEQ ID NO: 22363 - DNA, 1371 bp, Macaca Mulatta
  misc_feature (1)...(1371): n = A,T,C or G
ctgaaagaatgttcttataatgatccaagaggaagtggcaaatgagtgctcttcttcaggnnnnnnnnnnnnnnnnnnnnnnnnnnnnnnnnnnnnnnnnnnnnnnnnnnnnnnnnnnnnnnnnnnnnnnnnnnnnnnnnnnnnnnnnnnnnnnnnnnnnnnnnnnnnnnnnnnnnnnnnnnnnnnnnnnnnnnnnnnnnnnnnnnnnnnnnnnnnnnnnnnnnnnnnnnnnnnnnnnnnnnnnnnnnnnnnnnnnnnnnnnnnnnnnnnnnnnnnnnnnnnnnnnnnnnnnnnnnnnnnnnnnnnnnnnnnnnnnnnnnnnnnnnnnnnnnnnnnnnnnnnnnnnnnnnnnnnnnnnnnnnnnnnnnnnnnnnnnnnnnnnnnnnnnnnnnnnnnnnnnnnnnnnnnnnnnnnnnnnnnnnnnnnnnnnnnnnnnnnnnnnnnnnnnnnnnnnnnnnnnnnnnnnnnnnnnnnnnnnnnnnnnnnnnnnnnnnnnnnnnnnnnnnnnnnnnnnnnnnnnnnnnnnnnnnnnnnnnnnnnnnnnnnnnnnnnnnnnnnnnnnnnnnnnnnnnnnnnnnnnnnnnnnnnnnnnnnnnnnnnnnnnnnnnnnnnnnnnnnnnnnnnnnnnnnnnnnnnnnnnnnnnnnnnnnnnnnnnnnnnnnnnnnnnnnnnnnnnnnnnnnnnnnnnnnnnnnnnnnnnnnnnnnnnnnnnnnnnnnnnnnnnnnnnnnnnnnnnnnnnnnnnnnnnnnnnnnnnnnnnnnnnnnnnnnnnnnnnnnnnnnnnnnnnnnnnnnnnnnnnnnnnnnnnnnnnnnnnnnnnnnnnnnnnnnnnnnnnnnnnnnnnnnnnnnnnnnnnnnnnnnnnnnnnnnnnnnnnnnnnnnnnnnnnnnnnnnnnnnnnnnnnnnnnnnnnnnnnnnnnnnnnnnnnnnnnnnnnnnnnnnnnnnnnnnnnnnnnnnnnnnnnnnnnnnnnnnnnnnnnnnnnnnnnnnnnnnnnnnnnnnnnnnnnnnnnnnnnnnnnnnnnnnnnnnnnnnnnnnnnnnnnnnnnnnnnnnnnnnnnnnnnnnnnnnnnnnnnnnnnnnnnnnnnnnnnnnnnnnnnnnnnnnnnnnnnnnnnnnnnnnnnnnnnnnnnnnnnnnnnnnnnnnnnnnnnnnnnnnnnnnnnnnnnnnnnnnnnnnnnnnnnnnnnnnnnnnnnnnnnnnnnnnnnnnnnnnnnnnnnnnnnnnnnnnnnnnnnnnnnnnnnnnnnnnnnnnnnnnnnnnnnnnnnnnnngctccaccaaccctcccagacgtcagtgggtcaagcagcctcccaaggcaaccttctgcacctggctcacagccaagcaaccatgtctcaaagtcccgt

SEQ ID NO: 22364 - DNA, 744 bp, Macaca Mulatta
cgcgagcccccacggtgaagagccgggaccgctgcggagtgtggaggtcgttggagtcacttgcctgtcagcagcagctcctgtgtctgctcgtcggcgcccctcccgctccagccatgctttccgccctcgcccggcctgccagcgctgctctccgccgcagcttcagcacctcggcccagaacaatgctaaagtagccgtgctaggggcctctggaggcatcgggcagccgctttcacttctcctgaagaacagccccttggtgagccgcctgaccctctatgatatcgcgcacacacccggagtggctgcagatctgagccacatcgagaccaaagctgttgtgaaaggctacctcggacctgaacagctgcctgactgcctaaaaggctgtgatgtggtagttattccggccggagtccccagaaaaccaggcatgacccgggacgacctgtttaacaccaatgccacgattgtggccaccctggctgctgcctgtgctcagcactgcccagaagccatgatctgcatcattgccaatccggttaactccaccatccccatcacagcagaagttttcaagaagcacggagtgtacaaccccagcaagatcttcggcgtgacgaccctggacatcgtcagagccaacacctttgttgcagagctgaagggtttggatccagctcgagtcaacgtccctgtcattggtggccatgccggggaagaccatcatccccctgatc

SEQ ID NO: 22365 - DNA, 9242 bp, Macaca Mulatta
  misc_feature (1)...(9242): n = A,T,C or G
tgtccgagtttctcctcggcttactcactctctcgggattattgccgatcgccagggtgctgaccgtgagagccgaccgagnnnnnnnnnnnnnnnnnnnnnnnnnnnnnnnnnnnnnnnnnnnnnnnnnnnnnnnnnnnnnnnnnnnnnnnnnnnnnnnnnnnnnnnnnnnnnnnnnnnnnnnnnnnnnnnnnnnnnnnnnnnnnnnnnnnnnnnnnnnnnnnnnnnnnnnnnnnnnnnnnnnnnnnnnnnnnnnnnnnnnnnnnnnnnnnnnnnnnnnnnnnnnnnnnnnnnnnnnnnnnnnnnnnnnnnnnnnnnnnnnnnnnnnnnnnnnnnnnnnnnnnnnnnnnnnnnnnnnnnnnnnnnnnnnnnnnnnnnnnnnnnnnnnnnnnnnnnnnnnnnnnnnnnnnnnnnnnnnnnnnnnnnnnnnnnnnnnnnnnnnnnnnnnnnnnnnnnnnnnnnnnnnnnnnnnnnnnnnnnnnnnnnnnnnnnnnnnnnnnnnnnnnnnnnnnnnnnnnnnnnnnnnnnnnnnnnnnnnnnnnnnnnnnnnnnnnnnnnnnnnnnnnnnnnnnnnnnnnnnnnnnnnnnnnnnnnnnnnnnnnnnnnnnnnnnnnnnnnnnnnnnnnnnnnnnnnnnnnnnnnnnnnnnnnnnnnnnnnnnnnnnnnnnnnnnnnnnnnnnnnnnnnnnnnnnnnnnnnnnnnnnnnnnnnnnnnnnnnnnnnnnnnnnnnnnnnnnnnnnnnnnnnnnnnnnnnnnnnnnnnnnnnnnnnnnnnnnnnnnnnnnnnnnnnnnnnnnnnnnnnnnnnnnnnnnnnnnnnnnnnnnnnnnnnnnnnnnnnnnnnnnnnnnnnnnnnnnnnnnnnnnnnnnnnnnnnnnnnnnnnnnnnnnnnnnnnnnnnnnnnnnnnnnnnnnnnnnnnnnnnnnnnnnnnnnnnnnnnnnnnnnnnnnnnnnnnnnnnnnnnnnnnnnnnnnnnnnnnnnnnnnnnnnnnnnnnnnnnnnnnnnnnnnnnnnnnnnnnnnnnnnnnnnnnnnnnnnnnnnnnnnnnnnnnnnnnnnnnnnnnnnnnnnnnnnnnnnnnnnnnnnnnnnnnnnnnnnnnnnnnnnnnnnnnnnnnnnnnnnnnnnnnnnnnnnnnnnnnnnnnnnnnnnnnnnnnnnnnnnnnnnnnnnnnnnnnnnnnnnnnnnnnnnnnnnnnnnnnnnnnnnnnnnnnnnnnnnnnnnnnnnnnnnnnnnnnnnnnnnnnnnnnnnnnnnnnnnnnnnnnnnnnnnnnnnnnnnnnnnnnnnnnnnnnnnnnnnnnnnnnnnnnnnnnnnnnnnnnnnnnnnnnnnnnnnnnnnnnnnnnnnnnnnnnnnnnnnnnnnnnnnnnnnnnnnnnnnnnnnnnnnnnnnnnnnnnnnnnnnnnnnnnnnnnnnnnnnnnnnnnnnnnnnnnnnnnnnnnnnnnnnnnnnnnnnnnnnnnnnnnnnnnnnnnnnnnnnnnnnnnnnnnnnnnnnnnnnnnnnnnnnnnnnnnnnnnnnnnnnnnnnnnnnnnnnnnnnnnnnnnnnnnnnnnnnnnnnnnnnnnnnnnnnnnnnnnnnnnnnnnnnnnnnnnnnnnnnnnnnnnnnnnnnnnnnnnnnnnnnnnnnnnnnnnnnnnnnnnnnnnnnnnnnnnnnnnnnnnnnnnnnnnnnnnnnnnnnnnnnnnnnnnnnnnnnnnnnnnnnnnnnnnnnnnnnnnnnnnnnnnnnnnnnnnnnnnnnnnnnnnnnnnnnnnnnnnnnnnnnnnnnnnnnnnnnnnnnnnnnnnnnnnnnnnnnnnnnnnnnnnnnnnnnnnnnnnnnnnnnnnnnnnnnnnnnnnnnnnnnnnnnnnnnnnnnnnnnnnnnnnnnnnnnnnnnnnnnnnnnnnnnnnnnnnnnnnnnnnnnnnnnnnnnnnnnnnnnnnnnnnnnnnnnnnnnnnnnnnnnnnnnnnnnnnnnnnnnnnnnnnnnnnnnnnnnnnnnnnnnnnnnnnnnnnnnnnnnnnnnnnnnnnnnnnnnnnnnnnnnnnnnnnnnnnnnnnnnnnnnnnnnnnnnnnnnnnnnnnnnnnnnnnnnnnnnnnnnnnnnnnnnnnnnnnnnnnnnnnnnnnnnnnnnnnnnnnnnnnnnnnnnnnnnnnnnnnnnnnnnnnnnnnnnnnnnnnnnnnnnnnnnnnnnnnnnnnnnnnnnnnnnnnnnnnnnnnnnnnnnnnnnnnnnnnnnnnnnnnnnnnnnnnnnnnnnnnnnnnnnnnnnnnnnnnnnnnnnnnnnnnnnnnnnnnnnnnnnnnnnnnnnnnnnnnnnnnnnnnnnnnnnnnnnnnnnnnnnnnnnnnnnnnnnnnnnnnnnnnnnnnnnnnnnnnnnnnnnnnnnnnnnnnnnnnnnnnnnnnnnnnnnnnnnnnnnnnnnnnnnnnnnnnnnnnnnnnnnnnnnnnnnnnnnnnnnnnnnnnnnnnnnnnnnnnnnnnnnnnnnnnnnnnnnnnnnnnnnnnnnnnnnnnnnnnnnnnnnnnnnnnnnnnnnnnnnnnnnnnnnnnnnnnnnnnnnnnnnnnnnnnnnnnnnnnnnnnnnnnnnnnnnnnnnnnnnnnnnnnnnnnnnnnnnnnnnnnnnnnnnnnnnnnnnnnnnnnnnnnnnnnnnnnnnnnnnnnnnnnnnnnnnnnnnnnnnnnnnnnnnnnnnnnnnnnnnnnnnnnnnnnnnnnnnnnnnnnnnnnnnnnnnnnnnnnnnnnnnnnnnnnnnnnnnnnnnnnnnnnnnnnnnnnnnnnnnnnnnnnnnnnnnnnnnnnnnnnnnnnnnnnnnnnnnnnnnnnnnnnnnnnnnnnnnnnnnnnnnnnnnnnnnnnnnnnnnnnnnnnnnnnnnnnnnnnnnnnnnnnnnnnnnnnnnnnnnnnnnnnnnnnnnnnnnnnnnnnnnnnnnnnnnnnnnnnnnnnnnnnnnnnnnnnnnnnnnnnnnnnnnnnnnnnnnnnnnnnnnnnnnnnnnnnnnnnnnnnnnnnnnnnnnnnnnnnnnnnnnnnnnnnnnnnnnnnnnnnnnnnnnnnnnnnnnnnnnnnnnnnnnnnnnnnnnnnnnnnnnnnnnnnnnnnnnnnnnnnnnnnnnnnnnnnnnnnnnnnnnnnnnnnnnnnnnnnnnnnnnnnnnnnnnnnnnnnnnnnnnnnnnnnnnnnnnnnnnnnnnnnnnnnnnnnnnnnnnnnnnnnnnnnnnnnnnnnnnnnnnnnnnnnnnnnnnnnnnnnnnnnnnnnnnnnnnnnnnnnnnnnnnnnnnnnnnnnnnnnnnnnnnnnnnnnnnnnnnnnnnnnnnnnnnnnnnnnnnnnnnnnnnnnnnnnnnnnnnnnnngggagatgcatcaacaaagcatgggtgtgtgatggagacattgattgtgaagatcagtcagatgaagatgactgtgacagtttcttgtgtggaccacccaaatatccttgtgctaatgacacctcagtctgcctgcagccagagaaactctgcaatgggaaaaaggattgtcctgatggctctgatgaaggcgatctctgtgnnnnnnnnnnnnnnnnnnnnnnnnnnnnnnnnnnnnnnnnnnnnnnnnnnnnnnnnnnnnnnnnnnnnnnnnnnnnnnnnnnnnnnnnnnnnnnnnnnnnnnnnnnnnnnnnnnnnnnnnnnnnnnnnnnnnnnnnnnnnnnnnnnnnnnnnnnnnnnnnnnnnnnnnnnnnnnnnnnnnnnnnnnnnnnnnnnnnnnnnnnnnnnnnnnnnnnnnnnnnnnnnnnnnnnnnnnnnnnnnnnnnnnnnnnnnnnnnnnnnnnnnnnnnnnnnnnnnnnnnnnnnnnnnnnnnnnnnnnnnnnnnnnnnnnnnnnnnnnnnnnnnnnnnnnnnnnnnnnnnnnnnnnnnnnnnnnnnnnnnnnnnnnnnnnnnnnnnnnnnnnnnnnnnnnnnnnnnnnnnnnnnnnnnnnnnnnnnnnnnnnnnnnnnnnnnnnnnnnnnnnnnnnnnnnnnnnnnnnnnnnnnnnnnnnnnnnnnnnnnnnnnnnnnnnnnnnnnnnnnnnnnnnnnnnnnnnnnnnnnnnnnnnnnnnnnnnnnnnnnnnnnnnnnnnnnnnnnnnnnnnnnnnnnnnnnnnnnnnnnnnnnnnnnnnnnnnnnnnnnnnnnnnnnnnnnnnnnnnnnnnnnnnnnnnnnnnnnnnnnnnnnnnnnnnnnnnnnnnnnnnnnnnnnnnnnnnnnnnnnnnnnnnnnnnnnnnnnnnnnnnnnnnnnnnnnnnnnnnnnnnnnnnnnnnnnnnnnnnnnnnnnnnnnnnnnnnnnnnnnnnnnnnnnnnnnnnnnnnnnnnnnnnnnnnnnnnnnnnnnnnnnnnnnnnnnnnnnnnnnnnnnnnnnnnnnnnnnnnnnnnnnnnnnnnnnnnnnnnnnnnnnnnnnnnnnnnnnnnnnnnnnnnnnnnnnnnnnnnnnnnnnnnnnnnnnnnnnnnnnnnnnnnnnnnnnnnnnnnnnnnnnnnnnnnnnnnnnnnnnnnnnnnnnnnnnnnnnnnnnnnnnnnnnnnnnnnnnnnnnnnnnnnnnnnnnnnnnnnnnnnnnnnnnnnnnnnnnnnnnnnnnnnnnnnnnnnnnnnnnnnnnnnnnnnnnnnnnnnnnnnnnnnnnnnnnnnnnnnnnnnnnnnnnnnnnnnnnnnnnnnnnnnnnnnnnnnnnnnnnnnnnnnnnnnnnnnnnnnnnnnnnnnnnnnnnnnnnnnnnnnnnnnnnnnnnnnnnnnnnnnnnnnnnnnnnnnnnnnnnnnnnnnnnnnnnnnnnnnnnnnnnnnnnnnnnnnnnnnnnnnnnnnnnnnnnnnnnnnnnnnnnnnnnnnnnnnnnnnnnnnnnnnnnnnnnnnnnnnnnnnnnnnnnnnnnnnnnnnnnnnnnnnnnnnnnnnnnnnnnnnnnnnnnnnnnnnnnnnnnnnnnnnnnnnnnnnnnnnnnnnnnnnnnnnnnnnnnnnnnnnnnnnnnnnnnnnnnnnnnnnnnnnnnnnnnnnnnnnnnnnnnnnnnnnnnnnnnnnnnnnnnnnnnnnnnnnnnnnnnnnnnnnnnnnnnnnnnnnnnnnnnnnnnnnnnnnnnnnnnnnnnnnnnnnnnnnnnnnnnnnnnnnnnnnnnnnnnnnnnnnnnnnnnnnnnnnnnnnnnnnnnnnnnnnnnnnnnnnnnnnnnnnnnnnnnnnnnnnnnnnnnnnnnnnnnnnnnnnnnnnnnnnnnnnnnnnnnnnnnnnnnnnnnnnnnnnnnnnnnnnnnnnnnnnnnnnnnnnnnnnnnnnnnnnnnnnnnnnnnnnnnnnnnnnnnnnnnnnnnnnnnnnnnnnnnnnnnnnnnnnnnnnnnnnnnnnnnnnnnnnnnnnnnnnnnnnnnnnnnnnnnnnnnnnnnnnnnnnnnnnnnnnnnnnnnnnnnnnnnnnnnnnnnnnnnnnnnnnnnnnnnnnnnnnnnnnnnnnnnnnnnnnnnnnnnnnnnnnnnnnnnnnnnnnnnnnnnnnnnnnnnnnnnnnnnnnnnnnnnnnnnnnnnnnnnnnnnnnnnnnnnnnnnnnnnnnnnnnnnnnnnnnnnnnnnnnnnnnnnnnnnnnnnnnnnnnnnnnnnnnnnnnnnnnnnnnnnnnnnnnnnnnnnnnnnnnnnnnnnnnnnnnnnnnnnnnnnnnnnnnnnnnnnnnnnnnnnnnnnnnnnnnnnnnnnnnnnnnnnnnnnnnnnnnnnnnnnnnnnnnnnnnnnnnnnnnnnnnnnnnnnnnnnnnnnnnnnnnnnnnnnnnnnnnnnnnnnnnnnnnnnnnnnnnnnnnnnnnnnnnnnnnnnnnnnnnnnnnnnnnnnnnnnnnnnnnnnnnnnnnnnnnnnnnnnnnnnnnnnnnnnnnnnnnnnnnnnnnnnnnnnnnnnnnnnnnnnnnnnnnnnnnnnnnnnnnnnnnnnnnnnnnnnnnnnnnnnnnnnnnnnnnnnnnnnnnnnnnnnnnnnnnnnnnnnnnnnnnnnnnnnnnnnnnnnnnnnnnnnnnnnnnnnnnnnnnnnnnnnnnnnnnnnnnnnnnnnnnnnnnnnnnnnnnnnnnnnnnnnnnnnnnnnnnnnnnnnnnnnnnnnnnnnnnnnnnnnnnnnnnnnnnnnnnnnnnnnnnnnnnnnnnnnnnnnnnnnnnnnnnnnnnnnnnnnnnnnnnnnnnnnnnnnnnnnnnnnnnnnnnnnnnnnnnnnnnnnnnnnnnnnnnnnnnnnnnnnnnnnnnnnnnnnnnnnnnnnnnnnnnnnnnnnnnnnnnnnnnnnnnnnnnnnnnnnnnnnnnnnnnnnnnnnnnnnnnnnnnnnnnnnnnnnnnnnnnnnnnnnnnnnnnnnnnnnnnnnnnnnnnnnnnnnnnnnnnnnnnnnnnnnnnnnnnnnnnnnnnnnnnnnnnnnnnnnnnnnnnnnnnnnnnnnnnnnnnnnnnnnnnnnnnnnnnnnnnnnnnnnnnnnnnnnnnnnnnnnnnnnnnnnnnnnnnnnnnnnnnnnnnnnnnnnnnnnnnnnnnnnnnnnnnnnnnnnnnnnnnnnnnnnnnnnnnnnnnnnnnnnnnnnnnnnnnnnnnnnnnnnnnnnnnnnnnnnnnnnnnnnnnnnnnnnnnnnnnnnnnnnnnnnnnnnnnnnnnnnnnnnnnnnnnnnnnnnnnnnnnnnnnnnnnnnnnnnnnnnnnnnnnnnnnnnnnnnnnnnnnnnnnnnnnnnnnnnnnnnnnnnnnnnnnnnnnnnnnnnnnnnnnnnnnnnnnnnnnnnnnnnnnnnnnnnnnnnnnnnnnnnnnnnnnnnnnnnnnnnnnnnnnnnnnnnnnnnnnnnnnnnnnnnnnnnnnnnnnnnnnnnnnnnnnnnnnnnnnnnnnnnnnnnnnnnnnnnnnnnnnnnnnnnnnnnnnnnnnnnnnnnnnnnnnnnnnnnnnnnnnnnnnnnnnnnnnnnnnnnnnnnnnnnnnnnnnnnnnnnnnnnnnnnnnnnnnnnnnnnnnnnnnnnnnnnnnnnnnnnnnnnnnnnnnnnnnnnnnnnnnnnnnnnnnnnnnnnnnnnnnnnnnnnnnnnnnnnnnnnnnnnnnnnnnnnnnnnnnnnnnnnnnnnnnnnnnnnnnnnnnnnnnnnnnnnnnnnnnnnnnnnnnnnnnnnnnnnnnnnnnnnnnnnnnnnnnnnnnnnnnnnnnnnnnnnnnnnnnnnnnnnnnnnnnnnnnnnnnnnnnnnnnnnnnnnnnnnnnnnnnnnnnnnnnnnnnnnnnnnnnnnnnnnnnnnnnnnnnnnnnnnnnnnnnnnnnnnnnnnnnnnnnnnnnnnnnnnnnnnnnnnnnnnnnnnnnnnnnnnnnnnnnnnnnnnnnnnnnnnnnnnnnnnnnnnnnnnnnnnnnnnnnnnnnnnnnnnnnnnnnnnnnnnnnnnnnnnnnnnnnnnnnnnnnnnnnnnnnnnnnnnnnnnnnnnnnnnnnnnnnnnnnnnnnnnnnnnnnnnnnnnnnnnnnnnnnnnnnnnnnnnnnnnnnnnnnnnnnnnnnnnnnnnnnnnnnnnnnnnnnnnnnnnnnnnnnnnnnnnnnnnnnnnnnnnnnnnnnnnnnnnnnnnnnnnnnnnnnnnnnnnnnnnnnnnnnnnnnnnnnnnnnnnnnnnnnnnnnnnnnnnnnnnnnnnnnnnnnnnnnnnnnnnnnnnnnnnnnnnnnnnnnnnnnnnnnnnnnnnnnnnnnnnnnnnnnnnnnnnnnnnnnnnnnnnnnnnnnnnnnnnnnnnnnnnnnnnnnnnnnnnnnnnnnnnnnnnnnnnnnnnnnnnnnnnnnnnnnnnnnnnnnnnnnnnnnnnnnnnnnnnnnnnnnnnnnnnnnnnnnnnnnnnnnnnnnnnnnnnnnnnnnnnnnnnnnnnnnnnnnnnnnnnnnnnnnnnnnnnnnnnnnnnnnnnnnnnnnnnnnnnnnnnnnnnnnnnnnnnnnnnnnnnnnnnnnnnnnnnnnnnnnnnnnnnnnnnnnnnnnnnnnnnnnnnnnnnnnnnnnnnnnnnnnnnnnnnnnnnnnnnnnnnnnnnnnnnnnnnnnnnnnnnnnnnnnnnnnnnnnnnnnnnnnnnnnnnnnnnnnnnnnnnnnnnnnnnnnnnnnnnnnnnnnnnnnnnnnnnnnnnnnnnnnnnnnnnnnnnnnnnnnnnnnnnnnnnnnnnnnnnnnnnnnnnnnnnnnnnnnnnnnnnnnnnnnnnnnnnnnnnnnnnnnnnnnnnnnnnnnnnnnnnnnnnnnnnnnnnnnnnnnnnnnnnnnnnnnnnnnnnnnnnnnnnnnnnnnnnnnnnnnnnnnnnnnnnnnnnnnnnnnnnnnnnnnnnnnnnnnnnnnnnnnnnnnnnnnnnnnnnnnnnnnnnnnnnnnnnnnnnnnnnnnnnnnnnnnnnnnnnnnnnnnnnnnnnnnnnnnnnnnnnnnnnnnnnnnnnnnnnnnnnnnnnnnnnnnnnnnnnnnnnnnnnnnnnnnnnnnnnnnnnnnnnnnnnnnnnngctcccaataatacatgtgatgaaaatgctntcatgtgccataataaagtatgcattcccaagcaatttgtttgtgaccatgatgacgactgtggagatggctctgatgagtcatcacagtgtgnnnnnnnnnnnnnnnnnnnnnnnnnnnnnnnnnnnnnnnnnnnnnnnnnnnnnnnnnnnnnnnnnnnnnnnnnnnnnnnnnnnnnnnnnnnnnnnnnnnnnnnnnnnnnnnnnnnnnnnnnnnnnnnnnnnnnnnnnnnnnnnnnnnnnnnnnnnnnnnnnnnnnnnnnnnnnnnnnnnnnnnnnnnnnnnnnnnnnnnnnnnnnnnnnnnnnnnnnnnnnnnnnnnnnnnnnnnnnnnnnnnnnnnnnnnnnnnnnnnnnnnnnnnnnnnnnnnnnnnnnnnnnnnnnnnnnnnnnnnnnnnnnnnnnnnnnnnnnnnnnnnnnnnnnnnnnnnnnnnnnnnnnnnnnnnnnnnnnnnnnnnnnnnnnnnnnnnnnnnnnnnnnnnnnnnnnnnnnnnnnnnnnnnnnnnnnnnnnnnnnnnnnnnnnnnnnnnnnnnnnnnnnnnnnnnnnnnnnnnnnnnnnnnnnnnnnnnnnnnnnnnnnnnnnnnnnnnnnnnnnnnnnnnnnnnnnnnnnnnnnnnnnnnnnnnnnnnnnnnnnnnnnnnnnnnnnnnnnnnnnnnnnnnnnnnnnnnnnnnnnnnnnnnnnnnnnnnnagggattaaacaatgttattgctatagactttgattacagagaagaattcatctattggattgattctagccgaccaaatggcagtcgcataaatagaatgtgtttaaatggaagtgacattaaggt

SEQ ID NO: 22366 - DNA, 639 bp, Macaca Mulatta
gagcagccccgcccccaccacagaccggggcacctccaccgacagcccttgccgccgcagcacagccacccagatggcacctccggggggtccccctgctgccccgcctgggggtcggggccactcgcatcgagaccgaatccactaccaggccgatgtgcgactagaggccactgaggagatctacctgaccccagtgcagaggcccccagaccctgcagagcccacctccgccttcctgccgcccactgagagccggatgtcggtcagctccgatccagaccctgctgcctacccctccacggcagggcggccacatccctccatcagtgaagaggaggagggcttcgactgcctgtcgtccccagagcgggctgagcccccaggcggagggtggcgggggagcctgggggagccgccgccacctccacgggcgtctctgagctcggacaccagcgccctgtcctacgactcggtcaagtacacgctggtggtggatgagcacgcacagctggagctggtgagcctgcggccgtgcttcggagactacagtgacgagagtgactcggccaccgtctatgacaactgtgcctctgtctcctcgccctatgagtcggccatcggagaggaatatgagga

SEQ ID NO: 22367 - DNA, 574 bp, Macaca Mulatta
  misc_feature (1)...(574): n = A,T,C or G
atttaagatctgagatacaattcctgaaatatcaacgtttccagaaaaccgtggctacacaataatgcattgcctctatcatgttagaacgtgcattagactcaaataccgaaaccatgaaacaaatcaccatccttcaacaatttgagcaaagatagaatgcttaagaacaacatagatggacttgcagaggatgggctgtttcctcgtgccgaattcggcacgnnnnnnnnnnnnnnnnnnnnnnnnnnngatccgaaaatgactttattgaagatggagttggcaagacctagctccacttcaccccacccccggagcctttcctgtcgccctcactcacatgctttccacaagctctgcacctccctgcacctgcctggatgccctgggaagggcactctctctccccgcttatgaccctgaggtggagaccaagtgcctgagcggctggcctgtttctacagcgttcagatgtgccgtgctcctgtcggaatgggtgaggagcaggccgcaggagagctcctcacgccctcccagccccgtgcttgggctggggctccatctgccccag

SEQ ID NO: 22368 - DNA, 1910 bp, Macaca Mulatta
  misc_feature (1)...(1910): n = A,T,C or G
tattaaggcgcaccgggcgcgcagacttctgggagatgaagtccttgcgaaggcagcgcattgattgggagcgcgggcgccaggaccctttgcgcaggcgcgttgcttacccgacctgaagaggcgccgtcttcccgggtcccgagcactctgtgccggaggngactctgcccttgactacaaggagagcacacaagaaaaaatggctactgtgtctcccaaccaccagatgccaggnnnnnnnnnnnnnnnnnnnnnnnnnnnnnnnnnnnnnnnnnnnnnnnnnnnnnnnnnnnnnnnnnnnnnnnnnnnnnnnnnnnnnnnnnnnnnnnnnnnnnnnnnnnnnnnnnnnnnnnnnnnnnnnnnnnnnnnnnnnnnnnnnnnnnnnnnnnnnnnnnnnnnnnnnnnnnnnnnnnnnnnnnnnnnnnnnnnnnnnnnnnnnnnnnnnnnnnnnnnnnnnnnnnnnnnnnnnnnnnnnnnnnnnnnnnnnnnnnnnnnnnnnnnnnnnnnnnnnnnnnnnnnnnnnnnnnnnnnnnnnnnnnnnnnnnnnnnnnnnnnnnnnnnnnnnnnnnnnnnnnnnnnnnnnnnnnnnnnnnnnnnnnnnnnnnnnnnnnnnnnnnnnnnnnnnnnnnnnnnnnnnnnnnnnnnnnnnnnnnnnnnnnnnnnnnnnnnnnnnnnnnnnnnnnnnnnnnnnnnnnnnnnnnnnnnnnnnnnnnnnnnnnnnnnnnnnnnnnnnnnnnnnnnnnnnnnnnnnnnnnnnnnnnnnnnnnnnnnnnnnnnnnnnnnnnnnnnnnnnnnnnnnnnnnnnnnnnnnnnnnnnnnnnnnnnnnnnnnnnnnnnnnnnnnnnnnnnnnnnnnnnnnnnnnnnnnnnnnnnnnnnnnnnnnnnnnnnnnnnnnnnnnnnnnnnnnnnnnnnnnnnnnnnnnnnnnnnnnnnnnnnnnnnnnnnnnnnnnnnnnnnnnnnnnnnnnnnnnnnnnnnnnnnnnnnnnnnnnnnnnnnnnnnnnnnnnnnnnnnnnnnnnnnnnnnnnnnnnnnnnnnnnnnnnnnnnnnnnnnnnnnnnnnnnnnnnnnnnnnnnnnnnnnnnnnnnnnnnnnnnnnnnnnnnnnnnnnnnnnnnnnnnnnnnnnnnnnnnnnnnnnnnnnnnnnnnnnnnnnnnnnnnnnnnnnnnnnnnnnnnnnnnnnnnnnnnnnnnnnnnnnnnnnnnnnnnnnnnnnnnnnnnnnnnnnnnnnnnnnnnnnnnnnnnnnnnnnnnnnnnnnnnnnnnnnnnnnnnnnnnnnnnnnnnnnnnnnnnnnnnnnnnnnnnnnnnnnnnnnnnnnnnnnnnnnnnnnnnnnnnnnnnnnnnnnnnnnnnnnnnnnnnnnnnnnnnnnnnnnnnnnnnnnnnnnnnnnnnnnnnnnnnnnnnnnnnnnnnnnnnnnnnnnnnnnnnnnnnnnnnnnnnnnnnnnnnnnnnnnnnncagaacagttgttttgatggctgctttagtccccctgtcttggagctttttggggccctaatcttgttctcttgtgtcccagcttttagacctcttccttctactgctagtagctggcacttcctgagcgcttacgatgaggtaaagactcagctaagggttttacaggaagtagattaactgatcctgtcgccaaccctatgaagtaggcactgttaccatctgcatctctagatgagcaccctgaggtttatagagattaaatcacttgcccaaggtgacccagctggtaaaaggtgatgccaggtcttgaagacaggtccaccttcaaagtctattttctttaccattatgcttgacagtttgttttataatttatgtatatgtattatcctctcaactagattgtaagcactggaggtgtgacttacaggtctttgtatctcacaca

SEQ ID NO: 22369 - DNA, 255 bp, Macaca Mulatta
ctgtctcttcaaagactcatcctcaaaacaagacttgacactgtgtccttgcctcagtcctaggaactgtggcacacagagatgttcattttaaaaacaatttcacgaaacactcttatactcatgtttataagagagcactgggtagccaagtgatcttcccattcacagagttagtaaacctctgtactacatgctgcttcctgatacttattgaacagggaaatgagtgtgtgcttcagaaaactgaagaat

SEQ ID NO: 22370 - DNA, 665 bp, Macaca Mulatta
  misc_feature (1)...(665): n = A,T,C or G
gggctcaagtcaggatcgtgggaaggggcagatgtctgctgagattgacgtgaggtcttttacctcagaaaattttacctgagtcattaaaataaaacccctttcaaaaaatttctttaagaaaaactagtataataaaaactaggtcctactagagaagttaccaaacaccaagaatattccaaaggaggaggctgtcaaccagcatattgaggctatggtccttgttcaacaggttttgtcatctgatactgataatatttagaaatctaagatgcctttggggtataatatgttcaaaaaaatgtggttctcttggtctgtggttacagcatatgtccatgctaatgagtttgtttcaggacaggaataagtcctcttctgttaagcagtttctcctaaatcagtttggagacatttcagaagctcttccaacacccaagctgaaattattgactttttctgtgattaaaaccatcccagcagttagcaaacaataaccagaaggttttcaatgtggcccctgtggacccttcagaaaacatcttgaaacagtactgtanaaatagtttcaagaaaggaatgtggtggccgggcnnnnnnnnnnnnntnnnnnnnnnnnnnnnnnnnnngagctganngcggtggatcgcagggtcaggaga

SEQ ID NO: 22371 - DNA, 627 bp, Macaca Mulatta
cgagtgtctgaacaaatgacatatgttgatattaacagtgtggtcacaactcactttgtatttgtgccaagttatctactgtatcatgtctgtttttatccttcttgttcagctatttccacagtaatgaaaaagttaggtttggcttggaagttgatgttctcaatagcatgttgcatgtttacagagagaaatatgtgagtccttgcagaagacgagactgttaactcatcgttaaagatggcagttgtcgtctaacagctactgatgatgtcccactttaaaaataaaacccccaaacatcactactttaaggaaaaaaatgtagtccaatactgatgctttcttacagctttttattttaatttggctggataagttgtttcaaataactgttaaaagatattacttacaattgaatgttcaaaatgagaaagtactttaagcaatagagttcatctcttgctgtgttatccaacctcgatgtatacttacagcatctcaggtcacgctttttatttcacttatttaattatgaaatcataaagaagcatgtggaaatagtgtttattgcatatttgaaaaaaaaccgccaactatttctggatattttggctgtacctacta

SEQ ID NO: 22372 - DNA, 821 bp, Macaca Mulatta
cccaggctgagttcatcctttctctgtttgtctccgggttctacaccatgacactcatggggaacacagccatcatcttggtctccctgctggatagccggctccacaccccaatgtactttttcctccgaaacctctcatttctggacatgtgtttcaccacctgcattgtccctcagatgctggtgaacatctggggagcgagtaagaaagtcagttacgtaggctgcatggctcagtattctgtcgccttggctctcggctccacagagtgtgtgcttcttgctgtcatggctgtggaccgttatgttgccgtctgctggcctcttcgctatgttacaatcatgcaccaacagatctgccaccttctcgcagccttgtcctggttttctgggtttgccaactctctctttgagtcttcactaactatcattttgcctctgtgtggccaccaccatgtggaccatttcctttgtgaggtcctggtcattgtcaagctgtcctgcgtggacaccggcccaactgaattgaagatgttcattgttcgtgtgatcatccttgcccttccagtgtgcaccatcctcacctcctatgcctgcattgccagagctgtgctgaagatgcagtctgctgaaggtcggcagaaggcctttgggacttgtgcctcccacctcggtggtggtcttggtcttctatggaaccatcatgttcatgtatcttcagctgaagagcaactactctcagacccagggaaaggtccttgctcttgtttataccattgttacccccaccttgaacccactaatctatacgctgaggaa

SEQ ID NO: 22373 - DNA, 900 bp, Macaca Mulatta
  misc_feature (1)...(900): n = A,T,C or G
agagcatattaaaagtcttcagactgaacaagcatctttgcagtcagaaaacacacattttgaaaatgagaatcagaagcttcaacagaaactaaaagtaatgactgaattatatcaagaaaatgaaatgaaactccacagnnnnnnnnnnnnnnnnnnnnnnnnnnnnnnnnnnnnnnnnnnnnnnnnnnnnnnnnnnnnnnnnnnnnnnnnnnnnnnnnnnnnnnnnnnnnnnnnnnnnnnnnnnnnnnnnnnnnnnnnnnnnnnnnnnnnnnnnnnnnnnnnnnnnnnnnnnnnnnnnnnnnnnnnnnnnnnnnnnnnnnnnnnnnnnnnnnnnnnnnnnnnnnnnnnnnnnnnnnnnnnnnnnnnnnnnnnnnnnnnnnnnnnnnnnnnnnnnnnnnnnnnnnnnnnnnnnnnnnnnnnnnnnnnnnnnnnnnnnnnnnnnnnnnnnnnnnnnnnnnnnnnnnnnnnnnnnnnnnnnnnnnnnnnnnnnnnnnnnnnnnnnnnnnnnnnnnnnnnnnnnnnnnnnnnnnnnnnnnnnnnnnnnnnnnnnnnnnnnnnnnnnnnnnnnnnnnnnnnnnnnnnnnnnnnnnnnnnnnnnnnnnnnnnnnnnnnnnnnnnnnnnnnnnnnnnnnnnnnnnnnnnnnnnnnnnnnnnnnnnnnnnnnnnnnnnnnnnnnnnnnnnnnnnnnnnnnnnnnnnnnnnnnnnnnnnnnnnnnnnnnnnnnnnnnnnnnnnnnnnnnnnnnnnnnnnnnnnnnnnnnnnnnnnnnnnnnnggacaatcatatcctgattcagcccttcctccacaaaggcaagacagatttttttctaattctggtagactgtctggaccagcagaactcagaagttttaatatgccttctttggataaaatgg

SEQ ID NO: 22374 - DNA, 2015 bp, Macaca Mulatta
  misc_feature (1)...(2015): n = A,T,C or G
atggtctgtcgtccagtgttcccttgtcgtcggcgattttgcccccgacccttcttggtgggcttggtggtggcaatctgtctcttctaccagactctgaccctccgagggacacggaagctcannnnnnnnnnnnnnnnnnnnnnnnnnnnnnnnnnnnnnnnnnnnnnnnnnnnnnnnnnnnnnnnnnnnnnnnnnnnnnnnnnnnnnnnnnnnnnnnnnnnnnnnnnnnnnnnnnnnnnnnnnnnnnnnnnnnnnnnnnnnnnnnnnnnnnnnnnnnnnnnnnnnnnnnnnnnnnnnnnnnnnnnnnnnnnnnnnnnnnnnnnnnnnnnnnnnnnnnnnnnnnnnnnnnnnnnnnnnnnnnnnnnnnnnnnnnnnnnnnnnnnnnnnnnnnnnnnnnnnnnnnnnnnnnnnnnnnnnnnnnnnnnnnnnnnnnnnnnnnnnnnnnnnnnnnnnnnnnnnnnnnnnnnnnnnnnnnnnnnnnnnnnnnnnnnnnnnnnnnnnnnnnnnnnnnnnnnnnnnnnnnnnnnnnnnnnnnnnnnnnnnnnnnnnnnnnnnnnnnnnnnnnnnnnnnnnnnnnnnnnnnnnnnnnnnnnnnnnnnnnnnnnnnnnnnnnnnnnnnnnnnnnnnnnnnnnnnnnnnnnnnnnnnnnnnnnnnnnnnnnnnnnnnnnnnnnnnnnnnnnnnnnnnnnnnnnnnnnnnnnnnnnnnnnnnnnnnnnnnnnnnnnnnnnnnnnnnnnnnnnnnnnnnnnnnnnnnnnnnnnnnnnnnnnnnnnnnnnnnnnnnnnnnnnnngaagatctatctgtgattcttaaagcgtatgtgttggtgacatccttaanccctttgcgtgcattcattcattcaactggcacagtttggaatccgccaaagaaaaaacgcttcactggcaannnnnnnnnnnnnnnnnnnnnnnnnnnnnnnnnnnnnnnnnnnnnnnnnnnnnnnnnnnnnnnnnnnnnnnnnnnnnnnnnnnnnnnnnnnnnnnnnnnnnnnnnnnnnnnnnnnnnnnnnnnnnnnnnnnnnnnnnnnntagatgcagattctgctttcaacttctaacttttgatattggttatggcagtntcatgcaccctgtagtgctacaggnnnnnnnnnnnnnnnnnnnnnnnnnnnnnnnnnnnnnnnnnnnnnnnnnnnnnnnnnnnnnnnnnnnnnnnnnnnnnnnnnnnnnnnnnnnnnnnnnnnnnnnnnnnnnnnnnnnnnnnnnnnnnnnnnnnnnnnnnnnnnnnnnnnnnnnnnnnnnnnnnnnnnnnnnnnnnnnnnnnnnnnnnnnnnnnnnnnnnnnnnnnnnnnnnnnnnnnnnnnnnnnnnnnnnnnnnnnnnnnnnnnnnnnnnnnnnnnnnnnnnnnnnnnnnnnnnnnnnnnnnnnnnnnnnnnnnnnnnnnnnnnnnnnnnnnnnnnnnnnnnnnnnnnnnnnnnnnnnnnnnnnnnnnnnnnnnnnnnnnnnnnnnnnnnnnnnnnnnnnnnnnnnnnnnnnnnnnnnnnnnnnnnnnnnnnnnnnnnnnnnnnnnnnnnnnnnnnnnnnnnnnnnnnnnnnnnnnnnnnnnnnnnnnnnnnnnnnnnnnnnnnnnnnnnnnnnnnnnnnnnnnnnnnnnnnnnnnnnnnnnnnnnnnnnnnnnnnnnnnnnnnnnnnnnnnnnnnnnnnnnnnnnnaaacacaccatgtcatatcaagcagatcttcacacatccgcgtttggaactaaatcccgactttaatccaaagatcaaagattattactctgaagtcccatttgatgtggtaacagtgacaattggagtggagactcctaagtgtcagtgcaaggtgcacctgtacgagcaggcagggccnnnntttgccagctaccctctgggcttaggaatgaacaaaatctcaatatttgtggtggatgaatctccagcacatggtgagaccctgatcacgtacaaactcaccatctatagagaagaccgcccaagtctgccc

SEQ ID NO: 22375 - DNA, 634 bp, Macaca Mulatta
  misc_feature (1)...(634): n = A,T,C or G
tgatgaaaagactcttcctcctactccagttctcatgttactttcaacagatggtgtgctttgtccattttatatgattaatcaaaatcctggggttaagtctctcatcaaaacaccggagcgactttcattagaaggagagcgacagcccaagtcaccagnnnnnnnnnnnnnnnnnnnnnnnnnnnnnnnnnnnnnnnnnnnnnnnnnnnnnnnnnnnnnnnnnnnnnnnnnnnnnnnnnnnnnnnnnnnnnnnnnnnnnnnnnnnnnnnnnnnnnnnnnnnnnnnnnnnnnnnnnnnnnnnnnnnnnnnnnnnnnnnnnnnnnnnnnttgaagtcatcggctactgtcactggggagccatcttcatattccagtggttctgacagctccaaagcagccccgagccctggcccatcaaccttctcttttgttcccccttctaaagcctccctagccctcacccctgcagcgtctcccacaggtccatcagctgcctcattctcctttggatcatctggttttaagcctaccctggaaagtacaccagtgccaagtatgtctgctccaaatatagcagtgaagccctccttcccaccctcaacctctgctgtcaaagtcaacctgagtgaaa

SEQ ID NO: 22376 - DNA, 814 bp, Macaca Mulatta
  misc_feature (1)...(814): n = A,T,C or G
gggccgcttcaccacttacgaaatcagggtcaagacaaatcttcctattttcaagctgaaagaatctactgttagaagaagatacagtgactttgaatggctgcgaagtgaattagaaagagagagcaaggtcgtagttcccccactccctgggaaagcgtttttgcgtcagcttccttttagaggagatgatggaatatttgatgacaattttattgaggaaagaaaacaagggctggagcagtttataaacaaggtcgctggtcatcctctggcacagaatgaacgttgtcttcacatgtttttacaagatgaaataatagataaaagctatactccatctaaaataagacatgcctgaaatttggcaagaaggggcaaaaatgtgactattaatgattgataagcaccagtgaagaagttctaacttttagcatgctgcacaaaaaactggaataaaatggccttccgtaaaccaacctcccaagccccatttttgttttggtttggccagttgaaaaaaaatttaattttcctttaaggaaaaaaccccccatttccaccccnnnnnnnnnnnnnnnnnnnnnnnnnnnnnnnnntttnnnnnnnnnnnnnnnnnngggtaccccccacaaaaacggggttttctcccaaggaaaaacgcgggggggggcgnnnnnnnnnnnnnnnnnnnnnnnnnnnnnnnnnnnnnnnnnnnnnnnaccaaattttgggggggcgcctaatttacgctccccgcccgcgcccccnnnnnnnnnnnnnnnnnnnnnntttctttttgtcttcccccccc

SEQ ID NO: 22377 - DNA, 1847 bp, Macaca Mulatta
  misc_feature (1)...(1847): n = A,T,C or G
ccctgagaggcggccgggcagcgccgccaccatgttcctgggcaccggggaaccggcctcggagacgnnnnnnnnnnnnnnnnnnnnnnnnnnnnnnnnnnnnnnnnnnnnnnnnnnnnnnnnnnnnnnnnnnnnnnnnnnnnnnnnnnnnnnnnnnnnnnnnnnnnnnnnnnnnnnnnnnnnnnnnnnnnnnnnnnnnnnnnnnnnnnnnnnnnnnnnnnnnnnnnnnnnnnnnnnnnnnnnnnnnnnnnnnnnnnnnnnnnnnnnnnnnnnnngtcatgtccctgggactcctgtctacagagagaaggaagacatgtatgacgagattattgagttaaagaagnnnnnnnnnnnnnnnnnnnnnnnnnnnnnnnnnnnnnnnnnnnnnnnnnnnnnnnnnnnnnnnnnnnnnnnnnnnnnnnnnnnnnnnnnnnnnnnnnnnnnnnnnnnnnnnnnnnnnnnnnnnnnnnnnnnnnnnnnnnnnnnnnnnnnnnnnnnnnnnnnnnnnnnnnnnnnnnnnnnnnnnnnnnnnnnnnnnnnnnnnnnnnnnnnnnnnnnnnnnnnnnnnnnnnnnnnnnnnnnnnnnnnnnnnnnnnnnnnnnnnnnnnnnnnnnnnnnnnnnnnnnnnnnnnnnnnnnnnnnnnnnnnnnnnnnnnnnnnnnnnnnnnnnnnnnnnnnnnnnnnnnnnnnnnnnnnnnnnnngcccctgggggagaagaagacgggcaccaaaaggcagaagaagatgggcagtgccctcctgaacttgtcccggagcgtccaggagctcacggaggagaaccagagccgaaggaggnnnnnnnnnnnnnnnnnnnnnnnnnnnnnnnnnnnnnnnnnnnnnnnnnnnnnnnnnnnnnnnnnnnnnnnnnnnnnnnnnnnnnnnnnnnnnnnnnnnnnnnnnnnnnnnnnnnnnnnnnnnnnnnnnnnnnnnnnnnnnnnnnnnnnnnnnnnnnnnnnnnnnnnnnnnnnnnnnnnnnnnnnnnnnnnnnnnnnnnnnnnnnnnnnnnnnnnnnnnnnnnnnnnnnnnnnnnnnnnnnnnnnnnnnnnnnnnnnnnnnnnnnnnnnnnnnnnnnnnnnnnnnnnnnnnnnnnnnnnnnnnnnnnnnnnnnnnnnnnnnnnnnnnnnnnnnnnnnnnnnnnnnnnnnnnnnnnnnnnnnnnnnnnnnnnnnnnnnnnnnnnnnnnnnnnnnnnnnnnnnnnnnnnnnnnnnnnnnnnnnnnnnnnnnnnnnnnnnnnnnnnnnnnnnnnnnnnnnnnnnnnnnnnnnnnnnnnnnnnnnnnnnnnnnnnnnnnnnnnnnnnnnnnnnnnnnnnnnnnnnnnnnnnnnnnnnnnnnnnnnnnnnnnnnnnnnnnnnnnnnnnnnnnnnnnnnnnnnnnnnnnnnnnnnnnnnnnnnnnnnnnnnnnnnnnnnnnnnnnnnnnnnnnnnnnnnnnnnnnnnnnnnnnnnnnnnnnnnnnnnnnnnnnnnnnnnnnnnnnnnnnnnnnnnnnnnnnnnnnnnnnnnnnnnnnnnnnnnnnnnnnnnnnnnnnnnnnnnnnnnnnnnnnnnnnnnnnnnnnnnnnnnnnnnnnnnnnnnnnnnnnnnnnnnnnnnnnnnnnnnnnnnnnnnnnnnnnnnnnnnnnnnnnnnnnnnnnnnnnnnnnnnnnnnnnnnnnnnnnnnnnnnnnnnnnnnnnnnnnnnnnnnnnnnnnnnnnnnnnnnnnnnnnnnnnnnnnnnnnnnnnnnctaccggtaaaagaaccaccaccgcagcttctacgaagaggagatcggcttcagccacacacagggacgcctcctccccacccttcctcgcagctcctcctg

SEQ ID NO: 22378 - DNA, 263 bp, Macaca Mulatta
ggagcttggcggaagactagaggaatgtgtagtgagtctgagtaatgtgtacacctacgcagcagagctatgggggagaagattaacaaagtcctttcttccaatatcaggacagtcatgagtggcagtcccatgcaaaagctcattagggctaaaaggccctctgtctctgaattatgacagattcttgctccctccggggggagccaaggagcttgcaactgggagtctgcagtgaatgagcaccatgacacagtcatttc

SEQ ID NO: 22379 - DNA, 195 bp, Macaca Mulatta
cttgtgatccattctttaccttttcattttaataatggttaaaaatatttgaaacatttactagtattttttattttatacacactttcttatactgcccatcaatatgtaatacaatgagctaaacccgtttaactggcttgactcatactcttaagcactttgctaaaatactgtttgtgagtattacattaa

SEQ ID NO: 22380 - DNA, 2265 bp, Macaca Mulatta
  misc_feature (1)...(2265): n = A,T,C or G
catcgaccccaccggcacctaccacggggacagcgacctgcagctggaccgcatctccgtgtactacaatgaagccacaggtnaggtggcaaatatgttcctcgtgccatcctggtggatctagaacctgggaccatggactctgttcgctcaggtccttttggccagatctttagaccagacaactttgtatttggtnggtcagtctggggcaggtaacaactgggccaaaggccactacacagagggnnnnnnnnnnnnnnnnnnnnnnnnnnnnnnnnnnnnnnnggaggcagagagctgtgactgcctgcagggcttccagctgacccactcactgggtggaggcacaggctctggaatgggcactctccttatcagcaagatccgagaagagtaccctgatcgcatcatgaacaccttcagtgtggttccttcacccaaagtatctgacaccgtggtcgagccctacaatgccaccctctccgtccatcagttggtagagaacactgatgagacctattgcattgacaacgaggccctctatgatatctgcttccgtactctgaagctgaccacaccaacctacggggatctgaaccacctcgtctcagccaccatgagcggtgtcaccacctgcctccgcttccctggccagctcaatgctgacctccgcaaattggcagtcaacatggtccccttcccacgcctccatttctttatgcctggctttgcccctctcaccagccgtggaagccagcaatatcgagctcttacagtgccagaactcacccagcaggtcttcgatgccaagaacatgatggctgcctgtgacccccgccacggccgatacctcaccgtggctgctgtcttccgtggtcggatgtccatgaaggaggtcgatgagcagatgcttaacgtgcagaacaaaaacagcagctactttgtggaatggatccccaacaacgtcaagacagctgtctgtgacatcccacctcgtggcctcaagatggcagtcaccttcatcggcaacagcacggccatccaggagctcttcaagcgcatctcggagcagtaagggccatgtccgccggaaggccttcctccactggacaaaggcgagggcatggacgagannnnnnnnnnnnnnnnnnnnnnnnnnnnnnnnnnnnnnnnnnnnnnnnnnnnnnnnnnnnnnnnnnnnnnnnnnnnnnnnnnnnnnnnnnnnnnnnnnnnnnnnnnnnnnnnnnnnnnnnnnnnnnnnnnnnnnnnnnnnnnnnnnnnnnnnnnnnnnnnnnnnnnnnnnnnnnnnnnnnnnnnnnnnnnnnnnnnnnnnnnnnnnnnnnnnnnnnnnnnnnnnnnnnnnnnnnnnnnngggagtctagaacagtgcctggcacatagcaggcactcaataaatacttgtttgttgaaagtctcctctctctttccactctgggaaacctagatttctgtcattctgggtgaccctgtatttccttctggtgtccattccttccatctatccagttaatatttccctcttaaaaatctccaagaagctgggtctcatccagatcccattgagaaccaaccaggtgctgaanacccatgtagataacggccaccatcctaagcccaaagtagaaaatggcagaaggtaatggatagaagtcactatataannnnnnnnnnnnnnnnnnnnnnnnnnnnnnnnnnnnnnnnnnnnnnnnnnnnnnnnnnnnnnnnnnnnnnnnnnnnnnnnnnnnnnnnnnnnnnnnnnnnnnnnnnnnnnnnnnnnnnnnnnnnnnnnnnnnnnnnnnnnnnnnnnnnnnnnnnnnnnnnnnnnnnnnnnnnnnnnnnnnnnnnnnnnnnnnnnnnnnnnnnnnnnnnnnnnnnnnnnnnnnnnnnnnnnnnnnnnnnnnnnnnnnnnnnnnnnnnnnnnnnnnnnnnnnnaagagaccatctctggtccctaagcttccagaaatgtcctaatctccaccttttcttacccctgaaaaggaattaacatccctgactatgtagtggtatatactgccatatcagcctttgagtcaatccccagaggagaggggaagcctcctccatcttttctgcaacatctcatatcttctttctgctgttgcttctcctgcccctacacttggttttattctatcctacatttgagatttctatgtgttaaacttgcttttcttcatattgaaaagatgacattgccccaatagccaaaaataaatg

SEQ ID NO: 22381 - DNA, 863 bp, Macaca Mulatta
  misc_feature (1)...(863): n = A,T,C or G
cagtagcgggtggcagagctggagtaaagggagctagtggtaaagggagctggtggagaggtggcggaaggggtaaggggcgggggacagcctctagacagagggtgggctccgaggtcctggctggccgtgggtgcgcccgcgcctgtgttggtcccacaatccctggccatgagaggccagggtttattggacagagtcagttgtggggttcagagggtcagcaatcaagcagtcctccgaatccagagatttagacccagccagtcatccgtattaggactggaggggggtcaataggttcagtgtttgaaatgccaaggaaacctgtcttttgatttggggttcaatatatagaggtnnnnnnnnnnnnnnnnnnnnnnnnnnnnnnnnnnnnnnnnnnnnnnnnnnnngaactcgcttcagacctttgtcttttgaggtgcccaaaccactgtttcctgtggcaggggtccctatgatccaacatcatattgaagcctgtgcccaggtnnnnnnnnnnnnnnnnnnnnnnnnnnnnnnnnnnnnnnnnnnnnnnnnnnnnnnnnnnnnnnnnnnnnnnnnnnnnnnnnnnnnnnnnnnnnnnnnnnnnnnnnnnnnnnnnnnnnnnnnnnnnnnnnnnnnnnnnnnnnnnnnnnnnnnnnnnnnnnnnnnnnnnnnnnnnnnnnnnnnnnnnnnnnnnnnnnnnnnnnnnnnnnnnnnnnnnnnnnnnnnnnnnnnnnnnnnnnnnnnnnnnnnnnnnnnnnnnnnnnnnnnnnnnnnnnnnnnnnnnnnnnnnnnggctaacaggacgcagtccctcaactacggctgcatcgttgagaatccacagacacatgagg

SEQ ID NO: 22382 - DNA, 127 bp, Macaca Mulatta
  misc_feature (1)...(127): n = A,T,C or G
gggaggaagaaagnggaagattttgatactagcactgagagcaaagacacagagcaaaaggaattagatcaagatatggtcacagaagatgaagatgacccaggatcacataaaagaggcagaaggg

SEQ ID NO: 22383 - DNA, 701 bp, Macaca Mulatta
ctttctggatttgttctactttacagaacctggacctgtagttcctccgattcttctggatgtgaaatctagaacgatgttggtcacctggcagcatcctagaaagtccaatggggttattacccattataacatttatctacatggccgtctatacttgagaactccaggaaatgtcactaattgcacagtgacacatttacacccatatactgcctataagtttcaggtagaagcctgcacttcaaaaggatgttccctttcgccagagtcccaaactgtatggacactcccaggggcaccggaagggattccttgtccagagctgttctctgatactccaacatctgtgattatatcttggcaaccccctacccaccccaatggcttggtggagaatttcacaattgagagaagagtcaaaggaaaggaagaagttactaccctggtgactctcccaaggagtcattccatgaggtttattgacaagacttctgctcttagcccatggacaaaatacgaatatcggatactgatgagcactcttcatggaggtacgaacagcagtgcttgggtggaagttaccacaagaccctcacgacctgctggggtgcagccgcctgtggtgacagtgctgggacctgatgcagcccaggtaagatactgactgttctctctcctttgcagatttaggaatgtac

SEQ ID NO: 22384 - DNA, 666 bp, Macaca Mulatta
aatctactccggtctaatctggaaaatgaatatttgtatttggaatgcctgtcttctccataacctgaataaaaaccacatacatcattgctgactcatagcccttctaagctctttctgagccttctgttgtccactttctttttgattattgagtttttaaccatgcctgtcatttgagcaaattctttattaaatagccaataatcatggactttttttaaccttcctccttaagtgtactgcttttgtttctctttttgcataaagcattcataaatacccctttcttctgtataagcaaaattatatcacctgcaagattttatagatgccttatgccacttgccactttggtcctaggtaaacagaccactctttatcctgttctttgtgattatttttttcaacttaacttttaattcccaaaacttctgaactcttcttaagtttcaaggctactcttagaatctcatagggtggctctcatagagacagtgcttcacacatggggagtgtcagttcctacctaagttcaaccattcttctcacagacctttttgtgcattcatgaaaatttattttcgcctagtcagtcctcctaaaaaaaaaagcattctactggaataacaatacattttacaaagcattcagttgattttccca

SEQ ID NO: 22385 - DNA, 4925 bp, Macaca Mulatta
  misc_feature (1)...(4925): n = A,T,C or G
gataagccaatggacatgtcaatgttatctgaannnnnnnnnnnnnnnnnnnnnnnnnnnnnnnnnnnnnnnnnnnnnnnnnnnnnnnnnnnnnnnnnnnnnnnnnnnnnnnnnnnnnnnnnnnnnnnnnnnnnnnnnnnnnnnnnnnnnnnnnnnnnnnnnnnnnnnnnnnnnnnnnnnnnnnnnnnnnnnnnnnnnnnnnnnnnnnnnnnnnnnnnnnnnnnnnnnnnnnnnnnnnnnnnnnnnnnnnnnnnnnnnnnnnnnnnnnnnnnnnnnnnnnnnnnnnnnnnnnnnnnnnnnnnnnnnnnnnnnnnnnnnnnnnnnnnnnnnnnnnnnnnnnnnnnnnnnnnnnnnnnnnnnnnnnnnnnnnnnnnnnnnnnnnnnnnnnnnnnnnnnnnnnnnnnnnnnnnnnnnnnnnnnnnnnnnnnnnnnnnnnnnnnnnnnnnnnnnnnnnnnnnnnnnnnnnnnnnnnnnnnnnnnnnnnnnnnnnnnnnnnnnnnnnnnnnnnnnnnnnnnnnnnnnnnnnnnnnnnnnnnnnnnnnnnnnnnnnnnnnnnnnnnnnnnnnnnnnnnnnnnnnnnnnnnnnnnnnnnnnnnnnnnnnnnnnnnnnnnnnnnnnnnnnnnnnnnnnnnnnnnnnnnnnnnnnnnnnnnnnnnnnnnnnnnnnnnnnnnnnnnnnnnnnnnnnnnnnnnnnnnnnnnnnnnnnnnnnnnnnnnnnnnnnnnnnnngctactctatctgaggcactctccagtgtgttagatcaggaggaagctatggaaattaaagaacaccatccagaggaggggtcttcagggtctgaggtggaagaaatccctgagacaccttgtgaaagtcaaggagaggaacttaaagaagaaaatatggagagtgtcccattgcacctttctctgactgaaactcagtccctagggttgtgtcttccaaaggaaagcccccaaaaagaatgctcataagctatggaagttgaaaccagtgtgattagtattgattcccctcaaaagttggcgatacttgaccaagaattggaacataaggatcaggaagcttgggaagaagctacttcagaggactccagtgttgtcattgtagatgtgaaagagccatctcctagagttgatgtttcttgtgaacctttggagggagtggagaagtgctcagattcccagtcatgggaggatgttgctccagaaatagaaccatgtgctgagaatagattagataccaaggaagaaaagagtgtagaatatgaaggagttctganatcagggactgcagaagcagaacctgtagaggaagactcttcacagcctcccttacctttagttagagcagatgatcctctgagacttgaccaggagttgcggcagccccaaactcaggagannnnnnnnnnnnnnnnnnnnnnnnnnnnnnnnnnnnnnnnnnnnnnnnnnnnnnnnnnnnnnnnnnnnnnnnnnnnnnnnnnnnnnnnnnnnnnnnnnnnnnnnnnnnnnnnnnnnnnnnnnnnnnnnnnnnnnnnnnnnnnnnnnnnnnnnnnnnnnnnnnnnnnnnnnnnnnnnnnnnnnnnnnnnnnnnnnnnnnnnnnnnnnnnnnnnnnnnnnnnnnnnnnnnnnnnnnnnnnnnnnnnnnnnnnnnnnnnnnnnnnnnnnnnnnnnnnnnnnnnnnnnnnnnnnnnnnnnnnnnnnnnnnnnnnnnnnnnnnnnnnnnnnnnnnnnnnnnnnnnnnnnnnnnnnnnnnnnnnnnnnnnnnnnnnnnnnnnnnnnnnnnnnnnnnnnnnnnnnnnnnnnnnnnnnnnnnnnnnnnnnnnnnnnnnnnnnnnnnnnnnnnnnnnnnnnnnnnnnnnnnnnnnnnnnnnnnnnnnnnnnnnnnnnnnnnnnnnnnnnnnnnnnnnnnnnnnnnnnnnnnnnnnnnnnnnnnnnnnnnnnnnnnnnnnnnnnnnnnnnnnnnnnnnnnnnnnnnnnnnnnnnnnnnnnnnnnnnnnnnnnnnnnnnnnnnnnnnnnnnnnnnnnnnnnnnnnnnnnnnnnnnnnnnnnnnnnnnnnnnnnnnnnnnnnnnnnnnnnnnnnnnnnnnnnnnnnnnnnnnnnnnnnnnnnnnnnnnnnnnnnnnnnnnnnnnnnnnnnnnnnnnnnnnnnnnnnnnnnnnnnnnnnnnnnnnnnnnnnnnnnnnnnnnnnnnnnnnnnnnnnnnnnnnnnnnnnnnnnnnnnnnnnnnnnnnnnnnnnnnnnnnnnnnnnnnnnnnnnnnnnnnnnnnnnnnnnnnnnnnnnnnnnnnnnnnnnnnnnnnnnnnnnnnnnnnnnnnnnnnnnnnnnnnnnnnnnnnnnnnnnnnnnnnnnnnnnnnnnnnnnnnnnnnnnnnnnnnnnnnnnnnnnnnnnnnnnnnnnnnnnnnnnnnnnnnnnnnnnnnnnnnnnnnnnnnnnnnnnnnnnnnnnnnnnnnnnnnnnnnnnnnnnnnnnnnnnnnnnnnnnnnnnnnnnnnnnnnnnnnnnnnnnnnnnnnnnnnnnnnnnnnnnnnnnnnnnnnnnnnnnnnnnnnnnnnnnnnnnnnnnnnnnnnnnnnnnnnnnnnnnnnnnnnnnnnnnnnnnnnnnnnnnnnnnnnnnnnnnnnnnnnnnnnnnnnnnnnnnnnggagactgaagagccaattgtagagtgtcaggagtgtgaaactgaagtttccccttcacagactgggggctcctcaggtgacctgggggatatcagctccttctcctccaaggcatccagcttacaccgcacttcaagtgggacaagtctctcagctatgcacagcagtggcagctcagggaaaggagccggaccactcaaagggaaaaccagcgggacagaacccgcagattttgccttacccagctcccgaggaggcccaggaaaactgannnnnnnnnnnnnnnnnnnnnnnnnnnnnnnnnnnnnnnnnnnnnnnnnnnnnnnnnnnnnnnnnnnnnnnnnnnnnnnnnnnnnnnnnnnnnnnnnnnnnnnnnnnnnnnnnnnnnnnnnnnnnnnnnnnnnnnnnnnnnnnnnnnnnnnnnnnnnnnnnnnnnnnnnnnnnnnnnnnnnnnnnnnnnnnnnnnnnnnnnnnnnnnnnnnnnnnnnnnnnnnnnnnnnnnnnnnnnnnnnnnnnnnnnnnnnnnnnnnnnnnnnnnnnnnnnnnnnnnnnnnnnnnnnnnnnnnnnnnnnnnnnnnnnnnnnnnnnnnnnnnnnnnnnnnnnnnnnnnnnnnnnnnnnnnnnnnnnnnnnnnnnnnnnnnnnnnnnnnnnnnnnnnnnnnnnnnnnnnnnnnnnnnnnnnnnnnnnnnnnnnnnnnnnnnnnnnnnnnnnnnnnnnnnnnnnnnnnnnnnnnnnnnnnnnnnnnnnnnnnnnnnnnnnnnnnnnnnnnnnnnnnnnnnnnnnnnnnnnnnnnnnnnnnnnnnnnnnnnnnnnnnnnnnnnnnnnnnnnnnnnnnnnnnnnnnnnnnnnnnnnnnnnnnnnnnnnnnnnnnnnnnnnnnnnnnnnnnnnnnnnnnnnnnnnnnnnnnnnnnnnnnnnnnnnnnnnnnnnnnnnnnnnnnnnnnnnnnnnnnnnnnnnnnnnnnnnnnnnnnnnnnnnnnnnnnnnnnnnnnnnnnnnnnnnnnnnnnnnnnnnnnnnnnnnnnnnnnnnnnnnnnnnnnnnnnnnnnnnnnnnnnnnnnnnnnnnnnnnnnnnnnnnnnnnnnnnnnnnnnnnnnnnnnnnnnnnnnnnnnnnnnnnnnnnnnnnnnnnnnnnnnnnnnnnnnnnnnnnnnnnnnnnnnnnnnnnnnnnnnnnnnnnnnnnnnnnnnnnnnnnnnnnnnnnnnnnnnnnnnnnnnnnnnnnnnnnnnnnnnnnnnnnnnnnnnnnnnnnnnnnnnnnnnnnnnnnnnnnnnnnnnnnnnnnnnnnnnnnnnnnnnnnnnnnnnnnnnnnnnnnnnnnnnnnnnnnnnnnnnnnnnnnnnnnnnnnnnnnnnnnnnnnnnnnnnnnnnnnnnnnnnnnnnnnnnnnnnnnnnnnnnnnnnnnnnnnnnnnnnnnnnnnnnnnnnnnnnnnnnnnnnnnnnnnnnnnnnnnnnnnnnnnnnnnnnnnnnnnnnnnnnnnnnnnnnnnnnnnnnnnnnnnnnnnnnnnnnnnnnnnnnnnnnnnnnnnnnnnnnnnnnnnnnnnnnnnnnnnnnnnnnnnnnnnnnnnncagtgtaacacagcttaccagtgtcttctaattgcggatcagcattgtcgaacccggaagtacttcctgtgccttgccagtgggattccttgtgtgtctcatgtctgggtcnnnnnnnnnnnnnnnnnnnnnnnnnnnnnnnnnnnnnnnnnnnnnnnnnnnnnnnnnnnnnnnnnnnnnnnnnnnnnnnnnnnnnnnnnnnnnnnnnnnnnnnnnnnnnnnnnnnnnnnnnnnnnnnnnnnnnnnnnnnnnnnnnnnnnnnnnnnnnnnnnnnnnnnnnnnnnnnnnnnnnnnnnnnnnnnnnnnnnnnnnnnnnnnnnnnnnnnnnnnnnnnnnnnnnnnnnnnnagatattgctttaggggtatttgatgtggtggtgacagacccctcttgcccagcctcggtgctgaagtgtgctgaagcattgcagctgcctgtcgtgtcacaagagtgggtgatccagtgcctcattgttggggagagaattggattcaagcagcatccaaaatataaacacgattatgtttctcactaaagatacttggtcttactggttttattccctgctatcgtggagattgtgttttaaccaggttttaaatgtgtcttgtgtgtaactggattccttgcatggatcttgtatatagttttatttgctgaacttttatgataaaataaatgttgaatctctttggttgtagtaactgg

SEQ ID NO: 22386 - DNA, 351 bp, Macaca Mulatta
gccatcttcccatttacccagacgcctctgacagtgtgtgcctggcctggaactacagagatgccctggcagtcatttggtctcatgagtgcgtggtgtgtttctttgctggtcacacccatgatggtggctactctgaggatccttttggtgtatatcacgtcagcctagaaggagttattgaaacagctccagacagccaagcgtttggcacagttcatgtctatcctgacaaaatgacgttgaaagggagaggcagagttccagacagaattaagaattacaagaaagaaagagccgtccattgttagtctaaattgttttgtttaacttgatagaaaatgagctttg

SEQ ID NO: 22387 - DNA, 1189 bp, Macaca Mulatta
  misc_feature (1)...(1189): n = A,T,C or G
taacccacattaagacgatccatcaggaggatgaactgattgagatccagtcggacacagggacctggtaccagcgctggggtgtccgggccttgagcctaggggggcaggtnaggtttgggggaattttctctcctgttttggtcccgaatatcggcgcatcactctgatgatgatgggtgtatggttcaccatgtcattcagnttcagctactatggcctgaccgtctggtttcctgacatgatccgccacctccaggcagtggactacgcatcccgcaccaaagtgttccccggggagcgtgtagagcatgtgacttttaacttcaccttggagaatcagatccaccgaggcgggcagtacttcaatgacaagtngttcattgggctgcgcctgaagtcagtgtcctttgaggattccctgtttgaagagtgttattttgaggatgtcacatctagcaacacgtttttccgcaactgcacattcatcaacactgtgttctataacactgnnnnnnnnnnnnnnnnnnnnnnnnnnnnnnnnnnnnnnnnnnnnnnnnnnnnnnnnnnnnnnnnnnnnnnnnnnnnnnnnnnnnnnnnnnnnnnnnnnnnnnnnnnnnnnnnnnnnnnnnnnnnnnnnnnnnnnnnnnnnnnnnnnnnnnnnnnnnnnnnnnnnnnnnnnnnnnnnnnnnnnnnnnnnnnnnnnnnnnnnnnnnnngctggctccagcgtgatgtcctgtgtctcttgcttcttcctgtcttttgggaacagcgagtcagccatgatcgctctgctctgcctttttggtggggtcagcattgcatcctggaatgcgctggacgtgttgactgttgaactctacccctcagacaagagnnnnnnnnnnnnnnnnnnnnnnnnnnnnnnnnnnnnnnnnnnnnnnngctggggatcagcatcttcacatcttcgtgggaatcaccaaggctgcccccatcctctttgcttcagctgcccttgcccttggcagctctctggccctgaagctgcctgagacccgggggcaggtgctgcagtgaagggatctctagggctttgggattggcaggcacactgtgagaccaacaactccttccttcccctccctgccctgccaatcctgacttccagagccctcactccccgctccctgtgtttggtgtcttag

SEQ ID NO: 22388 - DNA, 745 bp, Macaca Mulatta
  misc_feature (1)...(745): n = A,T,C or G
tctttctatgtgaagaggaatttgagatgttcttcaaagaagaaacccctgttactcacctttattttggttgttcagtcagcaaagtggttttaggacggatagctctcaactgtcctcgactgactgagttagtggtgtgtgctaatggtcttcagcctcttgataatgaacttatttgtgttgctgaacactgtacaaacctaacagccttgggcctcagcgaatgtgaagtcagctgcagtgccttcgtcgagtttgtaagactgtgtgggagaaggctaacacagctctctataatggaggaagttttgatccctgatgaggattatagcctagatgaaattcacactgaagtctccaaatacctgggaagagtatggttccctgatgtgatgcctctctggtaattggctaccaaagattccaaaattgttgttgttttttcagatcagtatgattagctgctttctatctaagcaaatgtaaattttaaaatgtgttgctgacatattttaggtcaaatatttgattgtttgcaaagtcttaatggattgctgcagaaacatttgaaaaaaaataagaaatttgaaaatcaaggaattgctgtaaatagggcacaagccctgtatgtggattagatggttgatatgccaaanactgcagatggtttctaagtagatttctcagctttccttgaaggcatattgtagcttgctaagcaaatgtgtaatattgaacttgg

SEQ ID NO: 22389 - DNA, 1784 bp, Macaca Mulatta
  misc_feature (1)...(1784): n = A,T,C or G
aggctaagaaatggcatttcaaaaggcagtgaaagggaccattcttgttggaggaggtgctcttgcgactgttttaggactttctcagtttgctcattacagaaggaaacaannnnnnnnnnnnnnnnnnnnnnnnnnnnnnnnnnnnnnnnnnnnnnnnnnnnnnnnnnnnnnnnnnnnnnnnnnnnnnnnnnnnnnnnnnnnnnnnnnnnnnnnnnnnnnnnnnnnnnnnnnnnnnnnnnnnnnnnnnnnnnnnnnnnnnnnnnnnnnnnnnnnnnnnnnaggactaaaaacagcgcttgtagaaagagatgatttctcatcagggaccagcagcagaagcactaaattgatccatggtggtgtgagatatcttcagaaggccatcatgaagttggatattgagcannnnnnnnnnnnnnnnnnnnnnnnnnnnnnnnnnnnnnnnnnnnnnnnnnnnnnnnnnnnnnnnnnnnnnnnnnnnnnnnnnnnnnnnnnnnnnnnnnngtggtggcagttaccttactactgggtaggaatcaagctgtatgatttggttgcaggaagcaattgcctgaaaagcagttatgtcctcagcaaatcaagagcccttgaacatttcccaatgctccagaaggacaaactggtaggagcaattgtctactatgacgnnnnnnnnnnnnnnnnnnnnnnnnnnnnnnnnnnnnnnnnnnnnnnnnnnnnnnnnnnnnnnnnnnnnnnnnnnnnnnnnnnnnnnnnnnnnnnnnnnnnnnnnnnnnnnnnnnnnnnnnnnnnnnnnnnnnnnnnnnnnnnnnnnnnnnnnnnnnnnnnnnnnnnnnnnnnnnnnnnnnnnnnnnnnnnnnnnnnnnnnnnnnnnnnnnnnnnnnnnnnnnnnnnnnnnnnnnnnnnnnnnnnnnnnnnnnnnnnnnnnnnnnnnnnnnnnnnnnnnnnnnnnnnnnnnnnnnnnnnnnnnnnnnnnnnnnnnnnnnnnnnnnnnnnnnnnnnnnnnnnnnnnnnnnnnnnnnnnnnnnnnnnnnnnnnnnnnnnnnnnnnnnnnnnnnnnnnnnnnnnnnnnnnnnnnnnnnnnnnnnnnnnnnnnnnnnnnnnnnnnnnnnnnnnnnnnnnnnnnnnnnnnnnnnnnnnnnnnnnnnnnnnnnnnnnnnnnnnnnnnnnnnnnnnnnnnnnnnnnnnnnnnnnnnnnnnnnnnnnnnnnnnnnnnnnnnnnnnnnnnnnnnnnnnnnnnnnnnnnnnnnnnnnnnnnnnnnnnnnnnnnnnnnnnnnnnnnnnnnnnnnnnnnnnnnnnnnnnggtggaaagtggacaacttatcggtctatggcagaagataccataaatgctgctatcaaaactcataatttaaaagcaggaccaagtagaacagttgggcttttccttcaagggggtaaagattggagccccacactctacattaggcttgtccaggattatggacttgaaagtgaggtgnnnnnggtggcacagcatcttgccgccacctatggtgataaggcctttgaggtggccaaaatggcaagtgtgactggcaaaaggtggcctattgttggagtacgtcttgtgtcagaatttccatatattgaagcagaggtnnnnnnnnnnnnnnnnnnnnnnnnnnnnnnnnnnnnnnnnnnnnnnnnnnnnnnnnnnnnnnnnncctttctaaatgtccaggcagcagaggaagccctacccaggattgttgaactgatgggcagggaactgaattgggatgatcataagaagcag

SEQ ID NO: 22390 - DNA, 1557 bp, Macaca Mulatta
  misc_feature (1)...(1557): n = A,T,C or G
gttgctgccaagctgcaggagacagagcgggcgctacgggagcaggaggtggtgctgaaggccgtgaccctggaacgagaccaggccgtgcaggccctgaggatgcatgggctccccggaccaggggcnnnnnnnnnnnnnnnnnnnnnnnnnnnnnnnnnnnnnnnnnnnnnnnnnnnnnnnnnnnnnnnnnnnnnnnnnnnnnnnnnnnnnnnnnnnnnnnnnnnnnnnnnnnnnnnnnnnnnnnnnnnnnnnnnnnnnnnnnnnnnnnnnnnnnnnnnnnnnnnnnnnnnnnnnnnnnnnnnnnnnnnnnnnnnnnnnnnnnnnnnnnnnnnnnnnnnnnnnnnnnnnnnnnnnnnnnnnnnnnnnnnnnnnnnnnnnnnnnnnnnnnnnnnnnnnnnnnnnnnnnnnnnnnnnnnnnnnnnnnnnnnnnnnnnnnnnnnnnnnnnnnnnnnnnnnnnnnnnnnnnnnnnnnnnnnnnnnnnnnnnnnnnnnnnnnnnnnnnnnnnnnnnnnnnnnnnnnnnnnnnnnnnnnnnnnnnnnnnnnnnnnnnnnnnnnnnnnnnnnnnnnnnnnnnnnnnnnnnnnnnnnnnnnnnnnnnnnnnnnnnnnnnnnnnnnnnnnnnnnnnnnnnnnnnnnnnnnnnnnnnnnnnnnnnnnnnnnnnnnnnnnnnnnnnnnnnnnnnnnnnnnnnnnnnnnnnnnnnnnnnnnnnnnnnnnnnnnnnnnnnnnnnnnnnnnnnnnnnnnnnnnnnnnnnnnnnnnnnnnnnnnnnnnnnnnnnnnnnnnnnnnnnnnnnnnnnnnnnnnnnnnnnnnnnnnnnnnnnnnnnnnnnnnnnnnnnnnnnnnnnnnnnnnnnnnnnnnnnnnnnnnnnnnnnnnnnnnnnnnnnnnnnnnnnnnnnnnnnnnnnnnnnnnnnnnnnnnnnnnnnnnnnnnnnnnnnnnnnnnnnnnnnnnnnnnnnnnnnnnnnnnnnnnnnnnnnnnnnnnnnnnnnnnnnnnnnnnnnnnnnnnnnnnnnnnnnnnnnnnnnnnnnnnnnttcctcccccttcttcctcctgcttgcctcctcttttcctggtccttcaccttgacgccctgttggtgggggcaggcccgggcccatcccagtcctcccttcagctaacagcatcttgtgttggaaactcacacactgaaggtggctcatgtttactttaatgcagggccttgatggcctgctgagggggcgtctgcgtgcacagtcctgcctgccccacgcctagcggtgggccctccctgcgtggggagggggccacatggccctcactgctgcgttcagagccacgcagctgctccatgccacggctctcctatcctggtcctggtcagggccttggccccgagggagtgacccccaactccatggctgggtttgagccacagctctgagctgtggagatgaccccaggtcctgattctgcagcttggcagagccgaccagcagggctcccttcttcctacctaaggccagagggaaaggctgtgaaggacagactgccagcctccctgacttcgta

SEQ ID NO: 22391 - DNA, 1193 bp, Macaca Mulatta
  misc_feature (1)...(1193): n = A,T,C or G
aaagaaagggtttttaaaaaagggggcttttcgggaaatgcccaccccaaaatttaaatttaaaggaaagagggtaaaaattcccatacttcttaaacccactgcaggttctatagtaatcccatttttataaaatccattctatctatcggtatatacatacagagatgccttaacatgtattaacggtcattcgattttaatagttttttgacgagtggtaggattttaagtgatctttcagcttactgctaaaatttcagtttttttttcctataactagcatgtattctttaaataatcatttaaaaaggcatgtcaagcacttctatccaatctgggaatagaggaggtaaatgaaacactagtaaaggatttaagaatttcaaaaattcagtacaagtaactgaatctcaatattataaagtaatgtttactacagattaatcagcatatcttttgctatgattatgatacagaaaactttctagctatttccacttataaaactcaaattagtagnnnnnnnnnnnnnnnnnnnnnnnnttgttttgttttagaggcattttatttagacaactaaaaacaattagatgttcagaagcagtgtacaatgaaagagaaatcaaaccagttactttatcatgtactccctcttccttacaactgannnnnnnnnnnnnnnnnncattctgctttaaggaaaaagatcagaaaaataagccaatatatttttcttctccataataacataaacggctacaagaaccctaattgtaataatagaaattggatgttggcttgtatatattcattaaaaagataacaggccactgtactataagaggataactccacctccctttatctgacactcctgagttttcacttacaggtaacaccaagttagtaagttgttccagcactggagataattcattttcctcattatttactgctgtttctgccttaagcagagagtaactctggaaggctgatgcttttctctgcttgctcgttttagtcagttgtatactaactgtggcatatgattgacgctcaggccttaacatcaggagctgaaggatagatgcaatctgaattctctgaagcaatttcttctatctcctcttctgtagtctctggaaaaccaatctttggctttgccagctcaccactatcttcttcaggaa

SEQ ID NO: 22392 - DNA, 2735 bp, Macaca Mulatta
  misc_feature (1)...(2735): n = A,T,C or G
atgagtgtgcgagatagctatacagactttcacattgactttggtggcacctctgtctggtaccatgtactcaagnngggtgaaaagatcttctacctgattcgcccaacaaatgccaatctgactctctttgagtgctggagcagttcctctaatcagaatgagatgttctttggggaccaggtggacaagtgctacaagtgttccgtgaagcaaggacagacacttttcattcccacaggnnncaggatggatccatgctgtgctgacgcctgtggactgccttgcctttggagggaacttcttacacagccttaacatcgagatgcagctcagcctatgagattgagaagcggctgagcacagcagacctcttcaaattccccaactttgagaccatctgttggtatgtgggaaagcacatcctggacatctttcgngtttgcgagagaacaggagacaccctgcttcctacctggtccatggtggcaaagccttgaacttggcctttagagcctggacaaggaaagaagnnnnnnnnnnnnnnnnnnnnnnnnnnnnnnnnnnnnnnnnnnnnnnnnnnnnnnnnnnnnnnnnnnnnnnnnnnnnnnnnnnnnnnnnnnnnnnnnnnnnnnnnnnnnnnnnnnnnnnnnnnnnnnnnnnnnnnnnnnnnnnnnnnnnnnnnnnnnnnnnnnnnnnnnnnnnnnnnnnnnnnnnnnnnnnnnnnnnnnnnnnnnnnnnnnnnnnnnnnnnnnnnnnnnnnnnnnnnnnnnnnnnnnnnnnnnnnnnnnnnnnnnnnnnnnnnnnnnnnnnnnnnnnnnnnnnnnnnnnnnnnnnnnnnnnnnnnnnnnnnnnnnnnnnnnnnnnnnnnnnnnnnnnnnnnnnnnnnnnnnnnnnnnnnnnnnnnnnnnnnnnnnnnnnnnagttcaacatcactggtgcctgcttgaatgactcagatgatgactcaccagacttggannnnnnnnnnnnnnnnnnnnnnnnnnnnnnnnnnnnnnnnnnnncagtacaaaaagggtgaagtgcttatccaaatctcggcgaaccaagatagcaaagaaggtagacaaggctagactggtggcagaacaggtgatagaagatgaatttgacttggattcagatgatgagctgcagattgacgagagattgggaaaggagaaggcgaccctgataataagaccannnnnnnnnnnnnnnnnnnnnnnnnnnnnnnnnnnnnnnnnnnnnnnnnnnnnnnnnnnnnnnnnnnnnnnnnnnnnnnnnnnnnnnnnnnnnnnnnnnnnnnnnnnnnnnnnnnnnnnnnnnnnnnnnnnnnnnnnnnnnnnnnnnnnnnnnnnnnnnnnnnnnnnnnnnnnnnnnnnnnnnnnnnnnnnnnnnnnnnnnnnnnnnnnnnnnnnnnnnnnnnnnnnnnnnnnnnnnnnnnnnnnnnnnnnnnnnnnnnnnnnnnnnnnnnnnnnnnnnnnnnnnnnnnnnnnnnnnnnnnnnnnnnnnnnnnnnnnnnnnnnnnnnnnnnnnnnnnnnnnnnnnnnnnnnnnnnnnnnnnnnnnnnnnnnnnnnnnnnnnnnnnnnnnnnnnnnnnnnnnnnnnnnnnnnnnnnnnnnnnnnnnnnnnnnnnnnnnnnnnnnnnnnnnnnnnnnnnnnnnnnnnnnnnnnnnnnnnnnnnnnnnnnnnnnnnnnnnnnnnnnnnnnnnnnnnnnnnnnnnnnnnnnnnnnnnnnnnnnnnnnnnnnnnnnnnnnnnnnnnnnnnnnnnnnnnnnnnnnnnnnnnnnnnnnnnnnnnnnnnnnnnnnnnnnnnnnnnnnnnnnnnnnnnnnnnnnnnnnnnnnnnnnnnnnnnnnnnnnnnnnnnnnnnnnnnnnnnnnnnnnnnnnnnnnnnnnnnnnnnnnnnnnnnnnnnnnnnnnnnnnnnnnnnnnnnnnnnnnnnnnnnnnnnnnnnnnnnnnnnnnnnnnnnnnnnnnnnnnnnnnnnnnnnnnnnnnnnnnnnnnnnnnnnnnnnnnnnnnnnnnnnnnnnnnnnnnnnnnnnnnnnnnnnnnnnnnnnnnnnnnnnnnnnnnnnnnnnnnnnnnnnnnnnnnnnnnnnnnnnnnnnnnnnnnnnnnnnnnnnnnnnnnnnnnnnnnnnnnnnnnnnnnnnnnnnnnnnnnnnnnnnnnnnnnnnnnnnnnnnnnnnnnnnnnnnnnnnnnnnnnnnnnnnnnnnnnnnnnnnnnnnnnnnnnnnnnnnnnnnnnnnnnnnnnnnnnnnnnnnnnnnnnnnnnnnnnnnnnnnnnnnnnnnnnnnnnnnnnnnnnnnnnnnnnnnnnnnnnnnnnnnnnnnnnnnnnnnnnnnnnnnnnnnnnnnnnnnnnnnnnnnnnnnnnnnnnnnnnnnnnnnnnnnnnnnnnnnnnnnnnnnnnnnnnnnnnnnnnnnnnnnnnnnnnnnnnnnnnnnnnnnnnnnnnnnnnnnnnnnnnnnnnnnnnnnnnnnnnnnnnnnnnnnnnnnnnnnnnnnnnnnnnnnnnnnnnnnnnnnnnnnnnnnnnnnnnnnnnnnnnnnnnnnnnnnnnnnnnnnnnnnnnnnnnnnnnnnnnnagatgccttacctaacagcccttcgtactacctaccaccactttatttcagaggcctttttctatatgcttctacagcattctctcgtggtacttacaatcataaatgaatgttttgttgtttcttactaaaccatgaatacttcaaga

SEQ ID NO: 22393 - DNA, 1120 bp, Macaca Mulatta
  misc_feature (1)...(1120): n = A,T,C or G
cagacggttgatgatgaagggccggccgtgtaaatgaagatcgggtgaggagcaggacgatgcccaagggcgggtgccctannnnnnnnnnnnnnnnnnnnnnnnnnnnnnnnnnnnnnnnnnnnnnnnnnnnnnnnnnnnnnnnnnnnnnnnnnnnnnnnnnnnnnnnnnnnnnnnnnnnnnnnnnnnnnnnnnnnnnnnnnnnnnnnnnnnnnnnnnnnnnnnnnnnnnnnnnnnnnnnnnnnnnnnnnnnnnnnnnnnnnnnnnnnnnnnnnnnnnnacagagaagcagggccctgagcggaagaggattaagaaggagcctgtcacccggaaggccgggctgctctttggcatggggctgtctggaatccgagctggctaccccctctccgagcgccagcaggtggcccttctcatgcagatgacagccgaggagtctgccaacagcccagnnnnnnnnnnnnnnnnnnnnnnnnnnnnnnnnnnnnnnnnnnnnnnnnnnnnnnnnnnnnnnnnnnnnnnnnnnnnnnnnnnnnnnnnnnnnnnnnnnnnnnnnnnnnnnnnnnnnnnnnnnnnnnnnnnnnnnnnnnnnnnnnnnnnnnnnnnnnnnnnnnnnnnnnnnnnnnnnnnnnnnnnnnnnnnnnnnnnnnnnncaggctggacggcgctgcacgaggcctgtaaccggggctactatgacgttgcgaagcagctgctggccgcaggtgcggaggtgaacaccaagggcctggatgacgacacgcctttgcacgacgctgccaacaacgggcactacaaggnnnnnnnnnnnnnnnnnnnnnnnnnnnnnnnnnnnnnnnnnnnnnnnnnnnnnnnnnnnnnnnnnnnnnnnnnnnnnnnnnnnnnnnnnnnnnnnnnnnnnnnnnnnnnnnnnnnnnnnnnnnnnnnnnnnnnnnnnnnnnnnnnnnngctcagaagaggaagacgccccgtcctttgcaccttccagttccgtcgatggcaacaacacggactccgagttcgaaaaaggcctcaagcacaaggccaagaacccagagccgcagaaggccacagcccccgtcaaggatgagtatgagtttgacgaggacgatgagca

SEQ ID NO: 22394 - DNA, 1091 bp, Macaca Mulatta
  misc_feature (1)...(1091): n = A,T,C or G
gtggccatcaccatctactgccaggcgtcggaggagttcttgaacggcagggcagnnnnnnnnnnnnnnnnnnnnnnnnnnnnnnnnnnnnnnnnnnnnnnnnnnnnnnnnnnnnnnnnnnnnnnnnnnnnnnnnnnnnnnnnnnnnnnnnnnnnnnnnnnnnnnnnnnnngctgaactttgacctggaccgaggcgtgtttccagtggtcatccaggctgtggtagacgaaggagatgnnnnnnnnnnnnnnnnnnnnnnnnnnnnnnnnnnnnnnnnnnnnnnnnnnnnnnnnnnnnnnnnnnnnnnnnnnnnnnnnnnnnnnnnnnnnnnnnnnnnnnnnnnnnnnnnnnnnnnnnnnnnnnnnnnnnnnnnnnnnnnnnnnnnnnnnnnnnnnnnnnnnnnnnnnnnnnnnnnnnnnnnnnnnnnnnnnnnnnnnnnnnnnnnnnnnnnnnnnnnnnnnnnnnnnnnnnnnnnnnnnnnnnnnnnnnnnnnnnnnnnnnnnnnnnnnnnnnnnnnnnnnnnnnnnnnnnnnnnnnnnnnnnnnnnnnnnnnnnnnnnnnnnnctttccgggccctcctgcagatccgggcggtgcggaagaagccaggagccctgtcccccgtgtccttcagccctgtcctggcccagagcctggagcacgatgagcactcnnnnnnnnnnnnnnnnnnnnnnnnnnnnnnnnnnnnnnnnnnnnnnnnnnnnnnnnnnnnnnnnnnnnnnnnnnnnnnnnnnnnnnnnnnnnnnnnnnnnnnnnnnnnnnnnnnnnnnnnnnnnnnnnnnnnnnnnnnnnnnnnnnnnnnnnnnnnnnnnnnnnnnnnnnnnnnnnnnnnnnnnnnnnnnnnnnnnnnnnnnnnnnnnnnnnnnnnnnnnnnnnnnnnnnnnnnnnnnnnnnnnnnnnnnnnnnnnnnnnnnnnnnnnnnnnnnnnnnnnnnnnnnnnnnagcaccttgcggtccccgtcttcccccatccatgaagaggatgaggagaagctctccgaggacgtggacgcccctcccccactgggtggtgcagagctggccctgcgggaaagcagctcccctgag

SEQ ID NO: 22395 - DNA, 1575 bp, Macaca Mulatta
  misc_feature (1)...(1575): n = A,T,C or G
gaggctggatttcatactcatagctctccctagaagttcagggagttctgttatgatctctgttgtaattaacaatttggttcaagtttgttctttaaatggatgtgctaagaattcatgtatgttctggatgtactggaattaaaaggatttaagaaatcatggtgtgcatgnnnnnnnnnnnnnnnnnnnnnnnnnnnnnnnnnnnnnnnnnnnnnnnnnnnnnnnnnnnnnnnnnnnnnnnnnnnnnnnnnnnnnnnnnnnnnnnnnnnnnnnnnnnnnnnnnnnnnnnnnnnnnnnnnnnnnnnnnnnnnnnnnnnnnnnnnnnnnnnnnnnnnnnnnnnnnnnnnnnnnnnnnnnnnnnnnnnnnnnnnnnnnnnnnnnnnnnnnnnnnnnnnnnnnnnnnnnnnnnnnnnnnnnnnnnnnnnnnnnnnnnnnnnnnnnnnnnnnnnnnnnnnnnnnnnnnnnnnnnnnnnnnnnnnnnnnnnnnnnnnnnnnnnnnnnnnnnnnnnnnnnnnnnnnnnnnnnnnnnnnnnnnnnnnnnnnnnnnnnnnnnnnnnnnnnnnnnnnnnnnnnnnnnnnnnnnnnnnnnnnnnnnnnnnnnnnnnnnnnnnnnnnnnnnnnnnnnnnnnnnnnnnnnnnnnnnnnnnnnnnnnnnnnnnnnnnnnggaaggccatggtaaaatttcagtatttgctgtcaaaatagctttagctacattgtgtggagggaagatcatggacaaattaagannnnnnnnnnnnnnnnnnnnnnnnnnnnnnnnnnnnnnnnnnnnnnnnnnnnnnnnnnnnnnnnnnnnnnnnnnnnnnnnnnnnnnnnnnnnnnnnnnnnnnnnnnnnnnnnnnnnnnnnnnnnnnnnnnnnnnnnnnnnnnnnnnnnnnnnnnnnnnnnnnnnnnnnnnnnnnnnnnnnnnnnnnnnnnnnnnnnnnnnnnnnnnnnnnnnnnnnnnnnnnnnnnnnnnnnnnnnnnnnnnnnnnnnnnnnnnnnnnnnnnnnnnnnnnnnnnnnnnnnnnnnnnnnnnnnnnnnnnnnnnnnnnnnnnnnnnnnnnnnnnnnnnnnnnnnnnnnnnnnnnnnnnnnnnnnnnnnnnnnnnnnnnnnnnnnnnnnnnnnnnnnnnnnnnnnnnnnnnnnnnnnnnnnnnnnnnnnnnnnnnnnnnnnnnnnnnnnnnnnnnnnnnnnnnnnnnnnnnnnnnnnnnnnnnnnnnnnnnnnnnnnnnnnnnnnnnnnnnnnnnnnnnnnnnnnnnnnnnnnnnnnnnnnnnnnnnnnnnnnnnnnnnnnnnnnnnnnnnnnnnnnnnnnnnnnnnnnnnnnnnnnnnnnnnnnnnnnnnnnnnnnnnnnnnnnnnnnnnnnnnnnnnnnnnnnnnnnnnnnnnnnnnnnnnnnnnnnnnnnnnnnnnnnnnnnnnnnnnnnnnnnnnnnnnnnnnnnnnnnnnnnnnnnnnnnnnnnnnnnnnnnncagccaactcagcagagaagtgctcctgacatctctttcaccatcgatgcgaataagcagcaaaggcagctgattgctgagctagaaaacaagaaca

SEQ ID NO: 22396 - DNA, 817 bp, Macaca Mulatta
tcttctgggggtctttatacctttctttcctctatgtggtggctacagagagtccagccagacttatgataagatttcccattaagttagtataggaccaatgctctttctcagacattggcaggagctagccatcaccccctataagatggtaggccctgagggctctgcatgtcctcatttttaaaccttggaaaaacagctaccttcctttgcaaagagaaattggcattagccacttctaagagactacagatgagcatgtttagaatcggcctagttcttaggaagatgacttctacatggtatctggattcatttgttaaaagttcaaaattgtcccaaccttccaagttgttggacgtaatgttttcacggcagcatttgtagaggaagagccaggcgggggtcaattttacacatccctgggaattccaggcaaagctctcatttcctataccgtttccagttgtgagcatttgtacctcatggtttatggtaatcagagttcctctggtagaagaacccaggaatactgaacttaacgaatgcttactttctttttctttccctccagtcattgtagtactgttcgtgaccctgagaaggcaaaagaaagaaccactcattgtctttgaggaagaagatgtccgtgagaacatcattacttatgatgatgaagggggtggggaagaagacacagaagcctttgatattgccaccctccagaatcccgatggtatcaatggatttatcccccgcaaagacatcaaacctgagtatcagtacatgcctagacctgggctccggccagcgc

SEQ ID NO: 22397 - DNA, 744 bp, Macaca Mulatta
gggatattctttcttctgccttggagttcggccctccccagacttcacttacgctagtctaagacccagattctgtcaacatttgggcaagatgagagggctgaccatgggctccaaattcctcttgtgatctcctcacctctccccctccattgataccaaccctttcccttcattcccccaacatcctgttgctctaactggagcacattcacttatgaagaccgagaaaccacagggccattgtcaccccttctctttcccttatttaggagccctgaacgcccccaaagtcgtatccattcatgcctcttgtatgttgatgccatttcttggaagaagatgagggcaatgagttagggctcctttccccttccctcccaccagattgctctccgtccttgcatttcttccttcaggcgctactctgtcagccctcccctttttatgccccaccgatacactgggaccaccccttacctggggacgggatgaatggttcaaaggagtgaggttgctaaagaacattcttttcccttctcgttctctcccttttcctctccctgattccttgtagagctgctgcagttctgaagaggggcagttctacctcttctgtcccttggcagaaagaagtttccacacctctttaggatggggatttaaacctccttttggcccccttcctggtcccctttgaggggctatttagaaagggagaaaatcagttggtgggtttccatt

SEQ ID NO: 22398 - DNA, 778 bp, Macaca Mulatta
ggggaatgaggccacggtggagacgctaacagagaccaagatccattgtgagactgatgagaaagacttctacttgtactactttctgatgcagtatccaggccgcagcttagtgtttgccaacagcatctcctgcatcaaacgcctctctgggctccttaaagtccttgatatcatgcccttgaccctacatgcctgtatgcaccagaagcagaggctcagaaacctggagcagtttgcccgtctggaagactgtgttctcttggcaacagatgtggcagctcggggtctggatattcctaaagtccagcatgtcatccattaccaggtcccacgtacctcggagatttatgtccaccgaagtggtcgaactgctcgagctgccaatgaaggtctcagcctgatgctcattgggcctgaggatgtgatcaactttaagaagatttacaaaaccctcaagaaagatgaggacatcccgctattccctgtgcagacaaaatacatggacgtggtcaaggagcgaatccgtttagctcgacagattgagaaatctgagtatcggaacttccaggcttgcctgcacaactcttggattgagccagcagcagctgccctggagatttgactgggaaaaagacttggtttaaagggagaaaagcttgaccaccaaaaaaagcgtcggagaccaaagccgatggaaggttctgaaaaaaggacctgcgccacctgtctctccccgcccgctgtttacggaaaagcccgaaaaacccagttatcc

SEQ ID NO: 22399 - DNA, 714 bp, Macaca Mulatta
ttccgggttgtccatccccaacacgccctgaacaagatctccaatcgaacagcagccatcatctcttgccttctgtggggtgtcactattggcctgacagtccacctcctgaagaggaagatgccgatccagaatggcactgcaaatctgtgcagcagcttcagcatctgcgataccttccggtggcacgaagccatgttcctcctggagttcttcctgcccctgggcatcatcctgttctgctcagccagaattatctggagcctgcggcagagacaaatggaccggcatgccaagatcaaaagagccatcaccttcatcatggtcgtggccatcgtctttgtcatctgcttccttcccagcgtggctgtgcggatacgcatcttctggctcctgcacacttttggcacgcagaactgtgaagtgtaccgctcggtggacctggcgttctttatcactctcagtttcacctacatgaacagcatgctggaccccgtggtgtactacttctccagcccatcctttcccaacttcttctccactttgatcaaccgctgcctccgaaggaagatgacaggtgagccagataataaccgcagcacgagtgtcgagctcacgggggacccgaacacaaccagaggcgctccagaggcgttaatggccaaccccggtgagccatggagcccctcttatctgggtccaacctctcgttaa

SEQ ID NO: 22400 - DNA, 5002 bp, Macaca Mulatta
  misc_feature (1)...(5002): n = A,T,C or G
gacttctactccccccatcagttcttcaatcactcccaccaatacagtgacttctatgacaactacgacttcttggcccacagccactaatacgttatcatcactcaccagtagcattttatcttcnnnnnnnnnnnnnnnnnnnnnnnnnnnnnnnnnnnnnnnnnnnnnnnnnnnnnnnnnnnnnnnnnnnnnnnnnnnnnnnnnnnnnnnnnnnnnnnnnnnnnnnnnnnnnnnnnnnnnnnnnnnnnnnnnnnnnnnnnnnnnnnctcccacagtacccccagcttcccttaatcagccatttactccacagtcannnnnnnnnnacaatactctcagcttcactacttcaatcaccaccaccgagaccaccccacacagtactcccagcttcacttcttcaatcaccaccacagagaccacatcccatagtactcccagtttcacttcttcaatcaccaccactgagaccccctcacatagtactcccagcttcacttctttgatcactaccactgagaccacttcacccagtactcccagcttcacttcttcaatcaccaccatcgagaccagttcccacagtacacccagctacacttcttcgatcagaaccaccgagaccacctcacacagtactcccagattcacttcctctatcacgaccaccgagacccactcacagagtacttccagcttcacttcttccataaccacctctgagacccactcacacggtactcccaacttcacttcttcgaccaccaccaccgagaccacatcccacaatactcccagcttcacttcctcaatcaccaccaaccgagacaccccacacagtattcccagcttcacttcttcaacnnnnnnnnnnnnnnnnnnnnnnnnnnnnnnnnnnnnnnnnnnnnnnnnnnncatttactccacagtcagcacatccacaaccgctatctcctcannnnnnnnnnnnnnnnnnnnnnnnnnnnnnnnnnnnnnnnnnnnnnnnnnnnnnnnnnnnnnnnnnnnnnnnnnnnnnnnnnnnnnnnnnnnnnnnnnnnnnnnnnnnnnnnnnnnnnnnnnnnnnnnnnnnnnnnnnnnnnnnnnnnnnnnnnnnnnnnnnnnnnnnnnnnnnnnnnnnnnnnnnnnnncacttcttcaatcaccaccagtgagacgaccttacatggtactcccagcttcacttcttcaatcaccaccaccgagaccacctcacaaagtactctcagcttcacttctttaatcaccacgactctgacaacctctcacagtactcccagcttcagttcttcaatcaccaccaccgagaccacctcacctggtactcccaccttcacttcttccatcaccaccactgacaccagctcacatattactccaagcttcacttcttcaaccagctactccacagtcagcacatccacaactgccatcacctcacattttactacctcagagactggggtgacttccacacctgtaaccccagcttctctgagtacagacatcctgaccacaaccgtacgaactctcaccccctcatctgtgggaaccagcacttcattgactacaaccacagatcttccctctatacccactgatatcagtaggttaccaaccccaacacacatcatttcatcttctccctccatccaaagcacagaaacatcatcccttgtgggcacaacctctcccaccatgtccactgtgagaacgacccttagaagtactgagaacaccccaatcacttcctttagcacaagtattgttgttacacctgaaacccaacacagaccgctcctgtactgacnnnnnnnnnnnnnnnnnnnnnnnnnnnnnnnnnnnnnnnnnnnnnnnnnnnnnnnnnnnnnnnnnnnnnnnnnnnnnnnnnnnnnnnnnnnnnnnnnnnnnnnnnnnnnnnnnnnnnnnnnnnnnnnnnnnnnnnnnnnnnnnnnnnnnnnnnnnnnnnnnnnnnnnnnnnnnnnnnnnnnnnnnnnnnnnnnnnnnnntcacatctacaagtgagtcccttcagaatctttcactaggggaagtacatctacaaatgccatcttgacttcttttagtaccatcatctggtcctcaacacccactatcatcatgtcctcttctctgtcttctaccagcataactccactgttctataccaccactcattctgttccttcttcagcatacactttcagtacagaaaatatgggctcctcttctatcacagcctttcctactctctcttcctctgcaaccaccagcacttctccaaccagctcctctctgaccacagctctcactgaaataacccccttttcttatatttcccttccctccaccacaccctgtccagaaactataacaattaccatagtccctgcctctcccactgatccgtgtgttgaaatggattccagcactgaagctacttctcctccccccaccccattaacagtgcttccctttactactgaaatggtcacctgtcctagctccatcagtatgcaaactacccttgctacatatatggacacttcttccatgacgccagaaagtgagtccagcatcacaacgaatgcttccagttccactggcactgggactgtacccacaaacacggttttcacaagtactgaaatgcccaccagtgagacctggctgagcaccagctttgtgacccccccacatcttcctggcgtctctaccatcccactcaccacgaaaccaagcagtagccttccgaccatcctgannnnnnnnnnnnnnnnnnnnnnnnnnnnnnnnnnnnnnnnnnnnnnnnnnnnnnnnnnnnnnnnnnnnnnnnnnnnnnnnnnnnnnnnnnnnnnnnnnnnnnnnnnnnnnnnnnnnnnnnnnnnnnnnnnnnnnnnnnnnnnnnnnnnnnnnncaggcacctgtgacaatggcggcacctgggaacagggccagtgtgcttggcgtccggggttctctggggaccgctgtcagttccagaccagctgcctcaacgggggtcagtgggataacatcaagtgccagtgccccagcaccttctatggttcccgttgtgagtttgctgtggaacaggtggatnnagatgtagtggagactgaggtgggcatggaagtatctgtcgatcaggagttctcgccggacctcaatgacaacacttctcaggcctacagggatttcaacaagaccttctggaatcannncagatgcagaagatttttgcaggcatgcggggcttcaacttcaagggtgtggagatcctgtccctgaggnnnnnnnnnnnnnnnnnnnnnnnnnnnnnnnnnnnnnnnnnnnnnnnnnnnnnnnnnnnnnnnnnnnnnnnnnnnnnnnnnnnnnnnnnnnnnnnnnnnnnnnnnnnnnnnnnnnnnnnnnnnnnnnnnnnnnnnnnnnnnnnnnnnnnnnnnnnnnnnnnnnnnnnnnnnnnnnnnnnnnnnnnnnnnnnnnnnnnnnnnnnnnnnnnnnnnnnnnnnnnnnnnnnnnnnnnnnnnnnnnnnnnnnnnnnnnnnnnnnnnnnnnnnnnnnnnnnnnnnnnnnnnnnnnnnnnnnnnnnnnnnnnnnnnnnnnnnnnnnnnnnnnnnnnnnnnnnnnnnnnnnnnnnnnnnnnnnnnnnnnnnnnnnnnnnnnnnnnnnnnnnnnnnnnnnnnnnnnnnnnnnnnnnnnnnnnnnnnnnnnnnnnnnnnnnnnnnnnnnnnnnnnnnnnnnnnnnnnnnnnnnnnnnnnnnnnnnnnnnnnnnnnnnnnnnnnnnnnnnnnnnnnnnnnnnnnnnnnnnnnnnnnnnnnnnnnnnnnnnnnnnnnnnnnnnnnnnnnnnnnnnnnnnnnnnnnnnnnnnnnnnnnnnnnnnnnnnnnnnnnnnnnnnnnnnnnnnnnnnnnnnnnnnnnnnnnnnnnnnnnnnnnnnnnnnnnnnnnnnnnnnnnnnnnnnnnnnnnnnnnnnnnnnnnnnnnnaggtgcacatcaagagacccgagatgacctcatcctcagtgtgagccctgcgggccccgtcaccatcccctctgccctgcctgggacacaaggctctgcactgcgtccatttcaagtggtggccccagaacgggagcagcccaggcacctgctgttcttgggcaaaatgagactgttcccccaaatcccatccttgtctttccaacttggctgaaacccaccaggagacacagttcaggtgcaggctcttccactgcggaaccttgggcaagtcagtaaggagcctcagtttcctcacctgcaaaatgggtacaacattcctgtgtgatatctcacaccattgttgtgtaaaccacatggacttggtcannnnnnnnnnnnnnnnnnnnnnnnnnnnnnnnnnnnnnnnnnnnnnnnnnnnnnnnnnnnnnnnnnnnnnnnnnnnnnnnnnnnnnnnnnnnnnnnnnnnnnnnnnnnnnnnnnnnnnnnnnnnnnnnnnnnnnnnnnnnnnnnnnnnnnnnnnnnnnnnnnnnnnnnnnnnnnnnnnnnnnnnnnnngatctaactccctgctgttactttactcgcattccttagatgtcctctccttctgacaccgttccttcannnnnnnnnnnnnnnnnnnnnnnnnnnnnnatcctccctcctctcctccatcctggtccctagcaaggtatagatagcctctgtgtcttaggataccccagctgctgttccccccatcaccccgttgcccaattccccatttctcttgttctcattccttgtatcttctccccttctgagccggtccattcatcggttctgctttttctcccccagccctaaataccctgactgctgtttctttttttcacccccctacccgattctccattctccacccctttctctcacccctggagccccctggggggttcagggcatgaattccccagttcccaaggaaaggcagccccctcaatccccctcct

SEQ ID NO: 22401 - DNA, 723 bp, Macaca Mulatta
  misc_feature (1)...(723): n = A,T,C or G
gcagcggcggcggcagnctggagaattgaagaaggagcatgtgctgcactgccagttctccgcgtggtacccgctcttccgaggcgttaccatcaagagtgtcattcttccacttcctcagaatgtgaaggattatttactcgatgatggaactctggtggtttcaggaagggacgatccaccaacacattctcagccagacagtgatgatgaagcagaagaaatacagtggtctgatgatgagaacacagccacgcttacggcaccagaatttcctgagtttgccactcaagtccaggaagctatcaattccctcgggggcagtgtctttcctaagcttaactggagtgccccaagggatgcgtattggatagcaatgaatagttctctgaaatgtaaaaccctcagcgacatctttctacttttcaagagttctgatttcatcactcgtgacttcactcagccgtttattcattgtactgatgattctccagatccatgtatagaatatgagcttgttctccgaaaatggtgtgaattgattcctggcgctgagtttcgatgttttgtcaaggaaaacaagcttattggtatttctcaaagagactacacacaatactatgatcatatttctaaacaaaaggaagaaatttgcagatgtatacaagactttttcaagaaacacatacagtacaaattcttagatgaagactttgtgttcga

SEQ ID NO: 22402 - DNA, 3085 bp, Macaca Mulatta
  misc_feature (1)...(3085): n = A,T,C or G
ttctgcctctgcatggctgaagccatcctactcttctcacctgaacactccccgttcttcttctgctcccgaaaagcacggatccggctccactgggcagggcagaccctagccatcctctgtgcagctctgggcctgggcttcatcatctccagcaggacccgcagtgagctgcctcatctggtgtcctggcacagctgggtgggagccctgacactgctggccactggtgtccaggcactgtgtgggctctgcctcctttgtccccgggcagccagggtctcgagggtggctcgcctcaagctctaccatctgacatgtggactggtggtctacctgatggctacagtgacggtgcttctgggnnnnnnnnnnnnnnnnnnnnnnnnnnnnnnnnnnnnnnnnnnnnnnnnnnnnnnntggcactgctcatctatccagccctggtgatcatgcaccagatctccagatcttacttgccgaggaagaaaatggaaatgtgagttcctgcgaactcttaatctgggtgggacacttgccttgaacatcatggttcattcggtgatctataagggatctatttcagaagtgatcaggtttttgcacttcttggctggttcagggactgcagaaaccaaagctgctgttgttgaggaataattcagtgggtcagaatgggaaaatgtacagggtatgactggaaggtgagggagagcctgatcctgaagcttctacttgatgagagacagagttttgggtggtgatagtgatgtcctggtggtcatttcttgcttgtgtgcctggtgaanaattgggttcccgtaagtaatgaatggcatccatggatatttgggttacttttaagaaagcagtgtgatgtagtnnnnnnnnnnnnnnnnnnnnnnnnnnnnnnnnnnnnnnnnnnnnnnnnnnnnnnnnnnnnnnnnnnnnnnnnnnnnnnnnnnnnnnnnnnnnnnnnnnnnnnnnnnnnnnnnnnnnnnnnnnnnnnnnnnnnnnnnnnnnnnnnnnnnnnnnnnnnnnnnnnnnnnnnnnnnnnnnnnnnnnnnnnnnnnnnnnnnnnnnnnnnnnnnnnnnnnnnnnnnnnnnnnnnnnnnnnnnnnnnnnnnnnnnnnnnnnnnnnnnnnnnnnnnnnnnnnnnnnnnnnnnnnnnnnnnnnnnnnnnnnnnnnnnnnnnnnnnnnnnnnnnnnnnnnnnnnnnnnnnnnnnnnnnnnnnnnnnnnnnnnnnnnnnnnnnnnnnnnnnnnnnnnnnnnnnnnnnnnnnnnnnnnnnnnnnnnnnnnnnnnnnnnnnnnnnnnnnnnnnnnnnnnnnnnnnnnnnnnnnnnnnnnnnnnnnnnnnnnnnnnnnnnnnnnnnnnnnnnnnnnnnnnnnnnnnnnnnnnnnnnnnnnnnnnnnnnnnnnnnnnnnnnnnnnnnnnnnnnnnnnnnnnnnnnnnnnnnnnnnnnnnnnnnnnnnnnnnnnnnnnnnnnnnnnnnnnnnnnnnnnnnnnnnnnnnnnnnnnnnnnnnnnnnnnnnnnnnnnnnnnnnnnnnnnnnnnnnnnnnnnnnnnnnnnnnnnnnnnnnnnnnnnnnnnnnnnnnnnnnnnnnnnnnnnnnnnnnnnnnnnnnnnnnnnnnnnnnnnnnnnnnnnnnnnnnnnnnnnnnnnnnnnnnnnnnnnnnnnnnnnnnnnnnnnnnnnnnnnnnnnnnnnnnnnnnnnnnnnnnnnnnnnnnnnnnnnnnnnnnnnnnnnnnnnnnnnnnnnnnnnnnnnnnnnnnnnnnnnnnnnnnnnnnnnnnnnnnnnnnnnnnnnnnnnnnnnnnnnnnnnnnnnnnnnnnnnnnnnnnnnnnnnnnnnnnnctgacaacagctgagccaggaaagtgctgctgaggcaggtagacatagctcacagggaactctgggaagcctggggtgtaggcgctggagctccagttcccgggagcaggggcaggtgttcctagatgttagtgttgtggatgtcctgggtcttttgaagattcaggtcctcctctccgggtagctcagaagtaaggaggttggtttgattcaatagtacaagaatggggacagcaagggcagaagtgtcctctccatgtacctcattatgcccctactgggggagattgcctctcccaggacaagcatctaaaggaggtccctgctgtgcagaagggtattgtccctgtctctttcattgtcctccctcctctcaaactctcagtgtggtgtgaactcggcagaaacggttactggggccgcatggagaatctcacctgcgttgattttgatccagggaccgcatctcctctttcctcatcacagccagctctgaggggctcactctacctgccgcagggtaggagggccaggcaaagttcaccagcttgctctgagagcaagcaggcagtgccgtaaagcctgagcctgcctgaggtgctgcctcctcccaggtggtgcgggggttggtgggcgggcgggcaggcgtgctgacagccggcagtttgcgtgggctgtgccatctgatgtctattcccagccctgggaggaagggggagtcatttatattctgcaggaggaaggggccnnnnnnnnnnnnnnnnnnnnnnnnnnnnnnnnnnnnnnnnnnnnnnnnnnnnnnnnnnnnnnnnnnnnnnnnnnnnnnnnnnnnnnnnnnnnnnnnnnnnnnnnnnnnnnnnnnnnnnnnnnnnnnnnnnnnnnnnnnnnnnnnnnnnnnnnnnnnnnnnnnnnnnnnnnnnnnnnnnnnnnnnnnnnnnnnnnnnnnnnnnnnnnnnnnnnnnnnnnnnnnnnnnnnnnnnnnnnnnnnnnnnnnnnnnnnnnnnnnnnnnnnnnnnnnnnnnnnnnnnnnnnnnnnnnnnnnnnnnnnnnnnnnnnnnnnnnnnnnnnnnnnnnnnnnnnnnnnnnnnnnnnnnnnnnnnnnnnnnnnnnnnnnnnnnnnnnnnnnnnnnnnnnnnnggaagtacacgccttggaggagaacacatggttgcccttttgtccttgctccctggctaaggaaagctgctagtggtcagcctgttttgcct

SEQ ID NO: 22403 - DNA, 175 bp, Macaca Mulatta
agatgagtaacgaaagaggctttgaaaatgtagaactgggagtcataggaaaaaagaagaaagtcccaaggagagtcatccactttgttagtggcgaaacgatggaagaatacagcacagatgaagatgaagttgatggcctggagaagaaagatgttttgccttctgttgatcc

SEQ ID NO: 22404 - DNA, 754 bp, Macaca Mulatta
  misc_feature (1)...(754): n = A,T,C or G
aggtttctgtcacaacaagattactgatttcccatttaagtggaattcgtcattatgaaaaggacataaaaaaggtgaaagaagagaaagcttataaagccttgaagatgatgaaagagactgttgcatttgagcaagaaaaagaaggcaaaagtaatgaaaagaatgattttactaaatgtaaaacagagnnnnnnnnnnnnnnnnnnnnnnnnnnnnnnnnnnnnnnnnnnnnnnnnnnnnnnnnnnnnnnnnnnnnnnnnnnnnnnnnnnnnnnnnnnnnnnnnnnnnnnnnnnnnnnnnnnnnnnnnnnnnnnnnnnnnnnnnnnnnnnnnnnnnnnnnnnnnnnnnnnnnnnnnnnnnnnnnnnnnnnnnnnnnnnnnnnnnnnnnnnnnnnnnnnnnnnnnnnnnnnnnnnnnnnnnnnnnnnnnnnnnnnnnnnnnnnnnnnnnnnnnnnnnnnnnnnnnnnnnnnnnnnnnnnnnnnnnnnnnnnnnnnnnnnnagattttatgtttacaataaaaagaaacgtcttgtcaacacaccttacgtggataactcctataaatgggctggtggtggatttctgtctacagtgggtgaccttctgaaatttgggaatgcaatgctttatggttaccaagtcgggctgtttaagaactcaaatgaaaatcttttacctggatacctcaaaccggaaacaatggttatgatgtggaccccagtcactgacacagagatgtcttgggataaa

SEQ ID NO: 22405 - DNA, 533 bp, Macaca Mulatta
gacaccaggagcctgaatggggaacgattctatcagctacgagtatggggattacagcgacctcttggacctccctgtggactgcctggatggcgcctgcctggccaccgacacgctgcgcatggccccgctcccgctgtatgctgccatcttcctggtgggggtgccgggcaatgccatggtggcctgggtggctgggaaggaggcccgccggagggtgggtgccacctggttgctccacctggccgtggcggatttgctgtgctgtttgtctctgcccatcctggcagtgcccattgcccatgggggccactggccatatggggaagtgggctgtcgggtgctgccctccgtcatcctgctgaccatgtatgccagcgtcctgctcctggcagctctcagtgccgacctctgctttctggctctcgggcctgcctggtggtcgaaggttcagcgggcgtgcggggtgcaggtggcctgcggggcagcctggacgctggccttgctgctcaccatgccctccgccatctacc

SEQ ID NO: 22406 - DNA, 2205 bp, Macaca Mulatta
  misc_feature (1)...(2205): n = A,T,C or G
ngatgggggctgtgatgactatgcagagggccgagtttgcaaagttcgctttgatgccaatggagctacaggaccagggagccgggaccccgcccaggtgaagctgctgcctggaaggcacatgctcttccctcctcttgagagagtccactacttacannagttgaagaagctggatctggcagccgccgcagcacacaccttctttgtagcaaaccctatgcacctgcagatgcgagaggacatggctaagtacagacgaatgtcgggagttcagccccagagcttccgggacctggagacgccgccacactgggnnnnnnnnnnnnnnnnnnnnnnnnnnnnnnnnnnnnnnnnnnnnnnnnnnnnnnnnnnnnnnnnnnnnnnnnnnnnnnnnnnnnnnnnnnnnnnnnnnnnnnnnnnnnnnnnnnnnnnnnnnnnnnnnnnnnnnnnnnnnnnnnnnnnnnnnnnnnnnnnnnnnnnnnnnnnnnnnnnnnnnnnnnnnnnnnnnnnnnnnnnnnnnnnnnnnnnnnnnnnnnnnnnnnnnnnnnnnnnnnnnnnnnnnnnnnnnnnnnnnnnnnnnnnnnnnnnnnnnnnnnnnnnnnnnnnnnnnnnnnnnnnnnnnnnnnnnnnnnnnnnnnnnnnnnnnnnnnnnnnnnnnnnnnnnnnnnnnnnnnnnnnnnnnnnnnnnnnnnnnnnnnnnnnnnnnnnnnnnnnnnnnnnnnnnnnnnnnnnnnnnnnnnnnnnnnnnnnnnnnnnnnnnnnnnnnnnnnnnnnnnnnnnnnnnnnnnnnnnnnnnnnnnnnnnnnnnnnnnnnnnnnnnnnnnnnnnnnnnnnnnnnnnnnnnnnnnnnnnnnnnnnnnnnnnnnnnnnnnnnnnnnnnnnnnnnnnnnnnnnnnnnnnnnnnnnnnnnnnnnnnnnnnnnnnnnnnnnnnnnnnnnnnnnnnnnnnnnnnnnnnnnnnnnnnnnnnnnnnnnnnnnnnnnnnnnnnnnnnnnnnnnnnnnnnnnnnnnnnnnnnnnnnnnnnnnnnnnnnnnnnnnnnnnnnnnnnnnnnnnnnnnnnnnnnnnnnnnnnnnnnnnnnnnnnnnnnnnnnnnnnnnnnnnnnnnnnnnnnnnnnnnnnnnnnnnnnnnnnnnnnnnnnnnnnnnnnnnnnnnnnnnnnnnnnnnnnnnnnnnnnnnnnnnnnnnnnnnnnnnnnnnnnnnnnnnnnnnnnnnnnnnnnnnnnnnnnnnnnnnnnnnnnnnnnnnnnnnnnnnnnnnnnnnnnnnnnnnnnnnnnnnnnnnnnnnnnnnnnnnnnnnnnnnnnnnnnnnnnnnnnnnnnnnnnnnnnnnnnnnnnnnnnnnnnnnnnnnnnnnnnnnnnnnnnnnnnnnnnnnnnnnnnnnnnnnnnnnnnnnnnnnnnnnnnnnnnnnnnnnnnnnnnnnnnnnnnnnnnnnnnnnnnnnnnnnnnnnnnnnnnnnnnnnnnnnnnnnnnnnnnnnnnnnnnnnnnnnnnnnnnnnnnnnnnnnnnnnnnnnnnnnnnnnnnnnnnncctgttcttcacggagcccaacgccctcactgtcacggngctcgggtgcgtcctcgctgtggacgccttgtagccttcagctccggtggggagaatccccatggggtgtgggccgtgactcggggacggcgctgtgccctggcgctgtggcacacatgggcacctgagcacagggagcaggnnnnnnnnnnnnnnnnnnnnnnnnnnnnnnnnnnnnnnnnnnnnnnnnnnnnnnnnnnnnnagaaatgcccagcaaagacccttccccagagccccctagccgcaggcaccagagggtccaagacaaggctggaaaggcacctcgggttcgggaggagctgtgagtggctgagccagctccttgaggatggggccacttgacttgtgcaaggccatcttgatgccaggacccacagaaagcccctgcgtgacatcaggagcagaacagcaagctctctgtccctgcacccccaccatcttggggacccacaagggcctggactcagaggacaatgcacagggtagcctggagctcaccagggctggggagccgggactgggcccagctgccggacctgcagccccggacagatggggaacactgtgtctccctgaacggaaatggcaggggaggaggtagagtgctttacatgaagaggatggtggggttgg

SEQ ID NO: 22407 - DNA, 853 bp, Macaca Mulatta
tagcaggatttttcaggattgttaacatgcctgggattgggaaagataggactaaagttgtaccaaactataccaataaattccatgtttagcagaaataggcagcctaatgatgttatgtttatataacatagtccggagaactgacatgcaggtcaaaagtcagatacacaacctccttatctgctaactctgttattcttcaaacacaagtgggtagtgtcatttttccttccttcctttcattggcagattgcatatttattcaataaacattaaatgtccatcctgtgccaggtactgtgcagatgttgagggatttggagtctggttagtcattactgtctatcctgaatctaacagtgacttcataactaggagactgaattagacccttaaggtatagtgtgtgttgcaaatcactcagcaatggaatcttttatattcagggtaggtttgtgtcttaaactaggtgttctaatactgtacaagactttaccatacacaaaactatagtttttctaaacctttatcattttgtgattctttgagaaagggcttttaggaactttatgttctaaaaaaattgtcttaataataataaaataaaagcaaaacctgtgactcatatgtccccactgacattactcagcaggagcccccagctgccaaaggttggcagtgatcctgcgagttcaagggctctttctccctggggatgtgctttgtggcttctctttacagctttgtttctgcatcagttcactgctgcatgtcgtttggaatttatcaccgtaagaaagtgtctctgttttatatagaagcactttctcacttccaggggagaaggaaa

SEQ ID NO: 22408 - DNA, 1724 bp, Macaca Mulatta
  misc_feature (1)...(1724): n = A,T,C or G
cagaggtggagtgctccacggtgaccacacgcatcgtgtctcagatcaagaccaagggggccttgggcgtcagcttcaccttttttggcacctccttcctcttcatcacgtcccacttcaccnnnnnnnnnnnnnnnnnnnnnnnnnnnnnnnnnnnnnnnnnnnnnnnnnnnnnnnnnnnnnnnnnnnnnnnnnnnnnnnnnnnnnnnnnnnnnnnnnnnnnnnnnnnnnnnnnnnnnnnnnnnnnnnnnnnnnnnnnnnnnnnnnnnnnnnnnnnnnnnnnnnnnnnnnnnnnnnnnnnnnnnnnnnnnnnnnnnnnnnnnnnnnnnnnnnnnnnnnnnnnnnnnnnnnnnnnnnnnnnnnnnnnnnnnnnnnnnnnnnnnnnnnnnnnnnnnnnnnnnnnnnnnnnnnnnnnnnnnnnnnnnnnnnnnnnnnnnnnnnnnnnnnnnnnnnnnnnnnnnnnnnnnnnnnnnnnnnnnnnnnnnnnnnnnnnnnnnnnnnnnnnnnnnnnnnnnnnnnnnnnnnnnnnnnnnnnnnnnnnnnnnnnnnnnnnnnnnnnnnnnnnnnnnnnnnnnnnnnnnnnnnnnnnnnnnnnnnnnnnnnnnnnnnnnnnnnnnnnnnnnnnnnnnnnnnnnnnnnnnnnnncattccattggcagctggcaaatttgatagagagctatacttactaggaattaaaagacggatttcgaaggagattcagaggcagcaagcactacagagtcagaactccagctttatccgttccgtttcttgaagtttgctgagcgaggacccacagccgcaacatggggtgattgtatttgatcaaaacccagcgggaaggacgaagagtttgccgccttttgcggatctgagggactgtggcgcccgtgccactgtgccagcgtcccaagaaggaaaccatccctaagtgagcctgtccttctccatggcatgtccacacggcatgggtgggcagggcgtggacccgccgcagtaccacagaccccagccactctcgggggcagacgtcagaatccggtcctgagcagctcccgtgccctgggggcagtcacagagnnnnnnnnnnnnnngtgctctgcgccagcctctccttccacacccagagcaggcgtccatctgtgtcctcctggcagcccctcaaacacacaccaccccatgtcacacaggtgtccagagccaggctggacctgngctaggtgacccctggggcctcagacctctcagtgggccccagagcccagctgaggaagccacatggcctccaggacgtggcgcggttcccctccgcgaggctgcaggtcgcctgccnnnnnnnnnnnnnnnnnnnnnnnnnnnnnnnnnnnnnnnnnnnnnnnnnnnnnnnnnnnnnnnnnnnnnnnnnnnnnnnnnnnnnnnnnnnnnnnnnnnnnnnnnnnnnnnnnnnnnnnnnnnnnnnnngaaaccatctcatggtttcagtgacgtagaccgtttgcttctgtaactccagccacagaatgacagtggagcctggctggggaactgctggaagcttaggatgccaccaccttgaacacctaggccagggatccccaccatgtcccgggtttctttcttcgagagtttagaaccgttcattcttgctttgtgtcccattccatctcttgaaaaaatgtagtctttgaatgtgtgaaaatctagggacattcaatctagtc

SEQ ID NO: 22409 - DNA, 774 bp, Macaca Mulatta
  misc_feature (1)...(774): n = A,T,C or G
gaacaacgtttcagtcaaacaacagaccaccatatacagtgggagatccaataatttatagtaacatatttttgcagtacttttctgtgttagacacacaaatacttgccgttgtgttactgtactgaataccatatttgcctatgtaggtaacagtaacatgctgtagaggtttgtagcctaggagcaataggctatcccatagagcttaggtgtatagctgactgtactatctaggtttttaaaagtatactctatgaagtttgcagagcaacaagatcacctaacaatacatttctcaacttatgcccattgttaaacaaagcatgactgtaattgacctaaggtcacacagctaacaagtagtgaggttttaaactaaggcctttgaccagtgctattgatcattacagagtggtacaaacatggtagcataagctttaagaggagggaaaacttggttcccgcggctttatcagggaagannnnnnnnnnnnnnnnnnnnnnnnnnntactctgtcgcctnnnnnnnnnnnnnnnnnngcnnnnnnnnnnnnnnnnnnnnnntnnnnnnnnnnnnngtgcnnnnnnnnnnnnnnnnnnnnnnnnnnnnnnnnnnnnnnnnntgcccaccaccacacctggctagnnnnnnnnnnnnnnnnnnnnnnnnnagtttcactatgttagccaggatggtctcaatctcctgacctggtgatccccgcctcggcctcccacagtgctaggactacaagcatgagccaccacgcc

SEQ ID NO: 22410 - DNA, 4896 bp, Macaca Mulatta
  misc_feature (1)...(4896): n = A,T,C or G
acctagatgatcaggatgagcagggcaacctgaaaggctttatcaatgacgatgatgatgaagatgaaggggaggaggatgagggcagtgactctggtgattcagaagatgatgttggccacaagaagagaaaacgcannnnnnnnnnnnnnnnnnnnnnnnnnnnnnnnnnnnnnnnnnnnnnnnnnnnnnnnnnnnnnnnnnnnnnnnnnnnnnnnnnnnnnnnnnnnnnnnnnnnnnnnnnnnnnnnnnnnnnnnnnnnnnnnnnnnnnnnnnnnnnnnnnnnnnnnnnnnnnnnnnnnnnnnnnnnnnnnnnnnnnnnnnnnnnnnnnnnnnnnnnnnnnnnnnnnnnnnnnnnnnnnnnnnnnnnnnnnnnnnnnnnnnnnnnnnnnnnnnnnnnnnnnnnnnnnnnnnnnnnnnnnnnnnnnnnnnnnnnnnnnnnnnnnnnnnnnnnnnnnnnnnnnnnnnnnnnnnnnnnnnnnnnnnnnnnnnnggccctgcaagaagcccaggaaatcttcggtgtggactttgactatgatgaatttgagaaatacaatgagtatgatgaagaactggaggaagagtatgagtatgaggatgatgaggctgagggtgaaatccgagtgcgccccaagaagaccaccaagaagcgtgtgagccgtaggagcatctttgaaatgtatgagcccagtgagctagaaagcagccacctcacagatcaggacaatgaaatccgagccactgacctgcctgagaggttccannnnnnnnnnnnnnnnnnnnnnnnnnnnnnnnnnnnnnnnnnnnnnnnnnnnnnnnnnnnnnnnnnnnnnnnnnnnnnnnnnnnnnnnnnnnnnnnnnnnnnnnnnnnnnnnnnnnnnnnnnnnnnnnnnnnnnnnnnnnnnnnnnnnnnnnnnnnnnnnnnnnnnnnnnnnnnnnnnnnnnnnnnnnnnnnnnnnnnnnnnnnnnnnnnnnnnnnnnnnnnnnnnnnnnnnnnnnnnnnnnnnnnnnnnnnnnnnnnnnnnnnnnnnnnnnnnnnnnnnnnnnnnnnnnnnnnnnnnnnnnnnnnnnnnnnnnnnnnnnnnnnnnnnnnnnnnnnnnnnnnnnnnnnnnnnnnnnnnnnnnnnnnnnnnnnnnnnnnnnnnnnnnnnnnnnnnnnnnnnnnnnnnnnnnnnnnnnnnnnnnnnnnnnnnnnnnnnnnnnnnnnnnnnnnnnnnnnnnnnnnnnnnnnnnnnnnnnnnnnnnnnnnnnnnnnnnnnnnnnnnnnnnnnnnnnnnnnnnnnnnnnnnnnnnnnnnnnnnnnnnnnnnnnnnnnnnnnnnnnnnnnnnnnnnnnnnnnnnnnnnnnnnnnnnnnnnnnnnnnnnnnnnnnnnnnnnnnnnnnnnnnnnnnnnnnnnnnnnnnnnnnnnnnnnnnnnnnnnnnnnnnnnnnnnnnnnnnnnnnnnnnnnnnnnnnnnnnnnnnnnnnnnnnnnnnnnnnnnnnnnnnnnnnnnnnnnnnnnnnnnnnnnnnnnnnnnnnnnnnnnnnnnnnnnnnnnnnnnnnnnnnnnnnnnnnnnnnnnnnnnnnnnnnnnnnnnnnnnnnnnnnnnncagccagttccctactccagaagctgtgctagaaggcgcccgctacatggtagccctgcagattgcccgtgagccccttgtccggcaggtgctgaggcaaaccttccaagagagagccaagctaaatataacccccaccaagaaaggtagaaagnnnnnnnnnnnnnnnnnnnnnnnnnnnnnnnnnnnnnnnnnnnnnnnnnnnnnnnnnnnnnnnnnnnnnnnnnnnnnnnnnnnnnnnnnnnnnnnnnnnnnnnnnnnnnnnnnnnnnnnnnnnnnnnnnnnnnnnnnnnnnnnnnnnnnnnnnnnnnnnnnnnnnnnnnnnnnnnnnnnnnnnnnnnnnnnnnnnnnnnnnnnnnnnnnnnnnnnnnnnnnnnnnnnnnnnnnnnnnnnnnnnnnnnnnnnnnnnnnnnnnnnnnnnnnnnnnnnnnnnnnnnnnnnnnnnnnnnnnnnnnnnnnnnnnnnnnnnnnnnnnnnnnnnnnnnnnnnnnnnnnnnnnnnnnnnnnnnnnnnnnnnnnnnnnnnnnnnnnnnnnnnnnnnnnnnnnnnnnnnnnnnnnnnnnnnnnnnnnnnnnnnnnnnnnnnnnnnnnnnnnnnnnnnnnnnnnnnnnnnnnnnnnnnnnnnnnnnnnnnnnnnnnnnnnnnnnnnnnnnnnnnnnnnnnnnnnnnnnnnnnnnnnnnnnnnnnnnnnnnnnnnnnnnnnnnnnnnnnnnnnnnnnnnnnnnnnnnnnnnnnnnnnnnnnnnnnnnnnnnnnnnnnnnnnnnnnnnnnnnnnnnnnnnnnnnnnnnnnnnnnnnnnnnnnnnnnnnnnnnnnnnnnnnnnnnnnnnnnnnnnnnnnnnnnnnnnnnnnnnnnnnnnnnnnnnnnnnnnnnnnnnnnnnnnnnnnnnnnnnnnnnnnnnnnnnnnnnnnnnnnnnnnnnnnnnnnnnnnnnnnnnnnnnnnnnnnnnnnnnnnnnnnnnnnnnnnnnnnnnnnnnnnnnnnnnnnnnnnnnnnnnnnnnnnnnnnnnnnnnnnnnnnnnnnnnnnnnnnnnnnnnnnnnnnnnnnnnnnnnnnnnnnnnnnnnnnnnnnnnnnnnnnnnnnnnnnnnnnnnnnnnnnnnnnnnnnnnnnnnnnnnnnnnnnnnnnnnnnnnnnnnnnnnnnnnncaggagcatgtggtgaaagaggagctgctcaacgccttgtactgtgaatttatcaaccgagtcaatgaggtcggggtcgatgtcaaccgtgccattgcccacccttacagccaggccttgatccagtatgtttgtggcctgggacctcggaaagggacccacctcctgaannnnnnnnnnnnnnnnnnnnnnnnnnnnnnnnnnnnnnnnnnnnnnnnnnnnnnnnnnnnnnnnnnnnnnnnnnnnnnnnnnnnnnnnnnnnnnnnnnnnnnnnnnnnnnnnnnnnnnnnnnnnnnnnnnnnnnnnnnnnnnnnnnnnnnnnnnnnnnnnnnnnnnnnnnnnnnnnnnnnnnnnnnnnnnnnnnnnnnnnnnnnnnnnnnnnnnnnnnnnnnnnnnnnnnnnnnnnnnnnnnnnnnnnnnnnnnnnnnnnnnnnnnnnnnnnnnnnnnnnnnnnnnnnnnnnnnnnnnnnnnnnnnnnnnnnnnnnnnnnnnnnnnnnnnnnnagggctatggtgacaaacacatcacactctatgacatccgggcagagttgagctgtcgatacaaggacctccggacagcctaccgctctcccaacacagaggagatcttcaatatgttaaccaaagaaacaccagagaccttctacattggnnnnnnnnnnnnnnnnnnnnnnnnnnnnnnnnnnnnnnnnnnnnnnnnnnnnnnnnnnnnnnnnnnnnnnnnnnnnnnnnnnnnnnnnnnnnnnnnnnnnnnnnnnnnnnnnnnnnnnnnnnnnnnnnnnnnnnnnnnnnnnnnnnnnnnnnnnnnnnnnnnnnnnnnnnnnnnnnnnnnnnnnnnnnnnnnnnnnnnnnnnnnnnnnnnnnnnnnnnnnnnnnnnnnnnnnnnnnnnnnnnnnnnnnnnnnnnnnnnnnnnnnnnnnnnnnnnnnnnnnnnnnnnnnnnnnnnnnnnnnnnnnnnnnnnnnnnnnnnnnnnnnnnnnnnnnnnnnnnnnnnnnnnnnnnnnnnnnnnnnnnnnnnnnnnnnnnnnnnnnnnnnnnnnnnnnnnnnnnnnnnnnnnnnnnnnnnnnnnnnnnnnnnnnnnnnnnnnnnnnnnnnnnnnnnnnnnnnnnnnnnnnnnnnnnnnnnnnnnnnnnnnnnnnnnnnnnnnnnnnnnnnnnnnnnnnnnnnnnnnnnnnnnnnnnnnnnnnnnnnnnnnnnnnnnnnnnnnnnnnnnnnnnnnnnnnnnnnnnnnnnnnnnnnnnnnnnnnnnnnnnnnnnnnnnnnnnnnnnnnnnnnnnnnnnnnnnnnnnnnnnnnnnnnnnnnnnnnnnnnnnnnnnnnnnnnnnnnnnnnnnnnnnnnnnnnnnnnnnnnnnnnnnnnnnnnnnnnnnnnnnnnnnnnnnnnnnnnnnnnnnnnnnnnnnnnnnnnnnnnnnnnnnnnnnnnnnnnnnnnnnnnnnnnnnnnnnnnnnnnnnnnnnnnnnnnnnnnnnnnnnnnnnnnnnnnnnnnnnnnnnnnnnnnnnnnnnnnnnnnnnnnnnnnnnnnnnnnnnnnnnnnnnnnnnnnnnnnnnnnnnnnnnnnnnnnnnnnnnnnnnnnnnnnnnnnnnnnnnnnnnnnnnnnnnnncccaggatagaatatgtaacagtgactccagagggattccggtaccggggccagatcttcccaactgtgaatggactctttagatggtttaaggatcactaccaggatcctgtaccagnnnnnnnnnnnnnnnnnnnnnnnnnnnnnnnnnnnnnnnnnnnnnnnnnnnnnnnnnnnnnnnnnnnnnnnnnnnnnnnnnnnnnnnnnnnnnnnnnnnnnnnnnnnnnnnnnnnnnnnnnnnnnnnnnnnnnnnnnnnnnnnnnnnnnnnnnnnnnnnnnnnnnnnnnnnnnnnnnnnnnnnnnnnnnnnnnnnnnnnnnnnnnnnnnnnnnnnnnnnnnnnnnnnnnnnnnnnnnnnnnnnntattcccaacgccagcccagcagccagtggccacaccactaatgacccctagctactcctacacgaccccaagccagcccatcaccacccctcagtaccaccagctccaggccagcaccaccccgcagtcggcccaggcccagccccagccctcctccagctcccggcaacggcagcagcagccaaagt

SEQ ID NO: 22411 - DNA, 371 bp, Macaca Mulatta
atgaggaagcattagcaaaaatcagtatttcagtagagtggacagcttagcattttgacctctgagaatgctcagttctgaactgcagaatgtaagacacagctaggaaacactggaaatggaaatcctatcatgtcgttttagactgactactgccctacatgactgtgatcaatgtcaaatagatgaaagagacttctttacagagaacaaacatgaacaggtttatttacaggaaaaaatgaattctcatatatctaacctaaaagataacagtgagattctttctgaacaactctaatgttgacagcaaaattaacagcctaaacattaagctgcatcacacaggataaactctgagagacaagatg

SEQ ID NO: 22412 - DNA, 483 bp, Macaca Mulatta
gggtgggaacacttttttcaggtcctctaggatggtgagtcgtgtgccttgcccaaagaactgctcattgtgtaccctgtccaggggtgctggcacagaagtacacagccgagtccctgggttctgagggctggatcttcagagtggagaatgatgcgtcaggcatcgtagctgagaatcgatccttgggcatccctgaatcatctatcggagacttgttgttaaagtaaatcaggaactccagtccccgcatcatggtctgtctgtaccagaaaagggagctgtggcctgaaattggttcgcatctcagagtcacttcttttcccatctctgtcacctcatgccggggtaactggataactccagcatctgtgtgcttcgctaccaggatacaaaaggacacacagcagagagtccagaagcccatggcagagtgagagcagatgtggaatattccagaccaggccctctgtgagcatgacc

SEQ ID NO: 22413 - DNA, 451 bp, Macaca Mulatta
ctagactgctgcatagatgataacctgttggagaagagacaggaaaatcaagaccagcatttgcagaaagttgattttttcagcaacaaaacactgactatggacagaaatggtgtattaggaaaaacattttatcttgacacaaaccccattctattaagaaaaatacgtggcaactgtgactcatatagagtgaatttgaattatattttggaattaattattagtaatagaagctcctttataaggaacccttctgagtgtaatgcacatgggaaagttttcctttgtatgaagcgtgaaaatccttatgccagagggaaacctttggaatatgatggaaatgggaaagccgtctttcagaatgaggacctatttaggcatcaaactctgaagcagtgttttgaatacaatcagtgtgggaaggcttttcatgaagaggcagcctgca

SEQ ID NO: 22414 - DNA, 1524 bp, Macaca Mulatta
  misc_feature (1)...(1524): n = A,T,C or G
tgaagtagntggtttatctgtacatgtgcacatatgctcccctgaaaccagatctggctctcctggccatcaatacgctgtgcaaagactgctcagaccccaatccaatggtgcgagggctggcgttacggagcatgtgtagcctcagnnnnnnnnnnnnnnnnnnnnnnnnnnnnnnnnnnnnnnnnnnnnnnnnnnnnnnnnnnnnnnnnnnnnnnnnnnnnnnnnnnnnnnnnnnnnnnnnnnnnnnnnnnnnnnnnnnnnnnnnnnnnnnnnnnnnnnnnnnnnnnnnnnnnnnnnnnnnnnnnnnnnnnnnnnnnnnnnnnnnnnnnnnnnnnnnnnnnnnnnnnnnnnnnnnnnnnnnnnnnnnnnnnnnnnnnnnnnnnnnnnnnnnnnnnnnnnnnnnnnnnnnnnnnnnnnnnnnnnnnnnnnnnnnnnnnnnnnnnnnnnnnnnnnnnnnnnnnnnnnnnnnnnnnnnnnnnnnnnnnnnnnnnnnnnnnnnnnnnnnnnnnnnnnnnnnnnnnnnnnnnnnnnnnnnnnnnnnnnnnnnnnnnnnnnnnnnnnnnnnnnnnnnnnnnnnnnnnnnnnnnnnnnnnnnnnnnnnnnnnnnnnnnnnnnnnnnnnnnnnnnnnnnnnnnnnnnnnnnnnnnnnnnnnnnnnnnnnnnnnnnnnnnnnnnnnnnnnnnnnnnnnnnnnnnnnnnnnnnnnnnnnnnnnnnnnnnnnnnnnnnnnnnnnnnnnnnnnnnnnnnnnnnnnnnnnnnnnnnnnnnnnnnnnnnnnnnnnnnnnnnnnnnnnnnnnnnnnnnnnnnnnnnnnnnnnnnnnnnnnnnnnnnnnnnnnnnnnnnnnnnnnnnnnnnnnnnnnnnnnnnnnnnnnnnnnnnnnnnnnnnnnnnnnnnnnnnnnnnnnnnnnnnnnnnnnnnnnnnnnnnnnnnnnnnnnnnnnnnnnnnnnnnnnnnnnnnnnnnnnnnnnnnnnnnnnnnnnnnnnnnnnnnnnnnnnnnnnnnnnnnnnnnnnnnnnnnnnnnnnnnnnnnnnnnnnnnnnnnnnnnnnnnnnnnnnnnnnnnnnnnnnnnnnnnnnnnnnnnnnnnnnnnnnnnnnnnnnnnnnnnnnnnnnnnnnnnnnnnnnnnnnnnnnnnnnnnnnnnnnnnnnnnnnnnnnnnnnnnnnnnnnnnnnnnnnnnnnnnnnnnnnnnnnnnnnnnnnnnnnnnnnnnnnnnnnnnnnnnnnnnnnnnnnnnnnnnnnnnnnnnnnnnnnnnnnnnnnnnnnnnnnnnnnnnnnnnnnnnnnnnnnnnnnnnnnnnnnnnnnnnnnnnnnnagaggaagaaaaagatatggctgtacgggaccgaggtctcttctattatcgcctcctcttagttggcattgatgaagttaagcggattctgtgtagccctaaatctgaccctactcttggacttttggaggatccggcagaaagacctgtgaatagctgggcctcggatttcaacacactggtgccagtgtatggcaaagcccactg

SEQ ID NO: 22415 - DNA, 910 bp, Macaca Mulatta
  misc_feature (1)...(910): n = A,T,C or G
ggatataaagggggtgttaatcggtgtaaatcgctgtttggatttcctgattttataacatggcggctggttaatatctcactcagtttaaaaaatcagcccctaatttctccatgtttacacttcaatctgcaggcttcttaaagtgacagtatcccttaacctgccaccagtgtccaccctccgatccctgtcttgtaaaaaggggaggagaattagccaaacactgtaagcttttaagaaaaacaaagttttaaaagaaatactgctctgtccagaggctttaaaactggtgcatttaccgcaaaaacggaatctgtaactttaactcgtaaaccacatactgtttttgcaattttttaaagaagcaaagacgagaccgttataacccaatggatctatctaaaatgccaattttaatttcacagacacaatgtaatgacatttttacaattattaaaatttgaactaataaaatccattacaaaattgtagccaaaataaaatttgtattaagaccctaaggccaagaatgaaatctccaaaggtgtgtcagggataaatagactaggttgtgggttataaaaactgaaaaaaaagtaggaaaagatatacattagaaacaattgtcagcctattgtacatattaattaaacaccaaacataatttggtgtgctctatctcaatgtataaacaataataccctaggttactgccacacaagaaactgattaggtcattattttacatgggcgaaagtacccaaagtaaaggggtgcgcaaataatntattgataaaccttatcttgagatttgcacataaaatgagatataatgcacataattatcccacaagnctgaagaagaaaacgtgccggcgcggagaaagaattaatcggggtctgacag

SEQ ID NO: 22416 - DNA, 226 bp, Macaca Mulatta
atgaaaacgggccttacttcctggccctccgcgagatgatcgaggagatgtaccagctgtatgggggccccgtggtgctggttgcccacagtatgggcaacatgtacacgctctactttctgcagcggcagccgcaggcctggaaggacaagtatatccgggccttcgtgtcactgggtgcgccctgggggggcgtggccaagaccctgcgcgtcctggcttcagg

SEQ ID NO: 22417 - DNA, 434 bp, Macaca Mulatta
  misc_feature (1)...(434): n = A,T,C or G
naaaatatcatacttgcatcaccagatagacacatttccttctacacagaattatctccagagcttcttaaagcaaataaagcctccttcaaggaccgagtccctagtcaaattccctgaaggagtggagcctgtcatatgggtgagggtttgccttgaatgccatcccagtatttcagtgttgattaattagtcttccctcatggtcccaactgcatagtttttattttgttgagtgttctgacacatggtaagggacataaaagtatcctttgctgagatagtttatccattcaccagcgtttatctagcatctgctcaagagtgtgctgcagtggagggaaatcagatgacctcccagtctggttgtgttaggtacaatcatgtgtaagaagtgccattcaagtcatgtcactggaggggactgacagtga

SEQ ID NO: 22418 - DNA, 737 bp, Macaca Mulatta
ggctactgatgggttgtgggagactatgcataggcaggatgtggttaggattgtgggtgagtacttaactggcatgcatcaccaacagccaatagctgttggtggctacaaggtgactctgggacagatgcacggccttttaacagaaaggagaaccaaaatgtcctcggtatttgaggatcagaatgcagcaacccatctcattcgccatgctgtgggcaacaacgagtttgggactgttgatcatgagcgcctctccaaaatgcttagtcttcctgaagagcttgctcgaatgtacagagatgacattacaatcattgtagttcagttcaattctcatgtcgtaggggcgtatcaaaaccaagaatagtgagtggctctttcactggcaattctcaaatgatatgcatttaaagggcagatttttaaaaaagatactactataataaacatttccagttggtcattctaagcatttacccgtttgatactctagctagtcaggtactttaaattgactttgcagcagggtggcagggtcaggagagtctggttctgcctagctcagatttcatggcacctgcacttgaagcaagtcacttctttatcacaggtgtcttgaaacattggcttcttttaccaacctgagaaaattaggatgacctggcaaataagatcttgaataggccaaaagcaagtatcttgctgagtgtagtctcttggttaaagtgaagaaa

SEQ ID NO: 22419 - DNA, 144 bp, Macaca Mulatta
cagggtctcatgttccgatgcagcgccagctgttgtgaggacagccaggcctccatgaagcaggtgcaccagtgcatcgagcgctgccatgtgcccctggctcaagcccaggctttggtcaccagtgagttggagaagttccag

SEQ ID NO: 22420 - DNA, 5951 bp, Macaca Mulatta
  misc_feature (1)...(5951): n = A,T,C or G
gctgacacacccattgaagaattcacaccaacaccggcgttcccagccctgcagtacctggagtccgtggatgaaggtggggtggcgtggcaagccggactaaggaccggggacttcttgattgaggtnnnnnnnnnnnnnnnnnnnnnnnnnnnnnnnnnnnnnnnnnnnnnnnnnnnnnnnnnnnnnnnnnnnnnnnnnnnnnnnnnnnnnnnnnnnnnnnnnnnnnnnnnnnnnnnnnnnnnnnnnnnnnnnnnnnnnnnnnnnnnnnnnnnnnnnnnnnnnnnnnnnnnnnnnnnnnnnnnnnnnnnnnnnnnnnnnnnnnnnnnnnnnnnnnnnnnnnnnnnnnnnnnnnnnnnnnnnnnnnnnnnnnnnnnnnnnnnnnnnnnnnnnnnnnnnnnnnnnnnnnnnnnnnnnnnnnnnnnnnnnnnnnnnnnnnnnnnnnnnnnnnnnnnnnnnnnnnnnnnnnnnnnnnnnnnnnnnnnnnnnnnnnnnnnnnnnnnnnnnnnnnnnnnnnnnnnnnnnnnnnnnnnnnnnnnnnnnnnnnnnnnnnnnnnnnnnnnnnnnnnnnnnnnnnnnnnnnnnnnnnnnnnnnnnnnnnnnnnnnnnnnnnnnnnnnnnnnnnnnnnnnnnnnnnnnnnnnnnnnnnnnnnnnnnnnnnnnnnnnnnnnnnnnnnnnnnnnnnnnnnnnnnnnnnnnnnnnnnnnnnnnnnnnnnnnnnnnnnnnnnnnnnnnnnnnnnnnnnnnnnnnnnnnnnnnnnnnnnnnnnnnnnnnnnnnnnnnnnnnnnnnnnnnnnnnnnnnnnnnnnnnnnnnnnnnnnnnnnnnnnnnnnnnnnnnnnnnnnnnnnnnnnnnnnnnnnnnnnnnnnnnnnnnnnnnnnnnnnnnnnnnnnnnnnnnnnnnnnnnnnnnnnnnnnnnnnnnnnnnnnnnnnnnnnnnnnnnnnnnnnnnnnnnnnnnnnnnnnnnnnnnnnnnnnnnnnnnnnnnnnnnnnnnnnnnnnnnnnnnnnnnnnnnnnnnnnnnnnnnnnnnnnnnnnnnnnnnnnnnnnnnnnnnnnnnnnnnnnnnnnnnnnnnnnnnnnnnnnnnnnnnnnnnnnnnnnnnnnnnnnnnnnnnnnnnnnnnnnnnnnnnnnnnnnnnnnnnnnnnnnnnnnnnnnnnnnnnnnnnnnnnnnnnnnnnnnnnnnnnnnnnnnnnnnnnnnnnnnnnnnnnnnnnnnnnnnnnnnnnnnnnnnnnnnnnnnnnnnnnnnnnnnnnnnnnnnnnnnnnnnnnnnnnnnnnnnnnnnnnnnnnnnnnnnnnnnnnnnnnnnnnnnnnnnnnnnnnnnnnnnnnnnnnnnnnnnnnnnnnnnnnnnnnnnnnnnnnnnnnnnnnnnnnnnnnnnnnnnnnnnnnnnnnnnnnnnnnnnnnnnnnnnnnnnnnnnnnnnnnnnnnnnnnnnnnnnnnnnnnnnnnnnnnnnnnnnnnnnnnnnnnnnnnnnnnnnnnnnnnnnnnnnnnnnnnnnnnnnnnnnnnnnnnnnnnnnnnnnnnnnnnnnnnnnnnnnnnnnnnnnnnnnnnnnnnnnnnnnnnnnnnnnnnnnnnnnnnnnnnnnnnnnnnnnnnnnnnnnnnnnnnnnnnnnnnnnnnnnnnnnnnnnnnnnnnnnnnnnnnnnnnnnnnnnnnnnnnnnnnnnnnnnnnnnnnnnnnnnnnnnnnnnnnnnnnnnnnnnnnnnnnnnnnnnnnnnnnnnnnnnnnnnnnnnnnnnnnnnnnnnnnnnnnnnnnnnnnnnnnnnnnnnnnnnnnnnnnnnnnnnnnnnnnnnnnnnnnnnnnnnnnnnnnnnnnnnnnnnnnnnnnnnnnnnnnnnnnnnnnnnnnnnnnnnnnnnnnnnnnnnnnnnnnnnnnnnnnnnnnnnnnnnnnnnnnnnnnnnnnnnnnnnnnnnnnnnnnnnnnnnnnnnnnnnnnnnnnnnnnnnnnnnnnnnnnnnnnnnnnnnnnnnnnnnnnnnnnnnnnnnnnnnnnnnnnnnnnnnnnnnnnnnnnnnnnnnnnnnnnnnnnnnnnnnnnnnnnnnnnnnnnnnnnnnnnnnnnnnnnnnnnnnnnnnnnnnnnnnnnnnnnnnnnnnnnnnnnnnnnnnnnnnnnnnnnnnnnnnnnnnnnnnnnnnnnnnnnnnnnnnnnnnnnnnnnnnnnnnnnnnnnnnnnnnnnnnnnnnnnnnnnnnnnnnnnnnnnnnnnnnnnnnnnnnnnnnnnnnnnnnnnnnnnnnnnnnnnnnnnnnnnnnnnnnnnnnnnnnnnnnnnnnnnnnnnnnnnnnnnnnnnnnnnnnnnnnnnnnnnnnnnnnnnnnnnnnnnnnnnnnnnnnnnnnnnnnnnnnnnnnnnnnnnnnnnnnnnnnnnnnnnnnnnnnnnnnnnnnnnnnnnnnnnnnnnnnnnnnnnnnnnnnnnnnnnnnnnnnnnnnnnnnnnnnnnnnnnnnnnnnnnnnnnnnnnnnnnnnnnnnnnnnnnnnnnnnnnnnnnnnnnnnnnnnnnnnnnnnnnnnnnnnnnnnnnnnnnnnnnnnnnnnnnnnnnnnnnnnnnnnnnnnnnnnnnnnnnnnnnnnnnnnnnnnnnnnnnnnnnnnnnnnnnnnnnnnnnnnnnnnnnnnnnnnnnnnnnnnnnnnnnnnnnnnnnnnnnnnnnnnnnnnnnnnnnnnnnnnnnnnnnnnnnnnnnnnnnnnnnnnnnnnnnnnnnnnnnnnnnnnnnnnnnnnnnnnnnnnnnnnnnnnnnnnnnnnnnnnnnnnnnnnnnnnnnnnnnnnnnnnnnnnnnnnnnnnnnnnnnnnnnnnnnnnnnnnnnnnnnnnnnnnnnnnnnnnnnnnnnnnnnnnnnnnnnnnnnnnnnnnnnnnnnnnnnnnnnnnnnnnnnnnnnnnnnnnnnnnnnnnnnnnnnnnnnnnnnnnnnnnnnnnnnnnnnnnnnnnnnnnnnnnnnnnnnnnnnnnnnnnnnnnnnnnnnnnnnnnnnnnnnnnnnnnnnnnnnnnnnnnnnnnnnnnnnnnnnnnnnnnnnngaagcccggagatcatgagcaccatctcaggtacacggagcacgacggtcaccttcactgttcgccccggcacctcccaacccatcaccctgcagagccggccccccgactacgaaagcaggacctcaggaacaagacgtgccccaagccctgtggtctcgccaacagagatgaacaaagagaccctgcccacccccctgtctgctgccgccgcctctccttctcccactctctcagatgtctttagccttccaagccagcccccttccggggatctatttggcttgaacccagcgggacgcagtaggtcgccatccccctcgatactgcaacagccaatctcaaataagccttttacaactaaacctgtccacctgtggactaaaccagatgtggccgattggctggaaatctaaacttgggtgaaataaagaggccttcatggacaatgagatcgacggcagtcacttaccaaaactgcagaaggaggacctcatcgatcttggggtgactcgagttgggcacagaatgacataaaaaaggctttgaaaagctgctggacagatannnnnnnnnnnnnnnnnnnnnnnnnnnnnnnnnnnnnnnnnnnnnnnnnnnnnnnnnnnnnnnnnnnnnnnnnnnnnnnnnnnnnnnnnnnnnnnnnnnnnnnnnnnnnnnnnnnnnnnnnnnnnnnnnnnnnnnnnnnnnnnnnnnnnnnnnnnnnnnnnnnnnnnnnnnnnnnnnnnnnnnnnnnnnnnnnnnnnnnnnnnnnnnnnnnnnnnnnnnnnnnnnnnnnnnnnnnnnnnnnnnnnnnnnnnnnnnnnnnnnnnnnnnnnnnnnnnnnnnnnnnnnnnnnnnnnnnnnnnnnnnnnnnnnnnnnnnnnnnnnnnnnnnnnnnnnnnnnnnnnnnnnnnnnnnnnnnnnnnnnnnnnnnnnnnnnnnnnnnnnnnnnnnnnnnnnnnnnnnnnnnnnnnnnnnnnnnnnnnnnnnnnnnnnnnnnnnnnnnnnnnnnnnnnnnnnnnnnnnnnnnnnnnnnnnnnnnnnnnnnnnnnnnnnnnnnnnnnnnnnnnnnnnnnnnnnnnnnnnnnnnnnnnnnnnnnnnnnnnnnnnnnnnnnnnnnnnnnnnnnnnnnnnnnnnnnnnnnnnnnnnnnnnnnnnnnnnnnnnnnnnnnnnnnnnnnnnnnnnnnnnnnnnnnnnnnnnnnnnnnnnnnnnnnnnnnnnnnnnnnnnnnnnnnnnnnnnnnnnnnnnnnnnnnnnnnnnnnnnnnnnnnnnnnnnnnnnnnnnnnnnnnnnnnnnnnnnnnnnnnnnnnnnnnnnnnnnnnnnnnnnnnnnnnnnnnnnnnnnnnnnnnnnnnnnnnnnnnnnnnnnnnnnnnnnnnnnnnnnnnnnnnnnnnnnnnnnnnnnnnnnnnnnnnnnnnnnnnnnnnnnnnnnnnnnnnnnnnnnnnnnnnnnnnnnnnnnnnnnnnnnnnnnnnnnnnnnnnnnnnnnnnnnnnnnnnnnnnnnnnnnnnnnnnnnnnnnnnnnnnnnnnnnnnnnnnnnnnnnnnnnnnnnnnnnnnnnnnnnnnnnnnnnnnnnnnnnnnnnnnnnnnnnnnnnnnnnnnnnnnnnnnnnnnnnnnnnnnnnnnnnnnnnnnnnnnnnnnnnnnnnnnnnnnnnnnnnnnnnnnnnnnnnnnnnnnnnnnnnnnnnnnnnnnnnnnnnnnnnnnnnnnnnnnnnnnnnnnnnnnnnnnnnnnnnnnnnnnnnnnnnnnnnnnnnnnnnnnnnnnnnnnnnnnnnnnnnnnnnnnnnnnnnnnnnnnnnnnnnnnnnnnnnnnnnnnnnnnnnnnnnnnnnnnnnnnnnnnnnnnnnnnnnnnnnnnnnnnnnnnnnnnnnnnnnnnnnnnnnnnnnnnnnnnnnnnnnnnnnnnnnnnnnnnnnnnnnnnnnnnnnnnnnnnnnnnnnnnnnnnnnnnnnnnnnnnnnnnnnnnnnnnnnnnnnnnnnnnnnnnnnnnnnnnnnnnnnnnnnnnnnnnnnnnnnnnnnnnnnnnnnnnnnnnnnnnnnnnnnnnnnnnnnnnnnnnnnnnnnnnnnnnnnnnnnnnnnnnnnnnnnnnnnnnnnnnnnnnnnnnnnnnnnnnnnnnnnnnnnnnnnnnnnnnnnnnnnnnnnnnnnnnnnnnnnnnnnnnnnnnnnnnnnnnnnnnnnnnnnnnnnnnnnnnnnnnnnnnnnnnnnnnnnnnnnnnnnnnnnnnnnnnnnnnnnnnnnnnnnnnnnnnnnnnnnnnnnnnnnnnnnnnnnnnnnnnnnnnnnnnnnnnnnnnnnnnnnnnnnnnnnnnnnnnnnnnnnnnnnnnnnnnnnnnnnnnnnnnnnnnnnnnnnnnnnnnnnnnnnnnnnnnnnnnnnnnnnnnnnnnnnnnnnnnnnnnnnnnnnnnnnnnnnnnnnnnnnnnnnnnnnnnnnnnnnnnnnnnnnnnnnnnnnnnnnnnnnnnnnnnnnnnnnnnnnnnnnnnnnnnnnnnnnnnnnnnnnnnnnnnnnnnnnnnnnnnnnnnnnnnnnnnnnnnnnnnnnnnnnnnnnnnnnnnnnnnnnnnnnnnnnnnnnnnnnnnnnnncgcttttccagccacacacccgatttggaaaccaagtttttggaccttctgttccaaaaccttttgcaggtcaatctttgtatttgaaatgattcaaaccaacttgaaatcaattgaatattaaggcgctttacttccatgtgctttcagtttttccatggtgagatgagtaagtattactctagagaaatttcaagacaggatactatagatggcctgctgaggccgccccatattttagaaaatgtaaaaatggtggtttggccattaatttgtcttccatttgatgatactgcaaaattccatgagtccatccctttggcatggcgctttccctgggcctacagttggtatt

SEQ ID NO: 22421 - DNA, 489 bp, Macaca Mulatta
ggccgtacggagccacacgcgcaccgagtgcaaatgccacgggctgtcgggctcgtgcgcgctgcgaacctgctggcagaagctgcctccgtttcgcgaagtgggcgcgcggctgctggagcgcttccacggcgcctcacgcgtcatgggcactaacgacggcaaggccctactgcccgccgtccgcacgctcaagccgccgggccgagcggacctcctctacgccgctgattcgcccgacttctgcgcccccaaccgacgcaccggctcccccggcacgcgcggccgcgcctgcaatagcagcgccccggacctcagtggctgcgacctgctgtgttgcggccgcgggcaccgccaggagagcgtgcagctcgaagagaactgcctgtgccgtttccactggtgctgcgtagtgcagtgccaccgctgccgtgtgcgcaaggagctcagcctctgcctctgacccgccgcccggcacctagactgact

SEQ ID NO: 22422 - DNA, 210 bp, Macaca Mulatta
attggaaaactaggcaagctgttgctgcacggccctttcagcgtctggacaattcacaaggatcgttataaaatgaaggatttgattcgatttaagcccagccagaggcaaatctacctatttgaaaggggaatagtgttctgtaagatacgaatggagcctggggaccagggattgtctcctcattacagcttcaagaaggccatgaag

SEQ ID NO: 22423 - DNA, 445 bp, Macaca Mulatta
atgatgggagccgcacctccagtgggcaggccgggtgtgcactgtgtgagctgacccaaggcagccacatctgcttttgttctttgagaggactctgactacaacagaggcgtgacatcaatgaaaggaaaaccatgaaatcgatgagactgaatccctagggattttttaaagccagattcatggcgagaatgaatgtgcaacatggctgaaatctattttgtgtaataaaaggtgatgcaagtcaatagggacccttggctttgctctgcagcgcatgctgcacatgggggtgtgcggggccgccagagactgcttccctcggagtgccctcaggtagagtgtcccacacagccaccaggcggcaggcctggggttagggaggatcacttgcattcagaaaagtgagacctgatcaaaagtaactaaaagtaatgcgtttttc

SEQ ID NO: 22424 - DNA, 157 bp, Macaca Mulatta
ggttttcacggaccctagcaaccttcagcggcacattcgctctcagcatgtcggtgcccgggcccatgcatgcccggagtgtggcaaaacgtttgccacttcgtcgggcctcaaacaacacaagcacatccacagcagtgtgaagccctttatctgt

SEQ ID NO: 22425 - DNA, 10457 bp, Macaca Mulatta
  misc_feature (1)...(10457): n = A,T,C or G
gggcttcagataacagggagcgtgcttatgaacatagtgcctatggacaccatgaacgggggacgggaggatttgatcggacaagacattacgatcaggattactatagagatcctcgagagcggactttacaacatgggctctattatgcttctcggagtcgaagtccaaatcgctttgatgctcatgacccccgatatgaacctagggctcgcgagcagtttacactgccaagtgtggtacacagggatatctacagggatgatattacccgggaggtacgaggcagaaggccagagcggaattaccagcacagcaggagtcggtcaccacattcatcccagtctagaaatcagtctcctcagagactggctagccaagcgtctagacccacaaggtcccctagcggcagcggctctagaagtagatcctccagtagtgattcaatcagcagcagcagtagtaccagcagtgacannnnnnnnnnnnnnnnnnnnnnnnnnnnnnnnnnnnnnnnnnnnnnnnnnnnnnnnnnnnnnnnnnnnnnnnnnnnnnnnnnnnnnnnnnnnnnnnnnnnnnnnnnnnnnnnnnnnnnnnnnnnnnnnnnnnnnnnnnnnnnnnnnnnnnnnnnnnnnnnnnnnnnnnnnnnnnnnnnnnnnnnnnnnnnnnnnnnnnnnnnnnnnnnnnnnnnnnnnnnnnnnnnnnnnnnnnnnnnnnnnnnnnnnnnnnnnnnnnnnnnnnnnnnnnnnnnnnnnnnnnnnnnnnnnnnnnnnnnnnnnnnnnnnnnnnnnnnnnnnnnnnnnnnnnnnnnnnnnnnnnnnnnnnnnnnnnnnnnnnnnnnnnnnnnnnnnnnnnnnnnnnnnnnnnnnnnnnnnnnnnnnnnnnnnnnnnnnnnnnnnnnnnnnnnnnnnnnnnnnnnnnnnnnnnnnnnnnnnnnnnnnnnnnnnnnnnnnnnnnnnnnnnnnnnnnnnnnnnnnnnnnnnnnnnnnnnnnnnnnnnnnnnnnnnnnnnnnnnnnnnnnnnnnnnnnnnnnnnnnnnnnnnnnnnnnnnnnnnnnnnnnnnnnnnnnnnnnnnnnnnnnnnnnnnnnnnnnnnnnnnnnnnnnnnnnnnnnnnnnnnnnnnnnnnnnnnnnnnnnnnnnnnnnnnnnnnnnnnnnnnnnnnnnnnnnnnnnnnnnnnnnnnnnnnnnnnnnnnnnnnnnnnnnnnnnnnnnnnnnnnnnnnnnnnnnaggtggtgtttgaccgcttaaaaggcatggccctggttctctacaatgaaattgaatatgcacaagcagctgtaaaagagaccaaagggagaaaaatcggtggtaataaaattaaggtnnnnnnnnnnnnnnnnnnnnnnnnnnnnnnnnnnnnnnnnnnnnnnnnnnnnnnnnnnnnnnnnnnnnnnnnnnnnnnnnnnnnnnnnnnnnnnnnnnnnnnnnnnnnnnnnnnnnnnnnnnnnnnnnnnnnnnnnnnnnnnnnnnnnnnnnnnnnnnnnnnnnnnnnnnnnnnnnnnnnnnnnnnnnnnnnnnnnnnnnnnnnnnnnnnnnnnnnnnnnnnnnnnnnnnnnnnnnnnnnnnnnnnnnnnnnnnnnnnnnnnnnnnnnnnnnnnnnnnnnnnnnnnnnnnnnnnnnnnnnnnnnnnnnnnnnnnnnnnnnnnnnnnnnnnnnnnnnnnnnnnnnnnnnnnnnnnnnnnnnnnnnnnnnnnnnnnnnnnnnnnnnnnnnnnnnnnnnnnnnnnnnnnnnnnnnnnnnnnnnnnnnnnnnnnnnnnnnnnnnnnnnnnnnnnnnnnnnnnnnnnnnnnnnnnnnnnnnnnnnnnnnnnnnnnnnnnnnnnnnnnnnnnnnnnnnnnnnnnnnnnnnnnnnnnnnnnnnnnnnnnnnnnnnnnnnnnnnnnnnnnnnnnnnnnnnnnnnnnnnnnnnnnnnnnnnnnnnnnnnnnnnnnnnnnnnnnnnnnnnnnnnnnnnnnnnnnnnnnnnnnnnnnnnnnnnnnnnnnnnnnnnnnnnnnnnnnnnnnnnnnnnnnnnnnnnnnnnnnnnnnnnnnnnnnnnnnnnnnnnnnnnnnnnnnnnnnnnnnnnnnnnnnnnnnnnnnnnnnnnnnnnnnnnnnnnnnnnnnnnnnnnnnnnnnnnnnnnnnnnnnnnnnnnnnnnnnnnnnnnnnnnnnnnnnnnnnnnnnnnnnnnnnnnnnnnnnnnnnnnnnnnnnnnnnnnnnnnnnnnnnnnnnnnnnnnnnnnnnnnnnnnnnnnnnnnnnnnnnnnnnnnnnnnnnnnnnnnnnnnnnnnnnnnnnnnnnnnnnnnnnnnnnnnnnnnnnnnnnnnnnnnnnnnnnnnnnnnnnnnnnnnnnnnnnnnnnnnnnnnnnnnnnnnnnnnnnnnnnnnnnnnnnnnnnnnnnnnnnnnnnnnnnnnnnnnnnnnnnnnnnnnnnnnnnnnnnnnnnnnnnnnnnnnnnnnnnnnnnnnnnnnnnnnnnnnnnnnnnnnnnnnnnnnnnnnnnnnnnnnnnnnnnnnnnnnnnnnnnnnnnnnnnnnnnnnnnnnnnnnnnnnnnnnnnnnnnnnnnnnnnnnnnnnnnnnnnnnnnnnnnnnnnnnnnnnnnnnnnnnnnnnnnnnnnnnnnnnnnnnnnnnnnnnnnnnnnnnnnnnnnnnnnnnnnnnnnnnnnnnnnnnnnnnnnnnnnnnnnnnnnnnnnnnnnnnnnnnnnnnnnnnnnnnnnnnnnnnnnnnnnnnnnnnnnnnnnnnnnnnnnnnnnnnnnnnnnnnnnnnnnnnnnnnnnnnnnnnnnnnnnnnnnnnnnnnnnnnnnnnnnnnnnnnnnnnnnnnnnnnnnnnnnnnnnnnnnnnnnnnnnnnnnnnnnnnnnnnnnnnnnnnnnnnnnnnnnnnnnnnnnnnnnnnnnnnnnnnnnnnnnnnnnnnnnnnnnnnnnnnnnnnnnnnnnnnnnnnnnnnnnnnnnnnnnnnnnnnnnnnnnnnnnnnnnnnnnnnnnnnnnnnnnnnnnnnnnnnnnnnnnnnnnnnnnnnnnnnnnnnnnnnnnnnnnnnnnnnnnnnnnnnnnnnnnnnnnnnnnnnnnnnnnnnnnnnnnnnnnnnnnnnnnnnnnnnnnnnnnnnnnnnnnnnnnnnnnnnnnnnnnnnnnnnnnnnnnnnnnnnnnnnnnnnnnnnnnnnnnnnnnnnnnnnnnnnnnnnnnnnnnnnnnnnnnnnnnnnnnnnnnnnnnnnnnnnnnnnnnnnnnnnnnnnnnnnnnnnnnnnnnnnnnnnnnnnnnnnnnnnnnnnnnnnnnnnnnnnnnnnnnnnnnnnnnnnnnnnnnnnnnnnnnnnnnnnnnnnnnnnnnnnnnnnnnnnnnnnnnnnnnnnnnnnnnnnnnnnnnnnnnnnnnnnnnnnnnnnnnnnnnnnnnnnnnnnnnnnnnnnnnnnnnnnnnnnnnnnnnnnnnnnnnnnnnnnnnnnnnnnnnnnnnnnnnnnnnnnnnnnnnnnnnnnnnnnnnnnnnnnnnnnnnnnnnnnnnnnnnnnnnnnnnnnnnnnnnnnnnnnnnnnnnnnnnnnnnnnnnnnnnnnnnnnnnnnnnnnnnnnnnnnnnnnnnnnnnnnnnnnnnnnnnnnnnnnnnnnnnnnnnnnnnnnnnnnnnnnnnnnnnnnnnnnnnnnnnnnnnnnnnnnnnnnnnnnnnnnnnnnnnnnnnnnnnnnnnnnnnnnnnnnnnnnnnnnnnnnnnnnnnnnnnnnnnnnnnnnnnnnnnnnnnnnnnnnnnnnnnnnnnnnnnnnnnnnnnnnnnnnnnnnnnnnnnnnnnnnnnnnnnnnnnnnnnnnnnnnnnnnnnnnnnnnnnnnnnnnnnnnnnnnnnnnnnnnnnnnnnnnnnnnnnnnnnnnnnnnnnnnnnnnnnnnnnnnnnnnnnnnnnnnnnnnnnnnnnnnnnnnnnnnnnnnnnnnnnnnnnnnnnnnnnnnnnnnnnnnnnnnnnnnnnnnnnnnnnnnnnnnnnnnnnnnnnnnnnnnnnnnnnnnnnnnnnnnnnnnnnnnnnnnnnnnnnnnnnnnnnnnnnnnnnnnnnnnnnnnnnnnnnnnnnnnnnnnnnnnnnnnnnnnnnnnnnnnnnnnnnnnnnnnnnnnnnnnnnnnnnnnnnnnnnnnnnnnnnnnnnnnnnnnnnnnnnnnnnnnnnnnnnnnnnnnnnnnnnnnnnnnnnnnnnnnnnnnnnnnnnnnnnnnnnnnnnnnnnnnnnnnnnnnnnnnnnnnnnnnnnnnnnnnnnnnnnnnnnnnnnnnnnnnnnnnnnnnnnnnnnnnnnnnnnnnnnnnnnnnnnnnnnnnnnnnnnnnnnnnnnnnnnnnnnnnnnnnnnnnnnnnnnnnnnnnnnnnnnnnnnnnnnnnnnnnnnnnnnnnnnnnnnnnnnnnnnnnnnnnnnnnnnnnnnnnnnnnnnnnnnnnnnnnnnnnnnnnnnnnnnnnnnnnnnnnnnnnnnnnnnnnnnnnnnnnnnnnnnnnnnnnnnnnnnnnnnnnnnnnnnnnnnnnnnnnnnnnnnnnnnnnnnnnnnnnnnnnnnnnnnnnnnnnnnnnnnnnnnnnnnnnnnnnnnnnnnnnnnnnnnnnnnnnnnnnnnnnnnnnnnnnnnnnnnnnnnnnnnnnnnnnnnnnnnnnnnnnnnnnnnnnnnnnnnnnnnnnnnnnnnnnnnnnnnnnnnnnnnnnnnnnnnnnnnnnnnnnnnnnnnnnnnnnnnnnnnnnnnnnnnnnnnnnnnnnnnnnnnnnnnnnnnnnnnnnnnnnnnnnnnnnnnnnnnnnnnnnnnnnnnnnnnnnnnnnnnnnnnnnnnnnnnnnnnnnnnnnnnnnnnnnnnnnnnnnnnnnnnnnnnnnnnnnnnnnnnnnnnnnnnnnnnnnnnnnnnnnnnnnnnnnnnnnnnnnnnnnnnnnnnnnnnnnnnnnnnnnnnnnnnnnnnnnnnnnnnnnnnnnnnnnnnnnnnnnnnnnnnnnnnnnnnnnnnnnnnnnnnnnnnnnnnnnnnnnnnnnnnnnnnnnnnnnnnnnnnnnnnnnnnnnnnnnnnnnnnnnnnnnnnnnnnnnnnnnnnnnnnnnnnnnnnnnnnnnnnnnnnnnnnnnnnnnnnnnnnnnnnnnnnnnnnnnnnnnnnnnnnnnnnnnnnnnnnnnnnnnnnnnnnnnnnnnnnnnnnnnnnnnnnnnnnnnnnnnnnnnnnnnnnnnnnnnnnnnnnnnnnnnnnnnnnnnnnnnnnnnnnnnnnnnnnnnnnnnnnnnnnnnnnnnnnnnnnnnnnnnnnnnnnnnnnnnnnnnnnnnnnnnnnnnnnnnnnnnnnnnnnnnnnnnnnnnnnnnnnnnnnnnnnnnnnnnnnnnnnnnnnnnnnnnnnnnnnnnnnnnnnnnnnnnnnnnnnnnnnnnnnnnnnnnnnnnnnnnnnnnnnnnnnnnnnnnnnnnnnnnnnnnnnnnnnnnnnnnnnnnnnnnnnnnnnnnnnnnnnnnnnnnnnnnnnnnnnnnnnnnnnnnnnnnnnnnnnnnnnnnnnnnnnnnnnnnnnnnnnnnnnnnnnnnnnnnnnnnnnnnnnnnnnnnnnnnnnnnnnnnnnnnnnnnnnnnnnnnnnnnnnnnnnnnnnnnnnnnnnnnnnnnnnnnnnnnnnnnnnnnnnnnnnnnnnnnnnnnnnnnnnnnnnnnnnnnnnnnnnnnnnnnnnnnnnnnnnnnnnnnnnnnnnnnnnnnnnnnnnnnnnnnnnnnnnnnnnnnnnnnnnnnnnnnnnnnnnnnnnnnnnnnnnnnnnnnnnnnnnnnnnnnnnnnnnnnnnnnnnnnnnnnnnnnnnnnnnnnnnnnnnnnnnnnnnnnnnnnnnnnnnnnnnnnnnnnnnnnnnnnnnnnnnnnnnnnnnnnnnnnnnnnnnnnnnnnnnnnnnnnnnnnnnnnnnnnnnnnnnnnnnnnnnnnnnnnnnnnnnnnnnnnnnnnnnnnnnnnnnnnnnnnnnnnnnnnnnnnnnnnnnnnnnnnnnnnnnnnnnnnnnnnnnnnnnnnnnnnnnnnnnnnnnnnnnnnnnnnnnnnnnnnnnnnnnnnnnnnnnnnnnnnnnnnnnnnnnnnnnnnnnnnnnnnnnnnnnnnnnnnnnnnnnnnnnnnnnnnnnnnnnnnnnnnnnnnnnnnnnnnnnnnnnnnnnnnnnnnnnnnnnnnnnnnnnnnnnnnnnnnnnnnnnnnnnnnnnnnnnnnnnnnnnnnnnnnnnnnnnnnnnnnnnnnnnnnnnnnnnnnnnnnnnnnnnnnnnnnnnnnnnnnnnnnnnnnnnnnnnnnnnnnnnnnnnnnnnnnnnnnnnnnnnnnnnnnnnnnnnnnnnnnnnnnnnnnnnnnnnnnnnnnnnnnnnnnnnnnnnnnnnnnnnnnnnnnnnnnnnnnnnnnnnnnnnnnnnnnnnnnnnnnnnnnnnnnnnnnnnnnnnnnnnnnnnnnnnnnnnnnnnnnnnnnnnnnnnnnnnnnnnnnnnnnnnnnnnnnnnnnnnnnnnnnnnnnnnnnnnnnnnnnnnnnnnnnnnnnnnnnnnnnnnnnnnnnnnnnnnnnnnnnnnnnnnnnnnnnnnnnnnnnnnnnnnnnnnnnnnnnnnnnnnnnnnnnnnnnnnnnnnnnnnnnnnnnnnnnnnnnnnnnnnnnnnnnnnnnnnnnnnnnnnnnnnnnnnnnnnnnnnnnnnnnnnnnnnnnnnnnnnnnnnnnnnnnnnnnnnnnnnnnnnnnnnnnnnnnnnnnnnnnnnnnnnnnnnnnnnnnnnnnnnnnnnnnnnnnnnnnnnnnnnnnnnnnnnnnnnnnnnnnnnnnnnnnnnnnnnnnnnnnnnnnnnnnnnnnnnnnnnnnnnnnnnnnnnnnnnnnnnnnnnnnnnnnnnnnnnnnnnnnnnnnnnnnnnnnnnnnnnnnnnnnnnnnnnnnnnnnnnnnnnnnnnnnnnnnnnnnnnnnnnnnnnnnnnnnnnnnnnnnnnnnnnnnnnnnnnnnnnnnnnnnnnnnnnnnnnnnnnnnnnnnnnnnnnnnnnnnnnnnnnnncggtgaccccacccagcgatccaagcatccccatacccacactgccttctgtaactgcagcaaagctttcacctcctgtctcctctgggggaatcccacatcagagcccccctactaaggtgacagagtggatcacaaggcaggaggagtcacgggctcagtctactccatctccagctcttcccccagacacaaaggcctctgacgtcgacaccagctccagcaccctgaggaagattctcatggaccccaagtatgtgtctgcaacaggtgtcacttccactaagtgtcaccacggccattgcagagcctgtcagtgctgcccctagcctacatgaggccccgccccctccagttgaatctaaaaagcctttagaagnnnnnnnnnnnnnnnnnnnnnnnnnnnnnnnnnnnnnnnnnnnnnnnnnnnnnnnnnnnnnnnnnnnnnnnnnnnnnnnnnnnnnnnnnnnnnnnnnnnnnnnnnnnnnnnnnnnnnnnnnnnnnnnnnnnnnnnnnnnnnnnnnnnnnnnnnnnnnnnnnnnnnnnnnnnnnnnnnnnnnnnnnnnnnnnnnnnnnnnnnnnnnnnnnnnnnnnnnnnnnnnnnnnnnnnnnnnnnnnnnnnnnnnnnnnnnnnnnnnnnnnnnnnnnnnnnnnnnnnnnnnnnnnnnnnnnnnnnnnnnnnnnnnnnnnnnnnnnnnnnnnnnnnnnnnnnnnnnnnnnnnnnnnnnnnnnnnnnnnnnnnnnnnnnnnnnnnnnnnnnnnnnnnnnnnnnnnnnnnnnnnnnnnnnnnnnnnnnnnnnnnnnnnnnnnnnnnnnnnnnnnnnnnnnnnnnnnnnnnnnnnnnnnnnnnnnnnnnnnnnnnnnnnnnnnnnnnnnnnnnnnnnnnnnnnnnnnnnnnnnnnnnnnnnnnnnnnnnnnnnnnnnnnnnnnnnnnnnnnnnnnnnnnnnnnnnnnnnnnnnnnnnnnnnnnnnnnnnnnnnnnnnnnnnnnnnnnnnnnnnnnnnnnnnnnnnnnnnnnnnnnnnnnnnnnnnnnnnnnnnnnnnnnnnnnnnnnnnnnnnnnnnnnnnnnnnnnnnnnnnnnnnnnnnnnnnnnnnnnnnnnnnnnnnnnnnnnnnnnnnnnnnnnnnnnnnnnnnnnnnnnnnnnnnnnnnnnnnnnnnnnnnnnnnnnnnnnnnnnnnnnnnnnnnnnnnnnnnnnnnnnnnnnnnnnnnnnnnnnnnnnnnnnnnnnnnnnnnnnnnnnnnnnnnnnnnnnnnnnnnnnnnnnnnnnnnnnnnnnnnnnnnnnnnnnnnnnnnnnnnnnnnnnnnnnnnnnnnnnnnnnnnnnnnnnnnnnnnnnnnnnnnnnnnnnnnnnnnnnnnnnnnnnnnnnnnnnnnnnnnnnnnnnnnnnnnnnnnnnnnnnnnnnnnnnnnnnnnnnnnnnnnnnnnnnnnnnnnnnnnnnnnnnnnnnnnnnnnnnnnnnnnnnnnnnnnnnnnnnnnnnnnnnnnnnnnnnnnnnnnnnnnnnnnnnnnnnnnnnnnnnnnnnnnnnnnnnnnnnnnnnnnnnnnnnnnnnnnnnnnnnnnnnnnnnnnnnnnnnnnnnnnnnnnnnnnnnnnnnnnnnnnnnnnnnnnnnnnnnnnnnnnnnnnnnnnnnnnnnnnnnnnnnnnnnnnnnnnnnnnnnnnnnnnnnnnnnnnnnnnnnnnnnnnnnnnnnnnnnnnnnnnnnnnnnnnnnnnnnnnnnnnnnnnnnnnnnnnnnnnnnnnnnnnnnnnnnnnnnnnnnnnnnnnnnnnnnnnnnnnnnnnnnnnnnnnnnnnnnnnnnnnnnnnnnnnnnnnnnnnnnnnnnnnnnnnnnnnnnnnnnnnnnnnnnnnnnnnnnnnnnnnnnnnnnnnnnnnnnnnnnnnnnnnnnnnnnnnnnnnnnnnnnnnnnnnnnnnnnnnnnnnnnnnnnnnnnnnnnnnnnnnnnnnnnnnnnnnnnnnnnnnnnnnnnnnnnnnnnnnnnnnnnnnnnnnnnnnnnnnnnnnnnnnnnnnnnnnnnnnnnnnnnnnnnnnnnnnnnnnnnnnnnnnnnnnnnnnnnnnnnnnnnnnnnnnnnnnnnnnnnnnnnnnnnnnnnnnnnnnnnnnnnnnnnnnnnnnnnnnnnnnnnnnnnnnnnnnnnnnnnnnnnnnnnnnnnnnnnnnnnnnnnnnnnnnnnnnnnnnnnnnnnnnnnnnnnnnnnnnnnnnnnnnnnnnnnnnnnnnnnnnnnnnnnnnnnnnnnnnnnnnnnnnnnnnnnnnnnnnnnnnnnnnnnnnnnnnnnnnnnnnnnnnnnnnnnnnnnnnnnnnnnnnnnnnnnnnnnnnnnnnnnnnnnnnnnnnnnnnnnnnnnnnnnnnnnnnnnnnnnnnnnnnnnnnnnnnnnnnnnnnnnnnnnnnnnnnnnnnnnnnnnnnnnnnnnnnnnnnnnnnnnnnnnnnnnnnnnnnnnnnnnnnnnnnnnnnnnnnnnnnnnnnnnnnnnnnnnnnnnnnnnnnnnnnnnnnnnnnnnnnnnnnnnnnnnnnnnnnnnnnnnnnnnnnnnnnnnnnnnnnnnnnnnnnnnnnnnnnnnnnnnnnnnnnnnnnnnnnnnnnnnnnnnnnnnnnnnnnnnnnnnnnnnnnnnnnnnnnnnnnnnnnnnnnnnnnnnnnnnnnnnnnnnnnnnnnnnnnnnnnnnnnnnnnnnnnnnnnnnnnnnnnnnnnnnnnnnnnnnnnnnnnnnnnnnnnnnnnnnnnnnnnnnnnnnnnnnnnnnnnnnnnnnnnnnnnnnnnnnnnnnnnnnnnnnnnnnnnnnnnnnnnnnnnnnnnnnnnnnnnnnnnnnnnnnnnnnnnnnnnnnnnnnnnnnnnnnnnnnnnnnnnnnnnnnnnnnnnnnnnnnnnnnnnnnnnnnnnnnnnnnnnnnnnnnnnnnnnnnnnnnnnnnnnnnnnnnnnnnnnnnnnnnnnnnnnnnnnnnnnnnnnnnnnnnnnnnnnnnnnnnnnnnnnnnnnnnnnnnnnnnnnnnnnnnnnnnnnnnnnnnnnnnnnnnnnnnnnnnnnnnnnnnnnnnnnnnnnnnnnnnnnnnnnnnnnnnnnnnnnnnnnnnnnnnnnnnnnnnnnnnnnnnnnnnnnnnnnnnnnnnnnnnnnnnnnnnnnnnnnnnnnnnnnnnnnnnnnnnnnnnnnnnnnnnnnnnnnnnnnnnnnnnnnnnnnnnnnnnnnnnnnnnnnnnnnnnnnnnnnnnnnnnnnnnnnnnnnnnnnnnnnnnnnnnnnnnnnnnnnnnnnnnnnnnnnnnnnnnnnnnnnnnnnnnnnnnnnnnnnnnnnnnnnnnnnnnnnnnnnnnnnnnnnnnnnnnnnnnnnnnnnnnngtggagacagattactgtctgctgctggctctgccctgtggccgcgaccaagaggatgttgtgagccagaccgagtccctcaaggctgccttcatcacttacctgcaggctaagcaggcggcagggatcatcaacgttcccaaccctggctccaatcag

SEQ ID NO: 22426 - DNA, 264 bp, Macaca Mulatta
gtacgtgggcatgaagtaagaaagctccagaattctgctgaggccacaaggatttccagaactggcagtagttaagaattttgcagaattgaagagtcacacctctaaatttgtgtagattgtgaaatctcttcttgcaagaaaaaaagagaaatagcgggagttatggaaataacagttgatgaaaacttggtagtctgaagtctgaactttgaacactggcagacaggctgagaattctcattgatcgtgagcccaagttcc

SEQ ID NO: 22427 - DNA, 799 bp, Macaca Mulatta
  misc_feature (1)...(799): n = A,T,C or G
gggggctgctggatgaattaacggcgggttccgctcggaggttgtgacccttacggagtcccagcttgcccacgcaccccactcggcgtcgcgtggcgtgccctgcttgtcacagaatcatggcgtcatggaaagggatctactttatactgactctgttttggggaagcttttttggaagcattttcatgctgggtccctttttacctttgatgtttgtaaacccgtcttggtatcgctggatcaacaaccgccttgtggcaacatggctcaccctacctgtggcattattggagaccatgtttggtgtaaaagtgattataactggtgatgcatttgttcctggagaaagaagtgtcattataatgaaccatcggacaagaatggactggatgttcctgtggaattgtctgatgagatatagctacctcagattggagaaaatttgcctcaaagccagtctcaaaagtgttcctggatttgatggagtttggctctgttgcccaggctgaagtgcagtggtgcgatcttggctcactcaaacctccacctacctggttcaagcgattcttctgccacagcannnnnnnnnnnnnnnnnnnnnnacacgcnnnnnnnnnnnnnnnnnnnnnnngtgnnnnnnnnnnnnnnnnnngtttcaccgtttttggccaggatctcttgatgttgtgatctcctgcctcggcctcccaaaagtgttggggataacagggtgtgaacccactgcgcaacccggcccnnnnnnnnnnnnnnnnnnnnnnnnnnnagaatcctccct

SEQ ID NO: 22428 - DNA, 1175 bp, Macaca Mulatta
  misc_feature (1)...(1175): n = A,T,C or G
catttatggatgtggccatagaattctctgtgagggagtggcaatgcctggacactgcacagcagaattattataggaacgtgatgttagagaactacagaaacctggtcttcctgggtnnnnnnnnnnnnnnnnnnnnnnnnnnnnnnnnnnnnnnnnnnnnnnnnnnnnnnnnnnnnnnnnnnnnnnnnnnnnnnnnnnnnnnnnnnnnnnnnnnnnnnnnnnnnnnnnnnnnnnnnnnnnnnnnnnnnnnnnnnnnnnnnnnnnnnnnnnnnnnnnnnnnnnnnnnnnnnnnnnnnnnntaaaagtgtggatgagtataaggtgcacaaaggaagttatagatggatttaaccagtgtttgtcaactacccagagcaaaatatttcaatgtgataaatatgtgagagactttcataaattttcaaattcaaatagacataagactgaaaagaatcctttcaaatgtaaagaatgtggcaaatcattttgcgttctttcacacctaactcaacataaaagaattcacactactgtcagttcctacaaacttgaagaatgtagcaaggcttttaatgtgtcctcaacgctttctcaacataaaagaattcatacaagacagaaacactacaaatgtgaagaatgtggcatagcctttaacaagtcctcacaccttaacacacataagataattcatactagagagaaatcctacaaacgtgaagaatgtggcaaagcttttaacatatcctcacaccttactaaacataagataattcatactggagagaatgcctacaaatgtaaagaatgtggcaaagcttttaaccagtcatcaacccttactagacataagataattcatgctggagagaagccctacatatgtgaacattgtggcagagcttttaaccaatcctcgaaccttactaaacataagagaattcctactggtgataaacctttataaatgtgaagaatgtggcaaagcctttaatgtgtcctctacccttactcaacataagagaattcatactggggagaaaccttacaaatgtgaagagtgaggcaaagccctttaacgtggcctcaacttcttactccaacctaagagaattcatactggaaaaaaaccaaaacaatgtgaagaaggtggcaaagccttaaactcatcc

SEQ ID NO: 22429 - DNA, 119 bp, Macaca Mulatta
cagtatttgttcaagcaaacaagttgcagcagcatattttctctgcccatggacaagaagacaagatctatgactgtacacaatgtccacagaagtttttcttccaaacagagctgcag

SEQ ID NO: 22430 - DNA, 80 bp, Macaca Mulatta
ggtgacgccgagagccagagagatgtcggatttcgatagtaacccgtttgccgacccggatctcaacaatcccttcaagg

SEQ ID NO: 22431 - DNA, 4721 bp, Macaca Mulatta
  misc_feature (1)...(4721): n = A,T,C or G
cgcggacccacggggttgccaggatcgcgccggatgcagagcgcggtgctgccggtggagcttcagnnnnnnnnnnnnnnnnnnnnnnnnnnnnnnnnnnnnnnnnnnnnnnnnnnnnnnnnnnnnnnnnnnnnnnnnnnnnnnagctcaacagaggcagaaggatccaaagaaagaggcctggtccatatctggcaggcaggatcctttcccataacaccagagagattgccaggctggggaggaaagactgttttgcaggcagccctcggagtgaaacatggagttcttctgactgaangatggtgaggtctacagctttgggacccttccctggagaagtggaccagcagagatttgtccaagtagccccattctagaaaatgccctggttgggcaatatgttgttactgtggcaacaggaagcttccatagtggagcagtgacagacaatggtgtcgcatacatgtggggagagaattctgctggccagtgtgcagtagccaaccagcagtatgtgccggaaccgaaccctgtcagcattgctgattctgaggccagccctttgttagcagtcaggattttacagttggcatgtggcgaggaacacactctggcattgtcaataagcagagagatttgggcatggggtaccggttgtcagttgggtctcattaccactgccttcccagtgacaaagccgcaaaaggtagaacatcttgctgggcgagtggtgcttcaagttgcctgtggtgctttccacagcttagcccttgtacaatgcctcccttcccaagatctgaagccagtcccagaacgatgcaaccagtgcagccagctcttgattactatgactgacaaagaagaccatgtgattatatcagacagtcattgttgcccattaggtgtgacactgacagaatctcaggcagaaaaccatcccagcactgctctcagcccctccactgaaacccttgacaggcaggaagaagtatttgagaacactcttgtagccagtgatcagtctgttgctactgaactgaatgcagtcagtgctcagaccacaagcagcgatgccgtatcctctcaacaaaacgtcatgnnnnnnnnnnnnnnnnnnnnnnnnnnnnnnnnnnnnnnnnnnnnnnnnnnnnnnnnnnnnnnnnnnnnnnnnnnnnnnnnnnnnnnnnnnnnnnnnnnnnnnnnnnnnnnnnnnnnnnnnnnnnnnnnnnnnnnnnnnnnnnnnnnnnnnnnnnnnnnnnnnnnnnnnnnnnnnnnnnnnnnnnnnnnnnnnnnnnnnnnnnnnnnnnnnnnnnnnnnnnnnnnnnnnnnnnnnnnnnnnnnnnnnnnnnnnnnnnnnnnnnnnnnnnnnnnnnnnnnnnnnnnnnnnnnnnnnnnnnnnnnnnnnnnnnnnnnnnnnnnnnnnnnnnnnnnnnnnnnnnnnnnnnnnnnnnnnnnnnnnnnnnnnnnnnnnnnnnnnnnnnnnnnnnnnnnnnnnnnnnnnnnnnnnnnnnnnnnnnnnnnnnnnnnnnnnnnnnnnnnnnnnnnnnnnnnnnnnnnnnnnnnnnnnnnnnnnnnnnnnnnnnnnnnnnnnnnnnnnnnnnnnnnnnnnnnnnnnnnnnnnnnnnnnnnnnnnnnnnnnnnnnnnnnnnnnnnnnnnnnnnnnnnnnnnnnnnnnnnnnnnnnnnnnnnnnnnnnnnnnnnnnnnnnnnnnnnnnnnnnnnnnnnnnnnnnnnnnnnnnnnnnnnnnnnnnnnnnnnnnnnnnnnnnnnnnnnnnnnnnnnnnnnnnnnnnnnnnnnnnnnnnnnnnnnnnnnnnnnnnnnnnnnnnnnnnnnnnnnnnnnnnnnnnnnnnnnnnnnnnnnnnnnnnnnnnnnnnnnnnnnnnnnnnnnnnnnnnnnnnnnnnnnnnnnnnnnnnnnnnnnnnnnnnnnnnnnnnnnnnnnnnnnnnnnnnnnnnnnnnnnnnnnnnnnnnnnnnnnnnnnnnnnnnnnnnnnnnnnnnnnnnnnnnnnnnnnnnnnnnnnnnnnnnnnnnnnnnnnnnnnnnnnnnnnnnnnnnnnnnnnnnnnnnnnnnnnnnnnnnnnnnnnnnnnnnnnnnnnnnnnnnnnnnnnnnnnnnnnnnnagcttggatatataagcagagtgacagcaggaaaagatagctatctagccttggtggataaaaacattatggggtatattgccagtctccacgagttagctactacagaaagacgattctattcaaaactaagtgatatcaaatctcagattctcaggcctcttctcagtttannnnnnnnnnnnnnnnnnnnnnnnnnnnnnnnnnnnnnnnnnnnnnnnnnnnnnnnnnnnnnnnnnnnnnnnnnnnnnnnnnnnnnnnnnnnnnnnnnnnnnnnnnnnnnnnnnnnnnnnnnnnnnnnnnnnnnnnnnnnnnnnnnnnnnnnnnnnnnnnnnnnnnnnnnnnnnnnnnnnnnnnnnnnnnnnnnnnnnnnnnnnnnnnnnnnnnnnnnnnnnnnnnnnnnnnnnnnnnnnnnnnnnnnnnnnnnnnnnnnnnnnngatttcctaaataaaaaccaagagctgttgcaagatttatcagaagtgaatgatgaaaacactcagttgatggaaatactgaatactttgtttttcttgccaatcagacgacttcataattatgcaaaagttttgctaaagcttgctacttgttttgaagtggnnnnnnnnnnnnnnnnnnnnnnnnnnnnnnnnnnnnnnnnnnnnnnnnnnnnnnnnnnnnnnnnnnnnnnnnnnnnnnnnnnnnnnnnnnnnnnnnnnnnnnnnnnnnnnnnnnnnnnnnnnnnnnnnnnnnnnnnnnnnnnnnnnnnnnnnnnnnnnnnnnnnnnnnnnnnnnnnnnnnnnnnnnnnnnnnnnnnnnnnnnnnnnnnnnnnnnnnnnnnnnnnnnnnnnnnnnnnnnnnnnnnnnnnnnnnnnnnnnnnnnnnnnnnnnnnnnnnnnnnnnnnnnnnnnnnnnnnnnnnnnnnnnnnnnnnnnnnnnnnnnnnnnnnnnnnnnnnnnnnnnnnnnnnnnnnnnnnnnnnnnnnnnnnnnnnnnnnnnnnnnnnnnnnnnnnnnnnnnnnnnnnnnnnnnnnnnnnnnnnnnnnnnnnnnnnnnnnnnnnnnnnnnnnnnnnnnnnnnnnnnnnnnnnnnnnnnnnnnnnnnnnnnnnnnnnnnnnnnnnnnnnnnnnnnnnnnnnnnnnnnnnnnnnnnnnnnnnnnnnnnnnnnnnnnnnnnnnnnnnnnnnnnnnnnnnnnnnnnnnnnnnnnnnnnnnnnnnnnnnnnnnnnnnnnnnnnnnnnnnnnnnnnnnnnnnnnnnnnnnnnnnnnnnnnnnnnnnnnnnnnnnnnggtatggagaatacagaatcccaaacaagacaattaacaaagaagaccattatgtgggccattggaaagaaggaaaaatgtgcggtcaaggagtctacannnnnnnnnnnnnnnnnnnnnnnnnnnnnnnnnnnnnnnnnnnnnnnnnnnnnnnnnnnnnnnnnnnnnnnnnnnnnnnnnnnnnnnnnnnnnnnnnnnnnnnnnnnnnnnnnnnnnnnnnnnnnnnnnnnnnnnnnnnnnnnnnnnnnnnnnnnnnnnnnnnnnnnnnnnnnnnnnnnnnnnnnnnnnnnnnnnnnnnnnnnnnnnnnnnnnnnnnnnnnnnnnnnnnnnnnnnnnnnnnnnnnnnnnnnnnnnnnnnnnnnnnnnnnnnnnnnnnnnnnnnnnnnnnnnnnnnnnnnnnnnnnnnnnnnnnnnnnnnnnnnnnnnnnnnnnnnnnnnnnnnnnnnnnnnnngggaacactgactatgccaaatggagactacattgaaggttattttagtggagaatggggatctgggataaaaatcactggaacctacttcaaacctagtctgtatgagagtgataaagacagacctaaagttttnnnnnnnnnnnnnnnnnnnnnnnnnnnnnnnnnnnnnnnnnnnnnnnnnnnnnnnnnnnnnnnnnnnnnnnnnnnnnnnnnnnnnnnnnnnnnnnnnnnnnnnnnnnnnnnnnnnnnnnnnnnnnnnnnnnnnnnnnnnnnnnnnnnnnnnnnnnnnnnnnnnnnnnnnnnnnnnnnnnnnnnnnnnnnnnnnnnnnnnnnnnnnnnnnnnnnnnnnnnnnnnnnnnnnnnnnnnnnnnnnnnnnnnnnnnnnnnnnnnnnnnnnnnnnnnnnnnnnnnnnnnnnnnnnnnnnnnnnnnnnnnnnnnnnnnnnnnnnnnnnnnnnnnnnnnnnnnnnnnnnnnnnnnnnnnnnnnnnnnnnnnnnnnnnnnnnnnnnnnnnnnnnnnnnnnnnnnnnnnnnnnnnnnnnnnnnnnnnnnnnnnnnnnnnnnnnnnnnnnnnnnnnnnnnnnnnnnnnnnnnnnnnnnnnnnnnnnnnnnnnnnnnnnnnnnnnnnnnnnnnnnnnnnnnnnnnnnnnnnnnnnnnnnnnnnnnnnnnnnnnnnnnnnnnnnnnnnnnnnnnnnnnngttatgtagtaacgagttctggattattgcttcctgtgctgctacctcggctttacccaccgctgtttatgctttatgctttggataatgatcgcgaggaagacatttactgggaatgtgtccttcgactaaataagcagccagatattgctctcctgggctttcttggggtgcagag

SEQ ID NO: 22432 - DNA, 628 bp, Macaca Mulatta
caagctctgccctggctgtgggtatcaggactgtgaccaaagcatttctagtcccttctctctctctaaggacccaaatttccctgggggcatcctgctttctgaaagccgttggatttcagtgatttttttcccctcaccccccagcatagtagagcacccacagcctcagaaggggaaggtgtcctgctctctttcctcagggcccagcaggcgggacttgagtcctggaccccaggctcttagagactaaggggcagctcctgaccaaagacgatacagcttggcactttaaagcattcacagcaggtgtggccctgagggctcctccatggtgctgcattgaatccagctttccttctgcccttcctccaggagaaggggcccaaggtccccgtggatggtctccacctgtgcttggaaccagtgtaactggctgctccccgctcccagggactgactgcggggatcatctctgaccgccctccgtcgggcccctccctgccttctcccctgcacgcaaggctgtgctcttcctctgctctctgtgtgtccctttgagtgtctctgccccgcctccccatacttcctgggatgatgtgtgaaacctgacacctagatttatttg

SEQ ID NO: 22433 - DNA, 2070 bp, Macaca Mulatta
  misc_feature (1)...(2070): n = A,T,C or G
acagtcgcctacagaaggagattgtggaagtggcagaaaagctttcagattcagagaggctggccctgaagctgcagaaggacctggagtttgtgctgaaggacaaggcnnnnnnnnnnnnnnnnnnnnnnnnnnnnnnnnnnnnnnnnnnnnnnnnnnnnnnnnnnnnnnnnnnnnnnnnnnnnnnnnnnnnnnnnnnnnnnnnnnnnnnnnnnnnnnnnnnnnnnnnnnnnnnnnnnnnnnnnnnnnnnnnnnnnnnnnnnnnnnnnnnnnnnnnnnnnnnnnnnnnnnnnnnnnnnnnnnnnnnnnnnnnnnnnnnnnnnnnnnnnnnnnnnnnnnnnnnnnnnnnnnnnnnnnnnnnnnnnnnnnnnnnnnnnnnnnnnnnnnnnnnnnnnnnnnnnnnnnnnnnnnnnnnnnnnnnnnnnnnnnnnnnnnnnnnnnnnnnnnnnnnnnnnnnnnnnnnnnnnnnnnnnnnnnnnnnnnnnnnnnnnnnnnnnnnnnnnnnnnnnnnnnnnnnnnnnnnnnnnnnnnnnnnnnnnnnnnnnnnnnnnnnnnnnnnnnnnnnnnnnnnnnnnnnnnnnnnnnnnnnnnnnnnnnnnnnnnnnnnnnnnnnnnnnnnnnnnnnnnnnnnnnnnnnnnnnnnnnnnnnnnnnnnnnnnnnnnnnnnnnnnnnnnnnnnnnnnnnnnnnnnnnnnnnnnnnnnnnnnnnnnnnnnnnnnnnnnnnnnnnnnnnnnnnnnnnnnnnnnnnnnnnnnnnnnnnnnnnnnnnnnnnnnnnnnnnnnnnnnnnnnnnnnnnnnnnnnnnnnnnnnnnnnnnnnnnnnnnnnnnnnnnnnnnnnnnnnnnnnnnnnnnnnnnnnnnnnnnnnnnnnnnnnnnnnnnnnnnnnnnnnnnnnnnnnnnnnnnnnnnnnnnnnnnnnnnnnnnnnnnnnnnnnnnnnnnnnnnnnnnnnnnnnnnnnnnnnnnnnnnnnnnnnnnnnnnnnnnnnnnnnnnnnnnnnnnnnnnnnnnnnnnnnnnnnnnnnnnnnnnnnnnnnnnnnnnnnnnncagagtgaccaaatccaaaaacttaaagttgaacttgaatgcctgaatcaggaatatcagagcctgcaactgtcacagtcagagctgactcagacccttgaagaaagtcaaggccaggtnnnnnnnnnnnnnnnnnnnnnnnnnnnnnnnnnnnnnnnnnnnnnnnnnnnnnnnnnnnnnnnnnnnnnnnnnnnnnnnnnnnnnnnnnnnnnnnnnnnnnnnnnnnnnnnnnnnnnnnnnnnnnnnnnnnnnnnnnnnnnnnnnnnnnnnnnnnnnnnnnnnnnnnnnnnnnnnnnnnnnnnnnnnnnnnnnnnnnnnnnnnnnnnnnnnnnnnnnnnnnnnnnnnnnnnnnnnnnnnnnnnnnnnnnnnnnnnnagtttgaaaagaacacgaagtccgacctgctgctgaaggagctgtacgtggagaatgcccacctggtgagagcacttcaggccaccgaggagaagcagcgaggcgcggagaaacaaagccgcatcttggaagaaaaagttcgcgctctcaacaaactcgtcggtaggattgcccccgcagccctctccgtgtaaagacggattgttttccaggattcattcggaagcacatcttttaaattaagccactgtgatgccttagttttccatgggtcatgagccatgagtcctgggacatctgaggattgggattctttgttcaccccccagacagttaatgccctgccctgggcaagatcggggtcgggggctgggggaatatgcatgttgaaaaagcctgcgtttttattagcggtcctgagtaattttccttggcaaaattccccgttttgccacttgttggaggcagattctgggagctgtcagcaaggagcagctaagtgagcagttaaggacggcactttccatgtggcacttctgacccggctgtcagattgaaatgtaaaatcagggctctgtacagttttgccatttcactgttctgctttgagcttaggttattagaacgcgttggtggcgggtgtgtacac

SEQ ID NO: 22434 - DNA, 320 bp, Macaca Mulatta
aagtcaataagcatgaactcaagacctccctgcacccagctcagggccaagcatcacaggacacaaacaaaaggagccagcctgggaacacagttgtgagtccataggtggaggggcccctgtgcaagactccagcacaggctaagggaagggacagcaaaggagggggagcaaagctgaaaagaggtggctggagagggatagaaaagcaggacactagtgggtaccagacagtgggggaaggagcccaacaagcataaggaacttggctgtgaagtcatgttagtcaggatgccatgaccttccatgagcccgaaaga

SEQ ID NO: 22435 - DNA, 220 bp, Macaca Mulatta
gggagtcagcccgtgggaactaggaattcttcagggggtgctgtgcaccatggggccctcagaccaatccctttacattgagcctgtctctgcgtgggtagtggtgaaggcgtgccaggccctggggagccctccccctgccacctcagtatggggctgtgtcccatgctggtgtgtggtgggctctttcgggaaggctgcgtgtgtggtgggcctgccc

SEQ ID NO: 22436 - DNA, 946 bp, Macaca Mulatta
tgcgggcggtgctacgccgtagttggcacctcggagcgcagaggagccccgacgccgccatggagtccgagaccgaacccgaacccgtcacgctcctggtgaagagccccaaccagcgccaccgcgacttggagctgagtggagaccgcagctggagcgtgggccacctcaaggcccacctgagccgcgtctaccccgagcgtccgcgtccagaggaccagaggttaatttattccgggaagctgctgttggatcaccaatgtctcagggacttgcttccaaagcaggaaaaacggcatgttttgcatctggtgtgcaatgtgaagagtccttcaaaaatgccagaagtcagtgccaaggtggctgaatccacagagcagcccgctggttctaatcggggacagtatcctgaggattcctcaagtgatggtttaaggcaaagggaagttcttcggaacctttcttcccctgaatgggagaacatctcaaggcctgaagctgcccagcaggcattccaaggcctgggtcctggtttctccggttacacaccctatgggtggcttcagctttcctggttccagcagatatatgcacgacagtactacatgcaatatttagcagccactgctgcatcgggggcttttgttccaccaccaagtgcacaagagatacctgtggtctctgcacctgctccagcccctattcacaaccagtttccagctgaaaaccagccagccaatcagaatgctgctcctcaagtggttgttaatcctggagccaatcaaaatttgcggatgaatgcacaaggtggccctattgtggaagaagatgatgaaataaatcgagattggttggattggacctattcagcagctacattttctgtttttctcagtatcctctacttctactcctccctgagcagattcctcatggtcatgggggc

SEQ ID NO: 22437 - DNA, 811 bp, Macaca Mulatta
ggctgccaggatattgcagatgaattcagagcacaggagattgatggacaggcccttctcttgctaaaagaagaccatctcatgagtgcaatgaatatcaagctaggcccagccctgaagatctgtgcacgcatcaactctctgaaggaatcttaacaggaacatgaaaccttgataaaacagcagttttactcttctcatacaaacttgtaaggtaaaggcctaacttggtctagaatatgacacttactgtagtggatagccaaccacattgggatttccacatcagatactgacatttcttctacaggtgtaattattcatcatacattttcataattaacaaacattggtaaaattaattttacaggttacatgaaacattgaaagacttgttatagagggccatgatatttttcaaagaaatgtgttacactagataatttttttaaaggtgatgtttatcattaatataaagaatccttttaaaagtaatttaatgatttacatttctcctcttttgattcgattttcttatacatttttttctaccctattagttttctaaaggttgtcatgagaggtatgttatggaataatttagtagtccagtgacagaatcatatgaaatcagtgtacattttttaaaatatgtcttttagacatatgctttacctataaaaaaggaattgtgttctagtatgaacaatactgatctggaagtgagaagagttagttcctattccaagcttgaccaagaatttggtttgactgagaaagttttccactgagtttttgtacatttatttag

SEQ ID NO: 22438 - DNA, 225 bp, Macaca Mulatta
ggcagagacacaggaactttgcttagtaatgggcattaaatgaagagtagttaaagcaaacacattttgtgaaataaaatgaaaccccaatcctccaagattggcagtcgaggggaatcatttttctgctggaatttaatttttctaagggtctctcttcagttaatgctgccttcctgaggctgtctggctccagacctgtctggttgtggtctcagggagcgt

SEQ ID NO: 22439 - DNA, 687 bp, Macaca Mulatta
  misc_feature (1)...(687): n = A,T,C or G
aggtgctatgggcataaacaacagaggtgccatgccccctgctcctgtgccagctggtaccccagctcctccaggacctgccactatgatgccggatggaactttgggattnnnnnnnnnnnnnnnnnnnnnnnnnnnnnnnnnnnnnnnnnnnnnnnnnnnnnnnnnnnnnnnnnnnnnnnnnnnnnnnnnnnnnnnnnnnnnnnnnnnnnnnnnnnnnnnnnnnnnnnnnnnnnnnnnnnnnnnnnnnnnnnnnnnnnnnnnnnnnnnnnnnnnnnnnnnnnnnnnnnnnnnnnnnnnnnnnnnnnnnnnnnnnnnnnnnnnnnnnnnnnnnnnnnnnnnnnnnnnnnnnnnnnnnnnnnnnnnnnnnnnnnnnnnnnnnnnnnnnnnnnnnnnnnnnnnnnnnnnnnnnnnnnnnnnnnnnnnnnnnnnnnnnnnnnnnnnnnnnnnnnnnnnnnnnnnnnnnnnnnnnnnnnnnnnnnnnnnnnnnnnnnnnnnnnnnnnnnnnnnnnnnnnnnnnnnnnnnnnnnnnnnnnnnnnnnnnnnnnnnnnnnnnnnnnnnnnnnnnnnnnnnnnnnnnnnnnnnnnnnnnnnnnnnnnnnnnnnnnnnnnnnnnnnnnnnnnngcccaggctggagtgcaatggcatgatcttggctcactgcaactttgcctcctgggttcaag

SEQ ID NO: 22440 - DNA, 420 bp, Macaca Mulatta
  misc_feature (1)...(420): n = A,T,C or G
gcagagcctggagcgtctccaccatggcctgggctccactcctcctcaccctcctcgctcactgcacaggnnnnnnnnnnnnnnnnnnnnnactcagccccattctgtgtcggggtctccggggcagacggtcaccatctcctgcacccacagcagtggcagcattgacaacagctatgtgtactggtaccagcagcgcccgggcagcgcccccaccactgtgatctacaatgatgaccaaagaccctctggggtccctgatcggtcctctggctccatcgacagctcctccaactctgcctccctcaccatctctggactgaagtctgaggacgaggctgactattactgtcagtcttatgacagcagcggttatcacacagtgctccagcctcatggggaagtgagacaaaatctccc

SEQ ID NO: 22441 - DNA, 842 bp, Macaca Mulatta
  misc_feature (1)...(842): n = A,T,C or G
gggctgtgggcctgtcctgccaggcctgggggagttttccctgaatacagtcagggatcggggtgagatgggggtagaaatgccttttattctttgagttcacgtaagatacaagttttagacagggcttgaaggactggattggccaaacctcacatcagccatcagagctgtcttccaaggggagacatcccaaatcctggctacatcccagcctgtggttacagtgcagacagttaggccatgtgagccactgctgccagcacagcacgtcctccccctatagaccagtgccactcaccaccatgcccggctactttttgtatttttaagtagatacgatattcaccatgttggccgggcttgtttcaaactcctggcgtcaggtggtccacctnnnnnnnnnnnnnnnnnnntnnnnnnnnnnnnnnnnnnnnnnnnnnnnntggcctctcttttttatcagccacaaatccagtagcagcctgaggattcagctcataaaataggcctggtgtctttggtgatgtcacctaaccaagaatgccatccccgggggagaaccacattccccctggcatgcccctcccagaccttgggttttcgggctgggccgtccagcagccctggagtaccggcatctttgggactttcgtattgccccgtgcgccctggcatgcgcttcggtcccaggcccttcccacggccctttttccattagccccccgtggttccttgcaacccctcgtgttactgacgcacaccccttgggcaaacacacttgttgtgccgaccggataattgtaaacactgagtactcccctaagcaattgttgccattg

SEQ ID NO: 22442 - DNA, 433 bp, Macaca Mulatta
gctggccctgaaggaccctgttcatatggtgtcactgcagcagttcatctacgagaagctcaaggcacagcaggagatgctaggagaacaaggtttccagtccctcatggaaacggtggacacggagattgtcacccagctacaggaatttttgcaaggattctaagagcacatgacatgtggctgcctcgcctttcagaaacaagctgagtaacctagcctgccgtttgtatgtgagagcctgctgagatgaagaaatcacttcatgaaaataagcaaagaccacacattttttttactacaaaatgtaaaggataaatgtaaatcctgcataactaaaatcacaaacctattcctcaaaagaatttaattttatatttatgagggggccctttactaaaaagtacatgtaaaagtacatttgatgacaata

SEQ ID NO: 22443 - DNA, 498 bp, Macaca Mulatta
cctcccactggtgccgttgctgcgttctttcaatgctgactggactgtgtttttcctatgcagtgtcagctcctctgtctggttgtttacctgttcctgtttgtgcttgtaatgctcacttatgttttctctgtataacttgtgattccagggctgtttgtcaacagtgtacaaaagaattgtgcctctcccaagtccagtgtgactctatcttctgggtggtttaatagtgtttttaaaagtaatatataatgtggggtgaaatgggagtaggggggtggacaggggagaaatggaaaccacaaaaagaaaacccagctcctctccttctcccccctagctcagattaaatcccccacccccaactttacctccaccagtgtgcttgggatcttcaatgaactctgcttttcgctttctttctgcatgactattgtaacttagatagaacattaagagattttcaagatcaaactgccatagcttcatccactgaat

SEQ ID NO: 22444 - DNA, 812 bp, Macaca Mulatta
  misc_feature (1)...(812): n = A,T,C or G
cacagataccagcgtcctcagatgtctgcagattaacacctgcatgatcactactcttgcttttttgggaagagacactttgttgcaactctttttcaagtacttgaaagttgaaaatttaaaatcttggtattgatcatgctttaaggtttatgtaaagaaagtgtactgatgttcttacattaaagctttacaaagatttaaactaattatttttgtagttacttctaccaaatagcctttccttttcgataacattcctgagtatttttatagccaagtacattttattttcttgctgatgaactggaattggataaaatattgcaagtggatgagttggaaattatgcactttgaaaaacatttgctttgtttactctaagtttattgggtttgggacttgattaaattaaatgtggaggctttctatagcattctaagctgagacgtagattgttacccagtaatgaaatnnnnnnnnnnnnnnnnnnnnnnnnnnnctctattgtttacaacaatactcagcttaaatatttatgctggtcgaatgtgatttaaattggacattttcatcaatgcagtctaatgtgtagataaataattatttcaaccataataaatggattggcagtgtattttttacattgaacttttcttcacttgtatataaagattatatataagtacttatttatgaatataagaaaggttaggcatattttcattaactgaataaacttgatttatataacctggtttatcaaaatttaacatggcttcaatatgagatctttttcaaaactattttct

SEQ ID NO: 22445 - DNA, 119 bp, Macaca Mulatta
gctcctgggcaatgtgctggtgtgtatgctggcccacaactttgacaaggaattcatcctacaggtgcaggctgcctatcagaaggtggtggctggtgtggctaatgccctggctcaca

SEQ ID NO: 22446 - DNA, 122 bp, Macaca Mulatta
tcagaccacagtattataaaataattgaggaatgcgtttcacagatagtgctacactgcagtggtatggatccagacttcaagtacaggcaacgattagacattgatttcactcacctgata

SEQ ID NO: 22447 - DNA, 512 bp, Macaca Mulatta
  misc_feature (1)...(512): n = A,T,C or G
ggcatctctgggaagagccagatcctttttgctctcgtcttcaccaccagatacctggacctgttcaccaacttcatctccatctacaacacagtaatgaaggtnnnnnnnnnnnnnnnnnnnnnnnnnnnnnnnnnnnnnnnnnnnnnnnnnnnnnnnnnnnnnnnnnnnnnnnnnnnnnnnnnnnnnnnnnnnnnnnnnnnnnnnnnnnnnnnnnnnnnnnnnnnnnnnnnnnnnnnnnnnnnnnnnnnnnnnnnnnntcctctggactttctctatctacctggagtcagtggctattctgccccagctcttcatgatcagcaagactggagaggctgagaccattactactcactacctgttctttctgggtctgtaccgggcactctacctggctaactggatcaggcggtaccagactgagaatttctatgaccaaatcgcagtggtgtctggagtagtacaaaccatcttctactgtgacttcttctacttgtatgtgaccaaag

SEQ ID NO: 22448 - DNA, 268 bp, Macaca Mulatta
atcctcatggctttattatcacctcactacttcttagagatatggttgtaatgagctagacttgcccaaagttactcagctataaatggtaaagctagaatttgaacttatatctgtctggcttcaaaggccacgttctttccacttcatgttattgtcaccaagtaaagaggatctcacagtctccaaggtggaagctccctctcagcttgtctggatggtgtttttcaaatccatccttggagtgtgacccatcagtgggtcatga

SEQ ID NO: 22449 - DNA, 253 bp, Macaca Mulatta
  misc_feature (1)...(253): n = A,T,C or G
gtattatcgggggacccacggggtcattgtggtttacgacgtcaccagtgccgagtcattcgtcaacgtcaagcggtggcttcacgaaatcaaccagaactgtgatgatgtctgccgaatattagnagtgggtaataagaatgacgaccctgagcggaaggtggtggagacagaagatgcctacaaatttgccgggcagatgggcatccagttgtttgagaccagcgccaaggagaatgtcaacgtggaagag

SEQ ID NO: 22450 - DNA, 510 bp, Macaca Mulatta
cttatatcacatatataggcctgggcatttctatttgcagcctgatcctttgcttgtccattgaggtcctagtctggagccaagtgacaaagacagagatcgcctatttacgccatgtgtgcattgttaacattgcagccactttgctgatggctgatgtgtggttcattgtagcttcctttcttagtggtccaataacactccacaagggatgtgtggcagccacattttttgttcatctcttttacctttctgtatttttctggatgttaaaaaaggcactccttatcctctatggaatcatgattgttttccataccttgcccaagtcggtcctggtggcatctctgttttcagtgggctatggatgccctttggtcattgctgccatcacggttgctgccactgaacctggcaaaggctacctacgacctgaggcctgctggctcaactgggatatgaccagagccctcctggccttcgtggtcccagctttgggcatcgtggtag

SEQ ID NO: 22451 - DNA, 2010 bp, Macaca Mulatta
  misc_feature (1)...(2010): n = A,T,C or G
agaccccacatcttgttaacctcaatgaagacccactaatgtctgagtgcctactttattacatcaaagatggaattacaagnnnnnnnnnnnnnnnnnnnnnnnnnnnnnnnnnnnnnnnnnnnnnnnnnnnnnnnnnnnnnnnnnnnnnnnnnnnnnnnnnnnnnnnnnnnnnnnnnnnnnnnnnnnnnnnnnnnnnnnnnnnnnnnnnnnnnnnnnnnnnnnnnnnnnnnnnnnnnnnnnnnnnnnnnnnnnnnnnnnnnnnnnnnnnnnnnnnnnnnnnnnnnnnnnnnnnnnnnnnnnnnnnnnnnnnnnnnnnnnnnnnnnnnnnnnnnnnnnnnnnnnnnnnnnnnnnnnnnnnnnnnnnnnnnnnnnnnnnnnnnnnnnnnnnnnnnnnnnnnnnnnnnnnnnnnnnnnnnnnnnnnnnnnnnnnnnnnnnnnnnnnnnnnnnnnnnnnnnnnnnnnnnnnnnnnnnnnnnnnnnnnnnnnnnnnnnnnnnnnnnnnnnnnnnnnnnnnnnnnnnnnnnnnnnnnnnnnnnnnnnnnnnnnnnnnnnnnnnnnnnnnnnnnnnnnnnnnnnnnnnnnnnnnnnnnnnnnnnnnnnnnnnnnnnnnnnnnnnnnnnnnnnnnnnnnnnnnnnnnnnnnnnnnnnnnnnnnnnnnnnnnnnnnnnnnnnnnnnnnnnnnnnnnnnnnnnnnnnnnnnnnnnnnnnnnnnnnnnnnnnnnnnnnnnnnnnnnnnnnnnnnnnnnnnnnnnnnnnnnnnnnnnnnnnnnnnnnnnnnnnnnnnnnnnnnnnnnnnnnnnnnnnnnnnnnnnnnnnnnnnnnnnnnnnnnnnnnnnnnnnnnnnnnnnnnnnnnnnnnnnnnnnnnnnnnnnnnnnnnnnnnnnnnnnnnnnnnnnnnnnnnnnnnnnnnnnnnnnnnnnnnnnnnnnnnnnnnnnnnnnnnnnnnnnnnnnnnnnnnnnnnnnnnnnnnnnnnnnnnnnnnnnnnnnnnnnnnnnnnnnnnnnnnnnnnnnnnnnnnnnnnnnnnnnnnnnnnnnnnnnnnnnnnnnnnnnnnnnnnnnnnnnnnnnnnnnnnnnnnnnnnnnnnnnnnnnnnnnnnnnnnnnnnnnnnnnnnnnnnnnnnnnnnnnnnnnnnnnnnnnnnnnnnnnnnnnnnnnnnnnnnnnnnnnnnnnnnnnnnnnnnnnnnnnnnnnnnnnnnnnnnnnnnnnnnnnnnnnnnnnnnnnnnnnnnnnnnnnnnnnnnnnnnnnnnnnnnnnnnnnnnnnnnnnnnnnnnnnnnnnnnnnnnnnnnnnnnnnnnnnnnnnnnnnnnnnnnnnnnnnnnnnnnnnnnnnnnnnnnnnnnnnnnnnnnnnnnnnnnnnnnnnnnnnnnnnnnnnnnnnnnnnnnnnnnnnnnnnnnnnnnnnnnnnnnnnnnnnnnnnnnnnnnnnnnnnnnnnnnnnnnnnnnnnnnnnnnnnnnnnnnnnnnnnnnnnnnnnnnnnnnnnnnnnnnnnnnnnnnnnnnnnnnnnnnnnnnnnnnnnnnnnnnnnnnnnnnnnnnnnnnnnnnnnnnnnnnnnnnnnnnnnnnnnnnnnnnnnnnnnnnnnnnnnnnnnnnnnnnnnnnnnnnnnnnnnnnnnnnnnnnnnnnnnnnnnnnnnnnnnaagttagcaagcagcacattaataatcagcaacagccacctcaactacgttggagaagcaattctctcaataatggccagccgaaaagtacgcgttgccaggcatctgcctctgcggagtcattaaactcccacagtggtcaccccactgctgatgtgcagactttccaggcaaagcgccatattcatcaacaccgtcagtcttactgtaattataacactggaggtcagttagagggcagtgcggccacttcctgtcagaggcagactgacaaacccagccactgtagccagtttgtgacacctccgcggatgaggagacagttctcagcacccaatctcaaagctggtcgagaaaccacagtata

SEQ ID NO: 22452 - DNA, 95 bp, Macaca Mulatta
agcaagacggaaagttgccttttgttcctccagaggaagaatttattatgggagtttccaagtatggcataaaagtatcaacatcagatcaatat

SEQ ID NO: 22453 - DNA, 791 bp, Macaca Mulatta
gcaggatttgaaagccttgaacgatgctgtgaaggagatacagacctcagccaagtccagagcttgagacatggaggccctgagaagcacccttcagactatggagtccgacgtctacaccgaggtccgcgagctgtgtgagcctcaagcaggagcagcaggctttcaaggaggcggccgacacggagcggctcgccctgcaggccctcacggagaagcttctcaggtccgaggagtccgtctcccgcctcccggaggagatccagagactggaggaagagctccgccagctgaagtccgattcccatgggccgaaggaagatggaggcttcagacactcggaagcctttgaggcgctccagcaaaagagtcagggactggactccaggctccagcacgtggaggacggggtgctctccatgcaggtggcttctgcgcgccagaccgagagcctggagtccctcctgtccaagagccaggagcatgagcagcgcctggccgccctgcaggggcgcctggaaggcctggggtcctcggaggcagaccaggatggcctggccagcacggtgcggagcctgggtgaggcccagctggtgctctacggcgacgtggaggagctgaagaggagtgtgggggagctccccagcaccgtggaatcactccagaaagtgcaggagcaggtgcacacgctgctcagtcaggaccaagcccaggccgcccgtctgcctcctcaggacttcctggacagactttcttctttagacaacctgaaagcctcagtcagccaagtg

SEQ ID NO: 22454 - DNA, 334 bp, Macaca Mulatta
  misc_feature (1)...(334): n = A,T,C or G
tccccggatccagggctaccctctgatggggtcccccttgctaatgacctccatcctcctgacctacgtgtacttcgttctgtcacttgggcctcgcatcatggctaatcgaaagcccttccagctccgtggcttcatgattgtctacaacttctcactagtggcattctccctctacattgtttatgagnagttcctgatgtcaggctggctgagcacctatacctggcgctgtgaccctgtggactattccaacagccctgaggcacttaggngatggatcgggtggcctggctcttcctcttctccagttcattgagctgatggacacagt

SEQ ID NO: 22455 - DNA, 751 bp, Macaca Mulatta
  misc_feature (1)...(751): n = A,T,C or G
ggcagatgacctgtaaccccatgttcacagcagcgttcttcacaatagccgaaaggaggaatcaaccccagtgtctatcaacagatgatggataaacaaatgtggaatacacagacagtggaatgcttgaaaagaaggaaatcctgacaaatgctacaacatggctaaaccttgaggacattatgctgaatgaaataaggcagacacaaaagaagagctattgtaagattctacttatatgagattcctagagcagttaatttcatagagacagaaagtagaatggtgggcctagggtagtggctcgtgcctataatctcagcgctttgagaggccaagggaagaggattgcttgaggctgagagtttgaggccagcctgggcaacatagtgagaacctctctctacnnnnnnnnnnnnnnnnnnnnnnnnnnnnnntagaatggtggttgccagaggctaggataagaggagaataatcctctcctcttatctctatttagataatagtcaaatctctaaagttactgttttatgggtagagtttttgtttcccagatgggagtggagttctgtagatagatggagagtctgggttttccaatatgggggagaattctgtanatagatgatgggtgatgggttgcataataatgtgaatgtggcccaagccctggttggcctggggtcgggaaatcccagccactttttgggaggcccaagccaaggtggaatcaccttgaaggtcaggg

SEQ ID NO: 22456 - DNA, 788 bp, Macaca Mulatta
  misc_feature (1)...(788): n = A,T,C or G
cccatacaatcaaagtccctaagaaatctttaaatattgctttatactttctcatgtctgggttagtgcttggaactctgtcaataatctgtagagcagactatgagtgagaaaatagcttntctctcttatcagaagaaggctggatctctgtgccatattataggaaaactcatacgtattgactttcttctagttctctctaaagttccaacctactgggcttccgtctagggctgtatttccaaaatctttaaggacagaaattggttgtttatcttcccgtaattacaatcccatgttcctttcgaatcccctgagttttgttgacatttgacacttgttagttccctcagattctgaagaataaatccacattcttcatcctttgtggaagcctcttgacaatatttttttctcttacagatttacccaaatggcttcaggattacctgaaaggcaaactgtttccctgagatggaatcaacttgagtcttctgcaattggtcacaactaatcacgcttcctatgatttcatccaactacttaccttgcctactatatctcctttatcttaatcagtttattttctttcaaataaaaaataactatgagcaacataaaaatggtatttcttagggactatcgggtggttgtccaatgtttagacaatccaagtgacagacacttcagattttacctaatacttccttgtgctcctactaataactagatttcctacttgtttcttttttaaataagacactagttttgtgcttaatactaaa

SEQ ID NO: 22457 - DNA, 272 bp, Macaca Mulatta
ctgtgctgcaaggggaggttggggaggggtctccaggcagggcccccccttccctcagacctgcatgtgcaggtggcttctgggtacatctgtgtgctctcctggcagatggtgctggcagggcccagcacacaggtgatggctgtggcccttcaggtcccaccagtgttgtaggcacacgagtccctggggcttgtgtcattagaggacagccatgtggatggatgtgccatgccaacatgtcagacagctcctgaaaggaagggcctcat

SEQ ID NO: 22458 - DNA, 674 bp, Macaca Mulatta
cactgatgagaccgggaccttttctggctgttggagtttccctgttcctgctgcaggaggccttaccaataattctatcactcttccccctcttgtctgatataaaaactttctttttcttgtaattgctttcttacaaagtacactcatcagccccaagaggctgctcctaagacttctctttccttgtgttttgcacacaatctgttccttctgcagcagagctggggtcaccagccctcatgtacttgtgacttttcccctgccacagggcccgaaagatccccatcatcattcgccgttacctgccagatgggagctatgaagactggggggtggacgagctcatcatcaccgactgagctggagtcatcttcctgcccttgcccaattttcattcccactttatatgtgtaaataaaatattcaactttccaacccccttcccctctgcttatctgcgatgtcaccaccttttgcttccctgttaccgccatgctgcctggagcatacacctattccagtggccctgtgactgtcagctccttaagaagcaccagaggcccttagcccctttggatcccccacatccttccctccatctccctgttccccagagcaaaggctgctgcaggggagacacctcagctgccttcccagcagacagacgagtc

SEQ ID NO: 22459 - DNA, 834 bp, Macaca Mulatta
tgaagggggaccagcacagcacacagaagtacggaggcaggagaatgccagacttggggagcagcgggtggtctcttggccccctccaccatcctctcccaaagtccccaactccaccgcatgggccgttcctctagcttcaaggggctgccccaagggactgcttctagggaggcctggcttcctcctggtggagggtccccctctcagcctagtgggacagaggacagcacatgctgcaccccaggcccctttttaacttgtcattgattctcctggcctcagaaatggggtgatggccaaggtcttgtgaacagtgctggctgtgggaatactggagaggttgaaccactgtctagagggattcagtgggtgcccccaccccatcatgcctctgcacgcacagtgctgactcagcctcccactcctgcaggtgagaggctgacagaagacgaagtggagaagttgatggctgggcaagaggactccaacggctgcatcaactacgaaggtgggctcagcaggggcagggatcttccgggaggggagtgctgggacccaggcttccagccatggctgccccgtgttgcatccctgccactcactctcctcttctttccagcattcgtgaagcacatcatggccagctaaacctcctgcccaggtaggcacccactccctcctgaacccgctgctgccacctccccacactccaccagctgcagtgctcacttgacatcctgctgcctccatctccctcctcctctgtaatctgcactgcctttgctctcaggaagcccagggaaggctgtgcagggacgtctcatctcccat

SEQ ID NO: 22460 - DNA, 289 bp, Macaca Mulatta
agaaccgtgggtaccgatggatgtggccgagagccctgaacgggatcctcgctctccagaggatgaagagcagccacaggggctctcggacgacgacattctgagggacagcgggtccgatcaggatttggacggggcgggggtgagggcttctgatctggaggatgaggagagtgcagccagggggctgagccaggaggaggaagataaccactccgacgaggaccgggccagtgagcctaaatcccaagagcaggactcggaggtgaatgagctgagccggggcccg

SEQ ID NO: 22461 - DNA, 1611 bp, Macaca Mulatta
  misc_feature (1)...(1611): n = A,T,C or G
gggggcaggctggtggtactggcagccgcttccgcgtgggcaaggcgaaggcctctgcctgcaacatccctctcccgttggccctggatcccagcccagggannnnnnnnnnnnnnnnnnnnnnnnnnnnnnnnnnnnnnnnnnnnnnnnnnnnnnnnnnnnnnnnnnnnnnnnnnnnnnnnnnnnnnnnnnnnnnnnnnnnnnnnnnnnnnnnnnnnnnnnnnnnnnnnnnnnnnnnnnnnnnnnnnnnnnnnnnnnnnnnnnnnnnnnnnnnnnnnnnnnnnnnnnnnnnnnnnnnnnnnnnnnnnnnnnnnnnnnnnnnnnnnnnnnnnnnnnnnnnnnnnnnnnnnnnnnnnnnnnnnnnnnnnnnnnnnnnnnnnnnnnnnnnnnnnnnnnnnnnnnnnnnnnnnnnnnnnnnnnnnnnnnnnnnnnnnnnnnnnnnnnnnnnnnnnnnnnnnnnnnnnnnnnnnnnnnnnnnnnnnnnnnnnnnnnnnnnnnnnnnnnnnnnnnnnnnnnnnnnnnnnnnnnnnnnnnnnnnnnnnnnnnnnnnnnnnnnnnnnnnnnnnnnnnnnnnnnnnnnnnnnnnnnnnnnnnnnnnnnnnnnnnnnnnnnnnnnnnnnnnnnnnnnnnnnnnnnnnnnnnnnnnnnnnnnnnnnnnnnnnnnnnnnnnnnnnnnnnnnnnnnnnnnnnnnnnnnnnnnnnnnnnnnnnnnnnnnnnnnnnnnnnnnnnnnnnnnnnnnnnnnnnnnnnnnnnnnnnnnnnnnnnnnnnnnnnnnnnnnnnnnnnnnnnnnnnnnnnnnnnnnnnnnnnnnnnnnnnnnnnnnnnnnnnnnnnnnnnnnnnnnnnnnnnnnnnnnnnnnnnnnnnnnnnnnnnnnnnnnnnnnnnnnnnnnnnnnnnnnnnnnnnnnnnnnnnnnnnnnnnnnnnnnnnnnnnnnnnnnnnnnnnnnnnnnnnnnnnnnnnnnnnnnnnnnnnnnnnnnnnnnnnnnnnnnnnnnnnnnnnnnnnnnnnnnnnnnnnnnnnnnnnnnnnnnnnnnnnnnnnnnnnnnnnnnnnnnnnnnnnnnnnnnnnnnnnnnnnnnnnnnnnnnnnnnnnnnnnnnnnnnnnnnnnnnnnnnnnnnnnnnnnnnnnnnnnnnnnnnnnnnnnnnnnnnnnnnnnnnnnnnnnnnnnnnnnnnnnnnnnnnnnnnnnnnnnnnnnnnnnnnnnnnnnnnnnnnnnnnnnnnnnnnnnnnnnnnnnnnnnnnnnnnnnnnnnnnnnnnnnnnnnnnnnnnnnnnnnnnnnnnnnnnnnnnnnnnnnnnnnnnnnnnnnnnnnnnnnntgaaggaggcctcccctgcccccacccgagaaggcagagcagtctctgctgcccggtcctggtgaagcccaaggttgtgggtgaagggggtggcttcctggggccagcacccccacctcctggtcctggcctctccccgacccctcagacggccacgcatgacccgcactcaccacgccctgccctcttcagtgacattcttctacctggtaggagttaggaccctgtagtgcccaacctagccaggccgccgccactgggcccaggtgccgaataaaccctggttgggaag

SEQ ID NO: 22462 - DNA, 1281 bp, Macaca Mulatta
ccctgacatcacacagctgcagagatgaataaacaaagaggaaccttctcagaagtgagtctggcccaggatccaaagaggcagcaaaggaaacctaaaggcaataaaagctccatttcaggaagcgaacaggaaatattccaagtagaattaaaccttcaaaatccttctgtgaatcatcaagggattgatcaaatatatgactgccaaggtttactgccacctccagagaagctcactgctgaggtcctgggaatcatttgcattgtcctgatggccactgtgttaaaaacagtggttcttattcctttcccggagcagagcaattcttccctgaatacaagaacgcagaaagtcctggagcagaacaattctttcccgaatacaagaacccagaaagtacgtcactgtggccattgtcctgaggagtggattacatattccaacagttgttattacattggcaaggagaaaagaacttgggcagagagtttgctggcctgtacttcaaagaactctagtctgctttctatagataatgaagaagaaatgaaatttctgactgccattttaccttcctcatggattggtgtgtttcgtaacagcagtcatcatccatgggtgacaataaacggtctgactttcaaacatgagataaaaaactccgataatgctgaacacaactgtgcaatgctacatgcacgtggactcaaatcaaaccagtgtgaatctacagtaatatatcattgtaagcataagctttagaagtaaagcatttgcgtttgcagtgcatcagataaattttatatttctcaaaataggaataatattatgattgcataaatcttgaaatgaattacattatttgctctaataagaaaattctaagtcaattattgaagtaggatacacacaattactaaagtacagatatcccagcatttgtgtcgggctcattttgcacaacatgatatttgtggtattcagcctttctaaaagttgcatgttatatgagtcagtttctatgaagtatcaagaacagtcaaacccatggagacacaaagtagaatagtggttgccaatgcctaagggaggtggaaataggaggtgatcactaattgatagaacgttctttgtgtcgtgatgaaaactttctaaattccaatagtggtgatggttgtaactctgtgaatatactaaacatcattgatttttaatcattttaagtggatgaaatttatgctttgtacatgacacttcaataaagctatccggaaaaaa

SEQ ID NO: 22463 - DNA, 1749 bp, Macaca Mulatta
  misc_feature (1)...(1749): n = A,T,C or G
tcagttgctatacctgcctatcaggaactgccctcgttttcaagaacttgggagtgagactttgacatcagaggaattccagaagaggctgcacccttataagnnnnnnnnnnnnnnnnnnnnnnnnnnnnnnnnnnnnnnnnnnnnnnnnnnnnnnnnnnnnnnnnnnnnnnnnnnnnnnnnnnnnnnnnnnnnnnnnnnnnnnnnnnnnnnnnnnnnnnnnnnnnnnnnnnnnnnnnnnnnnnnnnnnnnnnnnnnnnnnnnnnnnnnnnnnnnnnnnnnnnnnnnnnnnnnnnnnnnnnnnnnnnnnnnnnnnnnnnnnnnnnnnnnnnnnnnnnnnnnnnnnnnnnnnnnnnnnnnnnnnnnnnnnnnnnnnnnnnnnnnnnnnnnnnnnnnnnnnnnnnnnnnnngcatgacactactgtgagtggcctacaggtggcgctagatgttttcaacggactccttcctccctatgctgcttgccacttgatggaattgtactttgagaagggnggagtactttgtggagatgtactatcggaatgagacgcagcacgagccgtatctactcacgctacctggctgcagctccagctgtcctctggagaggtttgctgagctggttggccctgtgatccctcaagactggcccacggagtgtatgaccacaagcagccatcaaggtactgaggacagtacagattagnnnnnnnnnnnnnnnnnnnnnnnnnnnnnnnnnnnnnnnnnnnnnnnnnnnnnnnnnnnnnnnnnnnnnnnnnnnnnnnnnnnnnnnnnnnnnnnnnnnnnnnnnnnnnnnnnnnnnnnnnnnnnnnnnnnnnnnnnnnnnnnnnnnnnnnnnnnnnnnnnnnnnnnnnnnnnnnnnnnnnnnnnnnnnnnnnnnnnnnnnnnnnnnnnnnnnnnnnnnnnnnnnnnnnnnnnnnnnnnnnnnnnnnnnnnnnnnnnnnnnnnnnnnnnnnnnnnnnnnnnnnnnnnnnnnnnnnnnnnnnnnnnnnnnnnnnnnnnnnnnnnnnnnnnnnnnnnnnnnnnnnnnnnnnnnnnnnnnnnnnnnnnnnnnnnnnnnnnnnnnnnnnnnnnnnnnnnnnnnnnnnnnnnnnnnnnnnnnnnnnnnnnnnnnnnnnncaaggaaggaaagatgtgaataggctgatgggcaaaaaaccaatttacccatcagttccagccttctctcaaggagaggcaaagaaaggagatacagtggagacatctggaaagttttctccactggaaaactgctactatctgtttttatatttctgttaaaatatatgaggctatagaactaaaaattttaaaactctttgtgtcccttggtcctggaacatttattttccttttatagaaacaaaaatcaaactttacagaaaaatttgatgtatgtaatacatatagcagctcttgaagtatagacatcataacaaataagtcatctgatgagaacaagctgtttgagcacaacacatcaggaaagagagcaccacatgatggagtttctctagaagctccagtgataatagatgttgactctaaagttgatttaaggccaggcatggtggtttacacctataatcccagcattttgagagtccaagatgggaggatcacttgagctcaggaggtcaagatcagcctgggcaacatggtgaaacctcgtctctacataaaatacaaaaaattagatgggcatggtggtatgtgcctatagtc

SEQ ID NO: 22464 - DNA, 731 bp, Macaca Mulatta
atgggtatgtgggtcagactctggcagagaggaggggtgggtctgggttccttttctcttgtgggaagagaaaggacatcctgggctgggagctgggcctgggggatcccgagccctttggagcctggtcttagtccctgatctccaccctgataccctcaatcaggaggcacagaaagcgtcgtctgctaccaagaggactcagtggggacagaaatctgactcctcgctggacgctgaggtgaatggtggggaggggcctggccctacagcagagggccatagtgcactgtgggagaccccatcgcccccgtgtgtacacattaactggcctgcgatcgcacagtctacccagaacgcccccatccctgctcatgcagattggtctgagccaaccgtgagaacaaggttgagccctcagctggttttgctgcctgtagctctcagagcctctgccccttcagctggcagattgcagggctctgactcattgtgggtgtggggcttgggcaaagagatgccttcctatccagtggcccccttccccttccatccctgagcaccccattgccttgtgctaacagctctttgccccacaggtgtgacaagccctgccaagacagacctgcaagtcttcatctcaaggggcctccctcatgccaggcctctgcctctcacagcagcaccccttcctctcattgcctctgttccctttttgcctctggatctgt

SEQ ID NO: 22465 - DNA, 135 bp, Macaca Mulatta
  misc_feature (1)...(135): n = A,T,C or G
natggctcgtggacagcagaaaattcagtctcagcagaaaaatgccaaaaagcaagctggacaaaagaagaaacaaggacatgaccaaaaggctgctgccaaagctgccttaatatatacctgcactgtctgtag

SEQ ID NO: 22466 - DNA, 1036 bp, Macaca Mulatta
  misc_feature (1)...(1036): n = A,T,C or G
aggccgtgtccgtgtcagtggcagtgctgactctcagcttcatcgccctggaccgctggtatgccatctgccacccactattgttcaagagcacagcccggcgggcccgtggctccatcctgggcatctgggctgtgtcgctgactgtcatggtgccccaggctgcagtcatggaatgcagcagtgtgctgcccgagctagccaaccgcacacggctcttctcggtctgtgatgaacgctgggcagngcagatgacctatatcccaagatctaccacagttgcttcttcattgtcacctacctggccccactgggcctcatggccatggcctatttccagatattccgcaagctctggggccgccagnnnnnnnnnnnnnnnnnnnnnnnnnnnnnnnnnnnnnnnnnnnnnnnnnnnnnnnnnnnnnnnnnnnnnnnnnnnnnnnnnnnnnnnnnnnnnnnnnnnnnnnnnnnnnnnnnnnnnnnnnnnnnnnnnnnnnnnnnnnnnnnnnnnnnnnnnnnnnnnnnnnnnnnnnnnnnnnnnnnnnnnnnnnnnnnnnnnnnnnnnnnnnnnnnnnnnnnnnnnnnnnnnnnnnnnnnnnnnnnnnnnnnnnnnnnnnnnnnnnnnnnnnnnnnnnnnnnnnnnnnnnnnnnnnnnnnnnnnnnnnnnnnnnnnnnnnnnnnnnnnnnnnnnnnnnnnnnnnnnnnnnnnnnnggcaaattccgggagcagtttaaggctgccttctcctgctgcctgcctggcccgggtccctgcggctctctgaaggcccctagtccccgctcctctgccagccacaagtccttgtccttgcagagccgatgctccgtctccaaactctctgagcatgtggtgctcaccagcgtcaccacagtgctgccctgagcgagggctgccctggaggctccagctcgggggatctgcccctacccctcatggaaagacagctggatgtggtaaaaggctggggcttcagtcctgggtttctgcctgtgtgactctggataagtcact

SEQ ID NO: 22467 - DNA, 250 bp, Macaca Mulatta
  misc_feature (1)...(250): n = A,T,C or G
ggtttactccatcatctccgtgcagctgctcatcaccgtggccatcatcgctatcttcacctttgtgnggaacctgtcagcgcctttgtgaggagaaatgtggctgtctactacgtgtcctannnnnnnnnnnnnnnnnnnnnnnnnnnnnnnnnnnnnnnnnnnnnnnnnnnnnnnnnnnnnnnnnnnnnnnnnnnnnnnnnnnnnnnnnnnacttttgccatgggcttcatgacaggtaccatttcca

SEQ ID NO: 22468 - DNA, 563 bp, Macaca Mulatta
tctcaccgtaaaggtgtcttcataattactagtgacaagttctcttgactccggcaaggttccagtgtggtcgtcgagtacataatgcaatttcttaatgatttatctgatattaaaagtatttatgatctctaagtagtttgcactttaattctgaagagtgagtctatggattctatttaaattgctaagttttaacaatgtgagctccaccagggttaagatttaatatatttggctgggaattctaaaggtcatgaggaaaggttcagtacttaaaaagaaccagattagcagatgctgaaaagtataaaccttttaagaagacttaatttggaataggataattatttaaaggaatttagtttgtttaattccagttggtcaaacattaatcaaagatccgcttaaattgattgctaaaatcagaacaaaataatttgtacactgattctgaaaaggaaaactaaatctgcgagttaagcaaatttactttgtttaatgttagaaccagatgaatgatgacacatgtggacttgaggaaaataactgtttgtaactac

SEQ ID NO: 22469 - DNA, 789 bp, Macaca Mulatta
  misc_feature (1)...(789): n = A,T,C or G
aaacttcctttaaaccacccttttagtaaggtccaattccttcctatttttttattttgcagatttctttgacaatatatgggtggatataacatggcataatcttaacttaaatgtaaagtgacanaactagtaatgaagcccagattttgttcagagtattatactactctgtctccatgtggataacccactatcacttcaaatttttttttgaatctaaaatcatctgtcctaactcaattttccctctaatctccttaatcctgtttgaaggtaccacctttctcctattcccttaaacataaattatttttgacacttaatcttctttattccctctcaacaagtttggctcccatatttcccctcgtcaccctcattcagatttcctttccctttcatatgtgatgtatggtaataaccaacctatttttttcttaaccccaagctcttcccatctgtcttgggtattacagccaaaatcatctttcagaatactgatgtaatcatatgacttatttggctcaaaagtttctaaactcctgttaccatgaaagtcaagtctaaatttatacttccattcaaagagtataatagtctggttccagcctgttcacccaactttacttcccactgctccccaaaatagcattgtgttctctagcaaggtatcatttctcaacttctgttgggtatgtcacactcccaactcggtnnnnnnnnnnnnnnnnnnnnnnnnacaaagtctcactctgttacccaggctagagtgtggtggcatgatcc

SEQ ID NO: 22470 - DNA, 793 bp, Macaca Mulatta
gggggagaacctgtgaacgctttctgaattatggcgggggtggatatccgagacaatctgctgggaatttcttgggttgacagctcttggatccctattttgaacagtggtagtgtcctggattacttttcagaaagaagtaatcctttttatgacagaacatgtaataatgaagtggtcaaaatgcagaggctaacattagaacacttgaatcagatggttggaatcgaatacatccttttgcatgctcaagagcccattcttttcatcattcggaagcaacagcggcagtcccctgcccaagttatcccactagctgattactatatcattgctggagtgatctatcaggcaccagacttgggatcagttataaactctagagtgcttactgcagtgcatggtattcagtcagcttttgatgaagctatgtcatactgtcgatatcatccttccaaaggttattggtggcacttcaaagatcacgaagagcaagataaagtcagacctaaagccaaaaggaaagaagaaccaagctctatttttcagagacaacgtgtggatgctttacttttagacctcagacaaaaatttccacccaaatttgtgcagctaaagcctgggagaaaagcctgtttcagtggatcaaacaaagaaagaggcagaaacctgtaccagaaactgttaaatctgagggagaaggagaccacaaaagaatgtacaacagacagtgagtgctaaaggccccccctgaaaaaaggatgagactttcgtgagtacggacaaaagagaa

SEQ ID NO: 22471 - DNA, 2410 bp, Macaca Mulatta
  misc_feature (1)...(2410): n = A,T,C or G
agaagaggctataaccacgaatgaggttataaaccaattattgcaccacgttggtgcgatgtgcatacaccaacttaatcttcttgccaccaaccccaatcttccaatcacaagtgtcttgggcaagcagcatccaattgaagcacaccatcttagcagtatttgtgacattatggagaaggccatggttaatggagatacctgtattatacgctgcattctcgttgtctttcaggnnnnnnnnnnnnnnnnnnnnnnnnnnnnnnnnnnnnnnnnnnnnnnnnnnnnnnnnnnnnnnnnnnnnnnnnnnnnnnnnnnnnnnnnnnnnnnnnnnnnnnnnnnnnnnnnnnnnnnnnnnnnnnnnnnnnnnnnnnnnnnnnnnnnnnnnnnnnnnnnnnnnnnnnnnnnnnnnnnnnnnnnnnnnnnnnnnnnnnnnnnnnnnnnnnnnnnnnnnnnnnnnnnnnnnnnnnnnnnnnnnnnnnnnnnnnnnnnnnnnnnnnnnnnnnnnnnnnnnnnnnnnnnnnnnnnnnnnnnnnnnnnnnnnnnnnnnnnnnnnnnnnnnnnnnnnnnnnnnnnnnnnnnnnnnnnnnnnnnnnnnnnnnnnnnnnnnnnnnnnnnnnnnnnnnnnnnnnnnnnnnnnnnnnnnnnnnnnnnnnnnnnnnnnnnnnnnnnnnnnnnnnnnnnnnnnnnnnnnnnnnnnnnnnnnnnnnnnnnnnnnnnnnnnnnnnnnnnnnnnnnnnnnnnnnnnnnnnnnnnnnnnnnnnnnnnnnnnnnnnnnnnnnnnnnnnnnnnnnnnnnnnnnnnnnnnnnnnnnnnnnnnnnnnnnnnnnnnnnnnnnnnnnnnnnnnnnnnnnnnnnnnnnnnnnnnnnnnnnnnnnnnnnnnnnnnnnnnnnnnnnnnnnnnnnnnnnnnnnnnnnnnnnnnnnnnnnggttaaaaggcttggaacaagttactaaggctactatgcttggtcaccttcttccagtgttacnnnnnnnnnnnnnnnnnnnnnnnnnnnnnnnnnnnnnnnnnnnnnnnnnnnnnnnnnnnnnnnnnnnnnnnnnnnnnnnnnnnnnnnnnnnnnnnnnnnnnnnnnnnnnnnnnnnnnnnnnnnnnnnnnnnnnnnnnnnnnnnnnnnnnnnnnnnnnnnnnnnnnnnnnnnnnnnnnnnnnnnnnnnnnnnnnnnnnnnnnnnnnnnnnnnnnnnnnnnnnnnnnnnnnnnnnnnnnnnnnnnnnnnnnnnnnnnnnnnnnnnnnnnnnnnnnnnnnnnnnnnnnnnnnnnnnnnnnnnnnnnnnnnnnnnnnnnnnnnnnnnnnnnnnnnnnnnnnnnnnnnnnnnnnnnnnnnnnnnnnnnnnnnnnnnnnnnnnnnnnnnnnnnnnnnnnnnnnnnnnnnnnnnnnnnnnnnnnnnnnnnnnnnnnnnnnnnnnnnnnnnnnnnnnnnnnnnnnnnnnnnnnnnnnnnnnnnnnnnnnnnnnnnnnnnnnnnnnnnnnnnnnnnnnaggtggaaggagatacagtcaccttctcctttgaaatgagaagtggccgtgaacacaacactcctgataaagccatgtggggctttgcttgcacagttcgcgctcaggnnnnnnnnnnnnnnnnnnnnnnnnnnnnnnnnnnnnnnnnnnnnnnnnnnnnnnnnnnnnnnnnnnnnnnnnnnnnnnnnnnnnnnnnnnnnnnnnnnnnnnnnnnnnnnnnnnnnnnnnnnnnnnnnnnnnnnnnnnnnnnnnnnnnnnnnnnnnnnnnnaggtgccagtggcaggtggaggccaatggcgtgatctcccctgcccttactccgagcccctctccactgcctctgaccatagaggaagacagagaattcacctacccctctgatgtcctcgtgcctcctgttggaaactactttgatctgcctcggatcaggctgcctccaggaatcatgataaagctcagggaaatttctgggcgtgctagacctcaatttagaccaagtataaagtatgttgctgtgtagtgttttacttttcccagtaggaaaaaaagtttaaacaattgaaatgggtgtatttcttctgtggtatagtaaatgaaactttaattttatgtttactctatgagtgttaaaattaaccgagtctggagggcccaccaggcagtattccagattaggggctctcaaaatttggtcccctagtcagcagcattggcatcacttgggagcttgttagttcttgaaccccattttacacctattgaatcaggaggtctgaggatggggcccagcttaacaagtttcccatgtgactgatacatgctaaagtgtgacaagtgctaaatttatctctagtgttttgaccttctactagcagtcagcctctactttactttccagagtctagag

SEQ ID NO: 22472 - DNA, 538 bp, Macaca Mulatta
ctggactaaggcagcctagtgttcagggctcagtactcagccgctcagcctctgaggtcatgagggcttccggcgtgctgggtcctgcccatcaattctcccagaatcccctattcctttcctgacctcaccacttcaaccttctcagggcgtcaagatcccacatccctgggcccctcctgtgagcctgctggaaacacgctgaaactggaatcctctgacctgctgccacctctcccaggtccctgcaacctcctgtctcctctacccttcgtcttcatcctgcctgagctgccagagctctgattgcttttggagttgatctagaggactcagaattattagagatcccaggatcctctcctgaggaggaggggtgcccagtctcctattctacctctgacctggcctggtttctttgccccagggctttgccttgtaagtacccgggctggatcttctaaataaatacgatccgtacctcccacgagtttgtgttgtgattctttcgtttcagcctctgtgtgattagagaaat

SEQ ID NO: 22473 - DNA, 709 bp, Macaca Mulatta
tcaagaacctcttctgacctttcgcctaaacaaagcctttatggaagcagcagaaatcacagatgaagacaacagcatagctgccatgtaccaggctgttggtgaactgccccaggccaacagggacacattagctttcctcatgattcacttgcagagagtggctcagagtccacatactaaaatggatgttgccaatctggctaaagtctttgggcctacaatagtggcccatgctgtgcccaatccagacccagtaacaatgttacaggacatcaagcgtcaacccaaggtggttgagcgcctgctttccttgcccctggagtattggagtcagttcatgatggtagagcaagagaacattgaccccctacatgtcattgaaaactcaaatgccttttcaacaccacagacaccagatattaaagtgagtttactgggacctgtgaccactcctgaacatcagcttctcaagactccttcatctagttccctgtcacagagagtccgttccaccctcaccaagaacactcccagatttgggagcaaaagcaagtctgccactaacctaggacgacaaggcaacttttttgcttctccaatgctcaagtgaagtcacatctgcctgttacttcccaacattgactgactataagaaaggacacacctgtactctgctctgcagcctcctgtactcattactactttt

SEQ ID NO: 22474 - DNA, 130 bp, Macaca Mulatta
agaagaggctgatattgcagctcgacgccacacaggcgtcattccgacgcaccatcagtttatcactaatgagcgctttggggacctcctcaatatagacgataccgccaaaaggaaatctgggtcagag

SEQ ID NO: 22475 - DNA, 638 bp, Macaca Mulatta
ctcttgtgggacgtatcatataatgttcagcactaagtaatgtcttgtttgtggctgaatatttttcgtagatgtttttgaagttgacatgacttacgtgcatttaaatatatattgccatccttagtttgtaattaagatttggaatatggttgtggatttctgagcatgtgcagactggtctagctagttcaggaactggtgcatgtatttttcaaagataaagaaagtgtactgcgaaaatatgcaggaagattaattttgtggcagttttctaaaactgacaaccaggtgggaccaaagtttatgtgcctttagtcttaatttaccttgcattgtaatattcagttttaataaatcttcaaaatattttgtatttaggaatagatctgactttaataaaaacatggctcagaatctacaggtcaaattaatttgaacagttcttgtcaatctgaattgttgattctgtttaaatgaccaatactttttgaaattgatgtacttagtttcaagattcatagattctgttatctatgtagacagaatggtcatgtatattttctattagttgagtttttacatctttagaaatgtaaaattcagtatagtttgaaagcggcacaattaaaaattat

SEQ ID NO: 22476 - DNA, 1198 bp, Macaca Mulatta
  misc_feature (1)...(1198): n = A,T,C or G
ggggcttctggtcgtggcggaccctttagataaggcgcttcaggactaccgcaagaagctgcttgagcacaaggagatcgacggccgtcttaaggagttaagggaacaattaaaagaacttaccaagcagtacgaaaagtctgagaatgatctgaaggccctacaaagtgtcgggcagattgtgggtgaagtgcttaaacagttaactgaagaaaaattcattgttaaagctaccaatggaccaagatatgttgtgggttgtcgtcgacagcttgacaaaagtaagctgaagccaggaacaagagttgctttggatatgactacactaactatcatgagatatttgccaagagaagtggatccattggtttataacatgtctcatgaggaccctgggaatgtttcttattctgagattggagggctatcagaacagatccgggaattaagagaggtgatagaattacctcttacaaacccagagttatttcagcgtgtaggaataatacctccaaaaggctgtttgttatatggaccaccaggtacgggaaaaacactcttggcacgagccgttgctagccagctggactgcaatttcttaaaggttgtatctagttctattgtagacaagtacattggtgaaagtgctcgtttgatcagagaaatgtttaattatgccagagaccatcaaacatgcattatttctatggatgaaatagatgctattgattatgaagcaattgtgaagctttcagatggctttaatggagcagacctgagaatgtttgtccctcgaccaggtttttcgcaactcgcgcgaacacatctggggtacagaaactcttgaaagcgcccacaacggcgttcagaagcaaaaccatcggcgacacggggtatacgccacactgagcgctgaaacagcgcatcagcacgtctctagtgggtgcgctctcagaaaacacagcacatacaaggttgactaagggtcagtttgtagcaggaacttttctttcgctcgtctctccgtcccctctctgctctcgcgacacccgcccatccagcgcgacagacaacaagagacggagaagagagagaaagaagaacagaaagaaaagagaaagcgaggaagacgcgagagcatgacaagacgcgaaagaacgagcnnnnnnnnnnnnnnnnnnnnnnnnnnnnnnnngaa

SEQ ID NO: 22477 - DNA, 733 bp, Macaca Mulatta
ggcagcaactcggaggctccgcgaggtgcaggggacgcaggcatggccggtgagctgactcctgagcaggaggccgagtacaaaagcgccttctccgcggttgacacgaatggaagcggcaccatcaatgcccaggagctgggcgcggcgctgaaggccatgggcaagaatttctcggaggccgagctaaagaatctcatctcccagtttgatagcgacggcgacggcgaaatcagcttcgaggagttcatggcggtggtgaagaaggccagggccggccgggaggacctgcaggtcgccttccgcgccttcgaccaggacggcgatggccacatcaccgtggacgagctcaagcaggccatggcggggctggggcagccgctgccgcaggaggagctggatgccatgatccgcgaggccgacgtggaccaggacgggcgggtgaactacgaggagttcgcgaggatgctcacccaggagtgaggctccccgcctgtgtccccccagctgcgctctgagccttcagggccgccgcccgctgctgcttttgtgctgggactctccagggaaacctggtcggtggatgggaaactacctccccctgggaggaaggctttgcgctccagggcgtggatgtggcgccctcggccgcctgtgagcccctctctgcctccagaccttgggcagaaggtggtctccttgggcctggtcaccctttgccctgcagtggaat

SEQ ID NO: 22478 - DNA, 406 bp, Macaca Mulatta
  misc_feature (1)...(406): n = A,T,C or G
gtgtgacgtgggtgaaggagttcttattgagccatgggaggaagaaatagtacagaagannnnnnnnnnnnnnnnnnnnnnnnnnnnnnnnnnnnnnnnnnnnnnnnnnnnnnnnnnnnnnnnnnnnnnnnnnnnnnnnnnnnnnnnnnnnnnacaggcccggcattacctctgcgcacaaccctgtgggcctggctcaggcgggagtgcggggccagcaacatgagcaccctggacagccccgaccaggcctatgacttcctgctgaagttcctgctggtgggcgacagcgacgtaggcaagagtgagatcctggagagcctgcaggatggcgcggccgagtccccatacagtcacctgagggggatcgactacaagacgaccaccatcctgctggatggccagc

SEQ ID NO: 22479 - DNA, 178 bp, Macaca Mulatta
attactcattccttagtcaataccagcatttttccactgagaaaacaatcttgacatgatagtagaagaacctttaggcagctttcctgtcaaaaaagacagggaagaaaactctaaaaagccattgagatgtatagctgggggacaagacataaagccatcaagcacatgcttgaga

SEQ ID NO: 22480 - DNA, 1181 bp, Macaca Mulatta
  misc_feature (1)...(1181): n = A,T,C or G
cagaggggacatctgttgcggcaccagcggttgcacacggacgagaagccctttcagtgcccagagtgtgggctgagcttccgcctggagagcatgctgagagcccaccggctccggcacggcggggagaggccgttctcctgtagcgagtgtggcagaggcttcacccaccagtgcaagctccatgagcacctgagggtgcacagcggggagaggcctttccagtgcctggagtgcgacaagcgcttccgcctgaagggcatcctgaaggcccaccagcacacgcacagcaaggagaggccgttctcgtgtggggagtgtggtaagggcttcaccagacagtccaagctcacggagcacttgcgcgtgcacagcggggagagacccttccagtgcccagagtgcaacaggagcttccgcctgaaggggcagctgctcagccaccagcgcctgcacaccggagagaggccctttcagggtccggagtgtgacaagcgctatcgcgtgaaggccgaaatggaggcccaccagctgctgcacagcggnnnnnnnnnnnnnnnnagctgctgcacagcggggagatgcctttctcctgtgagtgcggcaagggctttgtgaaacactcgaagctcatcgagcacatcaggacgcacacgggagagaagccttttcagtgtcccaagtgtgacaagagtttccgcctgaaggcgcagttgctcagccatcagggcctgcacacaggagagaggcctttccactgccctgactgtggcaagaacttccgggaaaggggacacatgctgaggcaccagcgcatccacaggcccgagaggccctttgcctgtggcgactgtgggaagggcttcatttacaagtctaagcttgcagagcacatcagagtacacacaaaatcctgtcctgctccaaatgaactggacattaagaaaaggctcagccaactgtttgcaatgatagaggccgactggagttgaggcagagtgggacatccaaagcgttgagcaggagtggtattgcccgggaatccaccgcaacagtagccagacctgctggtagatgggttttaggagcaggtgtccttctttgagcaagagtgtcatacaagttaggaatatgaggaaccacaaaggattttctcttcggaaacattaccaattatattt

SEQ ID NO: 22481 - DNA, 1758 bp, Macaca Mulatta
  misc_feature (1)...(1758): n = A,T,C or G
gacccagcggaccagcggaccacctgcggcctgtggtagttggaggtagcctgcttagctcagttccttcagcgcctgtagcttcggcggagtctgcgcgatgggtgacccggaaaggccggaagcggccgggctggatctggatgagnnnnnnnnnnnnnnnnnnnnnnnnnnnnnnnnnnnnnnnnnnnnnnnnnnnnnnnnnnnnnnnnnnnnnnnnnnnnnnnnnnnnnnnnnnnnnnnnnnnnnnnnnnnnnnnnnnnnnnnnnnnnnnnnnnnnnnnnnnnnnnnnnnnnnnnnnnnnnnnnnnnnnnnnnnnnnnnnnnnnnnnnnnnnnnnnnnnnnnnnnnnnnnnnnnnnnnnnnnnnnnnnnnnnnnnnnnnnnnnnnnnnnnnnnnnnnnnnnnnnnnnnnnnnnnnnnnnnnnnnnnnnnnnnnnnnnnnnnnnnnnnnnnnnnnnnnnnnnnnnnnnnnnnnnnnnnnnnnnnnnnnnnnnnnnnnnnnnnnnnnnnnnnnnnnnnnnnnnnnnnnnnnnnnnnnnnnnnnnnnnnnnnnnnnnnnnnnnnnnnnnnnnnnnnnnnnnnnnnnnnnnnnnnnnnnnnnnnnnnnnnnnnnnnnnnnnnnnnnnnnnnnnnnnnnnnnnnnnnnnnnnnnnnnnnnnnnnnnnnnnnnnnnnnnnnnnnnnnnnnnnnnnnnnnnnnnnnnnnnnnnnnnnnnnnnnnnnnnnnnnnnnnnnnnnnnnnnnnnnnnnnnnnnnnnnnnnnnnnnnnnnnnnnnnnnnnnnnnnnnnnnnnnnnnnnnnnnnnnnnnnnnnnnnnnnnnnnnnnnnnnnnnnnnnnnnnnnnnnnnnnnnnnnnnnnnnnnnnnnnnnnnnnnnnnnnnnnnnnnnnnnnnnnnnnnnnnnnnnnnnnnnnnnnnnnnnnnnnnnnnnnnnnnnnnnnnnnnnnnnnnnnnnnnnnnnnnnnnnnnnnnnnnnnnnnnnnnnnnnnnnnnnnnnnnnnnnnnttttcaggcagaaaatccttttgattttatggaaaacatttctttagaaggaaaaacaaatttctttgagaaacgagtttcggagtatcagcgttttgcagttatggcagaaaccacagataatgtcttcaccttggatgcagatttttaaaaaacctcttgttttaaaactctataaacttgtcattggtaaatagtagtctattttcctctgctttaaaaaaatttttaaagtatatcctttaaaggactgggggtttgctcaaaaggaaatccaaaacttattccacacaatttgcatttatgtaattttcctgtttaacagcaagagtgtggcctaaacgcttttgtcttgtcactgaaataaaagatggcattatgtggttaagagcatggggtgaggggtcagacgtgagtttaaggttctgcccttactccaatgtgtgatccttggcaagtcagttaatcttggtaaacctcagtgtacttatatttaaaatgggagtaatagtaggtcctacattcatagagtggatatgaggattaggatgcaaaaataaatgcttaaccaacactactactgttagcaccactactaattatcatgtcgttgataatattaattgcagtgatgttgtaataaaatactttcttttccttaaagtaattgtgattctaggccctaggatctagaattagatctttgtatttttaatgcttaggggaagaatataagtatctctttaaaaagaac

SEQ ID NO: 22482 - DNA, 3305 bp, Macaca Mulatta
  misc_feature (1)...(3305): n = A,T,C or G
aactataagactttgattattatctgcgcactcttcactttggtcacagtacttttgtggaataagtgttccagtgacaaagcaatccagtttccacggcgtttgagtagtggcttcagagtggatggattagaaaaaagagcagcagcatctgagagtaacaactatatgaaccacgtggccaaacaacagtctgaggaagcattccctcaggaacagcagaaagctccccctgttgttgggggcttcaatagcaatgtgggaagtaaggtgttagggctcaaatatgaagaaattgactgtctcataaatgatgaacacacaattaaagggagacgagaggggaacgaagtctttcttccattcacttgggttgagaaatattttgatgtttatggaaaggtggttcagtatgatggctatgatcggtttgaattctctcatagctattccaaagtctatgcacagagagccccctatcaccccgatggtgtgtttatgtcttttgaaggctacaatgtggaagtccgtgacggagtcaagtgcataagtggggttgaaggnnnnnnnnnnnnnnnnnnnnnnnnnnnnnnnnnnnnnnnnnnnnnnnnnnnnnnnnnnnnnnnnnnnnnnnnnnnnnnnnnnnnnnnnnnnnnnnnnnnnnnnnnnnnnnnnnnnnnnnnnnnnnnnnnnnnnnnnnnnnnnnnnnnnnnnnnnnnnnnnnnnnnnnnnnnnnnnnnnnnnnnnnnnnnnnnnnnnnnnnnnnnnnnnnnnnnnnnnnnnnnnnnnnnnnnnnnnnnnnnnnnnnnnnnnnnnnnnnnnnnnnnnnnnnnnnnnnnnnnnnnnnnnnnnnnnnnnnnnnnnnnnnnnnnnnnnnnnnnnnnnnnnnnnnnnnnnnnnnnnnnnnnnnnnnnnnnnnnnnnnnnnnnnnnnnnnnnnnnnnnnnnnnnnnnnnnnnnnnnnnnnnnnnnnnnnnnnnnnnnnnnnnnnnnnnnnnnnnnnnnnnnnnnnnnnnnnnnnnnnnnnnnnnnnnnnnnnnnnnnnnnnnnnnnnnnnnnnnnnnnnnnnnnnnnnnnnnnnnnnnnnnnnnnnnnnnnnnnnnnnnnnnnnnnnnnnnnnnnnnnnnnnnnnnnnnnnnnnnnnnnnnnnnnnnnnnnnnnnnnnnnnnnnnnnnnnnnnnnnnnnnnnnnnnnnnnnnnnnnnnnnnnnnnnnnnnnnnnnnnnnnnnnnnnnnnnnnnnnnnnnnnnnnnnnnnnnnnnnnnnnnnnnnnnnnnnnnnnnnnnnnnnnnnnnnnnnnnnnnnnnnnnnnnnnnnnnnnnnnnnnnnnnnnnnnnnnnnnnnnnnnnnnnnnnnnnnnnnnnnnnnnnnnnnntcaattcagctttaagggcactgccccttataagtttctgtctgagcagcatggagtgaaagctgtgtttatgaataaacatgactggtatgaagaatatccaaccacacctagctcttttgttttaaatggctttatgtattctttaattgggctgtatgacttaaaagaaactgcaggggaaaaactcggaaaagaagcaaggtccttgtatgagcgtggcatggaatctcttaaagccatgctgcccttgtatgacactggctcaggaaccatctatgacctccgtcacttcatgcttggcatcgctcctaacctggctcgctgggactatcataccacccacatcaatcagttgcagctactcagtaccattgatgagtccccgatcttcaaagaatttgtcaagaggtggaaaagctaccttaaaggcagcagggcaaagcacaactagagctcacaaccaaaattatacttcagcctctgctgtacacagaaactacaggctctgtctcaggagagcataggcacattttaaaaggttatgtactaggtttttgtggattctatcaaagnnnnnnnnnnnnnnnnnnnnnnnnnnnnnnnnnnnnnnnnnnnnnnnnnnnnnnnnnnnnnnnnnnnnnnnnnnnnnnnnnnnnnnnnnnnnnnnnnnnnnnnnnnnnnnnnnnnnnnnnnnnnnnnnnnnnnnnnnnnnnnnnnnnnnnnnnnnnnnnnnnnnnnnnnnnnnnnnnnnnnnnnnnnnnnnnnnnnnnnnnnnnnnnnnnnnnnnnnnnnnnnnnnnnnnnnnnnnnnnnnnnnnnnnnnnnnnnnnnnnnnnnnnnnnnnnnnnnnnnnnnnnnnnnnnnnnnnnnnnnnnnnnnnnnnnnnnnnnnnnnnnnnnnnnnnnnnnnnnnnnnnnnnnnnnnnnnnnnnnnnnnnnnnnnnnnnnnnnnnnnnnnnnnnnnnnnnnnnnnnnnnnnnnnnnnnnnnnnnnnnnnnnnnnnnnnnnnnnnnnnnnnnnnnnnnnnnnnnnnnnnnnnnnnnnnnnnnnnnnnnnnnnnnnnnnnnnnnnnnnnnnnnnnnnnnnnnnnnnnnnnnnnnnnnnnnnnnnnnnnnnnnnnnnnnnnnnnnnnnnnnnnnnnnnnnnnnnnnnnnnnnnnnnnnnnnnnnnnnnnnnnnnnnnnnnnnnnnnnnnnnnnnnnnnnnnnnnnnnnnnnnnnnnnnnnnnnnnnnnnnnnnnnnnnnnnnnnnnnnnnnnnnnnnnnnnnnnnnnnnnnnnnnnnnnnnnnnnnnnnnnnnnnnnnnnnnnnnnnnnnnnnnnnnnnnnnnnnnnnnnnnnnnnnnnnnnnnnnnnnnnnnnnnnnnnnnnnnnnnnnnnnnnnnnnnnnnnnnnnnnnnnnnnnnnnnnnnnnnnnnnnnnnnnnnnnnnnnnnnnnnnnnnnnnnnnnnnnnnnnnnnnnnnnnnnnnnnnnnnnnnnnnnnnnnnnnnnnnnnnnnnnnnnnnnnnnnnnnnnnnnnnnnnnnnnnnnnnnnnnnnnnnnnnnnnnnnnnnnnnnnnnnnnnnnnnnnnnnnnnnnnnnnnnnnnnnnnnnnnnnnnnnnnnnnnnnnnnnnnnnnnnnnnnnnnnnnnnnnnnnnnnnnnnnnnnnnnnnnnnnnnnnnnnnnnnnnnnnnnnnnnnnnnnnnnnnnnnnnnnnnnnnnnnnnnaccgagggatgttgattttgctgcgccagtacactaaatcaatagtatatcttatacagtttgaaaatatgataccctacactttcaggggaccgagtctgacaaacacaatgcatttatctgtgacctgtatcaagtgcacatttaggagccaggtaggttacctgcttacacactatattttaattgaattcaaactaccaagcactacttagaaactggaaaa

SEQ ID NO: 22483 - DNA, 559 bp, Macaca Mulatta
  misc_feature (1)...(559): n = A,T,C or G
cattttgatggtgacganctttgatgatgtggaagaggatgaagggctagatgacttggagaatgctgaagaggaaggccaggagaatgtcgagatcctcccctctggggagcgaccgcaggccaaccagaagcgaatcaccacaccatatatgaccaagtacgagcgagcccgtgtgctgggcacccgagcgctccagattgcgatgtgtgcccctgtgatggtggagctggagggggagacagatcctctgctcattgccatgaaggaactcaaggcccgaaagatccccatcatcattcgccgttacctgccagatgggagctatgaagactggggggtggacgagctcatcatcaccgactgagctggagtcatcttcctgcccttgcccaattttcattcccactttatatgtgtaaataaaatattcaacnnnnnnnnnnnnnnnnnnnnnnnnnnnnnnnnnnnnnnnnnnnnnnnnnnnnnnnnnnnnnnnnnnnnnnnnnnnnnnnnnnnnnnnnnnnnnnnnnnnnnnngcggttaccaacttaatcgc

SEQ ID NO: 22484 - DNA, 4385 bp, Macaca Mulatta
  misc_feature (1)...(4385): n = A,T,C or G
ctacttacaggtactgtatccagcctggaagaccatggctacctagtggacattggtgttgatgggaccagagctttcctgccactgctgaaagcccaggagtacatcagacagaagaacannnnnnnnnnnnnnnnnnnnnnnnnnnnnnnnnnnnnnnnnnnnnnnnnnnnnnnnnnnnnnnnnnnnnnnnnnnnnnnnnnnnnnnnnnnnnnnnnnnnnnnnnnnnnnnnnnnnnnnnnnnnnnnnnnnnnnnnnnnnnnnnnnnnnnnnnnnnnnnnnnnnnnnnnnnnnnnnnnnnnnnnnnnnnnnnnnnnnnnnnnnnnnnnnnnnnnnnnnnnnnnnnnnnnnnnnnnnnnnnnnnnnnnnnnnnnnnnnnnnnnnnnnnnnnnnnnnnnnnnnnnnnnnnnnnnnnnnnnnnnnnnnnnnnnnnnnnnnnnnnnnnnnnnnnnnnnnnnnnnnnnnnnnnnnnnnnnnnnnnnnnnnnnnnnnnnnnnnnnnnnnnnnnnnnnnnnnnnnnnnnnnnnnnnnnnnnnnnnnnnnnnnnnnnnnnnnnnnnnnnnnnnnnnnnnnnnnnnnnnnnnnnnnnnnnnnnnnnnnnnnnnnnnnnnnnnnnnnnnnnnnnnnnnnnnnnnnnnnnnnnnnnnnnnnnnnnnnnnnnnnnnnnnnnnnnnnnnnnnnnnnnnnnnnnnnnnnnnnnnnnnnnnnnnnnnnnnnnnnnnnnnnnnnnnnnnnnnnnnnnnnnnnnnnnnnnnnnnnnnnnnnnnnnnnnnnnnnnnnnnnnnnnnnnnnnnnnnnnnnnnnnnnnnnnnnnnnnnnnnnnnnnnnnnnnnnnnnnnnnnnnnnnnnnnnnnnnnnnnnnnnnnnnnnnnnnnnnnnnnnnnnnnnnnnnnnnnnnnnnnnnnnnnnnnnnnnnnnnnnnnnnnnnnnnnnnnnnnnnnnnnnnnnnnnnnggttttgctttgtgaccctgaagccaagaagctgatgatgaccctgaaaaaaaccctggttgagtccaaactacctgtcattacctgctatgccgatgccaagcctggtctgcagacacatggcttcatcatcagggtcaaggactatggctgcattgtgaagttctacaacaatgtgcagggactggtgcccaagcatgagctcagtaccgagtatatccctgacccggagagagttttttacactggccaggnnnnnnnnnnnnnnnnnnnnnnnnnnnnnnnnnnnnnnnnnnnnnnnnnnnnnnnnnnnnnnnnnnnnnnnnnnnnnnnnnnnnnnnnnnnnnnnnnnnnnnnnnnnnnnnnnnnnnnnnnnnnnnnnnnnnnnnnnnnnnnnnnnnnnnnnnnnnnnnnnnnnnnnnnnnnnnnnnnnnnnnnnnnnnnnnnnnnnnnnnnnnnnnnnnnnnnnnnnnnnnnnnnnnnnnnnnnnnnnnnnnnnnnnnnnnnnnnnnnnnnnnnnnnnnnnnnnnnnnnnnnnnnnnnnnnnnnnnnnnnnnnnnnnnnnnnnnnnnnnnnnnnnnnnnnnnnnnnnnnnnnnnnnnnnnnnnnnnnnnnnnnnnnnnnnnnnnnnnnnnnnnnnnnnnnnnnnnnnnnnnnnnnnnnnnnnnnnnnnnnnnnnnnnnnnnnnnnnnnnnnnnnnnnnnnnnnnnnnnnnnnnnnnnnnnnnnnnnnnnnnnnnnnnnnnnnnnnnnnnnnnnnnnnnnnnnnnnnnnnnnnnnnnnnnnnnnnnnnnnnnnnnnnnnnnnnnnnnnnnnnnnnnnnnnnnnnnnnnnnnnnnnnnnnnnnnnnnnnnnnnnnnnnnnnnnnnnnnnnnnnnnnnnnnnnnnnnnnnnnnnnnnnnnnnnnnnnnnnnnnnnnnnnnnnnnnnnnnnnnnnnnnnnnnnnnnnnnnnnnnnnnnnnnnnnnnnnnnnnnnnnagactctgtgttgatccagacactggctgagatgaccccaggaatgttccttgacctagtggtgcaggaggtgttggaagatggctctgtggtattcagtgggggtccggtgcccgacctggtcctgagagccagcagataccatcgcgcagnnnnnnnnnnnnnnnnnnnnnnnnnnnnnnnnnnnnnnnnnnnnnnnnnnnnnnnnnnnnnnnnnnnnnnnnnnnnnnnnnnnnnnnnnnnnnnnnnnnnnnnnnnnnnnnnnnnnnnnnnnnnnnnnnnnnnnnnnnnnnnnnnnnnnnnnnnnnnnnnnnnnnnnnnnnnnnnnnnnnnnnnnnnnnnnnnnnnnnnnnnnnnnnnnnnnnnnnnnnnnnnnnnnnnnnnnnnnnnnnnnnnnnnnnnnnnnnnnnnnnnnnnnnnnnnnnnnnnnnnnnnnnnnnnnnnnnnnnnnnnnnnnnnnnnnnnnnnnnnnnnnnnnnnnnnnnnnnnnnnnnnnnnnnnnnnnnnnnnnnnnnnnnnnnnnnnnnnnnnnnnnnnnnnnnnnnnnnnnnnnnnnnnnnnnnnnnnnnnnnnnnnnnnnnnnnnnnnnnnnnnnnnnnnnnnnnnnnnnnnnnnnnnnnnnnnnnnnnnnnnnnnnnnnnnnnnnnnnnnnnnnnnnnnnnnnnnnnnnnnnnnnnnnnnnnnnnnnnnnnnnnnnnnnnnnnnnnnnnnnnnnnnnnnnnnnnnnnnnnnnnnnnnnnnnnnnnnnnnnnnnnnnnnnnnnnnnnnnnnnnnnnnnnnnnnnnnnnnnnnnnnnnnnnnnnnnnnnnnnnctcccaataagtcaccccagatttgttcgaaccatcccggagctgagtgttcggccaagnnnnnnnnnnnnnnnnnnnnnnnnnnnnnnnnnnnnnnnnnnnnnnnnnnnnnnnnnnnnnnnnnnnnnnnnnnnnnnnnnnnnnnnnnnnnnnnnnnnnnnnnnnnnnnnnnnnnnnnnnnnnnnnnnnnnnnnnnnnnnnnnnnnnnnnnnnnnnnnnnnnnnnnnnnnnnnnnnnnnnnnnnnnnnttccaggttctgaagcatccagataagaagttccgggttggccaggccctgagggccaccgtgattggcccagattcctccaaggccttcttatgcctgtccctcataggtnnnnnnnnnnnnnnnnnnnnnnnnnnnnnnnnnnnnnnnnnnnnnnnnnnnnnnnnnnnnnnnnnnnnnnnnnnnnnnnnnnnnnnnnnnnnnnnnnnnnnnnnnnnnnnnnnnnnnnnnnnnnnnnnnnnnnnnnnnnnnnnnnnnnnnnnnnnnnnnnnnnnnnnnnnnnnnnnnnnnnnnnnnnnnnnnnnnnnnnnnnnnnnnnnnnnnnnnnnnnnnnnnnnnnnngaacaaacccggagacgaaaagcaaagtagaagatccagagattaactccatccaggatattaaggaagggcagcttctgaggggctacgtggggtccatccagccacatggtgtgttctttcgnnnnnnnnnnnnnnnnnnnnnnnnnnnnnnnnnnnnnnnnnnnnnnnnnnnnnnnnnnnnnnnnnnnnnnnnnnnnnnnnnnnnnnnnnnnnnnnnnnnnnnnnnnnnnnnnnnnnnnnnnnnnnnnnnnnnnnnnnnnnnnnnnnnnnnnnnnnnnnnnnnnnnnnnnnnnnnnnnnnnnnnnnnnnnnnnnnnnnnnnnnnnnnnnnnnnnnnnnnnnnnnnnnnnnnnnnnnnnnnnnnnnnnnnnnnnnnnnnnnnnnnnnnnnnnnnnnnnnnnnnnnnnnnnnnnnnnnnnnnnnnnnnnnnnnnnnnnnnnnnnnnnnnnnnnnnnnnnnnnnnnnnnnnnnnnnnnnnnnnnnnnnnnnnnnnnnnnnnnnnnnnnnnnnnnnnnnnnnnnnnnnnnnnnnnnnnnnnnnnnnnnnnnnnnnnnnnnnnnnnnnnnnnnnnnnnnnnnnnnnnnnnnnnnnnnnnnnnnnnnnnnnnnnnnnnnnnnnnnnnnnnnnnnnnnnnnnnnnnnnnnnnnnnnnnnnnnnnnnnnnnnnnnnnnnnnnnnnnnnnnnnnnnnnnnnnnnnnnnnnnnnnnnnnnnnnnnnnnnnnnnnnnnnnnnnnnnnnnnnnnnnnnnnnnnnnnnnnnnnnnnnnnnnnnnnnnnnnnnnnnnnnnnnnnnnnnnnnnnnnnnnnnnnnnnnnnnnnnnnnnnnnnnnnnnnnnnnnnnnnnnnnnnnnnnnnnnnnctgtcccgcattgaggaggcgctgatggatcctgggcggcagccagagtctgcggatgattttgaccgactagtgctcagctcccccaacagctccattctgtggctgcagtacatggctttccacctgcaggccacggagatcgagaaggcccgtgccgtggccgagagggcccttaagaccatctccttca

SEQ ID NO: 22485 - DNA, 772 bp, Macaca Mulatta
tccaccccctaaccccattgccccagtgcctcatttggtctaaagccacctaacttttccattcttaaatcaggcggattatgtaaaatggcctccaaaaggaaaacaccttacaaaatccacagggaaatcaaagtagaccaattcaggtttaaaagaaatagtctattaacaataaaaagtgggattaaaaagcacactaaaggttctaggggctaccataataaaggtagataggaagagttttcattttttgtcttcactgtacaaaagaaatacattatatacatgtattgagagcctcatctgtatccggtttttcattttcccgatgtgttattttgctgttgctgctctgccaaggcttgctgaaggcgcatccgcttccgggaatagtgctgccaatgtagaatctgctgttcatcaatgaatttcgcacactgagcattcaccagctcctttcggaagtgttcgtattggagcagctctaacatgtgtaaacactgagggtactttagatacttggcatattctgggtctttccagtaaagcaagtatttaagataattaacaaaagctttgtctttgaagtaacctctttgggcaagaaaattaaggtaatttgggttggctaaacattgcacaaattccaactccaactgaaaccgaagtcgatttccagcatcatctgtctccatagcgacggcagcggccataacaaacgaagataccaaaacgccaccagcctgaccgagcaaaagcccagagtccc

SEQ ID NO: 22486 - DNA, 801 bp, Macaca Mulatta
ggtgaaagaacccctccaacaaactttaaaaggacactagaagagtccaattctggccccctgatgaagaaacatagacgaaatggcttaagtcgaagtagtggtgctcagcctgcaagtctccccacaacctcacagcgaaagaactctgttaaacttaccatgcgacgcagacttaggggccagaagaaaattggaaatcctttacttcatcaacacaggaaaactgtttgtgtttgctgaaatgcatctgggaaatgaggtttttccaaacttaggagagagctttttaaatttggtgccgaagttggacttttttttaaggagacaaaattaaaagaatatacagtttgactttttggaattcagcagttttatcctggccttgtacttgcttgtattataaatgtggattttatagatgttagggtataagttgctgtaaaatttgtgtaaatttgtatccacacaaattcagtctcttactctgatacacagtaattgtgacaacagggctaaatgtttaaagaaatcaaaagaatctattagattttagaaaaacatttaagctttttaaaatacttattaaaaaatttgtataagccacttgtcttgaaaactgcgcaactttttaaagtaaattattaagcagactggaaaagtgatgtattttcatagtgacctgtgtttcacttaatgtttcttagagacaggtgtcttttaaacattattttttatttcggatttcataattcagaactaaatttttcatagaaatgttgagccatggctacggtttaa

SEQ ID NO: 22487 - DNA, 268 bp, Macaca Mulatta
agctactttgtggtgtctaagtttctgataaaagggatgatcttaattgaagaatttaaagagatacttaaagagcaaatgtagtaggagcaacagagtgagccttataagaggacgttcagtctcatttattaaaataatgactgagactgggagaggtggctcacacctgtaaatcccagcactttggtagcatgaagtgggagattgcttgagtccaggagttcgagaccaacctgggcaacatagcaaaacctcatatctattt

SEQ ID NO: 22488 - DNA, 758 bp, Macaca Mulatta
ggggaagtgacatcgtctttaaaccctgcgtggcaatccctgacgcaccgccgtgatgcccagggaagaaagggcgacctggaagtccaactacttccttaagatcatccaacaattggatgattatccgaaatgtttcatcgtgggagcggacaatgtgggctcaaagcagatgcagcagatccgcatgtcccttcgagggaaggccgtggtgctgatgggcaagaacaccatgatgcgcaaggccatccgagggcacctggaaaacaacccagctctggaaactgctgcctcatatccgggggaatgtgggctttgtgttcaccaaggaggatctcactgagatcaaggacatgttgctggccaataaggtgccagctgctgcccgtgctggtgacattgctccatgtgaagtcactgtgccagcccagaacactggactcgggcccgagaagacctcctttttccaggctttaggtatcaccactaaaatctccaggggcaccattgaaatcctgagtgatgtgcaagctgatcaagactgggagacaaaagtgggaagccagcgaaagccacgcctgactgaaactatgctcaaacatactccccccctttctccactttatggggctggggtccattccagacaagattggtttttggaacaaaatggggccagccacttccttaccaattcccccatgaaaaaattgggcttggtgtaactcattccaaccgaagaatgggggaaaaaaaca

SEQ ID NO: 22489 - DNA, 2564 bp, Macaca Mulatta
  misc_feature (1)...(2564): n = A,T,C or G
tggagccacgtttaaatggaaaaggattaatcatatctctaattttcttcctgttaaaattctcaacagcaattgaaataccannnnnnnnnnnnnnnnnnnnnnnnnnnnnnnnnnnnnnnnnnnnnnnnnnnnnnnnnnnnnnnnnnnnnnnnnnnnnnnnnnnnnnnnnnnnnnnnnnnnnnnnnnnnnnnnnnnnnnnnnnnnnnnnnnnnnnnnnnnnnnnnnnnnnnnnnnnnnnnnnnnnnnnnnnnnnnnnnnnnnnnnnnnnnnnnnnnnnnnnnnnnnnnnnnnnnnnnnnnnnnnnnnnnnnnnnnnnnnnnnnnnnnnnnnnnnnnnnnnnnnnnnnnnnnnnnnnnnnnnnnnnnnnnnnnnnnnnnnnnnnnnnnnnnnnnnnnnnnnnnnnnnnnnnnnnnnnnnnnnnnnnnnnnnnnnnnnnnnnnnnnnnnnnnnnnnnnnnnnnnnnnnnnnnnnnnnnnnnnnnnnnnnnnnnnnnnnnnnnnnnnnnnnnnnnnnnnnnnnnnnnnnnnnnnnnnnnnnnnnnnnnnnnnnnnnnnnnnnnnnnnnnnnnnnnnnnnnnnnnnnnnnnnnnnnnnnnnnnnnnnnnnnnnnnnnnnnnnnnnnnnnnnnnnnnnnnnnnnnnnnnnnnnnnnnnnnnnnnnnnnnnnnnnnnnnnnntaaagcatgctaatgactcaagttcatccacagaaattggttccaagnnnnnnnnnnnnnnnnnnnnnnnnnnnnnnnnnnnnnnnnnnnnnnnnnnnnnnnnnnnnnnnnnnnnnnnnnnnnnnnnnnnnnnnnnnnnnnnnnnnnnnnnnnnnnnnnnnnnnnnnnnnnnnnnnnnnnnnnnnnnnnnnnnnnnnnnnnnnnnnnnnnnnnnnnnnnnnnnnnnnnnnnnnnnnnnnnnnnnnnnnnnnnnnnnnnnnnnnnnnnnnnnnnnnnnnnnnnnnnnnnnnnnnnnnnnnnnnnnnnnnnnnnnnnnnnnnnnnnnnnnnnnnnnnnnnnnnnnnnnnnnnnnnnnnnnnnnnnnnnnnnnnnnnnnnnnnnnnnnnnnnnnnnnnnnnnnnnnnnnnnnnnnnnnnnnnnnnnnnnnnnnnnnnnnnnnnnnnnnnnnnnnnnnnnnnnnnnnnnnnnnnnnnnnnnnnnnnnnnnnnnnnnnnnnnnnnnnnnnnnnnnnnnnnnnnnnnnnnnnnnnnnnnnnnnnnnnnnnnnnnnnnnnnnnnnnnnnnnnnnnnnnnnnnnnnnnnnnnnnnnnnnnnnnnnnnnnnnnnnnnnnnnnnnnnnnnnnnnnnnnnnnnnnnnnnnnnnnnnnnnnnnnnnnnnnnnnnnnnnnnnnnnnnnnnnnnnnnnnnnnnnnnnnnnnnnnnnnnnnnnnnnnnnnnnnnnnnnnnnnnnnnnnnnnnnnnnnnnnnnnnnnnnnnnnnnnnnnnnnnnnnnnnnnnnnnnnnnnnnnnnnnnnnnnnnnnnnnnnnnnnnnnnnnnnnnnnnnnnnnnnnnnnnnnnnnnnnnnnnnnnnnnnnnnnnnnnnnnnnnnnnnnnnnnnnnnnnnnnnnnnnnnnnnnnnnnnnnnnnnnnnnnnnnnnnnnnnnnnnnnnnnnnnnnnnnnnnnnnnnnnnnnnnnnnnnnnnnnnnnnnnnnnnnnnnnnnnnnnnnnnnnnnnnnnnnnnnnnnnnnnnnnnnnnnnnnnnnnnnnnnnnnnnnnnnnnnnnnnnnnnnnnnnnnnnnnnnnnnnnnaggataattattgatggagctaatttgaccatatctaatgtaactttagaggaccaaggtatttactgctgttcagctcttactgctctagatagtgctgcagatataactcaagtaactgttcttgnnnnnnnnnnnnnnnnnnnnnnnnnnnnnnnnnnnnnnnnnnnnnnnnnnnnnnnnnnnnnnnnnnnnnnnnnnnnnnnnnnnnnnnnnnnnnnnnnnnnnnnnnnnnnnnnnnnnnnnnnnnnnnnnnnnnnnnnnnnnnnnnnnnnnnnnnnnnnnnnnnnnnnnnnnnnnnnnnnnnnnnnnnnnnnnnnnnnnnnnnnnnnnnnnnnnnnnnnnnnnnnnnnnnnnnnnnnnnnnnnnnnnnnnnnnnnnnnnnnnnnnnnnnnnnnnnnnnnnnnnnnnnnnnnnnnnnnnnnnnnnnnnnnnnnnnnnnnnnnnnnnnnnnnnnnnnnnnnnnnnnnnnnnnnnnnnnnnnnnnnnnnnnnnnnnnnnnnnnnnnnnnnnnnnnnnnnnnnnnnnnnnnnnnnnnnnnnnnnnnnnnnnnnnnnnnnnnnnnnnnnnnnnnnnnnnnnnnnnnnnnnnnnnnnnnnnnnnnnnnnnnnnnnnnnnnnnnnnnnnnnnnnnnnnnnnnnnnnnnnnnnnnnnnnnnnnnnnnnnnnnnnnnnnnnnnnnnnnnnnnnnnnnnnnnnnnnnnnnnnnnnnnnnnnnnnnntcctgatacagctccagtgatccatgtggtggacgttattaacagtacattagctaaaggtacctggtctacaattccccaggactgagtacctgga

SEQ ID NO: 22490 - DNA, 179 bp, Macaca Mulatta
tctactgagttttctatatcatccacctcacgccgcatataccggtgtcgtaactgcattagccttgagaatgaggctcaaaaacgagaatcatttttgaagtacagatgtttacttcaacagctctactttacagaagctgattatgaagatgattctaaaattgctttcttgatgca

SEQ ID NO: 22491 - DNA, 648 bp, Macaca Mulatta
  misc_feature (1)...(648): n = A,T,C or G
gggggaccacccgaccagaaactatggttatttacaccccacaggaacgctttgagatcggacaggccaaggtcctccgccactgtgtcagtgacaaggtcacagttattggagctggaattactgtgtatgaagccttagcagctgctgatgagcttttgaaacaagatatttttatccgtgtcatcgacctgtttaccattaaacctctggatgtcaccactatcatctccagtgcaaaagccacagagggccggatcattacagtggaggatcactacccgcaaggtggcatcggggaagctgtctgtgcggccgtctccatggatcctgacattcangttcattcgctggcagtgtcaggagtgccccagagtgggaagtccgaagaattgctggatatgtatggaattagtgccagacatatcatagtggccgtgaaatgcatgttgttgaactaaaatagctgttagcttttgtctttttgcttctttaccctatgttaagtttggtccaaaccatcattaaatcttactggcgggtttgttctaaagcaaaccactaccctttttttcccagtttgaatcaaccacactttccttaacgggatgcaatcaaaccctgattttaacttaagggttcaatttn

SEQ ID NO: 22492 - DNA, 1967 bp, Macaca Mulatta
  misc_feature (1)...(1967): n = A,T,C or G
gggatcagtgtccttcacggatgtagctatcgatttcagcagagaggaatggcggcacctggacccttctcagagaaatctgtaccgggatgtgatgctggagacctatagccacctgctctcagtaggntatcaagttcctgaagcagaggtggtcatgttggagcaaggaaaggaaccatgggcactgcagggtgagaggccacgtcaaagctgcccaggnnnnnnnnnnnnnnnnnnnnnnnnnnnnnnnnnnnnnnnnnnnnnnnnnnnnnnnnnnnnnnnnnnnnnnnnnnnnnnnnnnnnnnnnnnnnnnnnnnnnnnnnnnnnnnnnnnnnngatattcacccagaagtcacagctcaaagtacacctgaaagttcttgcgggagaaaagctctatgtatgtattgaatgtgtgaaggcttttgtacagaagccagaatttattatacaccagaaaacccatatgagagagaaaccctttaaatgcaatgaatgtggaaaatccttttaacaagtgtcgtctctcttcagacatcagagaattcataccggagagaaactctatgaatgcagccaatgtgggaaaggcttctcttataactcagatctcagtatacatgagaaaattcatactggagagagacaccatgaatgcactgactgtggcaaagcgttcacacaaaagtccacactcaagatgcatcagaaaatccacacaggcgagagatcctatatctgtattgaatgcggacaggccttcatccannnnnnnnnnnnnnnnnnnnnnnnnnnnnnnnnnnnnnnnnnnnnnnnnnnnnnnnnnnnnnnnnnnnnnnnnnnnnnnnnnnnnnnnnnnnnnnnnnnnnnnnnnnnnnnnnnnnnnnnnnnnnnnnnnnnnnnnnnnnnnnnnnnnnnnnnnnnnnnnnnnnnnnnnnnnnnnnnnnnnnnnnnnnnnnnnnnnnnnnnnnnnnnnnnnnnnnnnnnnnnnnnnnnnnnnnnnnnnnnnnnnnnnnnnnnnnnnnnnnnnnnnnnnnnnnnnnnnnnnnnnnnnnnnnnnnnnnnnnnnnnnnnnnnnnnnnnnnnnnnnnnnnnnnnnnnnnnnnnnnnnnnnnnnnnnnnnnnnnnnnnnnnnnnnnnnnnnnnnnnnnnnnnnnnnnnnnnnnnnnnnnnnnnnnnnnnnnnnnnnnnnnnnnnnnnnnnnnnnnnnnnnnnnnnnnnnnnnnnnnnnnnnnnnnnnnnnnnnnnnnnnngtgggaaattgtttacttccaagtcacaactgcatgttcataaacgaattcacacaggagaaaaaccctacatgtgcaataaatgtgggaaggcatttaccaaccggtcaaatctcattacacatcagaaaactcatacaggagagaaatcttatatatgttccaaatgtggaaaggccttcacccagaggtcagacttgattacacatcagagaatccatactggggagaagccttatgaatgcagtacttgtggaaaagccttcactcagaagtcacacctcaatatacaccagaaaattcatactggagagagacagtatgaatgccacgaatgtgggaaagccttcaaccagaaatcaatactcattgttcatcagaaaattcatacaggagagaaaccctatgtatgcaccgagtgtggaagagctttcatccgcaagtcaaactttattactcatcaaagaattcatactggagagaaaccttatgaatgcagtgactgtgggaagtcctttacctctaagtctcagctcctggtgcatcagccaattcacacaggagagaaaccctatgtgtgtgccgagtgtgggaaagcctttagtggcaggtcaaatctcagtaagcatcagataactcataccggagagaagccctacatctgttctgaaagcgggaagacctttcgacagaaggcagaggtgattacac

SEQ ID NO: 22493 - DNA, 1431 bp, Macaca Mulatta
  misc_feature (1)...(1431): n = A,T,C or G
ggtggtgctggctagagtgtatacgtnnnnnnnnnnnnnnnnnnnnnnnnnnnnnnnnnnnnnnnnnnnnnnnnnnnnnnnnnnnnnnnnnnnnnnnnnnnnnnnnnnnnnnnnnnnnnnnnnnnnnnnnnnnnnnnnnnnnnnnnnnnnnnnnnnnnnnnnnnnnnnnnnnnnnnnnnnnnnnnnnnnnnnnnnnnnnnnnnnnnnnnnnnnnnnnnnnnnnnnnnnnnnnnnnnnnnnnnnnnnnnnnncagatcatccaatggcagaccagagaatggacatttcttcaaccatcagtgatttcatgtccccgggccccactgacctgctttccggctctcttggtaccagtggtgtggattgcaaccgcaaacggaaaggcagctccactgactaccnnnnnnnnnnnnnnnnnnnnnnnnnnnnnnnnnnnnnnnnnnnnnnnnnnnnnnnnnnnnnnnnnnnnnnnnnnnnnnnnnnnnnnnnnnnnnnnnnnnnnnnnnnnnnnnnnnnnnnnnnnnnnnnnnnnnnnnnnnnnnnnggcttctttggtaccaacatgcaacgcaatgtccaggaaattagataaacttactgtgctaaggatggctgttcagcacatgaaaacattaagaggtgnnnnnnnnnnnnnnnnnnnnnnnnnnnnnnnnnnnnnnnnnnnnnnnnnnnnnnnnnnnnnnnnnnnnnnnnnnnnnnnnnnnnnnnnnnnnnnnnnnnnnnnnnnnnnnnnnnnnnnnnnnnnnnnnnnnnnnnnnnnnnnnnnnnnnnnnnnnnnnnnnnnnnnnnnnnnnnnnnnnnnnnnnnnnnnnnnnnnnnnnnnnnnnnnnnnnnnnnnnnnnnnnnnnnnnnnnnnnnnnnnnnnnnnnnnnnnnnnnnnnnnnnnnnnnnnnnnnnnnnnnnnnnnnnctggacttccagttaaaacagatataacccctgggccatctcgattatgttctggagcacgacgttctttcttctgtaggatgaagtgtaacaggccttcagtaaaggttgaagacaaggacttcccctctacctgctcaaagaaaaaannnnnnnnnnnnnnnnnnnnnnnnnnnnnnnnnnnnnnnnnnnnnnnnnnnnnnnnnnnnnnnnnnnnnnnnnnnnnnnnnnnnnnnnnnnnnnnnnnnnnnnnnnnnnnnnnnnnnnnnnnnnnnnnnnnnnnnnnnnnnnnnnnnnnnnnnnnnnnnnnnnnnnnnnnnnnnnnnnnnngtgaaatctatggaatatgtttctcggcacgcgatagatggaaagtttgtttttgtagaccagaggnnnnnnnnnnnnnnggcatatttaccacaagaacttctaggcacgtcgtgttatgaatactttcaccaagatgacataggacatcttgcagaatgtcataggcaa

SEQ ID NO: 22494 - DNA, 744 bp, Macaca Mulatta
  misc_feature (1)...(744): n = A,T,C or G
tctctgccacaagaaccatcacacccccctgcgccgggaccagaccatcncgcttcgaccacgtgatcaccaacatgaacaacaactacgagccccgcagtggcaagttcacctgcagggtgcccggcctctactacttcacctaccacgccagctctcgagggaacctgtgtgtgaagctcatgcgtggccgggagcgcccacagaaggtggtcaccttctgcgactacgcctacaacaccttccaggtcaccaccggcggcatggtcctcaagctggagcagggggagaacgtcttcctgcaggccactgacaagaactcactactgggcatggagggtgccaacagcatcttctccgggttcctgctctttccagatgtggaggcctgacctgtgggctgcttcacacccaccctggctcccccttccagcaacgctcactctacccccaacactaccccttgcccagccaatgcacacagtggggcttggtgaatgttgctgagtgaatgagtaaataaactcttcaannnnnnnnnnnnnnnnnnnnnnnnnnnnnnnnnnnnnnnnnnnnnnnnnnnnnnnnnnnnnnnnnnnnnnnnnnnnnnnnnnnnnnnnnnnnnnnnnnnnnnnnnnnnnnnnnnnnnnnnnnnnnnnnnnnnnnnnnnnnnnnnnnnnnnnnnnnnnnnnnnnnnnnnnnnnnnnnnnnnnnnnnnnnnnnnnnnnnnnnnnnnnnnnnnnn

SEQ ID NO: 22495 - DNA, 1501 bp, Macaca Mulatta
  misc_feature (1)...(1501): n = A,T,C or G
ggtttccctccgcaagcgcgcgatgcagcgggcggcggcgctggtccggcggggctgtggtccccggacccccagctcctggggccgcagtcagagcagcgcggccgccgaggcctcggcggtgctcaaggtgcggcccgagcgcagccggcgcgagcgcatcctcacgctggagtccatgaacccgcaggtgaaggcggtggagtacgcggtgcggggacccatcgtgctcaaggccggcgagatcgagcttgagaagcagcggnnnnnnnnnnnnnnnnnnnnnnnnnnnnnnnnnnnnnnnnnnnnnnnnnnnnnnnnnnnnnnnnnnnnnnnnnnnnnnnnnnnnnnnnnnnnnnnnnnnnnnnnnnctacccaaacctgctggacagccccagcttcccagaagatgctctgtaacgcgcccggcggatcctgcaggcttnnnnnnnnnnnnnnnnnnnnnnnnnnnnnnnnnnnnnnnnnnnnnnnnnnnnnnnnnnnnnnnnnnnnnnnnnnnnnnnnnnnnnnnnnnnnnnnnnnnnnnnnnnnnnnnnnnnnnnnnnnnnnnnnnnnnnnnnnnnnnnnnnnnnnnnnnnnnnnnnnnnnnnnnnnnnnnnnnnnnnnnnnnnnnnnnnnnnnnnnnnnnnnnnnnnnnnnnnnnnnnnnnnnnnnnnnnnnnnnnnnnnnnnnnnnnnnnnnnnnnnnnnnnnnnnnnnnnnnnnnnnnnnnnnnnnnnnnnnnnnnnnnnnnnnnnnnnnnnnnnnnnnnnnnnnnnnnnnnnnnnnnnnnnnnnnnnnnnnnnnnnnnnnnnnnnnnnnnnnnnnnnnnnnnnnnnnnnnnnnnnnnnnnnnnnnnnnnnnnnnnnnnnnnnnnnnnnnnnnnnnnnnnnnnnnnnnnnnnnnnnnnnnnnnnnnnnnnnnnnnnnnnnnnnnnnnnnnnnnnnnnnnnnnnnnnnnnnnnnnnnnnnnnnnnnnnnnnnnnnnnnnnnnnnnnnnnnnnnnnnnnnnnnnnnnnnnnnnnnnnnnnnnnnnnnnnnnnnnnnnnnnnnnnnnnnnnnnnnnnnnnnnnnnnnnnnnnnnnnnnnnnnnnnnnnnnnnnnnnnnnnnnnnnnnnnnnnnnnnnnnnnnnnnnnnnnnnnnnnnnnnnnnnnnnnnnnnnnnnnnnnnnnnnnnnnnnnnnnnnnnnnnnnnnnnnnnnnnnnnnnnnnnnnnnnnnnnnnnnnnnnnnnnnnnnnnnnnnnnnnnnnnnnnnnnnnnnnnnnnnnnnnnnnnnnnnnnnnnnnnnnnnnnnnnnnnnnnnnnnnnnnnnnnnnnnnnnnnnnnnnnnnnnnnnnnnnnnnnnnnnnnnnnnnnnnnnnnnnnnnnnnnnnnnnnnnnnnnnnnnaggcccatcaaatggctccagacatgttctactgcatgaagctcctggaggagactggcatctgcgtcgtgcccggcagtggctttgggcagagggaaggcacttaccacttcag

SEQ ID NO: 22496 - DNA, 934 bp, Macaca Mulatta
  misc_feature (1)...(934): n = A,T,C or G
aggaaggagatgattcactacttataactgtggtacctgttaaatcatataaaacatctggaaaaatgaaaaagaattttgaggatctagaaaaagaacgtgaagagaaagaaaggatcaagtatgaggaagataaaagagtaagatatgatgaacaacgacgatctctcaaggaagcaaagtgtctttcattagttatggtaanggtaaatgaagaagaggaaaaccaagacacagcaaaaatttttaaagggtaccgccctggtaaactcaaactcagttttgaagaaatnnnnnnnnnnnnnnnnnnnnnnnnnnnnnnnnnnnnnnnnnnnnnnnnnnnnnnnnnnnnnnnnnnnnnnnnnnnnnnnnnnnnnnnnnnnnnnnnnnnnnnggtagtagattatgactccccagagatgtataagacagtctctcaagaatctcttacaccgnnnnnnnnnnnnnnnnnnnnnnnnnnnnnnnnnnnnnnnnnnnnnnnnnnnnnnnnncgacgaacagaggaagaacggaagcataagttagaaatggagaaacaagaatttgaacaactgagacaggaaatgggagaggnaggaagaggaagaaaatgaaacatttggattgagcagagaatatgaagaactgatcaaactaaaaaggagtggctctattcaagcnnnnnnnnnnnnnnnnnnnnnnnnnnnnnnnnnnnnnnnnnnnnnnnnnnnnnnnnnnnnnnnnnnaggaagatgatgttgatgttaggcctgcaagaaaaagcgaggctccatttactcacaaagtgaatatgaaagctagatttgaacaaatggctaaggnnnnnnnnnnnnnnnnnnnnnnnnnnnnnnnnnnncaaaagttactacgcatgcagtttgaacaaagggaaattgatgcagcactacaaaag

SEQ ID NO: 22497 - DNA, 135 bp, Macaca Mulatta
catgtctcactgtttaaataaaacgtcatggatatttcatgtcaggatcacaagcattatcttcacagcaaaggattcctagcatattcttactctacagtgtcttaagcaatattaaagattccttttcccaga

SEQ ID NO: 22498 - DNA, 2392 bp, Macaca Mulatta
  misc_feature (1)...(2392): n = A,T,C or G
agactatattgaactccatgcacaaataccagccccggttccacattgtaagagccaatgacatcttgaaactgccttatagtacatttcggacatacttattccccgaaactgaattcatcgctgtgactgcataccagaatgataagngataactcagttaaaaatagacaacaacccttttgcaaaaggtttccgggacactggaaatggccgaagagaaaaaagnagaaaacagctcaccctgcagtccatgagggtgtttgatgaaagacacaaaaaggagaacgggacctctgacgagtcctccagcgaacaagcagctttcaactgcttcgcccaggcttcttctccagccgtctccactgtagggacatcgaacctcaaannnnnnnnnnnnnnnnnnnnnnnnnnnnnnnnnnnnnnnnnnnnnnnnnnnnnnnnnnnnnnnnnnnnnnnnnnnnnnnnnnnnnnnnnnnnnnnnnnnnnnnnnnnnnnnnnnnnnnnnnnnnnnnnnnnnnnnnnnnnnnnnnnnnnnnnnnnnnnnnnnnnnnnnnnnnnnnnnnnnnnnnnnnnnnnnnnnnnnnnnnnnnnnnnnnnnnnnnnnnnnnnnnnnnnnnnnnnnnnnnnnnnnnnnnnnnnnnnnnnnnnnnnnnnnnnnnnnnnnnnnnnnnnnnnnnnnnnnnnnnnnnnnnnnnnnnnnnnnnnnnnnnnnnnnnnnnnnnnnnnnnnnnnnnnnnnnnnnnnnnnnnnnnnnnnnnnnnnnnnnnnnnnnnnnnnnnnnnnnnnnnnnnnnnnnnnnnnnnnnnnnnnnccaacagttcttcaacgggcacccgctcttcctgcaccccagccagtttgccatggggggcgccttctccagcatggcagccgccggcatggggcccctcctggccaccgtgtctggggcctccactggcgtctcgggcctggattccacggccatggcctctgccgccgcggcgcagggactgtccggggcgtccgcggccaccctgcccttccacctccagcagcacgtcctggcctctcaggnnnnagggcctggccatgtcccctttcggaagcctgttcccttacccctacacgtacatggccgcagcggcggccgcctcctctgcggcagcctccagctcggtgcaccgccaccccttcctcaatctgaacaccatgcgcccacggctgcgctacagcccctactccatcccggtgccggtcccggacggcagcagcctgctcaccaccgccctgccctccatggcggcggctgcggggccccnnnnnnnnnnnnnnnnnnnnnnnnnnnnnnnnnnnnnnnnnnnnnnnnnnnnnnnnnnnnnnnnnnnnnnnnnnnnnnnnnnnnnnnnnnnnnnnnnnnnnnnnnnnnnnnnnnnnnnnnnnnnnnnnnnnnnnnnnnnnnnnnnnnnnnnnnnnnnnnnnnnnnnnnnnnnnnnnnnnnnnnnnnnnnnnnnnnnnnnnnnnnnnnnnnnnnnnnnnnnnnnnnnnnnnnnnnnnnnnnnnnnnnnnnnnnnnnnnnnnnnnnnnnnnnnnnnnnnnnnnnnnnnnnnnnnnnnnnnnnnnnnnnnnnnnnnnnnnnnnnnnnnnnnnnnnnnnnnnnnnnnnnnnnnnnnnnnnnnnnnnnnnnnnnnnnnnnnnnnnnnnnnnnnnnnnnnnnnnnnnnnnnnnnnnnnnnnnnnnnnnnnnnnnnnnnnnnnnnnnnnnnnnnnnnnnnnnnnnnnnnnnnnnnnnnnnnnnnnnnnnnnnnnnnnnnnnnnnnnnnnnnnnnnnnnnnnnnnnnnnnnnnnnnnnnnnnnnnnnnnnnnnnnnnnnnnnnnnnnnnnnnnnnnncagtgcggatttatatatttttcccttcactgtgtcaagtggaaacaaaaataaaannnnnnnnnnnnnnntcgggacaagtgaatacattaacatgattctgtttgtgcagattaaaaactntatagggacttgcattatcggttctcaataaattactgagcagctttgtttggggagggaagtccctaccatccttgtttagtctatattaagaaaatctgtgtctttttaatattcttgtgatgttttcagagccgctataggtctcttcttgcatgtccacagtaatgtatttgtggtttttattttgaacgcttgcttttagagagaaaacaatatagccccctacccttttcccaatcctttgccctcagatcagtgacccaggggagggggggatttaaagggaaggagtgggcaaaacacataaaatgaatttattttatctaagctctgtagcaggattcatgttctttgacagttctttctctttcctgtatatgcaataacaaggttt

SEQ ID NO: 22499 - DNA, 454 bp, Macaca Mulatta
  misc_feature (1)...(454): n = A,T,C or G
gacccttttccaggcactgcagaacagggggctgggggttggcaggaggtattggacacatcgatagggaacaaggaggcggactcgggacaccatgatgaccagannnnnnnnnnnnnnnnnnnnnnnnnnnnnnnnnnnnnnnnnnnnnnnnnnnnnnnnnnnnnnnnnnnnnnnnnnnnnnnnnnnnnnnnnnnnnnnnnnnnnnnnnnnnnnnnnnnnnnnnnnnnnnnnnnnnnnnnnnnnnnnnnnnnnnnnagatcacctctgggaggggaactgcagcaggaggaagacacagccgccaactccagctctgaggaaggcccagggtccggccctgatggcaggctcagcacaggactctccaagcacctgctcagtagtctaggggaccgactgtgccgtctgctgcggagagagcgggaagccctggcctgggcccagcgggaag

SEQ ID NO: 22500 - DNA, 890 bp, Macaca Mulatta
  misc_feature (1)...(890): n = A,T,C or G
acgaggcctttctttaactccttcatccgtagtcatgcagcagttggaatggggagatgcaggagcccaaccttggcaaacagcccacatgggttggctgctcactgttcctcttctgtgaccatccccctttttcccagggcgccggcggcaccagaaaccggattaagaacccagttaaggaggcagccatgatgagttcccaggcccaagggccgcagcggagaccctgcaattgcaaagccagcagctcaagcttgattgggggcagtggggccggctgggagggcacggccttactgcaccatggcagctacatcaagctgggctgcctgcagtttgtcttcagcatcactgagtttgcgaccaaacagcccaaaggcgatgccagcctgctgcaggatggggtcttggccgagaagctctctctcaagccccaccagggccctgtgctgcgctccaactccgttccctaggactggcagctaccctgctactggcctgtacacccacccaagactcctgcaatgcaaaaatgtacacaaaccaagcccgggtgttttctatactctaccagaaacgcttcaactacaatctttgcatgaaatgaagaaaaccttttgacnnnnnnnnnnnnnnnnnnnnnnnnnnnncaagttctagggggcatttgcacatatatttgtactcaacatttcatgggaaagcggcaaacccgagctgaggaacagcgtggggcaggcagggaaagaccctggtctggaccttctccacaaaacccttccccaccatttatatacttccctcgcagcgtggtaaatactcaacgttcaattgtggcagaccaatcttttaagaaacacacgtcctccacaaaaaaaccccggggg

SEQ ID NO: 22501 - DNA, 697 bp, Macaca Mulatta
  misc_feature (1)...(697): n = A,T,C or G
taaacaaatcagttgtttttggtacctttaactggtggtgtgtgagaaagatggatgtgaagtgcagggttgtgcanccaggtgatgcccttctgtaagtgcccaccgcaggatgccggaaaggggcattatttgtgcactgagaacaccgcgcagcgtgactgtgagttgctcatactgtgctgctatctgggcagcgctgcccatttatttatatgtagattttaaacactgctgttgacaagttggtntgagggagaaaactctaagagtgaaagccacctctacaattgattggactttttaattttaatgtttttccccatgaaccacagtttttatatttctaccagaaaagtaaaaatcttttttaaaagtgttgtttttctaatttgtaactcctaggggttatttctgtgccagacacattccgcctctccagtattgcaggacagaatacatgtgttaatgaaaatgaatggctgtacatattttttctttcttcagagtactctgtacaataaatgcagtttataaaagtgttagattgttgttatgataccttgtaagagtcatgtgatcatactgttttctaaaaagttgtattttagatataatgcctgaaaccattttggtgtctgcttgtttgtttcagtcaatatttcattacatgcttcaatgaaagcaaattaatgat

SEQ ID NO: 22502 - DNA, 1270 bp, Macaca Mulatta
  misc_feature (1)...(1270): n = A,T,C or G
tttggctccccaagcgtcatctcacgagtgagaactttacacctcagcatagctggtgccaagagatgtcctaaggacatggccacctgggtccactccagtgacagaccccctgacaagagcaggtctctggaggctgagttgcatggggcctagtaacaccaagccagtgagcctctaatgctactgcgccctgggggctcccagggcctgggcaacttagctgcaactggcaaaggagaagggtagtttgaggtgtgacaccagtttgctccagaaagtttaaggggtctgtttctcatttccatggacatcttcagcagcttcacctgacaatgactgttcctatgaagaagccacttgttttaagcagagacaacctctctcttctcccctgcttcatgaaggcaggggacacagatgggagagattgagccaagtcagccttctgttggttaatatggtataatgcatggctttgtgcacagcccagtgtgggattacagctttgggatgaccgcttacaaagttctgtttggttagtattggcatagtttttctatatagccataaatgcgtatatatacccatagggctagatctgtatcttagtgtagcgatgtatacatacacacatccacctacatgttgaagggcctaaccagccttgggaatattgactggtcccttacctcttatggctaagtctttgactgtgttcatttaccaagttgacccagtttgtcctttaggttaagtaagactcgagagtaaaggcaaggagaggggccaggctctgaatgcggccacggatgccttgctgctgcaaccctttccccagctgtccactgaaacgtgaagtcctcttttgaatgccaaacccaccattcactggtgctgactacatagaatggggttgagagaagatcagtttgggcttcacagtgtcatttgaaaacgtttttagtatcgttgcctgctatgtcatgcgccgattattgtggaaaacttcagtgaacgaagatggtgtcctactgtggatgagggatgaacaagggaatggctttgatccaatggagcctgggaggtgtgcccagaaagcttgtctgtagcgggttttgtgagagtgaacactttccactttttgacaccttatcctgatgttatggttccaggatccggattccgatttttcacatgtcgcttgaaatttcactaaacttgccctggttttctaaaacnnnnnnnnnnnnnnnnnnnnnnnnnnncc

SEQ ID NO: 22503 - DNA, 739 bp, Macaca Mulatta
  misc_feature (1)...(739): n = A,T,C or G
ggcaagtcagtcagaactttgtggaccgacctgaagtttctttttgaatacttgtttctttagccctttgaagatagaaaaaccactttttaagtactaagtcatttgccctgaaagtttcctctgcattggatttgaagtagtttagttatgtcttttctctgtatataagtagtataatttgttacttgcaaataccagtactttcaatgcagggtttttttgttgttgttatctataaaaattgagggaaatagttatgcaaaaaaaaattttgctttggatcacatttcctaagcataaatttaccttcctaattatgtttacttaggaaaatgctcaattttgcttgcattccttgagaatgtatttatttgaagatcaaaacaatccaaatgtataagtactaggcagaagccaattttaaaattttcttgaataatccatgaaaggagtaattcaaatacagataaacagagttggcagtatattatagtgataattttgtattttcaggaaaaaaagttaaacctcttctttttattataatgaccagcttttggtatttcattgttacccagaactatttttagaataaaattgtttctccttccnnnnnnnnnnnnnnannnnnnnnnnnnncctttgtcggcgccctcggcccctcaaaaaactttcctaaaacatttcgtttggggccggggggccccattaaggtaattggaacctgggccataac

SEQ ID NO: 22504 - DNA, 460 bp, Macaca Mulatta
ctcacttggcttattggcttcctcatctctatcccgcccatgctgggctggcgcaccccggaagaccgctcggaccccgacgcatgcaccattagcaaggaccacggctacactatttactccactttcggagctttctacatcccgctgctgctcatgctggttctctatgggcgcatattccgagctgcgcgcttccgcatccgcaagacggtcaaaaaggtggagaagaccggagccgacacccgtcatggagcatctcccaccccgcagcccaagaagagcgtgaatggagagtcggggggcaggaactggaggctgggcgtggagagcaaggcagggggtgctctgtgcgccaatggcgcggtgaggcaaggcgacgatggcgccgccctagaggtgatcgaggtgcaccgagtgggcaactccaaagagcacttgcctctgcccagcgaggctg

SEQ ID NO: 22505 - DNA, 2622 bp, Macaca Mulatta
  misc_feature (1)...(2622): n = A,T,C or G
aggcgggggagagagacagagaagtgagcaacctgaacagcaagctgttaagcctgcaagttgacatcaagaatctgcacgatgtctgcaagagacagaggaagaccttgcaggacaatcagctctgcatggaggaggcaatgaacagcagccacgnnnnnnnnnnnnnnnnnnnnnnnnnnnnnnnnnnnnnnnnnnnnnnnnnnnnnnnnnnnnnnnnnnnnnnnnnnnnnnnnnnnnnnnnnnnnnnnnnnnnnnnnnnnnnnnnnnnnnnnnnnnnnnnnnnnnnnnnnnnnnnnnnnnnnnnnnnnnnnnnnnnnnnnnnnnnnnnnnnnnnnnnnnnnnnnnnnnnnnnnnnnnnnnnnnnnnnnnnnnnnnnnnnnnnnnnnnnnnnnnnnnnnnnnnnnnnnnnnnnnnnnnnnnnnnnnnnnnnnnnnnnnnnnnnnnnnnnnnnnnnnnnnnnnnnnnnnnnnnnnnnnnnnnnnnnnnnnnnnnnnnnnnnnnnnnnnnnnnnnnnnnnnnnnnnnnnnnnnnnnnnnnnnnnnnnnnnnnnnnnnnnnnnnnnnnnnnnnnnnnnnnnnnnnnnnnnnnnnnnnnnnnnnnnnnnnnnnnnnnnnnnnnnnnnnnnnnnnnnnnnnnnnnnnnnnnnnnnnnnnnnnnnnnnnnnnnnnnnnnnnnnnnnnnnnnnnnnnnnnnnnnnnnnnnnnnnnnnnnnnnnnnnnnnnnnnnnnnnnnnnnnnnnnnnnnnnnnnnnnnnnnnnnnnnnnnnnnnnnnnnnnnnnnnnnnnnnnnnnnnggttctggagcgtgaagaggctttgataaaactacaagccgactttgcttcctatacagctacccacagataccctcctagctcctcagaagagtgtgaagacatcaaaaaggtnnnnnnnnnnnnnnnnnnnnnnnnnnnnnnnnnnnnnnnnnnnnnnnnnnnnnnnnnnnnnnnnnnnnnnnnnnnnnnnnnnnnnnnnnnnnnnnnnnnnnnnnnnnnnnnnnnnnnnnnnnnnnnnnnnnnnnnnnnnnnnnnnnnnnnnnnnnnnnnnnnnnnnnnnnnnnnnnnnnnnnnnnnnnnnnnnnnnnnnnnnnnnnnnnnnnnnnnnnnnnnnnnnnnnnnnnnnnnnnnnnnnnnnnnnnnnnnnnnnnnnnnnnnnnnnnnnnnnnnnnnnnnnnnnnnnnnnnnnnnnnnnnnnnnnnnnnnnnnnnnnnnnnnnnnnnnnnnnnnnnnnnnnnnnnnnnnnnnnnnnnnnnnnnnnnnnnnnnnnnnnnnnnnnnnnnnnnnnnnnnnnnnnnnnnnnnnnnnnnnnnnnnnnnnnnnnnnnnnnnnnnnnnnnnnnnnnnnnnnnnnnnnnnnnnnnnnnnnnnnnnnnnnnnnnnnnnnnnnnnnnnnnnnnnnnnnnnnnnnnnnnnnnnnnnnnnnnnnnnnnnnnnnnnnnnnnnnnnnnnnnnnnnnnnnnnnnnnnnnnnnnnnnnnnnnnnnnnnnnnnnnnnnnnnnnnnnnnnnnnnnnnnnnnnnnnnnnnnnnnnnnnnnnnnnnnnnnnnnnnnnnnnnnnnnnnnnnnnnnnnnnnnnnnnnnnnnnnnnnnnngaagctcaatcatgtgacctcggagacaaagagcctgcagcgaagcttgacacagacccaagagaagaaagctcagctggaagaggaaatcattgcttatgaggaaaggatgaaaaagctcaatatggaattaaaaaaactgcggggcttccaccaggagagtgagctggaggtgnnnnnnnnnnnnnnnnnnnnnnnnnnnnnnnnnnnnnnnnnnnnnnnnnnnnnnnnnnnnnnnnnnnnnnnnnnnnnnnnnnnnnnnnnnnnnnnnnnnnnnnnnnnnnnnnnnnnnnnnnnnnnnnnnnnnnnnnnnnnnnnnnnnnnnnnnnnnnnnnnnnnnnnnnnnnnnnnnnnnnnnnnnnnnnnnnnnnnnnnnnnnnnnnnnnnnnnnnnnnnnnnnnnnnnnnnnnnnnnnnnnnnnnnnnnnnnnnnnnnnnnnnnnnnnnnnnnnnnnnnnnnnnnnnnnnnnnnnnnnnnnnnnnnnnnnnnnnnnnnnnnnnnnnnnnnnnnnnnnnnnnnnnnnnnnnnnnnnnnnnnnnnnnnnnnnnnnnnnnnnnnnnnnnnnnnnnnnnnnnnnnnnnnnnnnnnnnnnnnnnnnnnnnnnnnnnnnnnnnnnnnnnnnnnnnnnnnnnnnnnnnnnnnnnnnnnnnnnnnnnnnnnnnnnnnnnnnnnnnnnnnnnnnnnnnnnnnnnnnnnnnnnnnnnnnnnnnnnnnnnnnnnnnnnnnnnnnnnnnnnnnnnnnnnnnnnnnnnnnnnnggttcctcgtattgctagaatccacatctagccatgagcagcatttccacgcgtgtttcttccgaggacagtgagttcccagccctccctctctcttgaccctggatcagctcttacgggaatatatcacggtcccagcctattttgcaagacactaacgttcgttgagttttgcccacttcctgccatggagtgagctttagaagcatacgtccatctccaggcccaaatatgaaataaagacatgagcatg

SEQ ID NO: 22506 - DNA, 250 bp, Macaca Mulatta
taggggtttggtgcttttatctggtagtggaaggggccatctgggttcatgttatacatggtttgtctcaagcgttagttgcgttgtctacttatactcattatagaaggggttttttttccgtagtgtatttgtagttaatcccttttaaaaccttacagttaatgagcattggcagttgagaataggtacagatgtccttggttgctgctttttcttgtctgaagtaagctatttctacaatcccccg

SEQ ID NO: 22507 - DNA, 120 bp, Macaca Mulatta
ggaaaataattctttcaggttgcattcgtagtattcagactggtagattctactccagccagcagacatactgttgctatagtcttcacacttatggctctgaaacgtgtaaaagactat

SEQ ID NO: 22508 - DNA, 1407 bp, Macaca Mulatta
  misc_feature (1)...(1407): n = A,T,C or G
cagaattcacagatggattcagtggagaagacaacaaatagaagtgaacaaaaatccangaaagtttttaaaaagcctcatccggaaacagcctcaggagctgctcctggttattgggactggtgtcagtgcagcagtggccccgggaatccctgccctttgctcgtggagaagctgcatcgaggccgtcattgangctgcagagcagctggaggtgctgcaccccggagacgtcgccgacttccnggagaagtgacaaggaccgggaactgttggttgtcgcccatgatctgatccggagatgtcacctnnnnnnnnnnnnnnnnnnnnnnnnnnnnnnnnnnnnnnnnnnnnnnnnnnnnnnnnnnnnnnnnnnnnnnnnnnnnnnnnnnnnnnnnnnnnnnnnnnnnnnnnnnnnnnnnnnnnnnnnnnnnnnnnnnnnnnnnnnnnnnnnnnnnnnnnnnnnnnnnnnnnnnnnnnnnnnnnnnnnnnnnnnnnnnnnnnnnnnnnnnnnnnnnnnnnnnnnnnnnnnnnnnnnnnnnnnnnnnnnnnnnnnnnnnnnnnnnnnnnnnnnnnnnnnnnnnnnnnnnnnnnnnnnnnnnnnnnnnnnnnnnnnnnnnnnnnnnnnnnnnnnnnnnnnnnnnnnnnnnnnnnnnnnnnnnnnnnnnnnnnnnnnnnnnnnnnnnnnnnnnnnnnnnnnnnnnnnnnnnnnnnnnnnnnnnnnnnnnnnnnnnnnnnnnnnnnnnnnnnnnnnnnnnnnnnnnnnnnnnnnnnnnnnnnnnnnnnnnnnnnnnnnnnnnnnnnnnnnnnnnnnnnnnnnnnnnnnnnnnnnnnnnnnnnnnnnnnnnnnnnnnnnnnnnnnnnnnnnnnnnnnnnnnnnnnnnnnnnnnnnnnnnnnnnnnnnnnnnnnnnnnnnnnnnnnnnnnnnnnnnnnnnnnnnnnnnagatgctgaccgagtggacagcaccacattattgggtaannnnnnnnnnnnnnnnnnnnnnnnnnnnnnnnnnnnnnnnnnnnnnnnnnnnnnnnnnnnnnnnnnnnnnnnnnnnnnnatgatgctggagggtcttgaaatctttaaaaccagtaaaacctgcaacttgaaaaccagccttctgtaaccacagtgcccaaacgaagaggaatgcgtggagaactccacgtggatctctgattgcaaaacctcacatacaccaagagagccacatgggcgtgtggccctcaaggctgggtgagagggctcccctgtgtgttgaactgtgcaggaggtgacgcggacacannnnnnnnnncttcgcaaggactgatggacagctacctcaggggccaggatccatgggaaggggtggacctggtgttcccgttcccatctgacaggctctcttttgtcaaggtgg

SEQ ID NO: 22509 - DNA, 564 bp, Macaca Mulatta
  misc_feature (1)...(564): n = A,T,C or G
cgggcccccctgctgtgcaggagccggccatctctgaggcagcgcctgaagctggcgcccccacttcagccagtggcctcaatggccaccccaccctgtcagggagtggtgaccaaagggaggcccagaccttggacagccagatccaggagacaagngcatctaatgatgacattctggtctcgtcttccgtctcccccgtgnnnnnnnnnnnnnnnnnnnnnnnnnnnnnnnnnnnnnnnnnnnntgtcactgcagattgagacctacaggctgacgttccgggcaaacgccagggcccgcaccgaccacggggccgacattgtctcccgccccccacatttccctggcggccccaactcgggctcccgggtccttggccccctttcccggactgtccactagaccagtgagcgcttgggcgccgggcagcccgctaggcntcgccttccctcctgcttnnnnnnnnnnnncagcagcagccccaccccacacctcctctcacgctccagcccaggcccagctccctgctttcgtcttgccccatcactgcgccactgctcc

SEQ ID NO: 22510 - DNA, 257 bp, Macaca Mulatta
ggaggtgggagacaaggaaccaccgaagaggaagcaagaaagccgtactgtctacgttgtgatccttcatcgaacaaactgatgcgaaaacttgaatctgttactgaaacgaggagaggaggacacgtgctagtgaactgagccaaacacactgtaaatatctgcagactccctcccccgcccccatcccaaatgatcttgagatttcttttaaagaagtaaatttgtccaatggctgtaaactataaactactgta

SEQ ID NO: 22511 - DNA, 135 bp, Macaca Mulatta
cttgcactggtttccgcctccgacctgtggctggcctgctttcctctcgggatttcttgggtggcctggccttccgagttttccactgcacacagtacatcagacatggatccaagcccatgtacacccccgaac

SEQ ID NO: 22512 - DNA, 133 bp, Macaca Mulatta
tcaggtgaggaacagtcaggaattcccaactcacagcctgtggtgtagattaagtagacaatgaatgtgaatcatgcttagatcttgttggtgacagaatgtatcctaatggcttgttgattatattacactt

SEQ ID NO: 22513 - DNA, 1256 bp, Macaca Mulatta
  misc_feature (1)...(1256): n = A,T,C or G
gggtcttgcctcagttgacagaatggcggccacaggagccaatgcagagaaacctgaaagtcacannnnnnnnnnnnnnnnnnnnnnnnnnnnnnnnnnnnnnnnnnnnnnnnnnnnnnnnnnnnnnnnnnnnnnnnnnnnnnnnnnnnnnnnnnnnnnnnnnnnnnnnnnnnnnnnnnnnnnnnnnnnnnnnnnnnnnnnnnnnnnnnnnnnnnnnnnnnnnnnnnnnnnnnnnnnnnnnnnnnnnnnnnnnnnnnnnnnnnnnnnnnnnnnnnnnnnnnnnnnnnnnnnnnnnnnnnnnnnnnnnnnnnnnnnnnnnnnnnnnnnnnnnnnnnnnnnnnnnnnnnnnnnnnnnnnnnnnnnnnnnnnnnnnnnnnnnnnnnnnnnnnnnnnnnnnnnnnnnnnnnnnnnnnnnnnnnnnnnnnnnnnnnnnnnnnnnnnnnnnnnnnnnnnnnggtctggaacccggtaccgtggtcataacagagcaggcagtggatacctgcttcaaggcagagtttgagcatattgtgctggggaagcgggtcatccggaaaacggacctgaacaagaagctggtgcaggagctgttgctgtgttctgcagagctgagcgagttcaccgcggtggtggggaacaccatgtgtaccttggacttctatgaaggnnnnnnnnnnnnnnnnnnnnnnnnnnnnnnnnnnnnnnnnnnnnnnnnnnnnnnnnnnnnnnnnnnnnnnnnnnnnnnnnnnnnnnnnnnnnnnnnnnnnnnnnnnnnnnnnnnnnnnnnnnnnnnnnnnnnnnnnnnnnnnnnagcggccgtggtgtgtgtcaccctcatgaaccgcctggaaggggaccagatcagcagccctcacaatgtgctcaccgagtaccagcagaggccgcagcggctggtgagctacttcatcaagaagaaactgagcaaggcctgagcgctgccctgcacctccacagacctgctgggatcactggccattaaaagcactgtccaaaatcccctgttgtgtggactttgagcatattttacacaagaatctagaaaatcagatcgcaattaagagacagagaatcttggattaaccacctgggagatgttcttccttttgaagtttcattggagcattttcaactatgttagcctgatttggggtttcttcatagaacattctaccaaatgtttgtgctacttctagggaaaatttttagactttaaaataataatggtagtcagattt

SEQ ID NO: 22514 - DNA, 688 bp, Macaca Mulatta
  misc_feature (1)...(688): n = A,T,C or G
ccagctactccaggagcgctgaggcaggagaatggcatgaacccgggaggtgggnnnnnnnnnnnnnnnnnnnnccnnnnnnnnnnnnnnnnnnnagcannnnnnnnnnnnnnnnnnnnnnnnnnnnnnnnnnnnnnnnnnnnnnnnnnnnnnnnnnnngtgcctttttcctagttttgctggattattgttttattttgggcttcatcctcttccagcaaatcaagggcatctggatagtgaagacctaccgtaaactcaccatagtaccatagtaccttgggcaacccagcctccccctctgaaggtcgggtgtcttgtaaagggctggtccaaaggctctctgaccccttgtttcctctttttgttgcagcaggccctgcctttaggaccagggctgtctcagggtctaagaccccagactccaaggttgtcctcagaagttgtctgtcccctgttcccaaaggcacagctttcaattcccgagaagattttgagctggtcctctgccagctcaagttcagcctggaagataactctcttttccacagcatggacttggaacatgatccacgttttgctctttaaaactgtggcccctggcttgccaccctccctggcccattgctgcctctgtctcttcaccttaggcagtttgcctaactagtggagaaaagtctcggtctaa

SEQ ID NO: 22515 - DNA, 476 bp, Macaca Mulatta
cgccggctacctaccagacttccgggaacctgggggtgtcctactcccactcgagttgtggtccaagctatggctcacagaacttcagtgcgccttacagcccctacgcgttaaatcaggaagcagacgtaagtggtgggtacccccagtgcgctcccgctgtttactctggaaatctctcatctcccatggtacagcatcaccaccaccaccagggttatgccgggggcgcggtgggctcgcctcagtacattcaccactcatatggacaagagcaccagagcctggccctggctacgtataataactccttgtcccctctccacgccagccaccaagaagcctgtcgctctcctgcatcggagacatcttctccagcgcagacttttgactggatgaaagtcaaaagaaaccctcccaaaacaggtcagtcctgggggttgaagaggctccttgattaatctggaaggagctgg

SEQ ID NO: 22516 - DNA, 1396 bp, Macaca Mulatta
  misc_feature (1)...(1396): n = A,T,C or G
gggaaataactcttttggcaagttgcctgacaccttgtcttaccaaggtggcatatttgcatttttactgcnnnnnnnnnnnnnnnnnnnnnatctttatccaaatttatcatattgatggtaggactaacaggctttttagaagctggctttaacttttgagtctcaagctacaatgctgttgggtagcctggtcctcccacgtgagggtttaacttcgtttatttgcctccagttattccaaaatgcttattaaatgaaaggcccaggaacatgtttattttagtcacctttgctttttaacaattttgttttgtaaccaatgagtaattcatgatgaattatttttgactaatagatagctgaaggccaggcttttaattctaataggtaatgctcttcttttgtcttattgaaacaatgagaatactctgtgcatttcaaatgcactccgattatgctgcggtttcattcacataagcacaatatgtgttttatttataacttcataacaaacttataatgtaataatttaccttagcagacatgcaaacacttattcttgtgtgacttactttctttaagctaataatataaaaataaatatgtatcttaaaaatctataatgaaacattagaaattaaagatacatgctttttattttgcagatgagttcatttgcttttgtagatgtgttttcaaaagctaggtacaaaaggaatgtttgctacctttagccctgaataaagaaatagagtcaagaattttgttggattgtgttcgtgtgtgcatatatttgatatcatcattatatttgtaatctttggacttgtaatcatagcctgtttattctattgtgccattaaatatactttaccttatatataatgaataaaatacctagatgtagatttannnnnnnnnnnnnnnnnnnnnnnnnnnnnnnnnnnnntatgaaaaaataattaatggaaaaaaccaataaattaaattatggatttttctttggtcggccnnnnnnnnnnnnnnnnnnnnnnnnnnaaaaaccattttctttggcccgccgggggcccccattaggggaaaattgaaaaagggngcccataaccttttttccccaaaggagaaaccctggggcacaaaaaacaaggggctttgggaatcnnnnnnnnnnnnnnnnnnnnnnnnnngggcgggaaaaccgaaacggtttctggaaaaaaaccccagaatggggattttctcagagggcccttttccgggggttctcatcccaaacggggatctcccaaggcgaaggtctccaaaataaaaaatttataccccccccgccccttggccatattaaattagaaaaaaaacggtgttggaaaattttcaattataaccctcttca

SEQ ID NO: 22517 - DNA, 968 bp, Macaca Mulatta
  misc_feature (1)...(968): n = A,T,C or G
cccccccgggaggaaaggattccccacgggaaaagggccccccccaagaaactccccccttttgggagaattttttttccaagaaccggcctctgggttttnnnnnnnnnnnnnnnnnnnnnnntaagtgggggggggaattcccaagcccctttggttcatggccccgggattttccttagggaaacacggctttggccccaggtttcccttacccttacgggggccccgccgcgcccnnnnnnnnnnnnnnnnnnnnnnnnnnnnnnnnnnnnggagggcggccgacnnnnnnnnnnnnnnnnnnntttttttttttcttttggtttctaatttctttttattagtctgacatgaaaaagaaatatccctacaaatgaaagaaatattgaagaagcaaattgaagggcttaccttatttnnnnnnnnnnnnnnnnnnnagggctacccagggaagtttcagacgtgctcaatggacacgtgatttgtaaacagccgagattctgggggacagggggtgcctcggtggggttgacatttgagttacggggacttaataatggccagcctttcacatcccatgggaaacccctctcccacgggccttggagaatgggggtccaagtgcctatccccctttggatgtttcatcattagtaaacatcatccgcccagcaacaacaagcaaagcacatcgcaagattaaaacaaagaatccgccgtgaacagaaggcctccgtctctgctctcacgcaagtgtccttcggggaggagcctcaggcagctgttctaaccctgccgccaagcctgggctgttactgccgacaatcttctatttctctaaaagagtacgctgaacagctggctctgcgttggcgttccggtggctctccatgtccacctccccttgttctgcgtattctttgaagcacagttcttttcctcgtgccgattcggcacgaggcgag

SEQ ID NO: 22518 - DNA, 5039 bp, Macaca Mulatta
  misc_feature (1)...(5039): n = A,T,C or G
caggtccggaggcggctgcaggannnnnnnnnnnnnnnnnnnnnnnnnnnnnnnnnnnnnnnnnnnnnnnnnnnnnnnnnnnnnnnnnnnnnnnnnnnnnnnnnnnnnnnnnnnnnnnnnnnnnnnnnnnnnnnnnnnnnnnnnnnnnnnnnnnnnnnnnnnnnnnnnnnnnnnnnnnnnnnnnnnnnnnnnnnnnnnnnnnnnnnnnnnnnnnnnnnnnnnnnnnnnnnnnnnnnnnnnnnnnnnnnnnnnnnnnnnnnnnnnnnnnnnnnnnnnnnnnnnnnnnnnnnnnnnnnnnnnnnnnnnnnnnnnnnnnnnnnnnnnnnnnnnnnnnnnnnnnnnnnnnnnnnnnnnnnnnnnnnnnnnnnnnnnnnncaggtgctgtgcccttgtccgcgccagccttctccttagtcttcccgtttctgaagatggtgctgacggagatgtcccaccacagtgaggaggaggaggagcggatggcccagattcttcagatcctcactgtccacgcccaactgagggcctcccctagcaccccacccgggcgagtggacgannnnnnnnnnnnnnnnnnnnnnnnnnnnnnnnnnnnnnnnnnnnnnnnnnnnnnnnnnnnnnnnnnnnnnnnnnnnnnnnnnnnnnnnnnnnnnnnnnnnnnnnnnnnnnnnnnnnnnnnnnnnnnnnnnnnnnnnnnnnnnnnnnnnnnnnnnnnnnnnnnnnnnnnnnnnnnnnnnnnnnnnnnnnnnnnnnnnnnnnnnnnnnnnnnnnnnnnnnnnnnnnnnnnnnnnnnnnnnnnnnnnnnnnnnnnnnnnnnnnnnnnnnnnnnnnnnnnnnnnnnnnnnnnnnnnnnnnnnnnnnnnnnnnnnnnnnnnnnnnnnnnnnnnnnnnnnnnnnnnnnnnnnnnnnnnnnnnnnnnnnnnnnnnnnnnnnnnnnnnnnnnnnnnnnnnnnnnnnnnnnnnnnnnnnnnnnnnnnnnnnnnnnnnnnnnnnnnnnnnnnnnnnnnnnnnnnnnnnnnnnnnnnnnnnnnnnnnnnnnnnnnnnnnnnnnnnnnnnnnnnnnnnnnnnnnnnnnnnnnnnnnnnnnnnnnnnnnnnnnnnnggccacccccagtgctggatgctttgggacgagttatttcagaatctcctccagatcagtgggaagccaggtnccaggtgtggcttggcattggccctcaacaagctctcccagtatctggacagctctcaggtgaagccactctttcaattttttgtccctgatgccctcaacgaccgacacccagatgtccggaagtgcttgttnnnnnnnnnnnnnnnnnnnnnnnnnnnnnnnnnnnaggagaacgtcaactcactgttgccagtattcgaggagttcctgaagaacgcgcccaatgatgccagctacgatgctgtgcgacagagtgtggtggtcctgatgggctctctggccaagcacctggacaagagtgaccccaaagtgaagcccattgttgccaagctcatcgctgccctctctaccccctcccagcaggnnnnnnnnnnnnnnnnnnnnnnnnnnnnnnnnnnnnnnnnnnnnnnnnnnnnnnnnnnnnnnnnnnnnnnnnnnnnnnnnnnnnnnnnnnnnnnnnnnnnnnnnnnnnnnnnnnnnnnnnnnnnnnnnnnnnnnnnnnnnnnnnnnnnnnnnnnnnnnnnnnnnnnnnnnnnnnnnnnnnnnnnnnnnnnnnnnnnnnnnnnnnnnnnnnnnnnnnnnnnnnnnnnnnnnnnnnnnnnnnnnnnnnnnnnnnnnnnnnnnnnnnnnnnnnnnnnnnnnnnnnnnnnnnnnnnnnnnnnnnnnnnnnnnnnnnnnnnnnnnnnnnnnnnnnnnnnnnnnnnnnnnnnnnnnnnnnnnnnnnnnnnnnnnnnnnnnnnnnnnnnnnnnnnnnnnnnnnnnnnnnnnnnnnnnnnnnnnnnnnnnnnnnnnnnnnnnnnnnnnnnnnnnnnnnnnnnnnnnnnnnnnnnnnnnnnnnnnnnnnnnnnnnnnnnnnnnnnnnnnnnnnnnnnnnnnnnnnnnnnnnnnnnnnnnnnnnnnnnnnnnnnnnnnnnnnnnnnnnnnnnnnnnnnnnnnnnnnnnnnnnnnnnnnnnnnnnnnnnnnnnnnnnnnnnnnnnnnnnnnnnnnnnnnnnnnnnnnnnnnnnnnnnnnnnnnnnnnnnnnnnnnnnnnnnnnnnnnnnnnnnnnnnnnnnnnnnnnnnnnnnnnnnnnnnnnnnnnnnnnnnnnnnnnnnnnnnnnnnnnnnnnnnnnnnnnnnnnnnnnnnnnnnnnnnnnnnnnnnnnnnnnnnnnnnnnnnnnnnnnnnnnnnnnnnnnnnnnnnnnnnnnnnnnnnnnnnnnnnnnnnnnnnnnnnnnnnnnnnnnnnnnnnnnnnnnnnnnnnnnnnnnnnnnnnnnnnnnnnnnnnnnnnnnnnnnnnnnnnnnnnnnnnnnnnnnnnnnnnnnnnnnnnnnnnnnnnnnnnnnnnnnnnnnnnnnnnnnnnnnnnnnnnnnnnnnnnnnnnnnnnnnnnnnnnnnnnnnnnnnnnnnnnnnnnnnnnnnnnnnnnnnnnnnnnnnnnnnnnnnnnnnnnnnnnnnnnnnnnnnnnnnnnnnnnggttggctgagctcatggccggtttaggggtggagaagttggagaagctgatgccagaaatcgtggctacagccagcaaagtggatattgcaccccatgtccgagatggctacattatgatgtttaactacctgcccatcacctttggagacaagtttactccttatgtggggcccatcatcccctgtatcctcaaagngctcttgctgatgagaatgagtttgtgcgtgacactgccctgcgcgcgggccagcgggttatctccatgtatgctgagacagccatcgccctgctgctgccccagctagagcaaggcctctttgatgacctttggagaatcaggtnnnnnnnnnnnnnnnnnnnnnnnnnnnnnnnnnnnnnnnnnnnnnnnnnnnnnnnnnnnnnnnnnnnnnnnnnnnnnnnnnnnnnnnnnnnnnnnnnnnnnnnnnnnnnnnnnnnnnnnnnnnnnnnnnnnnnnnnnnnnnnnnnnnnnnnnnnnnnnnnnnnnnnnnnnnnnnnnnnnnnnnnnnnnnnnnnnnnnnnnnnnnnnnnnnnnnnnnnnnnnnnnnnnnnnnnnnnnnnnnnnnnnnnnnnnnnnnnnnnnnnnnnnnnnnnnnnnnnnnnnnnnnnnnnnnnnnnnnnnnnnnnnnnnnnnnnnnnnnnnnnnnnnnnnnnnnnnnnnnnnnnnnnnnnnnnnnnnnnnnnnnnnnnnnnnnnnnnnnnnnnnnnnnnnnnnnnnnnnnnnnnnnnnnnnnnnnnnnnnnnnnnnnnnnnnnnnnnnnnnnnnnnnnnnnnnnnnnnnnnnnnnnnnnnnnnnnnnnnnnnnnnnnnnnnnnnnnnntgctgtatttctctgaatcccttgtgcctacggcaaggaaggctttgtgtgacccactggaggaggtcagagaggcggcagccaagacattcgagcagctgcattccaccattggccaccaggctctggaggacattctcccatttttactaaagcagctggnnnnnnnnnnnnnnnnnnnnnnnnnnnnnnnnnnnnnnnnnnnnnnnnnnnnnnnnnnnnnnnnnnnnnnnnnnnnnnnnnnnnnnnnnnnnnnnnnnnnnnnnnnnnnnnnnnnnnnnnnnnnnnnnnnnnnnnnnnnnnnnnnnnnnnnnnnnnnnnnnnnnnnnnnnnnnnnnnnnnnnnnnnnnnnnnnnnnnnnnnnnnnnnnnnnnnnnnnnnnnnnnnnnnnnnnnnnnnnnnnnnnnnnnnnnnnnnnnnnnnnnnnnnnnnnnnnnnnnnnnnnnnnnnnnnnnnnnnnnnnnnnnnnnnnnnnnnnnnnnnnnnnnnnnnnnnnnnnnnnnnnnnnnnnnnnnnnnnnnnnnnnnnnnnnnnnnnnnnnnnnnnnnnnnnnnnnnnnnnnnnnnnnnnnnnnnnnnnnnnnnnnnnnnnnnnnnnnnnnnnnnnnnnnnnnnnnnnnnnnnnnnnnnnnnnnnnnnnnnnnnnnnnnnnnnnnnnnnnnnnnnnnnnnnnnnnnnnnnnnnnnnnnnnnnnnnnnnnnnnnnnnnnnnnnnnnnnnnnnnnnnnnnnnnnnnnnnnnnnnnnnnnnnnnnnnnnnnnnnnnnnnnnnnnnnnnnnnnnnnnnnnnnnnnnnnnnnnnnnnnnnnnnnnnnnnnnnnnnnnnnnnnnnnnnnnnnnnnnnnnnnnnnnnnnnnnnnnnnnnnnnnnnnnnnnnnnnnnnnnnnnnnnnnnnnnnnnnnnnnnnnnnnnnnnnnnnnnnnnnnnnnnnnnnnnnnnnnnnnnnnnnnnnnnnnnnnnnnnnnnnnnnnnnnnnnnnnnnnnnnnnnnnnnnnnnnnnnnnnnnnnnnnnnnnnnnnnnnnnnnnnnnnnnnnnnnnnnnnnnnnnnnnnnnnnnnnnnnnnnnnnnnnnnnnnnnnnnnnnnnnnnnnnnnnnnnnnnnnnnnnnnnnnnnnnnnnnnnnnnnnnnnnnnnnnnnnnnnnnnnnnnnnnnnnnnnnnnnnnnnnnnnnnnnnnnnnnnnnnnnnnnnnnnnnnnnnnnnnnnnnnnnnnnnnnnnnnnnnnnnnnnnnnnnnnnnnnnnnnnnnnnnnnnnnnnnnnnnnnnnnnnnnnnnnnnnnnnnnnnnnnnnnnnnnnnnnnnnnnnnnnnnnnnnnnnnnnnnnnnnnnnnnnnnnnnnnnnnnnnnnnnnnnnnnnnnnnnnnnnnnnnnnnnnnnnnnnnnnnnnnnnnnnnnnnnnnnnnnnnnnnnnnnnnnnnnnnngcggacgtgtccggcattgactggatggttcggcacgggcggagcctggcactttccgtggctgtgaatgtggctcctggcagactctgtgctggcagatacagcagtgatgttcaggaaatgatcctgagcagtgccacggcggacag

SEQ ID NO: 22519 - DNA, 615 bp, Macaca Mulatta
  misc_feature (1)...(615): n = A,T,C or G
ttaattatttcacagnttctaagttactaaagtaaacaaacaaaaaatcattgaagataagtattgccctcccccaaaaaaggtttcaagattagttgaacttccctcaactacacctaaataaagcaaaggggaattttagtaagtgtgtaccttgtctctttcagacacatctagaatgtttttctttcaccgtacctccaaaagaggcagtttagaaagtattaagtagtaacttttgttcaattccannnnnnnnnnnnnnnnnnnnnnnnnnnnnnnnnnnnnaaccttactttaaaacagtagcatatactatggtcattgaacttaatctccctggtgttagaaatttactttacaaaattgtgttaagacttggaaaaacaaaatgaaactgctgtggtaaaaaccaagttcgtttcagaaaagtattgacaattatttggctgttatattttctttgaaaactgcaataatttatatatttgtattgctctgctttggaactgtatatatgcttgtctactatttttaattttacaacaataaaataagtattttgttnnnnnnnnnnnnnnnnnnnnnnnnnnnnnnnnnnnnnnnnnnnnnnnn

SEQ ID NO: 22520 - DNA, 2378 bp, Macaca Mulatta
  misc_feature (1)...(2378): n = A,T,C or G
aggatgacttctcggaatcagttggtgcagcgggtgctgcaggagctgcaggaggcagtggagtgcgaaggcctggagggtcttgtaggtgctgccctagaggccaagcaggtcctgtcttccttcactcttcccacctgtcgggagggaggccctggcctccaggtgctggaagtggactcggtggccctgagcctgtatccnnnnnnnnnnnnnnnnnnnnnnnnnnnnnnnnnnnnnnnnnnnnnnnnnnnnnnnnnnnnnnnnnnnnnnnnnnnnnnnnnnnnnnnnnnnnnnnnnnnnnnnnnnnnnnnnnnnnnnnnnnnnnnnnnnnnnnnnnnnnnnnnnnnnnnnnnnnnnnnnnnnnnnnnnnnnnnnnnnnnnnnnnnnnnnnnnnnnnnnnnnnnnnnnnnnnnnnnnnnnnnnnnnnnnnnnnnnnnnnnnnnnnnnnnnnnnnnnnnnnnnnnnnnnnnnnnnnnnnnnnnnnnnnnnnnnnnnnnnnnnnnnnnnnnnnnnnnnnnnnnnnnnnnnnnnnnnnnnnnnnnnnnnnnnnnnnnnnnnnnnnnnnnnnnnnnnnnnnnnnnnnnnnnnnnnnnnnnnnnnnnnnnnnnnnnnnnnnnnnnnnnnnnnnnnnnnnnnnnnnnnnnnnnnnnnnnnnnnnnnnnnnnnnnnnnnnnnnnnnnnnnnnnnnnnnnnnnnnnnnnnnnnnnnnnnnnnnnnnnnnnnnnnnnnnnnnnnnnnnnnnnnnnnnnnnnnnnnnnnnnnnnnnnnnnnnnnnnnnnnnnnnnnnnnnnnnnnnnnnnnnnnnnnnnnnnnnnnnnnnnnnnnnnnnnnnnnnnnnnnnnnnnnnnnnnnnnnnnnnnnnnnnnnnnnnnnnnnnnnnnnnnnnnnnnnnnnnnnnnnnnnnnnnnnnnnnnnnnnnnnnnnnnnnnnnnnnnnnnnnnnnnnnnnnnnnnnnnnnnnnnnnnnnnnnnnnnnnnnnnnnnnnnnnnnnnnnnnnnnnnnnnnnnnnnnnnnnnnnnnnnnnnnnnnnnnnnnnnnnnnnnnnnnnnnnnnnnnnnnnnnnnnnnnnnnnnnnnnnnnnnnnnnnnnnnnnnnnnggaggtgctgggcatggaggagctagagaagctgccagaggagcaggtggctgaggaggagctggagtgctcagcactggcggtgtcaagccctggaatggtcttaatgcagcgggccaagttgtacctggagcattgcatttccctgaacacactggtaccctatcgctgcttcaaacgtaggttccctggcatctcacggtccacctattacaattggcggcgaaaggccctccggaggaaccccagcttcaagccagcaccagccctctctgctcctgggactccccagccagcatctgttggggaaggggctgtaattccttggaagagtgaagcagaagagggggcagggaaggccacggatgaggagcctcccaccccccaggagctcctgccactaaggatgcccctgtcccgttggcagaggcgtctgcgcagggctgcccgcaggcaggtgttgagtgggcatctccctttttgccgcttccgcctccgctaccccagcctgtcaccttctgccttttgggtctggaagagtcttgctcggggttggcccagaggcctgtccaaactccaggtgccagcccccaccttgggcaaaggaggtcaggaggctgaggagaagcaggaggaggaggctggcagggatgtgacaactgtgatggccccacctgtgagggcttcttcagaagatgcagagggagggccttccagagagggggccctgcaagaggggagccacagcccagggccagccccacagtgggcccctgctgagccaacctgtggtggcagcagcgggtgggagggatggccggatgctggtaatggacatgatcgctaccacgaagtttaaggcccaggccaagctgttcttgcagaagcgcttccagtctaagagcttcccctcctacaaggagttcagtgccctcttccctctcactgcccgctccacatactacatgtggaagcgagccctctatgatggcctcaccctggtagatggctgacagggaggtacaaaaggggctgggaggaagggggaccagtttggagaaggtcagggaccggagctgaccccaggcttggccaggatgtcctttgctctgggtcccacagtgtctaccctaagtccaagggtatatttgtgttattttctggctccaggacagagtgccagaaatcagccatctggtctcctgtaggaagctgtgggaccagagatgttctctttggttgtttgctggtcacatttttactgttatgatctagttt

SEQ ID NO: 22521 - DNA, 1337 bp, Macaca Mulatta
  misc_feature (1)...(1337): n = A,T,C or G
ccaggctctgatggaacattttgaaaaacttatctttttgaaagtgaatcttcccttaatatactttcagtattgaaactcacaacggcaccaccaggccagaggcgtggctgccccagcgttagcagcctgtaccgggtctgtgacccgctccgcccagggccgtgcacgacatcagaccaggcactctcagggccgccctccagctcaccagtgtctccacgtgccttaccccttttccttcaggccaggttttgcggggtgttctattaagacatccactagaaatagcttgtcctgtcaactatgaaatatggtgactagattttaattcataactgtaaagttttttaaaattttgggctagtaatttgttttactagaatgacaaagaagatgtaaacaattttattctgtaggctttttactcaattatgtacaaaccacgaatcaggtactgtattttagttaagtattgctttaattgcaacagaatagcttttgtggctatcaaatgaaatctgtaaataggaggtggagggcaagccatcctgactgagcagtttttaaccgcaggttctaaagtgtcccgcggagtacagataatattctggaaggtaactgtttactacgacagagacgtggcatttggaaacgaaacttagatgtttcatggagcttattttgagaactttcccatttcaggtttctgcattcaggctttacatggtcagttaactcagagnnnnnnnnnnnnnnnnnnnnnnnnnnnnnnnnnnnnnnnnnnnnnnnnnnnnnnnnnnnnnnnnnnnnnnnnnnnnnnnnnnnnnnnnnnnnnnnnnnnnnnnnnnnnnnnnnnnnnnnnnnnnnnnnnnnnnnnnnnnnnnnnnnnnnnnnnnnnnnnnnnnnnnnnnnnnnnnnnnnnnnnnnnnnnnnnnnnnnnnnnnnnnnnnnnnnnnnnnnnnnnnnnnnnnnnnnnnnnnnnnnnnnnnnnnnnnnnnnnnnnnnnnnnnnnnnnnnnnnnnnnnnnnnnnnnnnnnnnnnnnnnnnnnnnnnnnnnnnnnnnnnnnnnnnnnnnnnnnnnnnnnnnnnnnnnnnnnnnnnnnnnnnnnnnnnnnnnnnnnnnnnnnnnnnnnnnnnnnnnnnnnnnnnnnnnnnnnnnnnnnnnnnnnnnnnnnnnnnnnnnnnnnnnnnnnnnnnnnnnnnnnnnnnnnnnnnnnnnnnnnnnnnnnnnnnnnnnnnnnnnnncgcttaatctaaatttgcattgactatgttttagtgtatttataaatggtgaactcagtttctgaaattaaacttnttatttgcaattt

SEQ ID NO: 22522 - DNA, 390 bp, Macaca Mulatta
tcagtccagcctccctcttccaggatgagccactgtagatagtacaagttcctccttgaggggctgaaccgtagccagggttggggagagccctcgtatctggtcagaccctggagcaagggttcataggaaagaggagaggggacaaaaccagggcaggggtcagaggcccagtccctgactctggcttcccagggatctgtctgccttagttgagagtgtgtgtcaggaaattcctcagagtgctcagagtccctgtatttttatgcctttttacaatgttaactgttgagaactgttttttgtaacaagacctccttttctaaaaagtttgtacagatgtgtccctattctagacgattggaggagacggggtcggggggagacagg

SEQ ID NO: 22523 - DNA, 817 bp, Macaca Mulatta
gggggaactcggtggtggccactgctcagaccagacttcgctcgttttcgtgcgcctcgctccgcttttcctccgcaaccatgtctgacaaacccgatatggctgagatcgagaaattcgataagtcgaaactgaagaagacagagacgcaagagaaaaatccactgccttccaaagaaacgattgaacaggagaagcaagcaggcgaatcgtaatgaggcgtgcgccgccaatatgcactgtacattccacaagcattgccttcttattttacttcttttagctgtttaactttgtaagatgcaaagaggttggatcaagtttaaatgactgtgctgcccctttcacatcaaagaactactgacaacgaaggccgcgcctgcctttcccatctgtctatctggctggcagggaaggaaagaacttgcatgttggtgaaggaagaagtggggtggaagaagtgggggtgggacgacagtgaaatctagagtaaaaccaagctggcccaaggtgtcctgcaggctgtaatgcagtttaatcagagtgccattttttttttgttcaaatgattttaattatcggaatgcacaattttttttaatatgcaaataaaaagtttaaaaaccttaaaaacaaactcaaatatcatcacataataataactccttgtccggcgccgcccttcggcccttcgagaacctttctagaacatttcgttttggcctcgttgggccgccttagtaaggtaagtgaaaattagggggcgcctcgtggctcccgggaaatcctgggtattggaaacgtgttcgattggggg

SEQ ID NO: 22524 - DNA, 623 bp, Macaca Mulatta
agttttatacatgcattttcaatgtttaatatctagatttgaagtagaatatggaaatacgacatcattccttttgaatgttttcaggacaaagaaacaaaaactggcacatgtggttactgtgggctccagttccgacagcacccccactagagcacgtggcacgctgggggccccgcagcgtcctgtgaacatttccacggggaagatgagcgcgtgaagctcgctggttctgtgcgaagggtattcccggtgccgaataaagggtgttgctgtcaaggctgacaatttgtaagtttgtttcttttatcggctgggctttggaagtgaacatccacatggacatgggtagacgtgcgagtggaagcagtgcccgctccagagtgagcctgagctgcctcctgctggccaccgcgtgccttaccggctgcttctgtgtgtctcctcttatccctggggccacgtgggctgtaagaatggcggggcgggcagggagggagaagaagtgcctcttgttttgcagatgcagctgggcttccgagagccaaggtggctcttgagttgcacagtgaagagggcgcccaggcctcagctggtcctatgggaatgtcagtctctctccc

SEQ ID NO: 22525 - DNA, 148 bp, Macaca Mulatta
ggatggtggcagggaaggctgagccggccatgccaggaaggctgtatgtccacccggattctcctgccacaggggcccactggatgcggcagctggtctccttccagaagttgaagctgacaaacaaccacctggacccctttggcca

SEQ ID NO: 22526 - DNA, 134 bp, Macaca Mulatta
agaggacagagctgcccagtccttactcaacaagctgatcagaagtaaccttgtcgataacacaaaccaagtagaagtcctgcagcgggatccaaactcccctctgtactcggtgaagtcgtttgaagagcttc

SEQ ID NO: 22527 - DNA, 168 bp, Macaca Mulatta
gtccgcgaggccccctggggacgcggtggccaccgaggcacctacttccggaggctgcagccaggcgctccaatgaggcccggccccggcgccaacgggaccagcccgtgggacagcggcctctgctggcgggggagggagggaggccgaaccagggcgacggggaga

SEQ ID NO: 22528 - DNA, 352 bp, Macaca Mulatta
gtggtcaaggtgacgtgtgtgtcacactgtccttaaggactgaccttgtgacattctagctaacatttaacaccaccaaggttaagcttcacaggatctgtaattatatatttgcaagtgtttgaaaatcagttaagcttttagggttaaattcttcctccaacttttccaaatcctacacaagcctttgggaaactttggtaatattccctgttgccttgttgctatgttttccacagagaaaagtcaaatcttgtgaaaacaaatcccactacatttaagtctttatgtcagtgtgtctaagccggggtccacatgccagtaatttcaggtaatatttgatctaatagaa

SEQ ID NO: 22529 - DNA, 458 bp, Macaca Mulatta
  misc_feature (1)...(458): n = A,T,C or G
agtgcctatgaagtcatcaagcttaaaggatataccaaannnnnnnnnnnnnnnnnnnnnnnnnnnnnnnnnnnnnnnnnnnnnnnnnnnnnnnnnnnnnnnnnnnnnnnnnnnnnnnnnnnnnnaggggatgtatggcatcgagaatgaagtcttcctgagccttccatgtatcctcaatgcccgaggattaaccagcgttatcaaccagaagctaaaggatgatgagtttgctcagctcaagaaaagtgcagataccctgtgggacatccaaaaggacctaaaagatctgtgcttactgagctgtgtaggctgaagaaattttaaaactacaatgttattaactctgagcctttagttttcatctgtgtacatggatcgcagtttgctttaagcttcttcaatatgtgaatttgggctcatagaatcaaaacgtatgcttggtttaatgcttgcaa

SEQ ID NO: 22530 - DNA, 803 bp, Macaca Mulatta
tatacatttttactataaccaacctagttaagggtttgcagcctggccgactgacccatacaagcccattagcattgtaccaaaccccaaattaaatgaaagtaagtagtaactttaggaataagattttgattcagtatcttatttttcttaagcagtttatattaattgctttgtatgtgttctcaatgtttttattactctttagactcacaacgaccccaaaagcattctcaaagatgatgaatgtactcaaacagaacttcaactaattgctgaagcattttgcagtgccctagaatctgttgttggctctttagaacatgatggaggtgaaattctcactgacatgaagtatggacacctttggtcagttcaggcagattctccctgtgttgctaactggccagatttgctttcacattgtggctgtggattatacaatagccaggaagaactcagctggtctttcttaagaagcacacgtcatccttttgtgccacaaacctgccttccacttgaagctgtgggctcagccagcaacctgaccttggactgtttgactgcaaagcttagtggcctacaggtggctgtagagacagccaatttgattttggatctctcatatgttattgaagataaaaactaagagaatagcatgtttgtattacgaaagaaacaaataaactagtctggtgacaattaagaaaaattgtgagtgtatttgttctctcccaaagacccctgttctacatatttggacaaatgactcataaaattatagatacacttatttaggaaaa

SEQ ID NO: 22531 - DNA, 499 bp, Macaca Mulatta
  misc_feature (1)...(499): n = A,T,C or G
gggagctcacctttagtaggaattactattatgtatactctaggtaataggagtaagcctcctgatcagttctgccttggtttctcgttgtttctgcagaaatccctgccatatttctggtttttgattcgtgtttgtactagttttctaccctaatctttgcatataagaaactagaatttaggacattagccaggcatagtgtaatttcaannnnnnnnnnnnnnnnnntgggatgattacttgtggccaggagttcaagtccatcctggtcaacatagcaagactatgtctttacaaaaagtgttaaaaattagcttggaatgatggtgcatgcctgtagtctcagttactctggaggctgaagtgaaagtctctcttggttccaggagcttgagactgcactgagccatgatcacgccactatactccagcctggatgacagagtgagaatctgtttcttatcaaaattataacataaaaaaataaatctttgtc

SEQ ID NO: 22532 - DNA, 890 bp, Macaca Mulatta
  misc_feature (1)...(890): n = A,T,C or G
cctgacccttcacggcccgcctgcctccctgcccaagtcctcagccaccatgctgaccccgatggtggccgggggggtggtgttccctggactcttcctcctctccaagaatacgctccagcggctgccccannnnnnnnnnnnnnnnnnnnnnnnnnnnnnnnnnnnnnnnagcacgcctccctctctcccccaggctggtgtcctctgtccaggccnnnnnnnnnnnnnnnnnnnnnnnnnnnnnnnnnnnnnnnnnnnnnnnnnnnnnnnnnnnnnnnnnnnnnnnnnnnnnnnnnnnnnnnnnnnnnnnnnnnnnnnnnnnnnnnnnnnnnnnnnnnnnnnnnnnnnnnnnnnnnnnnnnnnnnnnnnnnnnnnnnnnnnnnnnnnnnnnnnnnnnnnnnnnnnnnnnnnnnnnnnnnnnnnnnnnnnnnnnnnnnnnnnnnnnnnnnnnnnnnnnnnnnnnnnnnnnnnnnnnnnnnnnnnnnnnnnnnnnnnnnnnnnnnnnnnnnnnnnnnnnnnnnnnnnnnnnnnnnnnnnnnnnnnnnnnnnnnnnnnnnnnnnnnnnnnnnnnnnnnnnnnnnnnnnnnnnnnnnnnnnnnnnnnncagtacaagcagcagcacacgctgctgcacaaggtgaacggggccctgatgctgctcagcttcctgtgctgccgggtgctgctcttcccctacctgtactgggcctacgggcgccacgccggcctgcctctgctggccgtgcccctggccatccccgcccacgtcaacctgggcgctgcgctgctcctggcccctcagctctactggttcttcctcatctgccgcggggcctgccgcctcttctggccccgctcccggccacccccggcctgccaggcccagg

SEQ ID NO: 22533 - DNA, 1199 bp, Macaca Mulatta
  misc_feature (1)...(1199): n = A,T,C or G
tgccgtgtcccggcccggccgcggggagccccgcttcatcgcggtgggctacgtggaagacacgcagttcgtgcggctcgatagcgacgctgcgagtccgaggatggagcctcgggcgccgtgggtggagcaggaggggccggagtattgggaagaggagacacggatcgccaaggcccacgcacacactgacagagtgaacctgcggaccctgcgcagctactacaaccagagcgaggccggttctcacaccctccagtggatgattggttgcgacctggggcccgacgggcgcctcctctgcaggtgtgaacagttcgcctacgatggcaaggattacctcgccctgaacgaggacctgtgctcctgaaccgcagcggacactgtggctcagatctccaagcgcaagtgtgaggcggccaaagcgactgaacgaaggagagcctacctggagggcacgtgagtggagtggctccacagatacctggagaatgggaaggagatgctgcagcgtgcggaccccccaaagacacacgtgacccagcaccctgtctctgaccatgagaccatcctgaggtgctgggccctgggcttctaccctgcggagatcacactgacctggcagcgggatggggaggaccaaactcaggacactgagcttgtggagaccaggccaggaggagatggaaccttccacaaatggggagctgtggtggtgccttctggagaagagcagagatacacgtgccatgtgccgcatgaggggctgacggagcccctcatcctgagatgggcaccatcttccaagtcaacaatccccattcgaggggcattgaagctggcctggctgtctagcaggtgtggtcacagaagccgaggctgctgattgtatgtgacgggggagacacaagtgaaaagaaggcgtaagagaaggaggatacgacaaagtcaggaccgagtgggacaacgtaaaagggccaagagagcaaacaggcgggacagtgcagcatggaaaggacagggcaagcagagcagaaacgagcaataaagagagcaataacgacccatggttgcctcccttctcccttcgtctccgcccgtgcttccatgnnnnnnnnnnnnnnnnnnnnnnnnnnnnnnnnnnnnnnnnnnnnnnnnaannnnnnnnnnnnnnnnnnnnnnnnnnnnnncaaaaagaa

SEQ ID NO: 22534 - DNA, 655 bp, Macaca Mulatta
cttgggcaagcaggggtaccagcttagacaggtaaataagggtatatattttaagatggctttatatacccagtaccaagtttgtcttgggcctaaatctatttttttcccttgctcttgatgttactatcagtaataaagctttttgctagaactattatttccaaaataatgctatagtatcattttaatttttcctacaagtgcttgatagttctgacattaagaattaatgccaaactaacagggccacttatcactagttgctaagcaatcacacttattttcttggtttttcagggagacaactttgaagtatgggaacgacctctctcagacttagcctgggctgtagctatgataaaccggcaggagatcggtggacctcgctcttataccatcgcggttgcttccctgggtaaaggagtggcctgtaatcctgcttgcttcatcacacagctcctccctgtgaaaaggaagctagggttctatgaatggacttcaaggttaagaagtcacataaatcccacaggcactgttttgcttcggctagaaaatacaatgcagatgtcaattaaagacttactttaaaatgtttattttgttgccaactactacttcccatccacctttttctctattcactttaaaagct

SEQ ID NO: 22535 - DNA, 693 bp, Macaca Mulatta
tcagatttcagaggactacccagcagggacaagtcacctctcatttggacagtgaggcccctggctgctgctctgggtggcgctggtgttgctggggcttcagctcttggtgcacgtttcagataagcatgcacacttctgaccggtggtcagggcccggcccacggctctgagcggctgcagcctgctttgggacgatggtcaggtcccatgttgtccctgctgcctccctctggagtggccacttggccaaagctcccatccacatctggaaagtctgagctgcggcctgctgcaccgtttccgctctgggatcttgtgagttacttttttaggctgtggtttggtgaaaggaaccaacacattaacgatttttccccccagaagccactgaataattctttttggtgtatttttgccttcctgttggctgtctggccttggagcaggtcgggagagtgaagtacataatcagtgccacacagaggcagggcatgtctgagactgatgcctgtcctgcctctggcctgtgtcctgggtgtgtgccgtacctgctgggccagtcccacacatttccaccctgcccctggagcagcagctttgataccatgggtgtcccttgagtctgagctagagtgtgtccccgataaactgtgagacctccctgttcttggtgaccccagttgggctttg

SEQ ID NO: 22536 - DNA, 548 bp, Macaca Mulatta
agacatctttaaatgtgagatttgtttgtttctatcataggtacctttatctaaaaagttaaattgtttatgaaaccatcactttcatgcaagatgactaagttctagaaatcttattgtttctctgaaagaaacatcaatgatagcaatatgtgacaagaaggaacaaaattatgcatgtgataaacattgctcttgaaatgagcctgcctttgaaatatgttttggaaggttaccgcagaaatagcagatgcagtaaaggaaaagattgtatttgataaatgaattgtgtttttgacattggaacttttttttatatttctatcttttccccatccatctgtgctgttattgatatgagagaaaaaagggtaaaatttgttccaaaactcgtgtgtgaagttacagtgccacagtggaaccaagttccttatcatctgagctagagttgcgtggaatgtgatttaagcacatagccctgtgttggtcaccattcttatgattcccttctgagtttgaatactgatgtaatgggaaagcaaatctga

SEQ ID NO: 22537 - DNA, 1166 bp, Macaca Mulatta
  misc_feature (1)...(1166): n = A,T,C or G
acttgacaatgcagatcttcgtgaagacctgactggcaagaccatcactcttgaggttgagcccagtgacaccnnnnnnnnnnnnnnnnnnnnnnnnnnnnnnnnnnnnnnnnnnnnnnnnnnnnnnnnnnnnnnnnnnnnnnnnnnnnnnnnnnnnnnnnnnnngcgcaccctgtctgactacaacatccagaaagagtccaccctgcacctcgtgctccgcctcagaggtgggatgcagatcttcgtgaagaccctgactggcaaggaccatcactcttgaggttgagcccagtgacaccatggagaatgtcaaggcaaagatccaagataaggaaggcattcctcctgaccagcagaggttgatctttgccgggaagcagctggaagatgggcgcaccctgtctgactacaacatccagaaagagtctaccctgcacctggtgctccgcctcagaggtgggatgcagatcttcgtgaagaccctgactggcaagaccatcaccctcgaggtggagcccagtgacaccatcgagaatgtcaaggcaaagatccaggacaaggaaggcattcctcctgaccagcagaggttgatctttgctgggaaacagctggaagatggacgcaccctgtctgactacaacatccagaaagagtccactctgcacttggtcctgcgcttgagggggggtgtctaagtttccccttttaaggtttcaacaaatttcattgcacttttctttcaataaagttgttgcattcccaaaaagatcacactactaacgactacaacacacctagacgcaaaacnnnnnnnnnnnnnnnnnnnnnnnnnnaattcgcctatagtnnnnnnnnnnnnnnnnnnnnnnnnnnnnnnnnnnnnnnnnnnnnnnnnnnnnnnnnnnnnnnnnnnnnnnnnnnnnnnnnnnnnnnnnnnnnnnnnnnnnnnnnnnnnnnnnnnnnnnnnnnnnnnnnnnnnnnnnnnnnnnnnnnnnnnnnnnnnnnnnnnnnnnnnnnnnnnnnnnnnnnnnnnnnnnnnnnnnnnnnnnnnnnnnnnnnnnnnnnnnnnnnnnnnnnnnnnnnnnnnnnnnnnnnnnnnnnnnnnnnnnnnnnnnnnnnnnnnnnnnnnnnnnnnnnnnnnnnnnnnnnnnnnnnnnnnnnnc

SEQ ID NO: 22538 - DNA, 121 bp, Macaca Mulatta
ggagttattgagagtattgcagttagctctgagggagcattgttctgttctgtgggtgatgataaagcaatgaaggtgtttgatgtagtgaactttgacatgatcaacatgctgaaacttg

SEQ ID NO: 22539 - DNA, 697 bp, Macaca Mulatta
ggaagggggctcaggggttacgaggatgactgggtccggtcgccaggactgtctctgaggcagaaacgccggctgggcgccggcggggacgatggccccgaccctggcagcgaggggagtgcaggcggctaggaccctggccgcgcttggttcttccaaagtgagaagggcttctctccctctgcctttccgcggcctccgcgaagcattggcggggagcccaaggacataacaaattaaaagcatgaaggagagaaaaatgggagtcgtggcttgagaaattccaggccctaccgattctctgccccctttgcgggcctggagcgccatagcacagtcgatttcgtttcccagctgtctcccctccgcagcagatacctctgtccagatctccggattgtcgggggacgcaggattcttcgaggaagaccagccgaatgagatcaaaagttgggggtggggggaggctgaacaaactcgaaacctggtggcccaccggaggtgttaccgggtttcctttctgtttcgtattctgtattcagcacatgttatctatctatctatataactataaccacacgccgtgtacacacccgctgccacacactacaggagtcaataaacaaggtgcaatattttcagatcattggccggctacagaatttgtttagcccccaagagtggagaggaatccttt

SEQ ID NO: 22540 - DNA, 678 bp, Macaca Mulatta
  misc_feature (1)...(678): n = A,T,C or G
ggtgattcgcgaagctaagagaacagcaccaagtatagtgtatgttcctcatatccacttgtggtgggaaatagttggaccaacacttaaagccacatttaccacattattacagaatattccttcatttgctccagttttactacttgcaacttctgacaaaccccattctgctttgccagaagaggtnnnnnnnnnnnnnnnnnnnnnnnnnnnnnnnnnnnnnnnnnnnnnnnnnnnnnnnnnnnnnnnnnnnnnnnnnnnnnnnnnnnnnnnnnnnnnnnnnnnnnnnnnnnnnnnnnnnnnnnnnnnnnnnnnnnngttttgcaggctttggaggtactcccagtagcaccaccacctgagccaagatcactgacagcagaagaagtgaaacgactagaagaacaagaagaagatacatttagagaactgaggattttcttaagaaatgttacgcataggcttgctattgacaaacgattccgagtgtttactaagcctgttgaccctgatgaggtnnnnnnnnnnnnnnnnnnnnnnnnnnnnnnnnnnnacctttcatctgtaatcagtaaaattgatctacacaagtatctgactgtgaaagactatntgagagatattgatctaatctgtagtaatgccttagaatacaatccagatagagatcctgga

SEQ ID NO: 22541 - DNA, 128 bp, Macaca Mulatta
gtacaccttcaccgccatttacacctgtgagtctctggtcaagattctgtctcgaggcttctgcctgcatgcgttcaccttccttcgggacccatggaactggctggacttcagtgtgattgtcatgg

SEQ ID NO: 22542 - DNA, 1889 bp, Macaca Mulatta
  misc_feature (1)...(1889): n = A,T,C or G
agtccctgccacaggtggaccgacacacagtctacaatatcatcaccaattttatgcgaacccgggaagaannnnnnnnnnnnnnnnnnnnnnnnnnnnnnnnnnnnnnnnnnnnnnnnnnnnnnnnnnnnnnnnnnnnnnnnnnnnnnnnnnnnnnnnnnnnnngtccatgacctcatctccagggactatagcctgnnnnnnnnnnnnnnnnnnnnnnnnnnnnnnnnnnnnnnnnnnnnnnnnnnnnnnnnnnnnnnnnnnnnnnnnnnnnnnnnnnnnnnnnnnnnnnnnnnnnnnnnnnnnnnnnnnnnnnnnnnnnnnnnnnnnnnnnnnnnnnnnnnnnnnnnnnnnnnnnnnnnnnnnnnnnnnnnnnnnnnnnnnnnnnnnnnnnnnnnnnnnnnnnnnnnnnnnnnnnnnnnnnnnnnnnnnnnnnnnnnnnnnnnnnnnnnnnnnnnnnnnnnnnnnnnnnnnnnnnnnnnnnnnnnnnnnnnnnnnnnnnnnnnnnnnnnnnnnnnnnnnnnnnnnnnnnnnnnnnnnnnnnnnnnnnnnnnnnnnnnnnnnnnnnnnnnnnnnnnnnnnnnnnnnnnnnnnnnnnnnnnnnnnnnnnnnnnnnnnnnnnnnnnnnnnnnnnnnnnnnnnnnnnnnnnnnnnnnnnnnnnnnnnnnnnnnnnnnnnnnnnnnnnnnnnnnnnnnnnnnnnnnnnnnnnnnnnnnnnnnnnnnnnnnnnnnnnnnnnnnnnnnnnnnnnnnnnnnnnnnnnnnnnnnnnnnnnnnnnnnnnnnnnnnnnnnnnnnnnnnnnnnnnnnnnnnnnnnnnnnnnnnnnnnnnnnnnnnnnnnnnnnnnnnnnnnnnnnnnnnnnnnnnnnnnnnnnnnnnnnnnnnnnnnnnnnnnnnnnnnnnnnnnnnnnnnnnnnnnnnnnnnnnnnnnnnnnnnnnnnnnnnnnnnnnnnnnnnnnnnnnnnnnnnnnnnnnnnnnnnnnnnnnnnnnnnnnnnnnnnnnnnnnnnnnnnnnnnnnnnnnnnnnnnnnnnnnnnnnnnnnnnnnnnnnnnnnnnnnnnnnnnnnnnnnnnnnnnnnnnnnnnnnnnnnnnnnnnnnnnnnnnnnnnnnnnnnnnnnnnnnnnnnnnnnnnnnnnnnnnnnnnnnnnnnnnnnnnnnnnnnnnnnnnnnnnnnnnnnnnnnnnnnnnnnnnnnnnnnnnnnnnnnnnnnnnnnnnnnnnnnnnnnnnnnnnnnnnnnnnnnnnnnnnnnnnnnnnnnnnnnnnnnnnnnnnnnnnnnnnnnnnnnnnnnnnnnnnnnnnnnnnnnnnnnnnnnnnnnnnnnnnnnnnnnnnnnnnnnnnnnnnnnnnnnnnnnnnnnnnnnnnnnnnnnnnnnnnnnnnnnnnnnnnnnnnnnnnnnnnnnnnnnnnnnnnnnnnnnnnnnnnnnnnnnnnnnnnnnnnnnnnnnnnnnnnnnnnnnnnnnnnnnnnnnnnnnnnnnnnnnnnnnnnnnnnnnnnnnnnnnnnnnnnnnnnnnnnnnnnnnnnnnnnnnnnnnnnnnnnnnnnnnnnnnnnnnnnnnnnnnnnnnnnnnnnnnnnnnnnnnnnnnnnnnnnnnnnnnnnnnnnnnnnnnnnnnnnnnnnnnnnnnnnnnnnnnnnnnnnnnnnnnnnnnnnnnnnnnnnnnnnnnnnnnnnnnnnnnnnnnnnnnnnnnnnnnnnnnnnnnnnnnnnnnnnnnnnnnnnnnnnnnnnnnnnnnnnnnnnnnnnnnnnnnnnnnnnnnnnnngtggaaatccctcagctgaaccaactcatgcgggagcttttggaactgagctgctgccacagctgccccttttcttctaccgctgctgccaagtgctttgcaggactcctcaacaagcaccctgcag

SEQ ID NO: 22543 - DNA, 1236 bp, Macaca Mulatta
  misc_feature (1)...(1236): n = A,T,C or G
taagtctgagctcaatgatacacaactagaccatcaaattattttcatattgaggaaaacagaaactcttttggataaccntgcattncaggctttcggtggaaaagacaaagacacacactgtacagcattaagtacttgggagacatgattttaaccaggatgtaactcaattatattagtgatttataaagagtctggagaaaatatttctttatttgagcatgggcactgtcagattaaaggtgcagtggttctaaatgctgtttgttccagccctgtcttcgattgcaacaatgtgagtgtcttgtctgtgctggtggattattaacagaggttattggtctccatggcaaagcgattgaatgattgctctgaacgtaatctcatttatgggggtgcaaaaaaaaagcacttcaggtcagggagaatgtataaatgtccatcgccatcaaggttctgctatttttgagaagctgaagcgactccaaggacgcagttcatagaaatttggttctcagccccaaaatactgattgaattgggcacagttacaaggactctctggccaaaaacccttgaagaggccccgtgaaggaggcagtgaggagcttttgattgctgacctatattgtatcaccccagcatgtgcactgggagctgtgccagatgcctggggggcaccctcattccccttgctttatttggcttcctggctaacatcctgttattttttcctggaggaaaagtgatagatgacaacgaccacctttcccaagagatctggtttttcggaggaatattaggaagcnggtgtcttnnnnnnnnnnnnnnnnnnnnnnnnnnnnnnnnnnnnnnnnnnnnnnnnnnnnnnnnnnnnnnnnnnnnnnnnnnnnnnnnnnnnnnnnnnnnnnnnnnnnnnnnnnnnnnnnnnnnnnnnnnnnnnnnnnnnnnnnnnnnnnnnnnnnnnnnnnnnnnnnnnnnnnnnnnnnnnnnnnnnnnnnnnnnnnnnnnnnnnnnnnnnnnnnnnnnnnnnnnnnnnnnnnnnnnnnnnnnnnnnnnnnnnnnnnnnnnnnnnnnnnnnnnnnnnnnnnnnnnnnnnnnnnnnnnnnnnnnnnnnnnnnnnnnnnnnnnnnnnnnnnnnnnnnnnnnnnnnnnnnnnnnnnnnnnnnnnnnnnnnnnnnnnnnnnnnnnnnnnnnnnnnnnnnnnnctgccagtgttgtggctgctgtgggg

SEQ ID NO: 22544 - DNA, 787 bp, Macaca Mulatta
  misc_feature (1)...(787): n = A,T,C or G
atcctgagaacctgaggactttgaagatacatggaagaggccagatgattaaccgggcagtctaagagactcgccatcccgtgcaaactggagaagatgcggattttggcacatggggagctcgtggtcgccacagccatcagcagcttcacgcggcacgtgttcacctgtggcagaagaggcgtcaaggtgtggagcctgactggccaggtggctgaggacaggttcccagagagccacctgccnnnnnnnnnnnnnnnnnnnnnnnnnnnnnnnnnnnnnnnnnnnnnnnnnnnnnnnnnnnnnnnnnnnnnnnnnnnnnnnnnnnnnnnnnnnnnnnnnnnnnnnnnnnnnnnnnnnnnnnnnnnnnnnnnnnnnnnnnnnnnnnnnnnnnnnnnnnnnnnnnnnnnnnnnnnnnnnnnnnnnnnnnnnnnnnnnnnnnnnnnnnnnnnnnnnnnnnnnnnnnnnnnnnnnnnnnnnnnnnnnnnnnnnnnnnnnnnnnnnnnnnnnnnnnnnnnnnnnnnnnnnnnnnnnnnnnnnnnnnnnnnnnnnnnnnnnnnnnnnnnnnnnnnnnnnnnnnnnnnnnnnnnnnnnnnnnnnnnnnnnnnnnnnnnnnnnnnnnnnnnnnnnnnnnnnnnnnncagataatgagcctgtcccacagcccccaggaggactggctgctgctgggcatggccaatggccagcagtggctgcagagcaccagcgggagccagcggcacatggtgggacagaaagatagcgtcatcctgagcaccaagttctc

SEQ ID NO: 22545 - DNA, 607 bp, Macaca Mulatta
cagggctcctggacagtgagcagtccaaacaccggtaccctttgtctccttcccaggccagtccccagcccagtccctctcctgacctgcccagcccaagccagccttcagcacgctgttttctgcccacagatattccaggcctacctggcattccaggacctccgaaatgatgctccagtcccttacaagcgctccctggatgagggcggcatggtgctgaccaccctcccctcgccctccgccaccagctctgtgaacatgcccaccactggccccaacagcctgagttatgccagctctgccctgtccccttgtctgaccgctccaaaggccccccgcctcgctatgatgcctgacaactaaatatccttatccacatcaataaagagagaatcctccctccagaagggtttctaaaaacagccctcagtccttatcatgtctgttccactcttttcccttgagtggcgagggtgggtaagaatcccacaaggtcaccattggggtctctgcactgggtcacatttccatagcatcctctggagccatcattggggcaccaccttgacagtgatggattggaagtggtgagaggagggaagca

SEQ ID NO: 22546 - DNA, 178 bp, Macaca Mulatta
ggcacatatttcttatcttcgaaacattctttctgcatgactgtggggtgtttggtgtgccagaaactgagacggtgccccgggatgagcaatgatcatgccaaactgaaagcaaactttgatcatgtctggagggaaaatccaatccatgaagtatcttgcatataccacaaaggga

SEQ ID NO: 22547 - DNA, 224 bp, Macaca Mulatta
  misc_feature (1)...(224): n = A,T,C or G
ngtctcccaatctctttctttctctctttagttcctccaggtaattcttacttaaacttgtaccaacttgtttttgactgacagtgaacagtgagagagttttcttcattttgaggaaccctaaacacctatctttcccaaggcaacctgtctggactgagcatttctgtgacttgacataactccccatccagccaggagtctgcactcttccgtctttgcag

SEQ ID NO: 22548 - DNA, 271 bp, Macaca Mulatta
atttgattaatgcccatttgactctcatgctttctattaaaaatatgtataggaccccaatccattgccatcaaattgcccttggactttttcaaggtatattatggggttttatgcaaaattccaagctaccatgtaacttttttttaaccgtttaacaaggaggggggactgcttcctaccttctttacatgttgtgcattgttgtggtccagaaatgccaaaccttttaaagatggtgcaactttgattcctcggcctgactatacag

SEQ ID NO: 22549 - DNA, 150 bp, Macaca Mulatta
agccacaccccagagctaacagctgagcccctgccacaccccatcctctgacttggagtgttgtccagaggtgcggctgggccctccctggtctccagcttaaacaggagtgaactccctctgcccccagggcctccctactgggcccca

SEQ ID NO: 22550 - DNA, 1180 bp, Macaca Mulatta
  misc_feature (1)...(1180): n = A,T,C or G
aggagaagggccggagaatgtcgtcccagccagcagggaaccagacctcccccggggccacagaggactactcctacggcagctggtacatcgatgagccccagggcggcgaggagctccagccagaggggtaagtnnnnnnnnnnnnnnnnnnnnnnnnnnnnnnnnnnnnnnnnnnnnnnnnnnnnnnnnnnnntccttgtgctgctgctcctggccgtgctggtgaggcgccgccagctctggcctgactgtgtgcgcggcaggcccggcctgcccagnnnnnnnnnnnnnnnnnnnnnnnnnnnnnnnnnnnnnnnnnnnnnnnnnnnnnnnnnnnnnnnnnnnnnnnnnnnnnnnnnnnnnnnnnnnnnnnnnnnnnnnnnnnnnnnnnnnnnnnnnnnnnnnnnnnnnnnnnnnnnnnnnnnnnnnnnnnnnnnnnnggggcctggaagatgctgggactgttctattacgctgccctctactacccgctggccgcctgtgccacagctggccacagagctgcacacttgcttggcagcacgctgtcctgggnnnnnnnnnnnnnnnnnnnnnnnnnnnnnnnnnnnnnnnnnnnnnnnnnnnnnnnnnnnnnnnnnnnnnnnnnnnnnnnnnnnnnnnnnnnnnnnnnnnnnnnnnnnnnnnnnnnnnnnnnnnnnnnnnnnnnnnnnnnnnnnnnnnnnnnnnnnnnnnnnnnnnnnnnnnnnnnnnnnnnnnnnnnnnnnnnnnnnnnnnnnnnnnnnnnnnnnnnnnnnnnnnnnnnnnnnnnnnnnnnnnnnnnnnnnnnnnnnnnnnnnnnnnnnnnnnnnnnnnnnnnnnnnnnnnnnnnnnnnnnnnnnnnnnnnnnnnnnnnnnnnnnnnnnnnnnnnnnnnnnnnnnnnnnnnnnnnnnnnnnnnnnnnnnnnnnnnnnnnnnnnnnnnnnnnnnnnnnnnnnnnnnnnnnnnnnnnnnnnnnnnnnnnnnnnnnnnnnnnnnnnnnnnnnnnnnnnnnnnnnnnnnnnnnnnnnnnnnnnnnnnnnnnnnnnnnnnnnnnnnnnnnnnnnnnnnnnnnnnnnnnnnnnnnnnnnnnnnnnnnnnngtgtgctacatctcggccttggtcttatcctgcttactcaccttcctggtcctaatgcgctcactggtgacacacagg

SEQ ID NO: 22551 - DNA, 634 bp, Macaca Mulatta
  misc_feature (1)...(634): n = A,T,C or G
gggatttctgaaacaattttagctatatccactatgattataaactgtgtctcgacctgtgttatttacattagctgcttaaaaaagcattgagttaattttttaaatatcaactaaaatatcatagttctgtggtagacattgttttataatgaaagaaataactgcaactagagaaaactgtataaaaacattaaattgtcagtatttttgtaaggttccattttgtaaagagaataatattcaaagacttttgtagcatacaaagtgaaaacttgtatctgcgaaactatacttgtattaaatgtgctttttaaataaaagctcgtaacacaactaattaaggacnnnnnnnnnnnnnnnnnnnnnnnnnnnnnnnnnnnnnnnnnnnnnnnnnnnnnnnnnnnnnnnnnnnnnnnnnnnnnnntnggccnnnnnnnnnnnnnnnnnnctttctaaaaaattcatttggcgggcgggccgcccaggtaagtaaacaaggtcgtacctgtttcttacgaaaacatgctcggggctggcgcttggatccacacaaattataaaaaccggcgtgcagcgacgcggnnnnnnnnnnnnnnnnnntcttagggtgttctggaagattccccgaagg

SEQ ID NO: 22552 - DNA, 680 bp, Macaca Mulatta
  misc_feature (1)...(680): n = A,T,C or G
tcacgcccagnctcannnnnnnnnnnnnnnnnnnnaatggtttcaccatggttannnnnnnnnnnnnnnnnnnnnnngnnnnnnnnnnnnnnannnnnnnnnnnnnnnnnnnnnnnnnncnnnnnnnnnnnnnnnnnnnnnnnnntgccaccagaattccttttgtatagccgagccttttggttaccacctcatgaagaatatgcttcctgcattgttctagtcccagttgtattctcacaggtgttatgtgcaggacacgatccaaatcataaacctggtgcatgcccaccacatttctgctaatagggagagggacccaccacacacccacacatgccacaggtcccttctcccagaggagaggccctgtgtctgtagaaggttaaagctgacaacatgtggaacatcccagaattatgactcttcccaagtttaaaatacattctcctcatgggagcagaaggttcgttgctgtgttgtgaatgatgagctgcctccacagggaacccactgccacctgggccagcttctggagcgtgagaacctgagccagggtcacccttttggggcctggacacgacgcatgctggctaagactaggagcagggctgcctcttctccctcccggagctctgcttgtgggcaccgcctgttccctcaggtgccattctcccaga

SEQ ID NO: 22553 - DNA, 2256 bp, Macaca Mulatta
  misc_feature (1)...(2256): n = A,T,C or G
aggtgagctcctacccctccttggtgggtgcggaggctcaggaggaattcctgcgggtccttggctccatgtgccagaagctccggtccgtgcagtacaatggcagctacttcgacagaggagccaagggcggcggccgtctctgcacaccggaaggctggttctcctgccaggnnnnnnnnnnnnnnnnnnnnnnnnnnnnnnnnnnnnnnnnnnnnnnnnnnnnnnnnnnnnnnnnnnnnnnnnnnnnnnnnnnnnnnnnnnnnnnnnnnnnaatagaaaagaaacgcaccatcattcctacactggtggaagcaattaaggaacaagacggaagagaagtggactgggagtatttttatggcctgctgtttacctcagagaacctaaaactagtgcacattgtctgccataagaaaaccatccacaagctcaactgtgacccaaacagaatctacaaaccccagccaaggttgaagcggaagcggcctgtgcggaaacgctagtgacacgtacacaccacgttctggtcttggttccaggcctgacgtgggcgtcattttaacaggtgccnnnnnnnnnnnnnnnnnnnnnnnnnnnnnnnnnnnnnnnnnnnnnnnnnnnnnnnnnnnnnnnnnntgtttcctgcaaatctgatttcagtacatttctgaattgttgnnnnnnnnnnnnnnnnnnnnnnnnnnnnnnnnnnnnnnnnnnnnnnnntgttgcccaggctggagtgcagtggcgcgatctcggctcanctcagcctcccaagtagctggcattacaggcacccaccaccatggccagctaatttttgtgctttcagtagaaacggggtttcaccatgttggccgggctgttcttgaactcctgacctcaggtgatctgcccaccttggcctcccaaagtgctgggattacaggcatgagccactgcnnnnnnnnnnnnnnnnnnnnnnnnnnnnnnnnnnnnnnnnnnnnnnnnnnnnnnnnnnnnnnnnnnnnnnnnnnnnnnnnnnnnnnnnnnnnnnnnnnnnnnnnnnnnnnnnnnnnnnnnnnnnnnnnnnnnnnnnnnnnnnnnnnnnnnnnnnnnnnnnnnnnnnnnnnnnnnnnnnnnnnnnnnnnnnnnnnnnnnnnnnnnnnnnnnnnnnnnnnnnnnnnnnnnnnnnnnnnnnnnnnnnnnnnnnnnnnnnnnnnnnnnnnnnnnnnnnnnnnnnnnnnnnnnnnnnnnnnnnnnnnnntcttgactcttctatatggccaaaagaggggtgtcatgctttgggagcaagatgtttgtactccataaagaacatacaaggacattcactgctgannnnnnnnnnnnnnnntttgagacggagtctcactctgttgcccaggctggagtgcagtggtgcaatcttggctcactgcaacctctgccttccaggttcaagcgattctcctgcctcagcctcccaagtagctggcattacaggcacccaccaccatggccagctaatttttgtgctttcagtagaaacggggtttcaccatgttggccgggctgttcttgaactcctgacctcaggtgatctgcccaccttggcctcccaaagtgctgggattacaggcatgagccactgcacctggcctgctgaattgtttataatggcaaaaagtaggaaaccccccaatgnnnnnnnnnnnnnnnnnnnnnnnnnnnnnnnnnnnnnnnnnnnnnnnnnnnnnnnnnnnnnnnnnagctattatgttgaaccacatgaaattgccgttttctaggccaaaaatggtcagcattcattaatttcatgattcaacctgatacatttacatagtgcaaaactatgtcgcagtttcaagcttttatgaggaaagtgtttctatgtagaaactggaagctgttcagtgcactggcagctgaaccctgctcgttgatcagcgttactatcatctcagatcatatggagctcatgtcagctatgtgggtggcaggtgccagagacgatctggaaggaaacacgcggatctgaacagcagtaatcctgggggatacgggggtagggctggattacagagggctcattttctacatcatgtattttatggtacttgaattttttgaaatgggcatttataacatgttaaaatgtacttttaaaattaagtcattttgtaatatttgaatttttacatttgttgtacaatcaggaaaagcaataaagattttcaaaaatagaca

SEQ ID NO: 22554 - DNA, 183 bp, Macaca Mulatta
cggagcggacgcccccagggatctggggacatccccatgggacaggtgaggtgctcggccggagccgcggggggacaacgactggggacctccatgccttcaccacgccctctgcggaggtttctccattgtccttgccggagtttgggtccctcggcctcccttgcaccaggcacccttggg

SEQ ID NO: 22555 - DNA, 161 bp, Macaca Mulatta
attcagacatgtcagtaaagcaaattagtaaagactcttcagttttgtgactgagatataatgttttacttacagaaccaatttagaacttgaattgattcatcgaggaggcaatttgtgttcaggtggtgcaagcacagctggcaaaaggtcttgtttaa

SEQ ID NO: 22556 - DNA, 1018 bp, Macaca Mulatta
  misc_feature (1)...(1018): n = A,T,C or G
agctggacagcatgaggttgtagctataggcacaggtgaatataattacagccaggacattaagccaaatggaagagtattgcatgacactcatgctgttgttacagcaagaaggtctcttcttaggtanttaggtacttttacagacaacttctgctcttctacagcaaaaatcctgctatgatggaaaaatcaatattttgtacagaaccaacttctaatctactcactcttaagcagaatatcaacatttgcctttacatgaaccagttgcctaaaggatcagcccagattaagtcacagttnnnnnnnnnnnnnnnnnnnnnnnnnnnnnnnnnnnnnnnnnnnnnnnnnnnnnnnnnnnnnnnnnnnnnnnnnnnnnnnnnnnnnnnnnnnnnnnnnnnnnnnnnnnnnnnnnnnnnnnnnnnnnnnnnnnnnnnnnnnnnnnnnnnnnnnnnnnnnnnnnnnnnnnnnnnnnnnnnnnnnnnnnnnnnnnnnnnnnnnnnnnnnnnnnnnnnnnnnnnnnnnnnnnnnnnnnnnnnnnnnnnnnnnnnnnnnnnnnnnnnnnnnnnnnnnnnnnnnnnnnnnnnnnnnnnnnnnnnnnnnnnnnnnnnnnnnnnnnnnnnnnnnnnnnnnnnnnnnnnnnnnnnnnnnnnnnnnnnnnnnnnnnnnnnnnnnnnnnnnnnnnnnnnnnnnnnnnnnnnnnnnnnnnnnnnnnnnnnnnnnnnnnnnnnnnnnnnnnnnnnnnnnnnnnnnnnnnnnnnnnnnnnnnnnnnnnnnnnnnnnnnnnnnnnnnnnnnnnnnnnnnnnnnnnnnnnnnnnnnnnnnnnnnnnnnnnnnnnnnnnnnnnnnnnnnnnnnnnnnnnnnnnnnnnnnnnnnnnnnnnnnnnnnnnnnnnnnngtgtatgtctgcctcctatcaagaagctaaatgtaagttgaaatcctacttacaacaacatgggctatggatcctggnattgtgaaatctccctgcatagagcaatttaacatgtga

SEQ ID NO: 22557 - DNA, 730 bp, Macaca Mulatta
gccggatgaggggactgaggaggagacggaggtgatcatcattgaggtggacgaggagggcggcggggcggtgagcgcggctgccgtggtactgcccgtgctgctgctgctcctggtgctggcggtgggccttgcagtcttcttcttcagacgccatgggacccccaggcgactgctctactgccagcgttccctgctggacaaggtctgacgcccaccgccggcccgcccactcctaccacaaggacttggcctctgaaggccagtggcagcaggtggtggtgggtgggctgcccccaccgtcccgagccccctccccacagcctccttgcttctctttgtcccctggctggcctccctcaccctgaccacctccctccctgctgccccggcattgcatcttccctagatggctcccatgagggctgactgggagggtggccctttccagcctctgcccctcagcggaaccctgtagttttgtgtctgtccagccccatctgaatgtgttgggggctctgcacttgaaggcaggaccctcagacctcgctggtaaaggtcaaatggggtcatctgctccttttccatcccctgacataccttaacctctgaactctgacctcaggaggctctgggcactccagccctgaaagccccaggtgtacccaattggcagcctctcactactctttctggctaaaaggaatctaatcttgttgggggtagagac

SEQ ID NO: 22558 - DNA, 1003 bp, Macaca Mulatta
  misc_feature (1)...(1003): n = A,T,C or G
gagaccacatgaccccaagacggtagatctgatcctggaacttctggatcgtgaccgtaatgggcgtgtcgatttcaacgaattcctcctatttattttcaaagtggctcaagcttgttactatgctctcggccaggccacgggactggatgaggagaagcgagcccggtgtgacggaaaggagagcctgttacaagatcgcaggcaagaagaagaccaaaggagattcgagtcccgggacagacaactggaagaagaacctgggcaacgacgcaggcagaagaggcaggaagaggagagggagctcgctgagggagaggagcaaagtgagaaacaagagcgacttcagcagcgcgacaggcagcgccgcgacgaggagctatggcggcaaaggcgagaacggagagaacaggaagagcgccgtgcagaggaagagcagctgcagaggtgcaagggtcacgaaactgaggcgtttccagatgaagagcaacaacgaaggcgggagctgcaggagctgaggagggagcgccgcgaggagaagcagcagcaaaggcgagagcggcaagaaagagtgctccaggaggaagaagagaaagagtggaggaagcgcgagagagtgcaccggcaggaagagaaactgcaggaagaagagccgcagctgcaaagagagctccaggaggaagaagagcagctacagaagctggagcggcaagagctgaagagggagcgccaggcggaagagcagcagcagcaaaggcnnnnnnnnnnnnnnnnnnnnnnnnnnnnnnnnnnnnnnnnnnnnnnnnnnnnnnnnnnnnnnnnnnnnnnnnnnnnnnnnnnnnnnnnnnnaggaggagaggcgcgagcagtggctgaagcgcgaacaggaggagaggcgcgagcagtggctgaagcgcgagcaggaggaggagaggcgcgatcagctgctgaagcgcgaggaggaggagaagaggcgccagcaggaggagaggcgcgagcagcg

SEQ ID NO: 22559 - DNA, 751 bp, Macaca Mulatta
  misc_feature (1)...(751): n = A,T,C or G
aagttgttttgttctaatgatagaactacttctgtaacaactttaattgccaagaatttcatgcctccctctctatcatttgcttgggaaaactgtgaaagagtttaaattctggcttctatacttaattaagaaagtggcctcagatgtttaaaagcataaaatactagatctacactatgaggttctcattagagttacttgttcattgattggagaaatatttttcaatgtcagtttggagcgttttgaggaggaaagtcttgaatatttaattttctttagcatctattttattttcaggttcagatctgggaaaaaaacaagagactcaatggagacagaagaaaatcccaaggttctaataactgcattctgaaaaaatatctcccccatttggtgaagtgaaaaacagataaataagactctgtggagaaatccgttgttcccgctgaaatggactgactgtaatgattgacactaaaatgaaccttgctatcaagaaatgctcgtcatacagtaaactctggagaattcttccagataatgtccttgctttgcaaaccaaccatttctagagagtctccttactcattaattcgatganatggattggtaagaggtcttgaaaacatgttagtcaaggactggtaaaatatatataaagattaaccctcttttccaattatacaaatgctatccaaataaaaataacatcattttattaatgcaaatattaggtgacaacaat

SEQ ID NO: 22560 - DNA, 648 bp, Macaca Mulatta
  misc_feature (1)...(648): n = A,T,C or G
gggctgatagttcaggaccattcagaccccatgttcagttcatatgcctataagtcccactatctactgaatgaatcaaatcgtgctgagttgatgaaattacctatgattccttcttcgtcagcttccaaaaagaaatgtgagaaaggtnnnnnnnnnnnnnnnnnnnnnnnnnnnnnnnnnnnnnnnnnnnnnnnnnnnnnnnnnnnnnnnnnnnnnnnnnnnnnnnnnnnnnnnnnnnnnnnnnnnnnnnnnnnnnnnnnnnnnnnnnnnnnnnnnnnnnnnnnnnnnnnnnnnnnnnnnnnnnnnnnnnnnnnnnnnnnnnnnnnnnnnnnnnnnnnnnnnnnnnnnnnnnnnnnnnnnnnnnnnnnnnnnnnnnnnnnnnnnnnnnnnnnnnnnnnnnnnnnnnnnnnnnnnnnnnnnnnnnnnnnnnnnnnnnnnnnnnnnnnnnnnnnnnnnnnnnnnnnnnnnnnnnnnnnnnnnnnnnnnnnnnnnnnnnnnnnnnnnnnnnnnnnnnnnnnnnnnnnnnnnnnngcactggaagaagctgcaaaacgtttccaggaattgaaagcacaaagagagagtaaagaagccctagagattgaaaaaaactcaagaaaaccccctccctacaaacacatcaaa

SEQ ID NO: 22561 - DNA, 2054 bp, Macaca Mulatta
  misc_feature (1)...(2054): n = A,T,C or G
gatctgaacctgccccagccccaggactcttaagtgcatccagaggggagccaggctggagagtggggagcacagagactgtggcctggatggtgccagagcgaacgggagannnnnnnnnnnnnnnnnnnnnnnnnnnnnnnnnnnnnnnnnnnnnnnnnnnnnnnnnnnnnnnnnnnnnnnnnnnnnnnnnnnnnnnnnnnnnnnnnnnnnnnnnnnnnnnnnnnnnnnnnnnnnnnnnnnnnnnnnnnnnnnnnnnnnnnnnnnnnnnnnnnnnnnnnnnnnnnnnnnnnnnnnnnnnnnnnnnnnnnnnnnnnnnnnnnnnnnnnnnnnnnnnnnnnnnnnnnnnnnnnnnnnnnnnnnnnnnnnnnnnnnnnnnnnnnnnnnnnnnnnnnnnnnnnnnnnnnnnnnnnnnnnnnnnnnnnnnnnnnnnnnnnnnnnnnnnnnnnnnnnnnnnnnnnnnnnnnnnnnnnnnnnnnnnnnnnnnnnnnnnnnnnnnnnnnnnnnnnnnnnnnnnnnnnnnnnnnnnnnnnnnnnnnnnnnnnnnnnnnnnnnnnnnnnnnnnnnnnnnnnnnnnnnnnnnnnnnnnnnnnnnnnnnnnnnnnnnnnnnnnnnnnnnnnnnnnnnnnnnnnnnnnnnnnnnnnnnnnnnnnnnnnnnnnnnnnnnnnnnnnnnnnnnnnnnnnnnnnnnnnnnnnnnnnnnnnnnnnnnnnnnnnnnnnnnnnnnnnnnnnnnnnnnnnnnnnnnnnnnnnnnnnnnnnnnnnnnnnnnnnnnnnnnnnnnnnnnnnnnnnnnnnnnnnnnnnnnnnnnnnnnnnnnnnnnggagggggaggcccttccgagctggggcctggatgtgaatgagggcaggtttttcatctctctgacctcaacttcctcaactggaaaggggagccacagcacctgcttggggtgatgaggaagggggagctcagggagagccctgggcagggctgcctcctcaccttccttcagcctttggacatgagcgcagaggaccaagtgaatgaatgaatgactcagtcaatcaactgatccatcagtctatggatctctggacagtcggacagctgggcagcgggcaggatgggggactctcgctgaagccgcattcatttgtgttcagctttgtgagtggggcgaggctgagggcttattcagtgggggaggtgcacggcagggtcagtgcctttggagggtcaggccccagagggcggggacacctgccaggatgcccaaacccagaggcggtggnnnnnnnnnnnnagccatggtcccactcggcagtggctgtgatgagggctgttcccactttgtccacacgattccagccgcagctgccccacacatgagctgtccctagtcacccagcacggctggacgaagccccctgcagccaaggtgctccgtggggcgggtttctcgaagctagtattttccatggtatcttacgtcccagcagaggcccaccactgtgcccggaccagcggcccactcggtgagtcgaacgtgcacctggcacccctctttttggaaatccacgaacactgggctcccgcagagactgaggctgagcaggccacttccctggagctgactccacagctgtgtaggtacagggtggccgtgaacacttagggctttctcaggctgtgcacttcttgttcactgcagggagcagggtgttggctcctgaccaagccctgtcactgctgcccagccacacatggggccccttcacccacccctgaccaccttatgcagggaagccactgtggaaacagtctggcagtccctcgaaaaatgaagtcatcaaccccagcaattccactcctgggcctatgacagagcttgcacgtcccctccaaagctcatgtttagatgtgagccccagtgctggaggtggagcctggtgtgtttgggtcctgggggcggatccctcatggctgggtgccgtgcacccactcaccacagtgagttctcacgagatcttgttgttgaaaagtgtgttgtacctcccccacaattctct

SEQ ID NO: 22562 - DNA, 96 bp, Macaca Mulatta
gacctgcccaaccccccaggccctctggttctgatggtggctgtggtggcaacctcaacactgagcctctttatggtgtgtggggtcctgattctg

SEQ ID NO: 22563 - DNA, 1249 bp, Macaca Mulatta
  misc_feature (1)...(1249): n = A,T,C or G
gggctgaaaacctttcatttcttctggaagctttaaaaaaaggtgaccgaactagcagttgcccagtgatcttcatattagatgaatttgatctttttgctcatcataaaaaccaaacacttctctataatctttttgacatttctcagtctgcacagaccccaatagcagttattggccttacatgtagattggatattttggaactcttagaaaaaagagtgaagtcaagattttctcaccggcagatacacttaatgaattcatttggttttccacaatatgttaaaatatttaaagaacagttatccctacctgcacaatttccagaacaagctttttagctcgagaactggaatagaaaaatgttcagatatcctcttcaaaaaaatatgaacttgtgccacgtaaattaccttaccagaacgccattttcaaataatcagtcctaaaaaaccttggcgaggtgcatttacctgtcattgctttactttgcatggcctttatcctttttaacacatacggaggtaaaaagagccaatgtataaataccttccctttattattaaaaacctgtcacccactattattagattaccttacataaggtggaacgagcccaatcaagtcttcatataatcgtcgccgcgcgcctatcataaccacaaatggcggggaaatcagtcgcccacaataaaaaaaaattggcccgccgacgttgatcaggggttggggtgatacgccacaaataggggggggggtatacacttcatnttttccggccggcggtagtatacctctggtggggtgctaatccaaaattccagccttggttatcccctatcactaaaacactgaatatgtttaggaccgccccacaagtggttgcagaccacaaacatatcattggatatgaatgagaatggttggagtatcaaaattatcaattaaaattatcgaacataactcttaaactatagaaaatgatccctagtattgtttcaataaaaataaatatcgcctcctacgaaatctaggggcgacttcgtgctgttttgacacactcggaacctataatcatttctacaggtaaagaaggcgcactctatggacttcccacaagaaacgcggtaaagtaagtccgcgtcacgacattattgctgttggccggnctctacacaacctgctgcctgatattaactatataacacacgcttgtatctactgtgtccgataaagatatcagagg

SEQ ID NO: 22564 - DNA, 346 bp, Macaca Mulatta
  misc_feature (1)...(346): n = A,T,C or G
gcccggtgtcttgcagactatgacgctgtgctgacagaagcgggagattacacagccaagtacatgaagcttcgagacttcttcggctccatctcaggnnnnnnnnnnnnnnnnnnnnnnnnnnnnnnnnnnnnnnnnnnnnnnnnnnnnnnnnnnnnnnnnnnnnnnnnnnnnnnnnnnnnnnnnnnnnnnnnnnnnnnnnagccaatcaagtctgaaaagcccatcaacatggagaacctgccagtcaacgggggaaatggacagtcctttgggtacattctctacgagaccagcatcacctcatctggcgtcctcagcggccgtgtgcgtgatcgggggcagg

SEQ ID NO: 22565 - DNA, 92 bp, Macaca Mulatta
cgtttacactccatgggcttcagcagtcccagcactaatgagagagtgccctaaaagcggggagggtagagttgtgtaaaacatgattcttg

SEQ ID NO: 22566 - DNA, 83 bp, Macaca Mulatta
ggtttcgtggctgtcccaacaaaaaatcccgatggcacgatgaacctcatgaactgggagtgcgccattccaggaaagaaagg

SEQ ID NO: 22567 - DNA, 1244 bp, Macaca Mulatta
  misc_feature (1)...(1244): n = A,T,C or G
gggggaggaggcttcatctgggcctgtaaaaactatgatggtgacgtgcagtcggactctgtggcccaagggtatggctctctcggcatgatgaccagtgtgctggtttgtccagatggcaagacagtagaagcagaggctgcccacgggactgtaacccgtcactaccgcatgtaccagaaaggacaggagacgtccaccaatcccattgcttccatttttgcctggaccagagggttagcccacagagcaaagcttgataacaataaagaacttgccttctttgcaaatgctttggaagaagtctgtattgagacaattgaggctggcttcatgaccaaggacttggccgcttgcattaaaggtttacccaatgtgcaacgttctgactacttgaatacatttgagttcatggacaaacttggagaaaacttgaagatcaaactagctcaggccaaactttaagttcataactgggctgaggaggataagtgtcttttggtaactaggtctataggtttacatttttctgtattacactcaaggataaaggcaaaatcaattttgtaatttgtttagaagtcagagtttatcttttctataagtttacagcctttttcttatatatacagttattgccacctttgtgaatgtggcaagggactttttttaaaattttgttttattttctattaccagcctcaggatttggttagtactgatttgtattcactgtcactttttctcatgttctaattataaatgaccaaaattaagattgctcaaaagggtaaatgatagcacagtattgttccctaaaatatgcataaagtagaaattcacttccttcccctcctgtccatgaccttgggcacagggaggttctggtgtcacagatgtcccgttttgtgaggtagagctgttaaacttgcacatgactggaacaaagttggagtgcaactcanatgtgttgaagatactgcagtcatttttgtaaagagcttgctgaatgttttcaatagactaaatattgtttaggccacaaggagagtttggaaatccggaaataaatacctacctggaaggttcggccctcttccatttggtctcctttcttcccctgggcccgggccctggaataatcaaggcctactccctaaattatagccataattttccatcccaaagttgccaaataaatggtaaaagcctggccannnnnnnnnnnnnnnnnnnnnctttcc

SEQ ID NO: 22568 - DNA, 730 bp, Macaca Mulatta
  misc_feature (1)...(730): n = A,T,C or G
ggcatgtatcgctgataaatgagtagagacaggcctaagatagcttccagcatcagattaatcccaagaagccatcagcaacctcagagctacccaagaagataatttaaatatatactgcttattggtcaatatatttggttcttaataaagaaaaatgttaaaatagcatacatagtggtaaaatacaatacaaaaagtgtgtgttgatttctagctgtttgagatgataaaagtgaagcaaagcctgttaaatcattggaagacttggaaaattattttaaataaacaattacgtataattaagnnnnnnnnnnnnnnnnnnnnnnnnnnnnnnnnnnnnnnnnnnnnnnnnnnnnnnnnnnnnnnnnnnnnnnnnnnnnnnnnnnnnnnnnnnnnnnnnnnnnnnnnnnnnnnnnnnnnnnnnnnnnnnnnnnnnnnnnnnnnnnnnnnnnnnnnnnnnnnnnnnnnnnnnnnnnnnnnnnnnnnnnnnnnnnnnnnnnnnnnnnnnnnnnnnnnnnnnnnnnnnnnnnnnnnnnnnnnnnnnnnnnnnnnnnnnnnnnnnnnnnnnnnnnnnnnnnnnnnnnnnnnnnnnnnnnnnnnnnnnnnnnnnnnnnnnnnnnnnnnnnnnnnnnnnnnnnnnnnnnnnnnnnnnnnnnnnnnnnnnnnnnnnnnnnnnnnnnnnnnnnnnnnnnnnnnnnnnnnnnnnnnnnnnnnnnnnnnnnnnnnn

SEQ ID NO: 22569 - DNA, 105 bp, Macaca Mulatta
tatggtctgatgggaggagctgacatcaatgggcccctgctttcaaagctacttcataagcgaggaagtctgatcaccagtttgctgagatctagggacaataag

SEQ ID NO: 22570 - DNA, 301 bp, Macaca Mulatta
  misc_feature (1)...(301): n = A,T,C or G
gggagccaggtgtggggaggacagccagtgtatccccaggaaactgacgatgcctgcatcttccctgatggtggaccttgcccatctggtccttggtctcagaagagaagctttgtttacgtctggaagacctggggnggccaatactggcaagttctagggggcccagtgtctgggctgagcattggaacaggcagagcaatgctgggcacacacaccatggaagtgactgtctaccatcgccggggatcccggagctatgtgcctcttgctcattccagctcggccttcaccattactg

SEQ ID NO: 22571 - DNA, 274 bp, Macaca Mulatta
tgaggatctagaaactctaggatggatacttataaaagataagggaagtatagcgcataggttgctgtgaggtggagagaaagttgcttacttttcctgagcctcaactttctgaaaatatagaaacacatttagatgatgagttatgaagtgaaggagaggatgactcagcagcaatgtgccagttccatagtgatttctccaccaagctggagaaggatttgtagcaatggttccagcactaactgtgcacatctataggatgaaggtaagt

SEQ ID NO: 22572 - DNA, 89 bp, Macaca Mulatta
atggctttacctcgtctcacaggagccttgcgttccttttcaaatgtcaccaagcaggataattataatgaagaagtggctgacttaaa

SEQ ID NO: 22573 - DNA, 542 bp, Macaca Mulatta
  misc_feature (1)...(542): n = A,T,C or G
cagggcccacatgccttggccccacatacaaacccaggatgctgtgacagcccatgagagggggagaggttgctctgggatggaacaagaaaaaagaggttgttttgtgaggnnnnnnnnnnnnnnnnnnnnnnnnnnnnnnnnnnnnnnnnnnnnnnnnnnnnnnnnnnnnnnnnnnnnnnnnnnnnnnnnnnnnnnnnnnnnnnnnnnnnnnnnnnnnnnnnnnnnnnnnnnnnnnnnnnnnnnnnnnnnnnnnnnnnnnnnnnnnnnnnnnnnnnnnnnnnnnnnnnnnnnnnnnnnnnnnnnnnnnnnnnnnnnnnnnnnnnnnnnnnnnnnnnnnnnnnnnnnnnnnnnnnnnnnnnnnnnnnnnnnnnnnnnnnnnnnnnnnnnnnnnnnnnnnnnnnnnnnnnnnnnnnnnnnnnnnnnncagatctgcctagctccctggtctcagccagcctaaggaagtcattttccagtccccaggagcagaagcagatctctgggaaggtcacacacctgattcagaacaatatgcctgg

SEQ ID NO: 22574 - DNA, 175 bp, Macaca Mulatta
  misc_feature (1)...(175): n = A,T,C or G
caggagcgcagcttcgagtgccgcatgtgcgcaaaggcttcaaagcgctcgtccacgctgtccaccccacctgctcatccactcagacacgcggccctacncntgccagttttgcggcaagcgtttccaccagaagtcggacatgaagaaacacacntacatnccacacaggtga

SEQ ID NO: 22575 - DNA, 1532 bp, Macaca Mulatta
  misc_feature (1)...(1532): n = A,T,C or G
ccaggtgaacatgacaacagatttggaagggagcgacatgttggtggaaaaggctgaccggcgagagttcattgacctgttgaagaagatgctgaccattgacgctgacaagagaatcactccaatcgaaaccctgaaccatccctttgtcaccatgacacacttactggattttccccacagcacacnnnnnnnnnnnnnnnnnnnnnnnnnnnnnnnnnnnnnnnnnnnnnnnnnnnnnnnnnnnnnnnnnnnnnnnnnnnnnnnnnnnnnnnnnnnnnnnnnnnnnnnnnnnnnnnnnnnnnnnnnnnnnnnnnnnnnnnnnnnnnnnnnnnnnnnnnnnnnnnnnnnnnnnnnnnnnnnnnnnnnnnnnnnnnnnnnnnnnnnnnnnnnnnnnnnnnnnnnnnnnnnnnnnnnnnnnnnnnnnnnnnnnnnnnnnnnnnnnnnnnnnnnnnnnnnnnnnnnnnnnnnnnnnnnnnnnnnnnnnnnnnnnnnnnnnnnnnnnnnnnnnnnnnnnnnnnnnnnnnnnnnnnnnnnnnnnnnnnnnnnnnnnnnnnnnnnnnnnnnnnnnnnnnnnnnnnnnnnnnnnnnnnnnnnnnnnnnnnnnnnnnnnnnnnnnnnnnnnnnnnnnnnnnnnnnnnnnnnnnnnnnnnnnnnnnnnnnnnnnnnnnnnnnnnnnnnnnnnnnnnnnnnnnnnnnnnnnnnnnnnnnnnnnnnnnnnnnnnnnnnnnnnnnnnnnnnnnnnnnnnnnnnnnnnnnnnnnnnnnnnnnnnnnnnnnnnnnnnnnnnnnnnnnnnnnnnnnnnnnnnnnnnnnnnnnnnnnnnnnnnnnnnnnnnnnnnnnnnnnnnnnnnnnnnnnnnnnnnnnnnnnnnnnnnnnnnnnnnnnnnnnnnnnnnnnnnnnnnnnnnnnnnnnnnnnnnnnnnnnnnnnnnnnnnnnnnnnnnnnnnnnnnnnnnnnnnnnnnnnnnnnnnnnnnnnnnnnnnnnnnnnnnnnnnnnnnngaaatgtctccacctgtgaggtgtcctcctctcaggccatcagctccccacagcgatccaagcgtgtcaaggagaacacacctccccgctgcgccatggtgcacagtagcccggcctgcagcacctcggtcacctgtgggtggggcgacgtggattccagcaccacccnnnnnnnnnnnnnnnnnnnnnnnnnnnnnnnnnnnnnnnnnnnnnnnnnnnnnnnnnnnnnnnnnnnnnnnnnnnnnnnnnnnnnnnnnnnnnnnnnnnnnnnnnnnnnnnncagcactgtctccaagcaaagaaaaaacgtcatcagctgtgtcacggtccacgactccccctactcggactcctccagcaacaccagcccctactccgtgcagcagcgcaccgggcacaacaacgccaacgcctttgacaccaaggggagcctggagaatcactgcacggggaacccccgaaccatcatcgtgccacccctgaaaacccaggccagcgaagtattggtggagtgtgatagcctggtgcca

SEQ ID NO: 22576 - DNA, 740 bp, Macaca Mulatta
  misc_feature (1)...(740): n = A,T,C or G
ggattctagaggcccggcctatcccacttggtttttgactgaaggggaagtacagaaatatgttgatttgtgatttctggtgtcacctgtgttaccaaaaaccaaaacnnnnnnnnnnnnnnnnnnnnnnnnnnnnnnnnnnnnnngnnnnnnnnnnnnnnnnnnnatgcagtggcatgattttggcttactgcaacctccacctctcagattcaagcagnnnnnnnnnnnnnnnnnnnnnnatnnnnnnnnnnnnngcgtgccaccacnnnnnnnnnnnnnnnnnnnnnnnnnnnnnnnnnnnnnnnntaccatgttagccaggatggtctcgatcacctgacctcatgatctgcccacctcagcctcccacaatcctgggattacagatgtgagccactgttcccagcccaaatcttcttgatcatacgtttaaatatattttttaatattgggagcatgagttgtcacttcttgtttgccttttttataaggcaatattggagagttacatcattgctaatgtagaaatgttaagtggaaaaatacacagtttggtaaaatagattccacatttatttgtgggttttttcccctcctttctttccacaggcacttttgatatcaagcaagtgggcttccttttttgagannnnnnnnnnnnnnnnnnnnnnnnnngttaaatggaagccccaacctaccctaaggcccttttcttaattttggaattttgggtttta

SEQ ID NO: 22577 - DNA, 850 bp, Macaca Mulatta
atttcattcttctggggtttccaacacgaccagccttccagcttcttcttttctccgttttcctggcaacctacttgctgacactgctggagaatcttcttatcatcttagctatccacagtgatgggcagctacataagcccatgtacttcttcctgagccacctctccttcctggagatgtggtatgtcacagtcatcagccccaagatgcttgttgacttcctcagtcacgacaagagtatttccttcaatggttgcatgactcaactttacttttttgtgacctttgtctgcactgagtacatccttcttgctgtcatggcctttgaccgctatgtagccatttgtaatccactacgctacccagtcatcatgatcaaccagctctgtggcacactggctggaggatgctggttctgtggactcatgactgccatgattaagatggtttttatagtgcaacttcactactgtggcacgcctcagatcaatcactacttttgtgatatctctccactccttaacgtctcctgtgaggactcctcacaggctgagctggtggacttcttcttggccctcatggtcattgctattcctctttgtgttgtggtggcatcctatgctgctatccttgccaccatcctcaggatcccttctgctcagggccgccaaaaggcattctccacctgtgcctcccatctgaccgttgtaattctcttctattccacaacccttttcacctatgcccgtcccaaactcatgtatgcctacaattccaacaaagtggtatctgttctctacactgtcattgttccactcctcaaccccatcatttactgtctgaggaa

SEQ ID NO: 22578 - DNA, 135 bp, Macaca Mulatta
agaatattcaagatctgtctatagttgcagcttgtgttccagttgtgaatgatatcagcccacgtctcctcaaacacttttccatgctggtattacctcatccttcacaagacatcttatgtactattttccagg

SEQ ID NO: 22579 - DNA, 852 bp, Macaca Mulatta
  misc_feature (1)...(852): n = A,T,C or G
ggggctggagtgtggagacgacgtgcagaaatggcacctcgaaagggnnnnnnnnnnnnnnnnnaacaggtcatcagcctcggacctcaggtggctgaaggagagaatgtatttggtgtctgccatatctttgcatccttcaatgacacttttgtccatgtcactgacctttctggcaaagaaaccatctgccgtgtgactggtgggatgaaggtgaaggcagaccgagatgaatcctcgccatatgctgctatgttggctgcccaggatgtggcccagaggtgcaaggagctgggtatcaccgccctacacatcaaactccgggccacaggaggaaataggaccaagacccctggacctggggcccagtcggccctcagagcccttgcccgctcgggtatgaagatcgggcggattgaggacgtcacccccatcccctctgacagcactcgcaggaaggggggtcgccgtggtcgccgtctgtgaacaagactcctcaaaatattttctgttaataaattgccttcgtgtaaaaagaacaggatacgtaataatctcgattttatgttataccccgtatctattgggattacgattaaacgtaatgaatcctttgttttggtcagcccttctggtccctgagtgaaaagtttttcataaaaactgttggtgtttgggggaccgccgggcgccccattatgaggaataggggaacaaggggggagccaaaagtattatgttttcatagggataattcatgtgtgtctcgtgggacctaggcggccgttggtgaatcttccccacccataataaattagaaataccgtccgctgagtagtcacaaacaaatgg

SEQ ID NO: 22580 - DNA, 441 bp, Macaca Mulatta
ttgtctggtacacctggcatgggtggcgttattctctgaaatctgtggttatgaaaattaggccaaatgattttattccaaatgtcatttaattgttgctgttgggctttcatttctgcaattcagctttgtttaaagtgatttgaaaaatactcattctgaacataccatgcgcaatcataactgttgtgatcattcttctcgcttgcctttgttaatgtactttcagtacagcagatatgctatattcaccaaataaacatagattgtattaatatttattgaatccctgtgtgcaaaaggctctgatacaagcttatgtcagacaaaacacaaaaagcatagattatataccatggcttaggatatataagcataaatgcataataaattaagaatgcaattggcaaaacacatgacaaaatctagcaaataatggat

SEQ ID NO: 22581 - DNA, 1524 bp, Macaca Mulatta
  misc_feature (1)...(1524): n = A,T,C or G
cagtgccacactctgctctatgtttataacctaccagcaaataaagatggcaagagcgtcagcaacaggctcagacgcctgtccgataattgtggtgggaaagtgctgagtatnnnnnnnnnnnnnnnnnnnnnnnnnnnnnnnnnnnnnnnnnnnnnnnnnnnnnnnnnnnnnnnnnnnnnnnnnnnnnnnnnnnnnnnnnnnnnnnnnnnnnnnnnnnnnnnnnnnnnnnnnnnnnnnnnnnnnnnnnnnnnnnnnnnnnnnnnnnnnnnnnnnnnnnnnnnnnnnnnnnnnnnnnnnnnnnnnnnnnnnnnnnnnnnnnnnnnnnnnnnnnnnnnnnnnnnnnnnnnnnnnnnnnnnnnnnnnnnnnnnnnnnnnnnnnnnnnnnnnnnnnnnnnnnnnnnnnnnnnnnnnnnnnnnnnnnnnnnnnnnnnnnnnnnnnnnnnnnnnnnnnnnnnnnnnnnnnnnnnnnnnnnnnnnnnnnnnnnnnnnnnnnnnnnnnnnnnnnnnnnnnnnnnnnnnnnnnnnnnnnnnnnnnnnnnnnnnnnnnnnnnnnnnnnnnnnnnnnnnnnnnnnnnnnnnnnnnnnnnnnnnnnnnnnnnnnnnnnnnnnnnnnnnnnnnnnnnnnnnnnnnnnnnnnnnnnnnnnnnnnnnnnnnnnnnnnnnnnnnnnnnnnnnnnnnnnnnnnnnnnnnnnnnnnnnnnnnnnnnnnnnnnnnnnnnnnnnnnnnnnnnnnnnnnnnnnnnnnnnnnnnnnnnnnnnnnnnnnnnnnnnnnnnnnnnnnnnnnnnnnnnnnnnnnnnnnnnnnnnnnnnnnnnnnnnnnnnnnnnnnnnnnnnnnnnnnnnnnnnnnnnnnnnnnnnnnnnnnnnnnnnnnnnnnnnnnnnnnnnnnnnnnnnnnnnnnnnnnnnnnnnnnnnnnnnnnnnnnnnnnnnnnnnnnnnnnnnnnnnnnnnnnnnnnnnnnnnnnnnnnnnnnnnnnnnnnnnnnnnnnnnnnnnnnnnnnnnnnnnnnnnnnnnnnnnnnnnnnnnnnnnnnnnnnnnnnnnnnnnnnnnnnnnnnnnnnnnnnnnnnnnnnnnnnnnnnnnnnnnnnnnnnnnnnnnnnnnnnnnnnnnnnnnnnnnnnnnnnnnnnnnnnnnnnnnnnnnnnnnnnnnnnnnnnnnnnnnnnnnnnnnnnnnnnnnnnnnnnnnnnnnnnnnnnnnnnnnnnnnnnnnnnnnnnnnnnnnnnnnnnnnnnnnnnnnnnnnnnnnnnnnnnnnnnnnnnnnnnnnnnnnnnnnnnnnnnnnnnnnnnnnnnnnnnnnnnnnnnnnnnnnnnnnnnnnnnnnnnnnnnnnnnnnnnnnnnnnnnnnnnnnnnnnnnnnnnnnnnnnnnnnnnnnnnnnnnnnnnnnnnnnnnnnnnnncagcgaacatgaatttgatccagactcttacaagattccttttgtgattctttctttgaagacatntgcgccccaggttcacagtcttctccagacccacgagggcaccgtgcctttattga

SEQ ID NO: 22582 - DNA, 451 bp, Macaca Mulatta
aggtcagcccaaggctgccccctcggtcactctcttcccgccctcctctgaggagcttcaagccaacaaggccacactagtgtgtctgatcagtgacttctacccgggagccgtggaagtggcctggaaggcagatggcagcgctgtcaacgcgggagtggagaccaccaaaccctccaaacagagcaacaacaagtacgcggccagcagctacctgagcctgacgtccgaccagtggaagtcccacaagagctacagctgccaggtcacgcacgaagggagcaccgtggagaagacagtggcccctgcagaatgttcataggttcccaaccctcaccccacccacgggggcctggagctgcaggatcccaggggaggggtctctcctcccaccccaaggcatccagcccttctccctgcactcaataaaccctcaataaatattctcatt

SEQ ID NO: 22583 - DNA, 1556 bp, Macaca Mulatta
  misc_feature (1)...(1556): n = A,T,C or G
gattcatcacaagagagctacaagagcctagaagaagctaaagactgctaccctccatccttactcaccctggacctgagagacctcttcaatcaggtggagcaaggccctctcctgtcctgccccaaggctggcacggacttgagcatgggccgggctcgggaagtgggttggatggcggcaggactgatgattggggctggtgcctgctactgcgtttacaaactgaccataggaagagatgacagtgagaagctnnnnnnnnnnnnnnnnnnnnnnnnnnnnnnnnnnnnnnnnnnnnnnnnnnnnnnnnnnnnnnnnnnnnnnnnnnnnnnnnnnnnnnnnnnnnnnnnnnnnnnnnnnnnnnnnnnnnnnnnnnnnnnnnnnnnnnnnnnnnnnnnnnnnnnnnnnnnnnnnnnnnnnnnnnnnnnnnnnnnnnnnnnnnnnnnnnnnnnnnnnnnnnnnnnnnnnnnnnnnnnnnnnnnnnnnnnnnnnnnnnnnnnnnnnnnnnnnnnnnnnnnnnnnnnnnnnnnnnnnnnnnnnnnnnnnnnnnnnnnnnnnnnnnnnnnnnnnnnnnnnnnnnnnnnnnnnnnnnnnnnnnnnnnnnnnnnnnnnnnnnnnnnnnnnnnnnnnnnnnnnnnnnnnnnnnnnnnnnnnnnnnnnnnnnnnnnnnnnnnnnnnnnnnnnnnnnnnnnnnnnnnnnnnnnnnnnnnnnnnnnnnnnnnnnnnnnnnnnnnnnnnnnnnnnnnnnnnnnnnnnnnnnnnnnnnnnnnnnnnnnnnnnnnnnnnnnnnnnnnnnnnnnnnnnnnnnnnnnnnnnnnnnnnnnnnnnnnnnnnnnnnnnnnnnnnnnnnnnnnnnnnnnnnnnnnnnnnnnnnnnnnnnnnnnnnnnnnnnnnnnnnnnnnnnnnnnnnnnnnnnnnnnnnnnnnnnnnnnnnnnnnnnnnnnnnnnnnnnnnnnnnnnnnnnnnnnnnnnnnnnnnnnnnnnnnnnnnnnnnnnnnnnnnnnnnnnnnnnnnnnnnnnnnnnnnnnnnnnnnnnnnnnnnnnnnnnnnnnnnnnnnnnnnnnnnnnnnnnnnnnnnnnnnnnnnnnnnnnnnnnnnnnnnnnnnnnnnnnnnnnnnnnnnnnnnnnnnnnnnnnnnnnnnnnnnnnnnnnnnnnnnnnnnnnnnnnnnnnnnnnnnnnnnnnnnnnnnnnnnnnnnnnnnnnnnnnnnnnnnnnnnnnnnnnnnnnnnnnnnnnnnnnnnnnnnnnnnnnnnnnnnnnnnnnnnnnnnnnnnnnnnnnnnnnnnnnnnnnnnnnnnnnnnnnnnnnnnnnnnnnnnnnnnnnnnnnnnnnnnnnnnnnnnnnnnnnnnnnnnnnnnnnnnnnnnnnnnnngctattgttgcctgtggtggtctccctgtccaagcagaaccgctttgcagagaccagacgcatatcgcagcttgagctgaaaatgcatttgttgcagcttaggttgaattatttttcgtttactctttcttctacacgcgcctgatggatagtgaacctattcatcaaaaaagtgcactgc

SEQ ID NO: 22584 - DNA, 760 bp, Macaca Mulatta
cttcggccaggccaccgtgtgtcccttctcggcgggcgctgcgctggggccctgccctgacaactgtgccgccttctccgggacgccctccgccctttgcaaacactgtcacgagaagccgtgaccgcgcgggcccgcgcccctcccgcacgcgtcctccgatctcccctgtgactgtcgctctgcccggacaggaaaggcctggagggaccctgcagacagggaggaggcggcccgacctcgcttccagcctgtgcgcggcgaacagtttggcgcagcgggaagcgccaaagccatcgggacgcgtgattgaactccggagccggacgctgtgctctgcgccccggaactcgtggcacccactgggcattgtcgggacccagcaagtctaggaacggggtgggtacagcattcttcgggcactgccgttcgcccctaaaagaagaccaccgcagcgtcccagggccgcggcgaggaccggcacttgtcagattccggacaggaggtcctgacctgaggcacacggagggtggagactaagcaaagtcggacttagtggctcgtgatcctctcgccgtgggcctcgcgctcccgctccagtcggcccttcgtgctaaactgcagggcagtgctctgttcccgaggacgcgcgtggccggcacctcccacctcggtgactccgcgactccgcagccctgaggagagcccacgatggccgtttgcagaggagctagaccgcgggcgcaggaagaccccgggc

SEQ ID NO: 22585 - DNA, 707 bp, Macaca Mulatta
cgaccccaagaagtatgatgtgtggagcatgggcgtcgtgctctacgtcatggtcaccgggtgcatgcccttcgacgactcggacattgccggcctgccccggcgccagaagcgcggcgtgctctaccccgaaggcctcgagctctccgagcgctgcaaggccctgatcgccgagctgctgcagttcagcccgtccgccaggccctcggcgggccaggtagcgcgcaactgctggctgcgcaccggggactctggctagaacccggggttccagccattcctgcccccgagggcactgggccagcgcggcgcacgcgcaagaggcgagtttagcgggaacatgcgaagctgccgcgtgctactgcgcatgcgccttctccctgccgcttccctcccttccttcccacggggaagtcggcagttgcccctgttcggaatccacgtcctccgccatcccgagaggtggaggcgcatgcgcatccgtgatttcccagaccaggccccgaaagaggcgagaccagaggggaaggaagcattgcgcctgcgcggaacaagctcagcctctgcgcggagggcgtaccttcccaaccaacgatgggtgccgggttcccggttggaacccgcaataaactcgctgttcctcgcacctggctctaacggtggccccatttgcagaccagtggagaagggatcgctccgtccgggga

SEQ ID NO: 22586 - DNA, 130 bp, Macaca Mulatta
tggatgaaaccacaaatctgacagtatcttttgccacatgccacgaaactattgatgacttccggcatcaagtgtattcccccttggactctatgatctctgttggagggcttttttgggaagggctttg

SEQ ID NO: 22587 - DNA, 633 bp, Macaca Mulatta
  misc_feature (1)...(633): n = A,T,C or G
gcgtcggcggagggagcagcgccggggcgcacgcggccaccatgacccagacgcccgccttcgacaagcccaaagtggaactgcacgtccacctagacggagccatcaagcctgaaaccatcttatactatggcaggaggagagggatcgccctcccagctaacacagcagaggggctgctgaacgtcattggcatggacaagccgctcaccctgccggaattcctggccaagtttgactactacatgcctgctattgcgggctgccgggaggctatcaaaaggatcgcctacgagtttatagagatgaaggccaaagagggcgtggtgtatgtggaggtgcggtacagtccgcacctgcttgccaattccaaagtggagccaatcccctggaaccaggctgaaggggacctcaccccagacgaggtggtggccctagtggcccagggcctgcaggagggggagcgagacttcggggtcaaggcccggtccatcctgtgctgcatgcgccaacagcccaactggtccctcgaggtggtggagctgtgtaagaagtaccagcagcagactgtggtagccattgacctggctggagatgagaccatcccaggaagcangctctttcctggacatg

SEQ ID NO: 22588 - DNA, 1263 bp, Macaca Mulatta
  misc_feature (1)...(1263): n = A,T,C or G
cggactgcttttccaatgacattcacaagttatataccaacaccatgacatggactcttatctgtacaaaggnagggcaaccctgcacgctggagggacttccactcagccacaatgctgggaagtcacatgtacgtctttgggggccgtgccgaccgctttgggccattccattccaacaatgagannnnnnnnnnnnnnnnnnnnnnnnnnnnnnnnnnnnnnnnnnnnnnnnnnnnnnnnnnnnnnnnnnnnnnnnnnnnnnnnnnnnnnnnnnnnnnnnnnnnnnnnnnnnnnnnnnnnnnnnnnnnnnnnnnnnnnnnnnnnnnnnnnnnnnnnnnnnnnnnnnnnnnnnnnnnnnnnnnnnnnnnnnnnnnnnnnnnnnnnnnnnnnnnnnnnnnnnnnnnnnnnnnnnnnnnnnnnnnnnnnnnnnnnnnnnnnnnnnnnnnnnnnnnnnnnnnnnnnnnnnnnnnnnnnnnnnnncagtccatctcctgaggaaggcctgggagatgaatttgacctcatagatcattctgacttacacattttggactttannnnnnnnnnnnnnnnnnnnnnnnnnnnnnnnnnnnnnnnnnnnnnnnnnnnnnnnnnnnnnnnnnnnnnnnnnnnnnnnnnnnnnnnnnnnnnnnnnnnnnnnnnnnnnnnnnnnnnnnnnnnnnnnnnnnnnnnnnnnnnnnnnnnnnngtttctgccacctcccctcctgagcctgctgtcaccttcactgcccctgcccatctgtcacccacctgcgcctttgacccctggacttggtatacctccatgtggagttgttgggcgagaggtgttctctgtgctgtgaattcagtggggagctgtagcggggtgggggccaggttcctccccccttgggccgagggccccttccccttggtgctctgtccccatccacctcctttcagctgctcctgggcctcagctctgcccagggccagccaggttctgttgggaagggaagggaatggggagaagggagaagcaagcagtgtctgagcctcaggagcttccccctccccctttgcctatcccgtccccctgcttgagccttgagccttgactgggagctgaaaggagttgcagctgttggcatgagacctccttctccccgtcttggggaggcggggaccagcagataatcccatccttccttgagctgtcgctgtaccctgaagctcagccagctcagattttataaaaattaattaaaacctccaa

SEQ ID NO: 22589 - DNA, 672 bp, Macaca Mulatta
  misc_feature (1)...(672): n = A,T,C or G
gagacacagaattcagtgacaataaaaagggtaatctggtttacctgggaatcaggggaaaagatctctgtttcttctgtgaagaaattcagggcaaacctactttgcagcttaaggnnnnnnnnnnnnnnnnnnnnnnnnnnnnnnnnnnnnnnnnnnnnnnnnnnnnnnnnnnnnnnnnnnnnnnnnnnnnnnnnnnnnnnnnnnnnnnnnnnnnnnnnnnnnnnnnnnnnnnnnnnnnnnnnnnnnnnnnnnnnnnnnnnnnnnnnnnnnnnnnnnnnnnnnnnnnnnnnnnnnnnnnnnnnnnnnnnnnnnnnnnnnnnnnnnnnnnnnnnnnnnnnnnnnnnnnnnnnnnnnnnnnnnnnnnnnnnnnnnnnnnnnnnnnnnnnnnnnnnnnnnnnnnnnnnnnnnnnnnnnnnnnnnnnnnnnnnnnnnnnnnnnnnnnnnnnnnnnnnnnnnnnnnnnnnnnnnnnnnnnnnnnnnnnnnnnnnnnnnnnnnnnnnnnnnnnnnnnnnnnnnnnnnnnnnnnnnnnnnnnnnnnnnnnnnnnnnnnnnnnnnnnnnnnnnttaccccaccatccactcagctgccatgcccagttcaatcaaccacccaaatgctgcttcatgcaaccctcctttcctattccttttgccaacccatgatgtaga

SEQ ID NO: 22590 - DNA, 800 bp, Macaca Mulatta
  misc_feature (1)...(800): n = A,T,C or G
gggccccaggtccccatgttccattaatgcctccatctcctccatcacaagttatacctgcttctgagccaaagcgccatccatcaaccctacctgtaatcagtgatgccaggagtgtgctactggaagcaatacgaaaaggtattcaactacgcaaagtagaagagcagcgtgaacaggaagctaaacatgaacgcattgaaaatgatgttgccaccatcctgtctcgccgtattgctgttgaatatagtgattcggaagatgattcagaatttgatgaagtagattggttggagtaagaaaaatgcattgataaatattacaaaactgaatgcaaatgtcctttgtggtgcttgttccttgaaaatgttggtcattctagtgttttgctttcttctccttacaataaatgacccttttcctcccaaacttttgatttctaaggaaaatattagcatacattttcaaactaaatgttttacagtgggcttaatctttttcttccccctgaaaaaactaatttggtcaaataaaaccacttaagtattaaagcatggaacagctggttgttagagtagcaaaattcaagtttttatgaattaacttaaattggttgtaccttggggaattttaaattttaaagaaaagcaaactgaatttgaaaatccttggaggggcaaactgtaatcctaattaaaggaaacctctaattcccattttcctggannnnnnnnnnnnnnnnnnnnnnncaccctgcccttggattacaatgaaatacaacgccaggaaaaagattattt

SEQ ID NO: 22591 - DNA, 348 bp, Macaca Mulatta
tcctaacctagcgatgacctcttccaggtagcggtcccctgtgcgcggtgggtagtacccagggcttagagtgaacgcgcacccagggctgcggtggaggctcctctgcgagctccacttgcctcccatcccgggacctaggagaaggcgggtacctggccgccagctgacgccctggtggtcactgtggccctttagaaacacacagctccatttcataagccaaacctcctcccccagccccggctcaagcaccattcacacactgccatccaagccgcgggcggccgtgggaagggcactggaccacccgtctcgcgggcgcggttaggtacagcgatggctccc

SEQ ID NO: 22592 - DNA, 579 bp, Macaca Mulatta
tgccctcgatggggcccacccacagtgggaacgcaggaggctatggcagtgccgggaagagagggtccctgggggaccaagcagtgctctttccttcctttctagggtgactctgggggccccctggcctgcgaggaggcccccggcgtgttttatctggcagggattgtgagctggggtattggctgcgctcaggttaagaagccgggcgtctacacgcgcatcaccaggctaaagggctggatcctggagatcatgtcttcccagccccttcccgtgtctcccccctcgaccacaaggacactggccaccaccagccatccccccaggacgacagctggcctcacagtcccgggggccacacccagcagacccacccctggggccgccagcagggtgacgggccaacctgccaactcagccttatctgccatgagcaccactgctaggggacagatgccatttccacatgccctggaggccaccacgcactcccagctaccaggtactgggagagacgcagggacccctgggagtggagggtaccatgttaatcagccccgggctgccaaacaagac

SEQ ID NO: 22593 - DNA, 680 bp, Macaca Mulatta
tcgcaggggggatttttcaggccaggagaacctcgtggagacactcgagatgagccacctccggggctccccaagggttgttgctttaacccactggagactttgagttctcctacgttcatccgccacaaatcttaatgtgttgaaagaatgagggcagaagttcagagtatgcaggctcataactttaggctatctggaatttttctaatggacaaatgaccaaacactggggaggaggagagaggagggatctcgcccgtagagatggaaggcacagaaaggtgcgacaggaaactttcctttctgttgtgaaataaagattatattagaatccaaataaaccctgagtatttagtaaggttaaaaagacaaattgagaacaattagacacactgtgtgaggatttgagcttggtgagattttatctccaagatatgacaccaaggtagacaggaaaatccatatttaaatggaaaaatttaatatctgattgcttttgcaggcgaagtgcccctttatatatccaaaaacatctatttgtgaccttaaacatgtggacccataggtgcagttagaaaaagacaacctatttttatttatgttagaaggagtagagtatttttttcaagacatttatttttcagagtggtgatacttttactttggatactctgtgc

SEQ ID NO: 22594 - DNA, 509 bp, Macaca Mulatta
  misc_feature (1)...(509): n = A,T,C or G
gggttaacaggtttttctgttagtttttcccccataacatttaattattactaaaactgtatttacaatagtgccaaatcaaatgataatttaaataaaatctattctgtgtttatgtagggtggtataaaaagaggtcttcatttagacatgtgatttctaaaattccagaaagcaaaattgataagacgttagaatatttgaacaattatttataatcagggtagcattcaaacggagaaaagaaagttttctgaaaaaatgcagtaaatctaagccacatttctaaagtttatttttatgaaagcttcttttaagatttttgaaatctattctgcattcccaagagtttatgtttattgtattttatatgatctacaacatataaaattgtgtatttttctttggttgtccctataaacaaaaaagtattttaataaaaaatcgaaatgaannananaaannnnnnnnnnnnnnnnnnnnnnnnnnnnnnnnnnnnnnnnnnnnnn

SEQ ID NO: 22595 - DNA, 265 bp, Macaca Mulatta
agaagaagaaactgatgaagctggctgccctaaaggaatcagcacgccggcccttcatcttttatagggctcaggtgggctcccggaacatgctggagtcggcagctcaccccggatggttcatctgcacctcctgcaattgtaatgaacctgttggagtgacagataaatttgagaacaggaaacacattgaattttcatttcaaccagtttgcaaagctgaaatgagccccagtagaggtcagcgattaggaaactgccccat

SEQ ID NO: 22596 - DNA, 132 bp, Macaca Mulatta
gcagcctctctcccattatgtgaccaagcaaaatacacagctttgcagctatttcttggtcctgttagccaagctgtattttgaagaaggggtgtgcattttggatggattgaaaagcaaaaatgcctttat

SEQ ID NO: 22597 - DNA, 1592 bp, Macaca Mulatta
  misc_feature (1)...(1592): n = A,T,C or G
aaagaatgggtttgtatttaagggccccagcagttagaacatcctcagaaaagaagnnnnnnnnnnnnnnnnnnnnnnnnnnnnnnnnnnnnnnnnnnnnnnnnnnnnnnnnnnnnnnnnnnnnnnnnnnnnnnnnnnnnnnnnnnnnnnnnnnnnnnnnnnnnnnnnnnnnnnnnnnnnnnnnnnnnnnnnnnnnnnnnnnnnnnnnnnnnnnnnnnnnnnnnnnnnnnnnnnnnnnnnnnnnnnnnnnnnnnnnnnnnnnnnnnnnnnnnnnnnnnnnnnnnnnnnnnnnnnnnnnnnnnnnnnnnnnnnnnnnnnnnnnnnnnnnnnnnnnnnnnnnnnnnnnnnnnnnnnnnnnnnnnnnnnnnnnnnnnnnnnnnnnnnnnnnnnnnnnnnnnnnnnnnnnnnnnnnnnnnnnnnnnnnnnnnnnnnnnnnnnnnnnnnnnnnnnnnnnnnnnnnnnnnnnnnnnnnnnnnnnnnnnnnnnnnnnnnnnnnnnnnnnnnnnnnnnnnnnnnnnnnnnnnnnnnnnnnnnnnnnnnnnnnnnnnnnnnnnnnnnnnnnnnnnnnnnnnnnnnnnnnnnnnnnnnnnnnnnnnnnnnnnnnnnnnnnnnnnnnnnnnnnnnnnnnnnnnnnnnnnnnnnnnnnnnnnnnnnnnnnnnnnnnnnnnnnnnnnnnnnnnnnnnnnnnnnnnnnnnnnnnnnnnnnnnnnnnnnnnnnnnnnnnnnnnnnnnnnnnnnnnnnnnnnnnnnnnnnnnnnnnnnnnnnnnnnnnnnnnnnnnnnnnnnnnnnnnnnnnnnnnnnnnnnnnnnnnnnnnnnnnnnnnnnnnnnnnnnnnnnnnnnnnnnnnnnnnnnnnnnnnnnnnnnnnnnnnnnnnnnnnnnnnnnnnnnnnnnnnnnnnnnnnnnnnnnnnnnnnnnnnnnnnnnnnnnnnnnnnnnnnnnnnnnnnnnnnnnnnnnnnnnnnnnatatattatgatagccttaaacctttttctctaatgccttaactgtcaaataattataaccttttaaagcataggactatagtcagcatgctagactgagaggtaaacactgatgcagttagaacaggtattgatgctgtcagtgtttaacactatgtttagctgtgtttatgctataaaagtgcaatattggacattagctagtactgctgcctcatgtaactccaaagaaaacaggatttcattaagtgcattgaatgtggatatttctttaagttactcatattgtcctttgcttgaatgcaatgccgtgcagatttatatggctgctatttttattttctgtgcattactttaacaccttaaagggagaagcaaacattttcttcttcagctgaccggaaatggccctttaactgcaataggaannnnnnnnnnnggtttttgtgaaaattggtgataactggcacttaagatcgaaaagaaatttctgtatacttgatgccttaagatgctatctgcccaaagctctgaaagactttaagataggcagtaatgcttactacagtactactgagtttttgtagagttaacatttgataataaaacttgcctgtttaatctca

SEQ ID NO: 22598 - DNA, 520 bp, Macaca Mulatta
  misc_feature (1)...(520): n = A,T,C or G
gtacaagtacagaaagctcttctctggatgttgaaagtaccttttcttctcctgaagattctctacacaagtctaaaccactgacatcttctcggtcttccatggaaatgcctgcacagccagctccacgaacagtcacagatgaggagataaactttgttaagacctgtcttcagaggtggaggagtgagattgaacaagatatacaagnagattaaaagaattgtattgcaagtactactcagactattgaacagatgtactgcgatcctctccttcgtcaggnnnnaggtgccttatcgcttgcatgcagttcttgttcatgaaggacaagcaaatgctggacactattgggcctatatctataatcagccccgacagagctggctcaagtacaatgacatctctgttactgaatcttcctgggaagaagttgaaagagattcctatgggggcctgagaaatgttagtgcttactgtctgatgtacattaatgacaaactaccctacttcaatgcag

SEQ ID NO: 22599 - DNA, 1145 bp, Macaca Mulatta
  misc_feature (1)...(1145): n = A,T,C or G
gtccccgagggtcagactgtgtccctctcattccgagtcttcgacctggagctgcaccccgcctgccgctacgacgcactggaggtcttcgctgggtctgggacttctggccagcggctcggacgcttttgcgggaccttccggcctgcgcccctagtcgcccccggcaaccaggtgaccctgaggatgacggcggatgagggcacaggaggacgaggcttcctgctctggtacagcgggcgggccacctcgggcactggagcaccaattttgcggggggcggctggagaaggcccagggaaccctgaccacaaaaaactggcccgagtccgattaccccccgggcatcagctgttcctggcacatcatcgcaccccgggatcaggnnnnnnnnnnnnnnnnnnnnnnnnnnnnnnnnnnnnnnnnnnnnnnnnnnnnnnnnnnnnnnnnnnnnnnnnnnnnnnnnnnnnnnnnnnnnnnnnnnnnnnnnnnnnnnnnnnnnnnnnnnnnnnnnnnnnnnnnnnnnnnnnnnnnnnnnnnnnnnnnnnnnnnnnnnnnnnnnnnnnnnnnnnnnnnnnnnnnnnnnnnnnnnnnnnnnnnnnnnnnnnnnnnnnnnnnnnnnnnnnnnnnnnnnnnnnnnnnnnnnnnnnnnnnnnnnnnnnnnnnnnnnnnnnnnnnnnnnnnnnnnnnnnnnnnnnnnnnnnnnnnnnnnnnnnnnnnnnnnnnnnnnnnnnnnnnnnnnnnnnnnnnnnnnnnnnnnnnnnnnnnnnnnnnnnnnnnnnnnnnnnnnnnnnnnnnnnnnnnnnnnnnnnnnnnnnnnnnnnnnnnnnnnnnnnnnnnnnnnnnnnnnnnnnnnnnnnnnnnnnnnnnnnnnnnnnnnnnnnnnnnnnnnnnnnnnnnnnnnnnnnnnnnnnnnnnnnnnnnnnnnnnnnnnnnnnnnnnnnnnnnnnnnnnnnnnnnnnnnnnnnnnnnnnnnnaggagtcaggtatctgttgatgggccaggtggaagagaacagaggccccgtccttcctccagagagctttgtggttctccaccggcccaaccaggaccagatcctcaccaacctaagcaagaggaagtgcccctcccaacctgtgcgggctgctgagtcccaggactg

SEQ ID NO: 22600 - DNA, 161 bp, Macaca Mulatta
aatcacccttcggtcatcgtgcagcctgggaagagacctttacctgtggaatccccggatactcaaaggaagcggaggatacacagatgtgattatgatggatgcaacaaagtgtacactaaaagctcccacttgaaagcacacagaagaacacacacagg

SEQ ID NO: 22601 - DNA, 613 bp, Macaca Mulatta
cttgatgcaccgtgataggtaagcacggtcagacctcttatcatccggatgaactgcaatatccagaagcacgcacccttgggaagagttctaccagctttggcgagtctatgtgtgagtactttgggcaccggggtccaagcagctgcacagggggaagcctgtgcgacttggctacaagatttggtgtgggacaaccagcagaggctacttggtgtggttcgagccctcacagggcacactttttaccaagcccgacaggagcctggatctaggaggcagtatggtaataaagtttgtggatgcgcttcaggagcgtggttttctgccatatcacatatttttggacaaggtttttacaagtgttaaactgatgtccattttgaggaaaaagggggtgaaggccacaggaactgttcgtgagtataggactgagcgatgtcccctaaaagaccccaaagaactgaaaaaaatgaagaggggtccatttgattacaaagtcgatgagagtgaggagatcatcgtgtgccgctggcacgatagcagtgtggtcaacatctgctccaatgccgtgggcatagagccagtgaggctgaccagtcgtcactctgga

SEQ ID NO: 22602 - DNA, 643 bp, Macaca Mulatta
gaccacgaggaacctttggcccaatgtaaaggctgttgctactgctgtggaacagatttacccatttgtgtttgaaagcaggaaagaaattttataattcaccacttaattggttagaatctctaactgagcaccttttaaacctgctgcacattggactcaaaaggaaaactggaccaacagtaattgaggagatagactcttttattcattcacggctacagtgtaagctccagtccctttggattttattccaaaccttgctgtaatataaaaggaagtttacaagacatgacattgctgcttttacaaaaggacattctatttattttcgcagtaattctcatgtccccataagcagagctgtcacagtgtgcactaccttagattgtcttattgttgtcattgttatttttttccattttgagctaatgtgttttatttgtgaatagtcttttacatttttgtatgctgaatatgggcaccaaagaacctgtaaaagttatctttttcaattgaatgtgcacaaataaaagtttggacaagatctctcttcatatccattctgtaacttttattcaccattttctatgttaacaaaaatcgtattcatacttttttgtaaaatctatgcaagcttaag

SEQ ID NO: 22603 - DNA, 801 bp, Macaca Mulatta
  misc_feature (1)...(801): n = A,T,C or G
ggatgatgtggcataatggtaaacaattcaccacactggacagagataaagatatgtatgcaggaaactgcgcccactttcataaaggaggctggtggtacaatgcctgtgcacattctaacctaaatggagtatggtacagaggaggccattacagaagcaagcaccaagatggaattttctgggccgaatacagaggcgggtcatactccttaagagcagttcagatgatgatcaagcctattgactgaagagagacactcgccaatttaaatgacacagaactttgtacttttcagttcttaaaaatgtaaatgttacatgtatattacctggcacaatttatttctacacataaagtttttaaaatgaattttaccttaactataaaaggggaacctataaatgtagtttcatctgttgtcaattactgcagaaaattatgtgtttccacgtcctagttattttaaaattatgttgactaaatacagtttgtttcctaaaatgtaaatatttgcaaaatctagctatattttaaaacctaactaaataactggttcaagaatcttaacaatttatttaaaatctaagattgctccaacttctagtgnnnnnnnnnnnnnnnnnnnnncagcccaaataaagcattttatttataaaaattttggaccgaaaaatttgagagaaaacctctagttttgccaaataaaaaaatccttcctcccattgaataaaagcctattttcaaccccntaaaaaaattacgtttaagaagnntttcctttgccggccccgcctccg

SEQ ID NO: 22604 - DNA, 493 bp, Macaca Mulatta
atgccctactggcctttctccacctctgacttctggaactacgtgcagcacttccaggccctgggggcctacccccagattgaggacatggcccgcaccttctttgcacacttccccctggggagcaccctgggcttccatgttccctatcaggaggactgaatggtgtccagcctggtgcccgcccgccccgccaggctgcaccaggtcaggcctctgcaggcatggagtcccggcaaaaacttggcccctgcggggagtcaggcctggtctcatgctcaataaactccggactgaagatgtacaaccagcgttgtgggtggtctttcaaggacggctgcgctcaggccccatttactttatttcacaaatgacgcgggttttattttgattcctggggagcactttcatacactctttcataaatgtgcaccatttccatccacactggcatcaacaagggaccttatatcctgggcggactcaggactgg

SEQ ID NO: 22605 - DNA, 314 bp, Macaca Mulatta
tttttgtttcccttttaccattttatcttgctttggaggaccttaaatgctactgaaacttacctgagaaccataggactgtggcaaacaaaaccaattcaggaagtgaattaatgatgaggatctgaaaacttggctagggctatatatactggaagctgaaggttaaaggaaaagcacaagaaacttgggaagcactttttctgcatacttagatgatcttcatgggcccacaggtaccaggataaagccgaactggtaccatctactcttttgaagtgttttagtctagtattggatcagtgaaaaacatt

SEQ ID NO: 22606 - DNA, 1913 bp, Macaca Mulatta
  misc_feature (1)...(1913): n = A,T,C or G
aggcgttgacgcgcacgcgctgagggatctggcccgggccgagcgcgcggccgtaagagcgcgggtgnnnnnnnnnnnnnnnnnnnnnnnnnnnnnnnnnnnnnnnnnnnnnnnnnnnnnnnnnnnnnnnnnnnnnnnnnnnnnnnnnnnnnnnnnnnnnnnnnnnnnnnnnnnnnnnnnnnnnnnnnnnnnnnnnnnnnnnnnnnnnnnnnnnnnnnnnnnnnnnnnnnnnnnnnnnnnnnnnnnnnnnnnnnnnnnnnnnnnnnnnnnnnnnnnnnnnnnnnnnnnnnnnnnnnnnnnnnnnnnnnnnnnnnnnnnnnnnnnnnnnnnnnnnnnnnnnnnnnnnnnnnnnnnnnnnnnnnnnnnnnnnnnnnnnnnnnnnnnnnnnnnnnnnnnnnnnnnnnnnnnnnnnnnnnnnnnnnnnnnnnnnnnnnnnnnnnnnnnnnnnnnnnnnnnnnnnnnnnnnnnnnnnnnnnnnnnnnnnnnnnnnnnnnnnnnnnnnnnnnnnnnnnnnnnnnnnnnnnnnnnnnnnnnnnnnnnnnnnnnnnnnnnnnnnnnnnnnnnnnnnnnnnnnnnnnnnnnnnnnnnnnnnnnnnnnnnnnnnnnnnnnnnnnnnnnnnnnnnnnnnnnnnnnnnnnnnnnnnnnnnnnnnnnnnnnnnnnnnnnnnnnnnnnnnnnnnnnnnnnnnnnnnnnnnnnnnnnnnnnnnnnnnnnnnnnnnnnnnnnnnnnnnnnnnnnnnnnnnnnnnnnnnnnnnnnnnnnnnnnnnnnnnnnnnnnnnnnnnnnnnnnnnnnnnnnnnnnnnnnnnnnnnnnnnnnnnnnnnnnnnnnnnnnnnnnnnnnnnnnnnnnnnnnnnnnnnnnnnnnnnnnnnnnnnnnnnnnnnnnnnnnnnnnnnnnnnnnnnnnnnnnnnnnnnnnnnnnnnnnnnnnnnnnnnnnnnnnnnnnnnnnnnnnnnnnnnnnnnnnnnnnnnnnnnnnnnnnnnnnnnnnnnnnnnnnnnnnnnnnnnnnnnnnnnnnnnnnnnnnnnnnnnnnnnnnnnnnnnnnnnnnnnnnnnnnnnnnnnnnnnnnnnnnnnnnnnnnnnaggtcatccctgtagccacccatctgctgaacaatggcagtggggtaggagttctacagtgtcttgagcatatgattggggcagtgagaagcaaagtgctggannnnnnnnnnnnnnnnnnnnnnnnnnnnnnnnnnnnnnnnnnnnnnnnnnnnnnnnnnnnnnnnnnnnnnnnnnnnnnnnnnnnnnnnnnnnnnnnnnnnnnnnnnnnnnnnnnnnnnnnnnnnnnnnnnnnnnnnnnnnnnnnnnnnnnnnnnnnnnnnnnnnnnnnnnnnnnnnnnnnnnnnnnnnnnnnnnnnnnnnnnnnnnnnnnnnnnnnnnnnnnnnnnnnnnnnnnnnnnnnnnnnnnnnnnnnnnnnnnnnnnnnnnnnnnnnnnnnnnnnnnnnnnnnnnnnnnnnnnnnnnnnnnnnnnnnnnnnnnnnnnnnnnnnnnnnnnnnnnnnnnnnnnnnnnnnnnnnnnnnnnnnnnnnnnnnnnnnnnnnnnnnnnnnnnnnnnnnnnnnnnnnnnnnnnnnnnnnnnnnnnnnnnnnnnnnnnnnnnnnnnnnnnnnnnnnnnnnnnnnnnnnnnnnnnnnnnnnnnnnnnnnnnnnnnnnnnnnnnnnnnnnnnnnnnnnnnnnnnnnnnnnnnnnnnnnnnnnnnnnnnnnnnnnnnnnnnnnnnnnnnnnnnnnggatctctccagtgtgtccagcagccccacctccagtcccaagaccaaagtgactgcggtaacctctgcccagaagtccagtcagattggaagctctcagctgctgaagagacatgtgcagcggacagaagctatgctgacccacaaacaagctcaag

SEQ ID NO: 22607 - DNA, 104 bp, Macaca Mulatta
cagccactctgacctacgacactctccggtttgccgagtatgaagattttccggagacctcagagcccgtttggatactgggtagaaaatacagcattttcaca

SEQ ID NO: 22608 - DNA, 2312 bp, Macaca Mulatta
  misc_feature (1)...(2312): n = A,T,C or G
agggttttgaattgttgctgtcagccttaggtgatccctcagaaagagtagttagtgctacacatcaagtatttttaccagcttacgctgcgtggactacagaacttggaaatttacagtctcatcttatacttacactactgaacaagattgaaaaacttctcagggnnnnnnnnnnnnnnnnnnnnnnnnnnnnnnnnnnnnnnnnnnnnnnnnnnnnnagtcgttgatcccatctctctcttgattagtgctacagaatgcacctttctccagcaaagccaagcttcatggtgaagtgccacagatagaagnnnnnnnnnnnnnnnnnnnnnnnnnnnnnnnnnnnnnnnnnnnnnnnnnnnnnnnnnnnnnnnnnnnnnnnnnnnnnnnnnnnnnnnnnnnnnnnnnnnnnnnnnnnnnnnnnnnnnnnnnnnnnnnnnnnnnnnnnnnnnnnnnnnnnnnnnnnnnnnnnnnnnnnnnnnnnnnnnnnnnnnnnnnnnnnnnnnnnnnnnnnnnnnnnnnnnnnnnnnnnnnnnnnnnnnnnnnnnnnnnnnnnnnnnnnnnnnnnnnnnnnnnnnnnnnnnnnnnnnnnnnnnnnnnnnnnnnnnnnnnnnnnnnnnnnnnnnnnnnnnnnnnnnnnnnnnnnnnnnnnnnnnnnnnnnnnnnnnnnnnnnnnnnnnnnnnnnnnnnnnnnnnnnnnnnnnnnnnnnnnnnnnnnnnnnnnnnnnnnnnnnnnnnnnnnnnnnnnnnnnnnnnnnnnnnnnnnnnnnnnnnnnnnnnnnnnnnnnnnnnnnnnnnnnnnnnnnnnnnnnnnnnnnnnnnnnnnnnnnnnnnnnnnnnnnnnnnnnnnnnnnnnnnnnnnnnnnnnnnnnnnnnnnnnnnnnnnnnnnnnnnnnnnnnnnnnnnnnnnnnnnnnnnnnnnnnnnnnnnnnnnnnnnnnnnnnnnnnnnnnnnnnnnnnnnnnnnnnnnnnnnnnnnnnnnnnnnnnnnnnnnnnnnnnnnnnnnnnnnnnnnnnnnnnnnnnnnnnnnnnnnnnnnnnnnnnnnnnnnnnnnnnnnnnnnnnnnnnnnnnnnnnnnnnnnnnnnnnnnnnnnnnnnnnnnnnnnnnnnnnnnnnnnnnnnnnnnnnnnnnnnnnnnnnnnnnnnnnnnnnnnnnnnnnnnnnnnnnnnnnnnnnnnnnnnnnnnnnnnnnnnnnnnnnnnnnnnnnnnnnnnnnnnnnnnnnnnnnnnnnnnnnnnnnnnnnnnnnnnnnnnnnnnnnnnnnnnnnnnnnnnnnnnnnnnnnnnnnnnnnnnnnnnnnnnnnnnnnnnnnnnnnnnnnnnnnnnnnnnnnnnnnnnnnnnnnnnnnnnnnnnnnnnnnnnnnnnnnnnnnnnnnnnnnnnnnnnnnnnnnnnnnnnnnnnnnnnnnnnnnnnnnnnnnnnnnnnnnnnnnnnnnnnnnnnnnnnnnnnnnnnnnnnnnnnnnnnnnnnnnnnnnnnnnnnnnnnnnnnctcaatgtcaattgctgcaagcttagtgagtgaagatacaaagaccaagtttttgaacaaaatgggccagttgacaacatcaggtgccatgttggccaatgtgtttcagagaaagaagtagaagcaggaaggaagcccccagtaaacactaagatggacctcaagccgactggttccttgtacttgaagtacttgccttttttatttcctcagttttatgttcttgcattataattttatcctaacctccaaagatatttgcactgcttttaattactgctgtatatttgttgattttggagttacaactgtggtgatagaaaattgagttgatggtctgtaccaagtcccttgtctatgttcttgtctttcagaataattttnnnnnnnnnnnnnnnnnnnnnnnnnnnnnnnnnnnatttttggatgggatattcgcaaatatctgtattatacactaagctattacaatggtacttaaaataatgtaaatttgaagtcattgttataaaataataaagtggagattacttaagtatttaaattatgaaagaataatgcagactttttattgtttcttaactgactagaaagagccaccagcattactctgtgccttttggacatcagtttgtgtgttctgtaggaattgtgtgcattccattcacacagtatttctttaggatgctgtgatgatttgaattacaaatcctacagtaaatagctaaagatgaaaccttcatttcagaactctcatgaatattttttaagtgctatttaaacctccccagcacttagatgcatataatggacttacct

SEQ ID NO: 22609 - DNA, 1061 bp, Macaca Mulatta
  misc_feature (1)...(1061): n = A,T,C or G
aggttccggttctgtggtgatctggaccatcgcgactgggtcctggctgagatcagcacgctggccaagatgngtcctctgtgaagttgtggctactctgcagccaggtactaaagagctgctgggacgggggattgatntatgagaagatcctgaagctcacagctgatgtcaagtttgnagtcaggcgacgtcaaggccacagtggcagtgctgagtttcatcctctccagtgcagccaagcacagtgtcgatggtggatccttgtccagtgaagtgcagcagctggggctgcccaaagnnnnnnnnnnnnnnnnnnnnnnnnnnnnnnnnnnnnnnnnnnnnnnnnnnnnnnnnnnnnnnnnnnnnnnnnnnnnnnnnnnnnnnnnnnnnnnnnnnnnnnnnnnnnnnnnnnnnnnnnnnnnnnnnnnnnnnnnnnnnnnnnnnnnnnnnnnnnnnnnnnnnnnnnnnnnnnnnnnnnnnnnnnnnnnnnnnnnnnnnnnnnnnnnnnnnnnnnnnnnnnnnnnnnnnnnnnnnnnnnnnnnnnnnnnnnnnnnnnnnnnnnnnnnnnnnnnnnnnnnnnnnnnnnnnnnnnnnnnnnnnnnnnnnnnnnnnnnnnnnnnnnnnnnnnnnnnnnnnnnnnnnnnnnnnnnnnnnnnnnnnnnnnnnnnnnnnnnnnnnnnnnnnnnnnnnnnnnnnnnnnnnnnnnnnnnnnnnnnnnnnnnnnnnnnnnnnnnnnnnnnnnnnnnnnnnnnnnnnnnnnnnnnnnnnnnnnnnnnnnnnnnnnnnnnnnnnnnnnnnnnnnnnnnnnnnnnnnnnnngtagagacgaggtttctccatgttggttgggctggtctcgacctcaggtgacccacttgccttgccctcccaaagtgctgggattataggtgtaagccactgcacctagccactgccatcttctttaggaagagagaagcgaccatgcctgaaccactcattggcaaggggaacattgccaatgttatggactgaatgttcatgttcctccagaattcatatgctgaagcctttgtccac

SEQ ID NO: 22610 - DNA, 1814 bp, Macaca Mulatta
  misc_feature (1)...(1814): n = A,T,C or G
ggtgttcctgcccaaataccgaggggacgctggaggcactagcagtgaggacagcctgatgaccagcttcctgccaggccctaagcctggagctcccttccctaatggacacgtgggtgctggaggcagtggcctgcttccgcctccacccgcgctctgcggggcctctgcctgcgatgtctctgtacgtgtggtggtgggtgagcccaccgaggccagggtggttccgggccggggcatctgcctggacctcgccatcctggatagtgccttcctgctgtcccaggtggccccgtccctgttcatgggctccatcgtccagctcaaccagtctgttactgcctatatggtgtctgctgcaggcctgggtctggttgccatttactttgctacacaggtagtatttgacaagagcgacttggccaaatactcggtgtagaaaacttccagcacattggggaggagggcctgcctcactgggtcccagctccccactctttgttagccccatggggctgctgggctggccgccagtttctgttgctgccaaaggaatgtggctctctgctgccaccctgtgnnnnnnnnnnnnnnnnnnnnnnnnnnnnnnnnnnnnnnnnnnnnnnnnnnnnnnnnnnnnnnnnnnnnnnnnnnnnnnnnnnnnnnnnnnnnnnnnnnnnnnnnnnnnnnnnnnnnnnnnnnnnnnnnnnnnnnnnnnnnnnnnnnnnnnnnnnnnnnnnnnnnnnnnnnnnnnnnnnnnnnnnnnnnnnnnnnnnnnnnnnnnnnnnnnnnnnnnnnnnnnnnnnnnnnnnnnnnnnnnnnnnnnnnnnnnnnnnnnnnnnnnnnnnnnnnnnnnnnnnnnnnnnnnnnnnnnnnnnnnnnnnnnnnnnnnnnnnnnnnnnnnnnnnnnnnnnnnnnnnnnnnnnnnnnnnnnnnnnnnnnnnnnnnnnnnnnnnnnnnnnnnnnnnnnnnnnnnnnnnnnnnnnnnnnnnnnnnnnnnnnnnnnnnnnnnnnnnnnnnnnnnnnnnnnnnnnnnnnnnnnnnnnnnnnnnnnnnnnnnnnnnnnnnnnnnnnnnnnnnnnnnnnnnnnnnnnnnnnnnnnnnnnnnnnnnnnnnnnnnnnnnnnnnnnnnnnnnnnnnnnnnnnnnnnnnnnnnnnnnnnnnnnnnnnnnnnnnnnnnnnnnnnnnnnnnnnnnnnnnnnnnnnnnnnnnnnnnnnnnnnnnnnnnnnnnnnnnnnnnnnnnnnnnnnnnnnnnnnnnnnnnnnnnnnnnnnnnnnnnnnnnnnnnnnnnnnnnnnnnnnnnnnnnnnnnnnnnnnnnnnnnnnnnnnnnnnnnnnnnnnnnnnnnnnnnnnnnnnnnnnnnnnnnnnnnnnnnnnnnnnnnnnnnnnnnnnnnnnnnnnnnnnnnnnnnnnnnnnnnnnnnnnnnnnnnnnnnnnnnnnnnnnnnnnnnnnnnnnnnnnnnnnnnnnnnnnnnnnnnnnnnnnnnnnnnnnnnnnnnnnnnnnnnnnnnnnnnnnnnnnnnnnnnnnnnnnnnnnnnnnnnnnnnnnnnnnnnnnnnnnnnnnnnnnnnnnnnnnnnnnnnnnnnnnnnnnnnnnnnnnnnnnncccccagagtatatctgtgcttgggaatctcacacagaaactcaggagcaccccctgcctgagctaaggaggtcttatctctcaggggggtttaagtgccgtttgcaataatgtcttatttatttagcggggcaaatattttatactgtaagtgagcaatcagtataatgtttatggtgatgaaattaaaggctttcttatatgttt

SEQ ID NO: 22611 - DNA, 580 bp, Macaca Mulatta
ggcccgcttcagcctctctctcctgctttttttcctgcccttggccatcacagccttctgctacgtgggctgcctccgggcactggcccactccggcctgacgcacaggcggaagctgagggccgcctgggtagccggcggggccctcctcacgctgctgctctgcgtaggaccctacaacgcctccaacgtggccagcttcctgaaccccaatctgggaggctcctggcggaagctggggctcatcacgggtgcctggagtgtggtgctcaacccgctggtgaccggttacttgggaaagggtcctggcctgaagacagtgtgtgcggcaagaacgcaagggagcacgtcccagaagtaacgccaccgctcgggggaagaagcatgaggcaggagggcccggctgcgtctccaggcccctgaggagggctgcttcggaggaactgcagggcagcctggcccggaggcctccctggagccactcaagcggagagcggcgcctgctgagggcagcaccccagtcaagagaggagcacggagccaaagcaaggcggcagggggaggtaagcttgcccccgca

SEQ ID NO: 22612 - DNA, 3555 bp, Macaca Mulatta
  misc_feature (1)...(3555): n = A,T,C or G
acggaagcgccgctgggactgacacgtggacttgggcggtgctgccctggtgggtcgccccgggctgggaggcagccccgggacacagctgtgcccacgccgtctgagcaccccaagcccgatgcagccaaccggcagaagaggcccggagggacagggccggggacagccagtggtccagnnnnnnnnnnnnnnnnnnnnnnnnnnnnnnnnnnnnnnnnnnnnnnnnnnnnnnnnnnnnnnnnnnnnnnnnnnnnnnnnnnnnnnnnnnnnnnnnnnnnnnnnnnnnnnnnnnnnnnnnnnnnnnnnnnnnnnnnnnnnnnnnnnnnnnnnnnnnnnnnnnnnnnnnnnnnnnnnnnnnnnnnnnnnnnnnnnnnnnnnnnnnnnnnnnnnnnnnnnnctgctgtcagcctctgcctggggctccatcacagccgtcaccccgctgctcgctcagctgagcagtgcccacctggcnttcatgaccttctcacgcatcctcatgggcttgctccaagnnnnnnnnnnnnnnnnnnnnnnnnnnnnnnnnnnnnnnnnnnnnnnnnnnnnnnnnnnnnnnnnnnnnnnnnnnnnnnnnnnnnnnnnnnnnnnnnnnnnnnnnnnnnnnnnnnnnnnnnnnnnnnnnnnnnnnnnnnnnnnnnnnnnnnnnnnnnnnnnnnnnnnnnnnnnnnnnnnnnnnnnnnnnnnnnnnnnnnnnnnnnnnnnnnnnnnnnnnnnnnnnnnnnnnnnnnnnnnnnnnnnnnnnnnnnnnnnnnnnnnnnnnnnnnnnnnnnnnnnnnnnnnnnnnnnnnnnnnnnnnnnnnnnnnnnnnnnnnnnnnnnnnnnnnnnnnnnnnnnnnnnnnnnnnnnnnnnnnnnnnnnnnnnnnnnnnnnnnnnnnnnnnnnnnnnnnnnnnnnnnnnnnnnnnnnnnnnnnnnnnnnnnnnnnnnnnnnnnnnnnnnnnnnnnnnnnnnnnnnnnnnnnnnnnnnnnnnnnnnnnnnnnnnnnnnnnnnnnnnnnnnnnnnnnnnnnnnnnnnnnnnnnnnnnnnnnnnnnnnnnnnnnnnnnnnnnnnnnnnnnnnnnnnnnnnnnnnnnnnnnnnnnnnnnnnnnnnnnnnnnnnnnnnnnnnnnnnnnnnnnnnnnnnnnnnnnnnnnnnnnnnnnnnnnnnnnnnnnnnnnnnnnnnnnnnnnnnnnnnnnnnnnnnnnnnnnnnnnnnnnnnnnnnnnnnnnnnnnnnnnnnnnnnnnnnnnnnnnnnnnnnnnnnnnnnnnnnnnnnnnnnnnnnnnnnnnnnnnnnnnnnnnnnnnnnnnnnnnnnnnnnnnnnnnnnnnnnnnnnnnnnnnnnnnnnnnnnnnnnnnnnnnnnnnnnnnnnnnnnnnnnnnnnnnnnnnnnnnnnnnnnnnnnnnnnnnnnnnnnnnnnnnnnnnnnnnnnnnnnnnnnnnnnnnnnnnnnnnnnnnnnnnnnnnnnnnnnnnnnnnnnnnnnnnnnnnnnnnnnnnnnnnnnnnnnnnnnnnnnnnnnnnnnnnnnnnnnnnnnnnnnnnnnnnnnnnnnnnnnnnnnnnnnnnnnnnnnnnnnnnnnnnnnnnnnnnnnnnnnnnnnnnnnnnnnnnnnnnnnnnnnnnnnnnnnnnnnnnnnnnnnnnnnnnnnnnnnnnnnnnnnnnnnnnnnnnnnnnnnnnnnnnnnnnnnnnnnnnnnnnnnnnnnnnnnnnnnnnnnnnnnnnnnnnnnnnnnnnnnnnnnnnnnnnnnnnnnnnnnnnnnnnnnnnnnnnnnnnnnnnnnnnnnnnnnnnnnnnnnnnnnnnnnnnnnnnnnnnnnnnnnnnnnnnnnnnnnnnnnnnnnnnnnnnnnnnnnnnnnnnnnnnnnnnnnnnnnnnnnnnnnnnnnnnnnnnnnnnnnnnnnnnnnnnnnnnnnnnnnnnnnnnnnnnnnnnnnnnnnnnnnnnnnnnnnnnnnnnnnnnnnnnnnnnnnnnnnnnnnnnnnnnnnnnnnnnnnnnnnnnnnnnnnnnnnnnnnnnnnnnnnnnnnnnnnnnnnnnnnnnnnnnnnnnnnnnnnnnnnnnnnnnnnnnnnnnnnnnnnnnnnnnnnnnnnnnnnnnnnnnnnnnnnnnnnnnnnnnnnnnnnnnnnnnnnnnnnnnnnnnnnnnnnnnnnnnnnnnnnnnnnnnnnnnnnnnnnnnnnnnnnnnnnnnnnnnnnnnnnnnnnnnnnnnnnnnnnnnnnnnnnnnnnnnnnnnnnnnnnnnnnnnnnnnnnnnnnnnnnnnnnnnnnnnnnnnnnnnnnnnnnnnnnnnnnnnnnnnnnnnnnnnnnnnnnnnnnnnnnnnnnnnnnnnnnnnnnnnnnnnnnnnnnnnnnnnnnnnnnnnnnnnnnnnnnnnnnnnnnnnnnnnnnnnnnnnnnnnnnnnnnnnnnnnnnnnnnnnnnnnnnnnnnnnnnnnnnnnnnnnnnnnnnnnnnnnnnnnnnnnnnnnnnnnnnnnnnnnnnnnnnnnnnnnnnnnnnnnnnnnnnnnnnnnnnnnnnnnnnnnnnnnnnnnnnnnnnnnnnnnnnnnnnnnnnnnnnnnnnnnnnnnnnnnnnnnnnnnnnnnnnnnnnnnnnnnnnnnnnnnnnnnnnnnnnnnnnnnnnnnnnnnnnnnnnnnnnnnnnnnnnnnnnnnnnnnnnnnnnnnnnnnnnnnnnnnnnnnnnnnnnnnnnnnnnnnnnnnnnnnnnnnnnnnnnnnnnnnnnnnnnnnnnnnnnnnnnnnnnnnnnnnnnnnnnnnnnnnnnnnnnnnnnnnnnnnnnnnnnnnnnnnnnnnnnnnnnnnnnnnnnnnnnnnnnnnnnnnnnnnnnnnnnnnnnnnnnnnnnnnnnnnnnnnnnnnnnnnnnnnnnnnnnnnnnnnnnnnnnnnnnnnnnnnnnnnnnnnnnnnnnnnnnnnnnnnnnnnnnnnnnnnnnnnnnnnnnnnnnnnnnnnnnnnnnnnnnnnnnnnnnnnnnnnnnnnnnnnnnnnnnnnnnnnnnnnnnnnnnnnnnnnnnnnnnnnnnnnnnnnnnnnnnnnnnnnnnnnnnnnnnnnnnnnnnnnnnnnnnnnnnnnnnnnnnnnnnnnnnnnnnnnnnnnnnnnnnnnnnnnnnnnnnnnnnnnnnnnnnnnnnnnnnnnnnnnnnnnnnnnnnnnnnnnnnnnnnnnnnnnnnnnnnnnnnnnnnnnnnnnnnnnnnnnnnnnnnnnnnnnnnnnnnnnnnnnnnnnnnnnnnnnnnnnnnnnnnnnnnnnnnnnnnnnnnnnnnnnnnnnnnnnnnnnnnnnnnnnnnnnnnnnnnnnnnnnnnnnnnnnnnnnnnnnnnnnnnnnnnnnnnnnnnnnnnnnnnnnnnnnnnnnnnnnnnnnnnnnnnnnnnnnnnnnnnnnnnnnnnnnnnnnnnnnnnnnnnnnnnnnnnnnnnnnnnnnnnnnnnnnnnnnnnnnnnnnnnnnnnnnnnnnctcccagtcagacaacagccagaaatgtctccagactctgctcagcctccccaggtagccaccctcgagacacgacttcagagtcactgcgtctcccagcagcctgtcaga

SEQ ID NO: 22613 - DNA, 776 bp, Macaca Mulatta
gggaagcattttttgcccattgcccaggaatcaaggtggttatacccagaagccctttccaggccaaaggacttcttttgtcatgcatagaggataaaaatccttgtatattttttgaacctaaaatactttacagggcagcagcggaacaggttcctatagaaccatacaacatcccattgtcccaggccgaagtcatacaggaagggagtgatgttactcttgttgcctggggcactcaggttcatgtgatccgggaggtagcgtccatggcaaaagaaaagcttggagtatcttgtgaagtcattgatctgaggactataataccttgggatgtggacacagtttgtaagtctgtgatcaaaacagggcgactgctaatcagtcacgaggctcccttgacaggcggttttgcatcggaaatcagctctacagttcaggaggaatgtttcttgaacctagaggctcctatatcaagagtatgtggttatgacacaccatttcctcacatttttgaaccattctacatcccagacaaatggaagtgttatgatgcccttcgaaaaatgatcaactactgaccatatagaaaagctggaagattataactagatatggaaatattttttctgaattttttttatatttcctcagacttacctctttttgaaaagagagtttttattaaatgaaacatcatgatattggctgaaaaattctacattccaattattggtattgtaaccacaataatgtattggatgaattttgcatta

SEQ ID NO: 22614 - DNA, 815 bp, Macaca Mulatta
  misc_feature (1)...(815): n = A,T,C or G
ggcagggtatctatataaagggggttaaattttttttaacttgctggttaagacattttagaaatattcttgagatgggcaggagagtcaaagggcttgcttgccccagcagggttcccagcagacagccatggctcttcccagcagcctgtgcaaactctgatcatggcccaccccggcacatgcacacgcacatcatgcttttccagctcatcacaccctgccccactgtgggcttcccgttaatagtgtataacttggagttaagttaaaagagccttttggacagaaaactgggccaggaaaaggcatctcggaccacaaatagagaatttgattccgcgtttgccacataaggtcatctgcttagcnnnnnnnnnnnnnnnnnnnnnnnnnnnnnnnnnnnnnnnnnnnngctttgtcgnnnnnnnnnnnnnnnnnnnngccatctcggctcactgcagaaccnnnnnnnnnnnnnnnnnnnnncgcctcccgtannnnnnnnnnnnnnnnntnnnnnnnnnnnnnnnnnnnnnnnnnnnnnntgtgcactaccacannnnnnnnnnnnnnnnnnnnnnnnnnnnnnnnnagtttcaccatttggccaggatggtctcgatctcttggacttgtgatctgcccacctcaacctctcaaagtgctgggaattacagggcgtgaaccacccgtgcccagccacttagctttttcttaattcccccctttctatcccatagaaacacccttttttatcctcccctggaaccatatttggatagataaataagggctgggggccggggcccccc

SEQ ID NO: 22615 - DNA, 2718 bp, Macaca Mulatta
  misc_feature (1)...(2718): n = A,T,C or G
ggctggtcgtgggcgtcccactggaaaccaatggccaccagaagacgggagacgctgtacaaggtcaaagtgatccacgggaaccgcannnnnnnnnnnnnnnnnnnnnnnnnnnnnnnnnnnnnnnnnnnnnnnnnnnnnnnnnnnnnnnnnnnnnnnnnnnnnnnnnnnnnnnnnnnnnnnnnnnnnnnnnnnnnnnnnnnnnnnnnnnnnnnnnnnnnnnnnnnnnnnnnnnnnnnnnnnnnnnnnnnnnnnnnnnnnnnnnnnnnnnnnnnnnnnnnnnnnnnnnnnnnnnnnnnnnnnnnnnnnggtgccagacctacatggacattgtcattgtcctggatggctccaacagcatctacccctgggtggaggttcagcacttcctcatcaacatcctgaagaagttttacatcggcccagggcagatccaggnnnnnnnnnnnnnnnnnnnnnnnnnnnnnnnnnnnnnnnnnnnnnnnnnnnnnnnnnnnnnnnnnnnnnnnnnnnnnnnnnnnnnnnnnnnnnnnnnnnnnnnnnnnnnnnnnnnnnnnnnnnnnnnnnnnnnnnnnnnnnnnnnnnnnnnnnnnnnnnnnnnnnnnnnnnnnnnnnnnnnnnnnnnnnnnnnnnnnnnnnnnnnnnnnnnnnnnnnnnnnnnnnnnnnnnnnnnnnnnnnnnnnnnnnnnnnnnnnnnnnnnnnnnnnnnnnnnnnnnnnnnnnnnnnnnngtcctggggtactacaaccgcaggggcatcaatccagaaacttttctaaatgaaatcaaatacttcgccagtgaccccgatgacaagcacttcttcaatgtcactgatgaggctgccttgaaggacattgtcgatgccctgggggacagaatcttcagcctggaagnnaggcaccaacaagaacgagacctcctttgggctggagatgtcacagacaggcttttcctcgcacgtggtggagnnnnnnnnnnnnnnnnnnnnnnnnnnnnnnnnnnnnnnnnnnnnnnnnnnnnnnnnnnnnnnnnnnnnnnnnnnnnnnnnnnnnnnnnnnnnnnnnnnnnnnnnnnnnnnnnnnnnnnnnnnnnnnnnnnnnnnnnnnnnnnnnnnnnnnnnnnnnnnnnnnnnnnnnnnnnnnnnnnnnnnnnnnnnnnnnnnnnnnnnnnnnnnnnnnnnnnnnnnnnnnnnnnnnnnnnnnnnnnnnnnnnnnnnnnnnnnnnnnnnnnnnnnnnnnnnnnnnnnnnnnnnnnnnnnnnnnnnnnnnnnnnnnnnnnnnnnnnnnnnnnnnnnnnnnnnnnnnnnnnnnnnnnnnnnnnnnnnnnnnnnnnnnnnnnnnnnnnnnnnnnnnnnnnnnnnnnnnnnnnnnnnnnnnnnnnnnnnnnnnnnnnnnnnnnnnnnnnnnnnnnnnnnnnnnnnnnnnnnnnnnnnnnnnnnnnnnnnnnnnnnnnnnnnnnnnnnnnnnnnnnnnnnnnnnnnnnnnnnnnnnnnnnnnnnnnnnnnnnnnnnnnnnnnnnnnnnnnnnnnnnnnnnnnnnnnnnnnnnnnnnnnnnnnnnnnnnnnnnnnnnnnnnnnnnnnnnnnnnnnnnnnnnnnnnnnnnnnnnnnnnnnnnnnnnnnnnnnnnnnnnnnnnnnnnnnnnnnnnnnnnnnnnnnnnnnnnnnnnnnnnnnnnnnnnnnnnnnnnnnnnnnnnnnnnnnnnnnnnnnnnnnnnnnnnnnnnnnnnnnnnnnnnnnnnnnnnnnnnnnnnnnnnnnnnnnnnnnnnnnnnnnnnnnnnnnnnnnnnnnnnnnnnnnnnnnnnnnnnnnnnnnnnnnnnnnnnnnnnnnnnnnnnnnnnnnnnnnnnnnnnnnnnnnnnnnnnnnnnnnnnnnnnnnnnnnnnnnnnnnnnnnnnnnnnnnnnnnnnnnnnnnnnnnnnnnnnnnnnnnnnnnnnnnnnnnnnnnnnnnnnnnnnnnnnnnnnnnnnnnnnnnnnnnnnnnnnnnnnnnnnnnnnnnnnnnnnnnnnnnnnnnnnnnnnnnnnnnnnnnnnnnnnnnnnnnnnnnnnnnnnnnnnnnnnnnnnnnnnnnnnnnnnnnnnnnnnnnnnnnnnnnnnnnnnnnnnnnnnnnnnnnnnnnnnnnnnnnnnnnnnnnnnnnnnnnnnnnnnnnnnnnnnnnnggtgcccttctggaacggctgcaatgaggatgagcactgtgtccctgaccttgtgctggatgcccggagtgacctgcccacggccatnnnnnnnnnnnnnnnnnnnnnnnnnnnnnnnnnnnnnnnnnnnnnnnnnnnnnnnnnnnnnnnnnnnnnnnnnnnnnnnnnnnnnnnnnnnnnnnnnnnnnnnnnnnnnnnnnnnnnnnnnnnnnnnnnnnnnnnnnnnnnnnnnnnnnnnnnnnnnnnnnnnnnnnnnnnnnnnnnnnnnnnnnnnnnnnnnnnnnnnnnnnnnnnnnnnnnnnnnnnnnnnnnnnnnnnnnnnnnnnnnnnnnnnnnnnnnnnnnnnnnnnnnnnnnnnnnnnnnnnnnnnnnnnnnnnnnnnnnnnnnnnnaggtggctttccgtcttgattttgagttcagcaaatccatcttcctacaccacctggagatcgagctcgctgcaggcannnnnnnnnnnnnnnnnnnnnnnnnnggaagacacgtggcccccttctactatcagctcaaatacgaggctgacgtcctcttcaccagg

SEQ ID NO: 22616 - DNA, 307 bp, Macaca Mulatta
  misc_feature (1)...(307): n = A,T,C or G
nagcaaaatggcgccagaactagtggcgggctgaggacgccgtacccctcggaaggcagccctacggtccctttgccgcccgttccctcccggacatggaggacgtggaggcgcgcttcgctcacctcttgcagcccatccgcgatctcaccaagaactgggaggtggacgtggcggcccagctgggcgagtatctggaggannnnnnnnnnnnnnnnnnnnnnnnnnnnnnnnnnnnnnnnnnatgaacttcattgaggcagcgttgttgatccagggctctgcctgcgtctacagtaagaaggtg

SEQ ID NO: 22617 - DNA, 1163 bp, Macaca Mulatta
  misc_feature (1)...(1163): n = A,T,C or G
gtgtgaaagaaaatgtctttatttaaagcccgtgattggtggtctactattctgggagataaagaagaatttgatcaaggctgtttgtgtctggctaatgttgacaatagtggaaatggacaagnagataaaataattgtgggtagctttatgggatacctaaggatctttagcccccatcctgcaaaaacaggagatggagctcaagctgaagatttgcttctagaagtggatctacgagatccagtacttcaagtggaagtaggaaagtttgtttcnnnnnnnnnnnnnnnnnnnnnnnnnnnnnnnnnnnnnnnnnnnnnnnnnnnnnnnnnnnnnnnaggaactttgggtaatgtggaacatgggaaccaagatcagatgaaattgatgtatgaacataatcttcagagaacagcctgcaatatgacctatggatcatttggtggtataaaaggtnnnnnnttaatttgcatccagtctatggatgggatgctgatggtatttgagcaggagagctatgcttttggaagatttctccctggctttcttctgcctggtcctcttgcctacagttcccgtacagattccttcattactgtctcttcctgccgacaagtggaaagttataagtannnnnnnnnnnnnnnnnnnnnnnnnnnnnnnnnnnnnnnnnnnnnnnnnnnnnnnnnnnnnnnnnnnnnnnnnnnnnnnnnnnnnnnnnnnnnnnnnnnnnnnnnnnnnnnnnnnnnnnnnnnnnnnnnnnnnnnnnnnnnnnnnnnnnnnnnnnnnnnnnnnnnnnnnnnnnnnnnnnnnnnnnnnnnnnnnnnnnnnnnnnnnnnnnnnnnnnnnnnnnnnnnnnnnnnnnnnnnnnnnnnnnnnnnnnnnnnnnnnnnnnnnnnnnnnnnnnnnnnnnnnnnnnnnnnnnnnnnnnnnnnnnnnnnnnnnnnnnnnnnnnnnnnnnnnnnnnnnnnnnnnnnnnnnnnnnnnnnnnnnnnnnnnnnnnnnnnnnnnnnnnnnnnnnnnnnnnntgatttaaagggagtgatagtcactctgagtgatgatggtcacttgcagtgttcttacctggggacagatccttctctgttccaagctccaaatgttgaatctcgagaactaaactatgatgaacttgatgt

SEQ ID NO: 22618 - DNA, 671 bp, Macaca Mulatta
  misc_feature (1)...(671): n = A,T,C or G
gggggttgccaaccttaatttctatgatgttttctaaaatgaaacttgacaaagtagaccaccagctgcaccgtgttttctgtaaaagtattgttagtaagtggccaagagacttgaggaaaatacagattttttgtttaccttggtcttgtttcaagtcttaaaaaattaaagttacattacaatgtagaatacagatgggacatagtccttgtaagcttcccttgaaaatgttttaaatatttaggaagcttttaaaagacactaaattgtactctaaaagacactaaattgtactagttgtacaaagatcaagccaattttatgaaacagtcccacagagtaataatatatgtgatgcagtgtgagaaagaaaatactcatctctaacatgatggtaataataaggtttagcctcttaggagttggggcagggggatgggtaattacaaatttgcaaactatagaaagagtttcattttttttgtgaccccacagagtctcanatttttacttcactacctgctagagactactgtgaaatcactgctccatatttgccagtggaggaagtgggcatcagagtaaagatacttcgtatgttacacatttgcatagactaacacacatcatgcgtttatggcagcagctgcatttgttccanatatatg

SEQ ID NO: 22619 - DNA, 668 bp, Macaca Mulatta
cagtgcaaccagtggacccgcgtggcgccgctgctgcatgccaacagcgagtcgggcgtggcggtgtgggagggccgcatctacatcctgggcggctacagctgggagaacaccgccttctccaagaccgtgcaggtgtacgaccgagaggccgacaagtggagcaggggcgtcgacctgcccaaggccatcgctggcgggtccgcctgtgtctgcgccctggagccgaggccagaggacaaaaagaagaaaggcaaaggcaagaggcaccaggaccggggccagtgaccccagctgcgcctcctgggaccatcctcaccatcatatcccagggctctgtagaccagcagcaacttcttagtattccggaaacattatgtacaacttagcagctttttttacttttatgattcttggtatttctatgatatcacagtaaccaattaaatactctctgtaactttacatatcttgctcgaataactaacccaggcagtgagcaaccccttgtatctttgcaggtctttgccccatgttacaattcctcatgggtccttgctaaccgtctccctgagagtagctggcatgggggttacacagaaatttctgtagtgaagcttggggcctcaaagggatctcttagatcacctagtccaagcctccccaaa

SEQ ID NO: 22620 - DNA, 259 bp, Macaca Mulatta
  misc_feature (1)...(259): n = A,T,C or G
aagcttaccaagcatcttccaccaagaacaattggctatccatggactcttgtttatggtactggaaaacatggcacaagcttgaaaactctttatcgaacaatgacaggtttagacaccccagtgctgatggtgattaaagacagtgatggacaggtnaggtttttggtgcattagcatctgagccatttaaagtgagtgatggcttttatggtactggagagacctttgtttttacgttctgtccagagtttgaggt

SEQ ID NO: 22621 - DNA, 1032 bp, Macaca Mulatta
ctttcttcttccatttgtgccagagggctcttagtcagctgccctttattcttgttgttatcaactccattataagtcacagctgcaagttttctgcttctgtagttctcatagtggacattattagtaacatctttcaagtcctgcatgtgtgttcttatcaacatatttcttaggattgtaaaatcacaatgttcaccattttcaacttcagcaacaccccaaggatactgccttcctctgacccttttgccattaacttcaatgatagtattactacctaccacagcaagagggtaaaccggtccttttatcttttttaaccaagtttattttctttcttcatcaatctgtttctgggaaaattcatatattttaattttatggttcttggatttctttcattatctgttttttaaactgttggcattcctctggtgtgagtgtgtctgctttggcaataagtgggatgatattcactttttcatgcaaacgcttcataaactcaatatccaatggtttaagtccatgtcctgaaggagcaatgaagtataaacaacattgcaccctgttatcaggcatctgacgtctgttcactcgtgattctgcatttaagtagtcctcaaatttactatcaatgtagtcgataacaggctgccagcaattactattatccactgcatctccaaatcctggggtatcaactattgtgagcagcaactgaacaccaccttctttgattaaaactttagattgttccacctgtacagtctttttaattctatgagaaggacctggatactctggagaatacaaatctgtgaggaataatgagttgattaacgtcgactttcccaatccagattcacccactaccataagcgtgaattcaaaacctctcttcactgattttctgtatacttgatttgggagattggcaaatcccacatagccttcaaggttcttctgttgagctaccatggtgctgctgttgacgctcctctcctcagcagcagcggatctcgcactccc

SEQ ID NO: 22622 - DNA, 6740 bp, Macaca Mulatta
  misc_feature (1)...(6740): n = A,T,C or G
atgagtgccaggaagctgcgaagtctatcttacaaaaaggnaggctgtaaggaggcaaaagttgcttgaacagagcatccagtctgcccaggagatcgaaaaatccttacacttaattcaggagtccctcacattcattgacaagcagttgacagcttatattgcagacaaggtggacgcagctcaaatgcctcaggaagcccaggcaanaaaaatccaattctgatttgacaagtcatgagatcagtttagaagaaatgaagaaacataaccaggggaaggaggctgcccaaagagtcctgtctcagattgatgttgcacagnacagaaaaaattgcaagatgtctccatgaagtttcgattatttcagaagccagccaattttgagcagcgtctacaagaaagtaagatgattttagatgaagtgaagatgcacttgcctgcgttggaaaccaagagtgtggaacaggaagtagtacagtcacagttaaatcattgtgtgnnnnnnnnnnnnnnnnnnnnnnnnnnnnnnnnnnnnnnnnnnnnnnnnnnnnnnnnnnnnnnnnnnnnnnnnnnnnnnnnnnnnnnnnnnnnnnnnnnnnnnnnnnnnnnnnnnnnnnnnnnnnnnnnnnnnnnnnnnnnnnnnnnnnnnnnnnaggtaacagaaagaaagcaacagttggagaaatgcttaaaactgtcccgtaagatgcgaaaggaaatgaatgtcttgacagaatggctggcagctacagatatggaattgacaaagagatcagcagttgaaggaatgcctagtaatttggattctgaagttgcctggggaaaggnnnnnnnnnnnnnnnnnnnnnnnnnnnnnnnnnnnnnnnnnnnnnnnnnnnnnnnnnnnnnnnnnnnnnnnnnnnnnnnnnnnnnnnnnnnnnnnnnnnnnnnnnnnnnnnnnnnnnnnnnnnnnnnnnnnnnnnnnnnnnnnnnnnnnnnnnnnnnnnnnnnnnnnnnnnnnnnnnnggaataccagaaacacatggaaacttttgaccagaatgtggaccacatcacaaagtggatcattcaggctgacacacttttggatgaatcagagaaaaagaaatcccagcaaaaagaagacgtgcttaagnagcgtttaaaggcagaactgaatgacatacgcccaaaggtggactccacacgtgaccaagcagcaaacttgatggcaaaccgcggtgaccactgcaggaaattagtagagccccaaatctcagagctcaaccatcgatttgcagccatttcccacagaattaagactgnnnaggcctccattcctttgaaggaattggagcagtttaactcagatatacaaaaattgcttgaaccactggaggctgaaattcagcagggggtgaatctgaaagaggaagacttcaataaagatatgngaatgaagacaatgagggtactgtaaaagaattgttgcaaagaggagacaacttacaacaaagaatcacagatgagagaaagcgagaggaaataaagataaaacagcagctgttacagacaaaacataatgctctcaaggnaggatttgaggtctcaaagaagaaaaaaggctctagaaatttctcatcagtggtatcaatacaagaggcaggctgatgatctcctgaaatgcttggatgacattgaaaaaaaattagccagcctacctgaacccagagatgaaaggaaaataaaggnnnnnnnnngggaattgcagaagaagaaagaggagctgaatgcagtgcgtaggcaagctgagggcttgtctgaggatggggccgcaatggcagtggagccaactcagatccagctcagcaagcgctggcgggaaattgagagcaaatttgctcagtttcgaagactcaactttgcacaaattncacactgtccgtgaagaaacgatgatggtgatgactgaagacatgcctttggaaatttcttatgtgccttctacttacctgactgaaatcactcatgtctcacaagccctatcagaagtggaacaacttctcaatgctcctgacctctgtgctaaggactttgaagatctctttaagcaagaggagtctctgaagnagaatataaaagatattctacaacaaagctcaggtcggattgacattattcacagcaagaagacagcagcattgcaaagtgcaacgcctgtggaaagggtgaagctacaggaagctctctcccagattgatttccaatgggaaaaagtaacaaaatgtacaaggaccgacaagggnggcgatttgacagatctgttgagaaatggcggcgttttcattatgatataaagatatttaatcagtggctaacagaagctgaacagttcctcagaaagacgcaaattcctgagaattgggaacatgctaaatacaaatggtatcttaaggnaggaactccaggatggcatcgggcagcggcaaactgttgtcagaacgttgaatgcaactggggaagaaataattcagcaatcctcaaaaacagatgccagtattctacaggaaaaattggggagcctgaatctgcggtggcaggaggtctgcaaacagctgtcagaaagaaaaaagaggnnnnnnnnnnnnnnnnnnnnnnnnnnnnnnnnnnnnnnnnnnnnnnnnnnnnnnnnnnnnnnnnaggctagaagaacaaaagaatatcttgtcagaatttcaaagagatttaaatgaatttgttttatggttggaggaagcagataacattgctagtatcccgcttgaacctggaaatgagcagcaactaaaagaaaagcttgagcaagtcaagnagttactggtggaagagttgcccctgcgccagggaattctaaaacaattaaatgaaactggaggacctgtgcttgtaagtgctcccataagcccagaagagcaagataaacttgaaaataagctcaagcggacaaatctccagtggataaaggttnaggtttccagagctttacctgagaaacaaggagaaattgaagctcaaataaaagaccttgggcagcttgaaaaaaagcttgaagaccttgaagattagttaaatcatctgctcctgtggctgtctcctattaagaatcagttggaaatttataaccaaccaaaccaagaaggaccatttgacattaaggnaggaaactgaaatcgcagttcaagctaaacaaccggatgtggaagggattttgtctaaagggcagcatttttacaaggaaaaaccagccactcagccagtgaagnnnnnnnnnnnnnnnnnnnnnnnnnnnnnnnnnnnnnnnnnnnnnnnnnnnnnnnnnnnnnnnnnnnnnnnnnnnnnnnnnnnnnnnnnnnnnnnnnnnnnnnnnnnnnctcctagtcagactgttactctggtgacacaacctgtggttactaaggaaactgccatctccaaactagaaatgccatcttccttgatgttggaggtacctgctctggcagatttcaaccgggcttggacagaacttaccgaatggctttctctgcttggtcgagttataaaatcacagagggtgatggtgggtgaccttgaggatatcaacgagatgatcatcaagcagaaggnaggcaacagtgcaggatttggaacagaggcgcccccagttggaagaactcattactgctgcccaaaatttgaaaaacaagaccagcaatcaagaggctagaacaatcattacggatcgaannnnnnnnnnnnnnnnnnnnnnnnnnnnnnnnnnnnnnnnnnnnnnnnnnnnnnnnnnnnnnnnnnnnnnnnnnnnnnnnnnnnnnnnnnnnnnnnnnnnnnnnnnnnnnnnnnnnnnnnnnnnnnnnnnnnnnnnnnnnnnnnnnnnnnnnnnnnnnnnnnnnnnnnnnnnnnnnnnnnnnnnnnnnnnnnnnnnnnnnnnnnnnnnnnnnnnnnnnnnnnnnnnnnnnnnnnnnnnnnnnnnnnnnnnnnnnnnnnnnnnnnnnnnnnnnnnnnnnnnnnnnnnnnnnnnnnnnnnnnnnnnnnnnnnnnnnnnnnnnnnnnnnnnnnnnnnnnnnnnnnnnnnnnnnnnnnnnnnnnnnnnnnnnnnnnnnnnnnnnnnnnnnnnnnnnnnnnnnnnnnnnnnnnnnnnnnnnnnnnnnnnnnnnnnnnnnnnnnnnnnnnnnnnnnnnnnnnnnnnnnnnnnnnnnnnnnnnnnnnnnnnnnnnnnnnnnnnnnnnnnnnnnnnnnnnnnnnnnnnnnnnnnnnnnnnnnnnnnnnnnnnnnnnnnnnnnnnngacctccaaggtgaaattgaagctcacacagatgtttatcacaacctggatgaaaacagccaaaaagtcctgagatccctggaaggttctgatgatgcagtcctgttacaaagacgtttggataacatgaacttcaagtggagtgaacttcggaaaaagtctctcaacattaggtnnnnnnnnnnnnnnnnnnnnnnnnnnnnnnnnnnnnnnnnnnnnnnnnnnnnnnnnnnnnnnnnnnnnnnnnnnnnnnnnnnnnnnnnnnnnnnnnnnnnnnnnnnnnnnnnnnnnnnnnnnnnnnnnnnnnnnnnnnnnnnnnnnnnnnnnnnnnnnnnnnnnnnnnnnnnnnnnnnnnnnnnnnnnnnnnnnnnnnnnnnnnnnnnnnnnnnnnnnnnnnnnnnnnnnnnnnnnnnnnnnnnnnnnnnnnnnnnnnnnnnnnnnnnnnnnnnagagctgcctcctgaggagcgagcccagaatgtcactaggcttctacgaaagcaggctgaggaggtcaatactgagtgggaaaaattgaacctgcattccactgactggcagagaaaaatagatgagaccctcgaaagactccaggaacttcaagaggccacggatgagctggacctcaagctgcgccaagctgaggtgatcaagggatcctggcagccagtgggcgatctcctcatcgactctctccaagatcacctcgagaaagtcaaggnnnnnnnnnnnnnnnnnnnnnnnnnnnnnnnnnnnnnnnnnnnnnnnnnnnnnnnnnnnnnnnnnnnnnnnnnnnnnnnnnnnnnnnnnnnnnnnnnnnnnnnnnnnnnnnnnnnnnnnnnnnnnnnnnnnnnnnnnnnnnnncaggtggccgtggaggaccgagtcaggcagctgcatgaagctcacagggactttggcccagcgtctcagcactttctttccannnccacgagactcaaacaacttgctgggaccatcccaaaatgacagagctctaccagtctttagnagctgacctgaataatgtcaggttctcagcttataggactgccatgaaactccgaagactgcagaaggctctttgctnnnnnnnnnnnnnnnnnnnnnnnnnnnnnnnnnnnnnnnnnnnnnnnnnnnnnnnnnnnnnnnnnnnnnnnnnnnnnnnnnnnnnnnnnnnnnnnnnnnnnnnnnnnnnnnnnnnnnnnnnnnnnnnnnnnnnnnnnnnnnnnnnnnnnnnnnnnnnnnnnnnnnnnnnnnnnnnnnnnnnnnnnnnnnnnnnnnnnnnnnnnnnnnnnnnnnnnnnnnnnnnnnnnnnnnnnnnnnnnnnnnnnnnnnnnnnnnnnnnnnnnnnnnnnnnnnnnnnnnnnnnnnnnnnnnnnnnnnnnnnnnnnnnnnnnnnnnnnnnnnnnnnnnnnnnnnnnnnnnnnnnnnnnnnnnnnnnnnnnnnnnnnnnnnnnnnnnnnnnnnnnnnnnnnnnnnnnnnnnnnnnnnnnnnnnnnnnnnnnnnnnnnnnnnnnnnnnnnnnnnnnnnngctaataataagccagagattgaagcggccctcttcctagactggatgagactggaaccccagtccatggtgtggctgcccgtcctgcacagagtggctgctgcagaaactgccaagcatcaggccaaatgtaacatctgcaaggagtgtccaatcattggattcaggtantcaggtacaggagtctaaagcactttaattatgacatctgccaaagctgctttttttctggtcgagttgcaaagggccataaatgcactatcccatggtggaannnnnnnnnnngactacatcaggagaagatgttcgagactttgccaaggtactaaaaaacaaatttcgaaccaaaaggtattttgcgaagcatccccgaatgggctacctgccagtgcagactgtcttagagggggacaacatggaaacnngcctgcctcgtcccctcagctttcacacgatgatactcattcacgcattgaacattatgctagcaggnnagatgatgaacatttgttaatccagcattactgccaaagttgaccccaggactcccccctgagccagcctcgtagtcctgcccagatcttgatttccttagagagtgaggaaagaggggagctagagagaatcctagcagatcttgaggaagaaaacaggnaggaatctgcaagcagaatatgaccgtctaaagcagcagcacgaacataaaggcctgtccccactgccgtcccctcctgaaatgatgcccacctctccccagagtccccgggatgctgagctcattgctgaggccaagctactccgtcaacacaaaggccgcctggaagccaggatgcaaatcctggaagaccacaataaacagctggagtcacagttacataggctaaggcagctgctggagcaa

SEQ ID NO: 22623 - DNA, 673 bp, Macaca Mulatta
  misc_feature (1)...(673): n = A,T,C or G
acctcgcctactcctattgcgcaacgagatctcctacccactcaagcccttcctcgtggagcccgacaagtatcgcttctggcagcgctgcctgcgcctcatccagcggctcagcccgcagatgctgcggctcaacgccgacccccacttcttcacgcaggtctttcaagacctcaagaacgagggcgaggccgccgccagcggcgggggcccaccgaacgggggcgcgtccgccgcctcctcggccgccagggacagctgcgcggccggagccaagcactggactatgaacctggaccgctagggatacccaggggccgnnnnnnnnnnnnnnnnnnnnnnnnnnnnnnnnnnnnnnnnnnnnggaccaccaagccaccgccgctgttaccgccgctcagcgccccggctgggcggaggaggagccgcccatgcccctcaggggaaagtggaggccgggacaccagaggccgcggtgtttggatttgctgggcgtgaagtggggacgaaagatgagcgcgggaagggcactccaacctcactcttcccgtctgtctgcgcccccatttcttcatttctgcccgggtcttccccttcccttcagtccattcccactcggttttgtccatttccttgcctcctttttgtgtcttcatttttcctcctgtctgca

SEQ ID NO: 22624 - DNA, 340 bp, Macaca Mulatta
  misc_feature (1)...(340): n = A,T,C or G
caacctcttaagcatttattagatgcctattgtatgccatatctcagcctctgtggacacagacctcactaactttgtatccctgccctgagggcctcacagccaggtctcctgagagccgactgaagaggaagctcagtacttctcaggcaggccagcaggtcggaaagtgattggggtcttttgccactcctgccccatttcatgggcggnctgatcantcancgtgttcctccgcnccaacggntcatngantttctanantattctcctntggcatcnnnttnatcacttccttgtngtccagantcccccctatntccccntttaggttattttc

SEQ ID NO: 22625 - DNA, 981 bp, Macaca Mulatta
  misc_feature (1)...(981): n = A,T,C or G
ctcagcaaggggtccgtccttctctgtcactgtctcttttgcctgttgtaattctgtctgcctctctgggactctgcctgtctcactctgtctgtgcctctcctcactcttgttctttctgcctgaatcacagccctcannnnnnnnnnnnnnnnnnnnnnnnnnnnnnnnnnnnnnnnnnnnnnnnnnnnnnnnnnnnnnnnnnnnnnnnnnnnnnnnnnnnnnnnnnnnnnnnnnnnnnnnnnnnnnnnnnnnnnnnnnnnnnnnnnnnnnnnnnnnnnnnnnnnnnnnnnnnnnnnnnnnnnnnnnnnnnnnnnnnnnnnnnnnnnnnnnnnnnnnnnnnnnnnnnnnnnnnnnnnnnnnnnnnnnnnnnnnnnnnnnnnnnnnnnnnntagggccacctcataaagcctggggcgaggggcaccacttccttgggaaggagccctgctggggctgttcggtctgacagacctcacaggctcagtcgggctctgcagtgtcatgcctgggagcccccggcctgcgccgagctgggcgctgttgctgcggctgctggcgttgctgcggcccccggggctgggcgaggcatgcagctgcgccccggcgcaccctcagcagcacatctgccactcggcacttgnnnnnnnnnnnnnnnnnnnnnnnnnnnnnnnnnnnnnnnnnnnnnnnnnnnnnnnnnnnnnnnnnnnnnnnnnnnnnnnnnnnnnnnnnnnnnnnnnnnnnnnnnnnnnnnnnnnnnnnnnnnnnnnnnnnnnnnnnnnnnnnnnnnnnnnnnnnnnnnnnnnnnnnnnnnnnnnnnnnnnnnnnnnnnnnnnnnnnnnnnnnnnnnnnnnnnggtcaggtcctcagtgatggaaaagtcttcatccatctgtgcaactacatcgagccctgggaggacctgtccttggtgcagagggaaagtctgaatcatcactaccatctgaactgtggctgcca

SEQ ID NO: 22626 - DNA, 114 bp, Macaca Mulatta
gtgcgtatcacggccacctgagctccctgattgacatcagtccctacaagttccgcaacctggatggccagaaggagtgggtccacgtggtatgcactgcccaactcaacaaca

SEQ ID NO: 22627 - DNA, 303 bp, Macaca Mulatta
  misc_feature (1)...(303): n = A,T,C or G
atggacaccagttaaacagaccggcaaatccgcgtgtggaacaggacccaggcgtttcctcttgctccctggtcgggggtgggcggtggctggggctgtgcggccaatgatggatttgtttcttttatgttttaaaataggatttaaaaactcatgtaaagnnnnnnnnnnnnnnnnnnnnnnnnnnnnaattctgaaacagacctgttttgtaccgagttatttttgggataaattttaccggttgctgttgtggagaaggtggcgtttccaccttttccataataaaatagaaatgtgtgt

SEQ ID NO: 22628 - DNA, 729 bp, Macaca Mulatta
  misc_feature (1)...(729): n = A,T,C or G
ggatgcctctcttccggaagaagatggtgtgggaaatccttcatcagcagttgctgtgagaaaactttgcctggtcccctctagctgctggtggttctttcacagacatttccatatacctcatgcattgtgggttaaaaagtccctgcatcacttctgttctctcacaggtactgagctgtcaaaagtgcatgaaggcctctcactgcaccctagtcctgacttggggtgcagagggctgcttgcaatcctgtttgtaaggctgtgcctgctcagagctttggactgttcaacccacacaagaacaaacgctaactactattttttttaagagattcttttccctatgaatgtgggaaatgcaggatttactctgtgaattgtttgttttctgtgtgtttgttcagcgtattcattcactcactcgtttgcaaacataatgggcagtggtcatttgctgctgctcttttacagttagctctaaattacttgtttgaactatttatttctgaaaggaatgttactcaagctgccactccctgctgaagaccaggagggaactctcactgggggcggaaggaagtggagctggagcagtaactgccaacatgaagctggaggttttgggnnnnnnnnnnnnnnnnnnnnnnnnnnnaggctcaaaaatgctgggagaaatgaaaatgctgtggggataggggctcccgtttgcccttttcagagggaaga

SEQ ID NO: 22629 - DNA, 1877 bp, Macaca Mulatta
  misc_feature (1)...(1877): n = A,T,C or G
tcctgtacatccaggcctttgtccttgtcttcctcctgggcaaggtgatgggcaaggtgttctttgggcaactgagggcagcagagatggagnagcaccttctggaacgttcctggtatgctgtcacagagacttgtctggccttcaccgtttttcgggatgacttcagcccccgctttgttgcactcttcactcttcttctcttcctcaaatgtttccactggctggctgaggatcgtgtggactttnnnnnnnnnnnnnnnnnnnnnnnnnnnnnnnnnnnnnnnnnnnnnnnnnnnnnnnnnnnnnnnnnnnnnnnnnnnnnnnnnnnnnnnnnnnnnnnnnnnnnnnnnnnnnnnnnnnnnnnnnnnnnnnnnnnnnnnnnnnnnnnnnnnnnnnnnnnnnnnnnnnnnnnnnnnnnnnnnnnnnnnnnnnnnnnnnnnnnnnnnnnnnnnnnnnnnnnnnnnnnnnnnnnnnnnnnnnnnnnnnnnnnnnnnnnnnnnnnnnnnnnnnnnnnnnnnnnnnnnnnnnnnnnnnnnnnnnnnnnnnnnnnnnnnnnnnnnnnnnnnnnnnnnnnnnnnnnnnnnnnnnnnnnnnnnnnnnnnnnnnnnnnnnnnnnnnnnnnnnnnnnnnnnnnnnnnnnnnnnnnnnnnnnnnnnnnnnnnnnnnnnnnnnnnnnnnnnnnnnnnnnnnnnnnnnnnnnnnnnnnnnnnnnnnnnnnnnnnnnnnnnnnnnnnnnnnnnnnnnnnnnnnnnnnnnnnnnnnnnnnnnnnnnnnnnnnnnnnnnnnnnnnnnnnnnnnnnnnnnnnnnnnnnnnnnnnnnnnnnnnnnnnnnnnnnnnnnnnnnnnnnnnnnnnnnnnnnnnnnnnnnnnnnnnnnnnnnnnnnnnnnnnnnnnnnnnnnnnnnnnnnnnnnnnnnnnnnnnnnnnnnnnnnnnnnnnnnnnnnnnnnnnnnnnnnnnnnnnnnnnnnnnnnnnnnnnnnnnnnnnnnnnnnnnnnnnnnnnnnnnnnnnnnnnnnnnnnnnnnnnnnnnnnnnnnnnnnnnnnnnnnnnnnnnnnnnnnnnnnnnnnnnnnnnnnnnnnnnnnnnnnnnnnnnnnnnnnnnnnnnnnnnnnnnnnnnnnnnnnnnnnnnnnnnnnnnnnnnnnnnnnnnnnnnnnnnnnnnnnnnnnnnnnnnnnnnnnnnnnnnnnnnnnnnnnnnnnnnnnnnnnnnnnnnnnnnnnnnnnnnnnnnnnnnnnnnnnnnnnnnnnnnnnnnnnnnnnnnnnnnnnnnnnnnnnnnnnnnnnnnnnnnnnnnnnnnnnnnnnnnnnnnnnnnnnnnnnnnnnnnnnnnnnnnnnnnnnnnnnnnnnnnnnnnnnnnnnnnnnnnnnnnnnnnnnnnnnnnnnnnnnnnnnnnnnnnnnnnnnnnnnnnnnnnnnnnnnnnnnnnnnnnnnnnnnnnnnnnnnnnnnnnnnnnnnnngccccctcggcctgccacttcagtcagctcccctgaggagactgccactacagttattgctgctgcctcctccaccagcatccccagctcagaggccacgaccccaaccacaggagcctccccaacagcccctgaaacggaaaggcctccagncagctcctgagtcagtgggcacagaggagatgcccgaggatggagagcctgatgcagcagagctccgccggcgccgcctgcaaaagctggagtctcctgttgcccactgacactgccccagcccagccccagcccctgctcttttgagcagccctcgctggaacacatcctgccaccaagtgccagctccctctctgtctgcagcagggagtagtacccccagctctgagaaagaggcggcatcccctaggccaagtggaaag

SEQ ID NO: 22630 - DNA, 668 bp, Macaca Mulatta
cggcactgcagctggggctgagagccagtactgcccgagaactgacagactgagttacagacggactaaccatggccgaccagccgaaacccatcagcccgctcaagaacctgctggccggcggctttggaggcgtgtgcctggtgttcgtgggtcaccctctcgacacggtcaaggtccgactgcagacacagccaccgagtttgcctggacaacctcccatgtactctggtacctttgactgtttccggaagactctttttagagagggcatcagggggctatatcggggaatggctgcccctatcatcggggtcactcccatgtttgctgtgtgcttctttgggtttggtttggggaagaaactacaacagaaacacccagaagatgtgctcagctatccccagctgtttgcagctgggatgttatctggtgtattcaccacaggaatcatgactcctggagaacggatcaagtgcttattacagattcaggcttcttcaggagaaaccaagtacactggtaccttggactgtgcaaagaagctgtaccaggagtttgggatccgaggcatctacaaagggactgtgcttacccttatgcgagatgtcccagctagtggaatgtatttcatgacatatgaatggctgaaaaactcttcactccag

SEQ ID NO: 22631 - DNA, 2619 bp, Macaca Mulatta
  misc_feature (1)...(2619): n = A,T,C or G
gcagctacatgagcaggatgcagggggcccagggggcgcagctgggtcacctgagagtcgggcatccagagttcgagctgatgaggtgcgactgcagtgccagagtggcagtggcttccttgagggcctctttggctgcctgcgccctgtctggaccatgattggcaaagcctactccactgagcacaagcagcagcaggaannnnnnnnnnnnnnnnnnnnnnnnnnnnnnnnnnnnnnnnnnnnnnnnnnnnnnnnnnnnnnnnnnnnnnnnnnnnnnnnnnnnnnnnnnnnnnnnnnnnnnnnnnnnnnnnnnnnnnnnnnnnnnnnnnnnnnnnnnnnnnnnnnnnnnnnnnnnnnnnnnnnnnnnnnnnnnnnnnnnnnnnnnnnnnnnnnnnnnnnnnnnnnnnnnnnnnnnnnnnnnnnnnnnnnnnnnnnnnnnnnnnnnnnnnnnnnnnnnnnnnnnnnnnnnnnnnnnnnnnnnnnnnnnnnnnnnnnnnnnnnnnnnnnnnnnnnnnnnnnnnnnnnnnnnnnnnnnnnnnnnnnnnnnnnnnnnnnnnnnnnnnnnnnnnnnnnnnnnnnnnnnnnnnnnnnnnnnnnnnnnnnnnnnnnnnnnnnnnnnnnnnnnnnnnnnnnnnnnnnnnnnnnnnnnnnnnnnnnnnnnnnnnnnnnnnnnnnnnnnnnnnnnnnnnnnnnnnnnnnnnnnnnnnnnnnnnnnnnnnnnnnnnnnnnnnnnnnnnnnnnnnnnnnnnnnnnnnnnnnnnnnnnnnnnnnnnnnnnnnnnnnnnnnnnnnnnnnnnnnnnnnnnnnnnnnnnnnnnnnnnnnnnnnnnnnnnnnnnnnnnnnnnnnnnnnnnnnnnnnnnnnnnnnnnnnnnnnnnnnnnnnnnnnnnnnnnnnnnnnnnnnnnnnnnnnnnnnnnnnnnnnnnnnnnnnnnnnnnnnnnnnnnnnnnnnnnnnnnnnnnnnnnnnnnnnnnnnnnnnnnnnnnnnnnnnnnnnnnnnnnnnnnnnnnnnnnnnnnnnnnnnnnnnnnnnnnnnnnnnnnnnnnnnnnnnnnnnnnnnnnnnnnnnnnnnnnnnnnnnnnnnnnnnnnnnnnnnnnnnnnnnnnnnnnnnnnnnnnnnnnnnnnnnnnnnnnnnnnnnnnnnnnnnnnnnnnnnnnnnnnnnnnnnnnnnnnnnnnnnnnnnnnnnnnnnnnnnnnnnnnnnnnnnnnnnnnnnnnnnnnnnnnnnnnnnnnnnnnnnnnnnnnnnnnnnnnnnnnnnnnnnnnnnnnnnnnnnnnnnnnnnnnnnnnnnnnnnnnnnnnnnnnnnnnnnnnnnnnnnnnnnnnnnnnnnnnnnnnnnnnnnnnnnnnnnnnnnnnnnnnnnnnnnnnnnnnnnnnnnnnnnnnnnnnnnnnnnnnnnnnnnnnnnnnnnnnnnnnnnnnnnnnnnnnnnnnnnnnnnnnnnnnnnnnnnnnnnnnnnnnnnnnnnnnnnnnnnnnnnnnnnnnnnnnnnnnnnnnnnnnnnnnnnnnnnnnnnnnnnnnnnnnnnnnnnnnnnnnnnnnnnnnnnnnnnnnnnnnnnnnnnnnnnnnnnnnnnnnnnnnnnnnnnnnnnnnnnnnnnnnnnnnnnnnnnnnnnnnnnnnnnnnnnnnnnnnnnnnnnnnnnnnnnnnnnnnnnnnnnnnnnnnnnnnnnnnnnnnnnnnnnnnnnnnnnnnnnnnnnnnnnnnnnnnnnnnnnnnnnnnnnnnnnnnnnnnnnnnnnnnnnnnnnnnnnnnnnnnnnnnnnnnnnnnnnnnnnnnnnnnnnnnnnnnnnnnnnnnnnnnnnnnnnnnnnnnnnnnnnnnnnnnnnnnnnnnnnnnnnnnnnnnnnnnnnnnnnnnnnnnnnnnnnnnnnnnnnnnnnnnnnnnnnnnnnnnnnnnnnnnnnnnnnnnnnnnnnnnnnnnnnnnnnnnnnnnnnnnnnnnnnnnnnnnnnnnnnnnnnnnnnnnnnnnnnnnnnnnnnnnnnnnnnnnnnnnnnnnnnnnnnnnnnnnnnnnnnnnnnnnnnnnnnnnnnnnnnnnnnnnnnnnnnnnnnnnnnnnnnnnnnnnnnnnnnnnnnnnnnnnnnnnnnnnnnnnnnnnnnnnnnnnnnnnnnnnnnnnnnnnnnnnnnnnnnnnnnnnnnnnnnnnnnnnnnnnnnnnnnnnnnnnnnnnnnnnnnnnnnnnnnnnnnnnnnnnnnnnnnnnnnnnnnnnnnnnnnnnnnnnnnnnnnnnnnnnnnnnnnnnnnnnnnnnnnnnnnnnnnnnnnnnnnnnnnnnnnnnnnnnnnnnnnnnnnnnnnnnnnnnnnnnnnnnnnnnnnnnnnnnnnnnnnnnnnnnnnnnnnnnnnnnnnnnnnnnnnnnnnnnnnnnnnnnnnnnnnnnnnnnnnnnnnnnnnnnnnnnnnnnnnnnnnnnnnnnnnnnnnnnnnnnnnnnnnnnnnnnnnnnnnnnnnnnnnnnnnnnnnnnnnnnnnnnnnnnnnnnnnnnnnnnnnnnnnnnnnnnnnnnnnnnncgccacataatcaacagaaagatggggctgtcccagccgtaagtcaagccgagggagactgatcccctgaccaattcacctgatactctagggacagtggcagctgtgga

SEQ ID NO: 22632 - DNA, 3912 bp, Macaca Mulatta
  misc_feature (1)...(3912): n = A,T,C or G
aggtggctgtacttttgatgatggtccaggggcctgtgattaccaccaggatctgtatgatgactttgagtgggtgcatgttagtgctcaagagcctcattatctaccacccgagatgcctcaaggtnaggttcctatatgatagtggactcttcagatcacgaccctggagaaaaggccagacttcagctgcctacaatgaaggagaacgacactcactgcattgatttcagttacctattatatagccagaaaggactgaatcctggcactttgaacatattggttagggtgaataaaggaccgcttgccaatccaatttggaatgtgactggattcacgggtagagattggctttcggctgagctagcagtgagcaccttttggccaatgaatatcaggtaatnnttgaagccgaagtctcaggagggagaagtggttatatttgccattgatgacttccaagtactgagttnnnnnnnngataaatctcctcatttcctccgtctcggggatgtagaggtgaatgcagggcaaaacgctacatttcagtgcattgccacagggagagatgctgtgcataacaagttatggctccagncagagacgaaatggagaagatataccagtagcccagactaaaaacatcaatcatagaaggtttgccgcttccttcagattgcaagaagtgacaaaannnnnnnnnnnnnnnnnnnnnnnnnnnnnnnnnnnnnnnnnnnnnnnnnnnnnnnnnnnnnnnnnnnnnnnnnnnnnnnnagaaccaccaagacccattgctcctcctcagctgcttggtgttgggcctacatatttgctgatccaactaaatgccaattcgatcattggcgatggtcctatcatcctaaaagaagtagagtaccgaatgacatcaggatcctggacagaaacccatgcagtcaatgctccaacttacaaattatggcatttagatccagataccgaatatgagatccgagttctacttacaagacctggtgaaggtggaacggggctcccaggacctccactaatcaccagaacaaaatgcgcagnngtgcctggccccgtaccggtaaaatctcttcaaggaacatcctttgaaaataagatcttcttgaactggaaagaacctttggatccaaatggaatcatcactcagtatgagnagatcagctatagcagtataagatcgtttgatcctgcagttccagtggctggacctccccagactgtatcaaatttatggaacagtacacatcatgtctttatgcatctccaccctggaaccacgtaccagtttttcataagagccagcacagtcaaaggctttggaccagccacagccatcaatgtcaccaccaatatctcagngctccatctttacctgactatgaaggagttgatgcctctctcaatgaaactgccaccactataagtgttttgttgagaccagctcaagccaaaggtgctcctatcagnagtgcttatcagattgttgtggaagaactgcacccacaccgaaccaagagagaagcaggagccatggaatgctaccaggttcctgtcacataccaaaatgccatgagtgggggtgcaccctattactttgctgcagaacttcccccaggaaacctgcctgagcctgccccattcactgtgggtgacaatcggacctaccaaggcttttggaaccctcctttggctccacgcaaaggatacaacatctatttccaggcaatgagcagtgtggagaaggnaggaaactaaaacccagtgtgtacgcattgctacaaaagnagcagcagcaacagaggaaccagaagtgatcccagatcccgccaagcagacagacagagtggtgaaaatagcaggaattagtgctggaattttggtgttcatcctccttctcctagttgtcatattaattgtaaaaaagagnnnnnnnnnnnnnnnnnnnnnnnnnnnnnnnnnnnnnnnnnnnnnnnnnnnnnnnnnnnnnnnnnnnnnnnnnnnnnnnnnnnnnnnnnnnnnnnnnnnnnnnnnnnnnnnnnnnnnnnnnnnnnnnnnnnnnnnnnnnnnnnnnnnnnnnnnnnnnnnnnnnnnnnnnnnnnnnnnnnnnnnnnnnnnnnnnnnnnnnnnnnnnnnnnnnnnnnnnnnnnnnnnnnnnnnnnnnnnnnnnnnnnnnnnnnnnnnnnnnnnnnnnnnnnnnnnnnnnnnnnnnnnnnnnnnnnnnnnnnnnnnnnnnnnnnnnnnnnnnnnnnnnnnnnnnnnnnnnnnnnnnnnnnnnnnnnnnnnnnnnnnnnnnnnnnnnnnnnnnnnnnnnnnnnnnnnnnnnnnnnnnnnnnnnnnnnnnnnnnnnnnnnnnnnnnnnnnnnnnnnnnnnnnnnnnnnnnnnnnnnnnnnnnnnnnnnnnnnnnnnnnnnnnnnnnnnnnnnnnnnnnnnnnnnnnnnnnnnnnnnnnnnnnnnnnnnnnnnnnnnnnnnnaggtcccgttcatgaaacagtatatgatttctggaggatgatttggcaagaacaatctgcttgcattgtgatggttacaaatttagttgaggttggccgggtnnnnnnnnnnnnnnnnnnnnnnnnnnnnnnnnnnnnnnnnnnnnnnnnnnnnnnnnnnnnnnnnnnnnnnnnnnnnnnnnnnnnnnnnnnnnnnnnnnnnnnnnnnnnnnnnnnnnnnnnnnnnnnnnnnnnnnnnnnnnnnnnnnnnnnnnnnnnnnnnnnnnnnnnnnnnnnnnnnnnnnnnnnnnnnnnnnnnnnnnnnnnnnnnnnnnnnnnnnnnnnnnnnnnnnnnnnnnnnnnnnnnnnnnnnnnnnnnnnnnnnnnnnncagtgctggtgctggacgaactggctgctacattgtgattgacatcatgctggacatggctgaaagagagggtgttgttgacatctacaattgtgtcaaagccttaagatctcgacgtattaatatggtccagacagaggnnnaggaacagtacatttttattcatgatgccattttagaagcctgcttatgtggagaaactgccatacctgtctgtgaatttaaagctgcatattttgatatgattagaatagactcccagactaactcttcacatctcaaggatgaatttcagnagactctgaattcagtcacccctcgactacaagctgaagactgcagtatagcgtgcctgccaaggaaccatgacaagaatcgtttcatggacatgctgccacctgacagatgtctgccttttttaattacaattgatggggagagcagtaactacatcaatgctgctcttatggacnagctacaggcaaccagctgctttcatcgtcacacaataccctctgccaaacactgtgaaagacttctggagattagtgtatgattatggctgtacctccattgtgatgttaaacgaagttgacttgtcccaggncagggctgccctcagtactggccagaggaagggatgctacgatatggccccatccaagtggaatgcatgtcttgttcaatggattgtgatgtgatcaaccggatttttaggatatgcaatctaacaagannnnnnnnnnnnnnnnnnnnnnnnnnnnnnnnnnnnnnnnnnnnnnnnnnnnnnnnnnnnnnnnnnnnnnnnnnnnnaaggtcattcttgaactgatactgcaggtggaaaagtggcaggaggaatgcgaggaaggggaaggccggacgattatccactgcctnaaatggtggcgggcgaagtggcatgttctgtgcgataggcatcgttgttgaaatggtgaaacggcaaaacgttgtcgatgttttccatgcggtaaagacgctaaggaacagcaagccaaacatggtggaagcaccggn

SEQ ID NO: 22633 - DNA, 639 bp, Macaca Mulatta
agagtttgcaacaggtgtgatgtccaacaaaactgtccagaccgcagctgcaaatgcagcttcaactgcagcatctagtgcagctcagaatgctttcaagggtaaccaaatttaagaatcttcaaacaatacactgttaccttttgactgtacttttttctccagttactgtattctacaaatatttttatgttcgaaacacagagtacagacagcatggatatttcctgttcacttgtgcatgggctaaaaccaggaaaacttccttgtcttattactttacctaatagtttcttaatatttcagtgccccttgcagaaaaaatattacatgctaaataaatattctccatattttttgggggatgatgttcagtgaattatttcagtggtgacccactgaaaattaataatggtacttatgattaaaaacacatttaatactaactgcagtagttctttcaagaatctttagagataaggattgcgcattggaaaagtaaactatgtttcattcctttttccctatttatattgaaagaaataggccagcagagacttagggattttaaattggcttgctttttagctgtttcagtcaccagtgaagagcctatttgcattttgtagtagataatgt

SEQ ID NO: 22634 - DNA, 660 bp, Macaca Mulatta
  misc_feature (1)...(660): n = A,T,C or G
tacaacaacaaaacctacagagtggatgatattgattggaagcagaatcctgaagacacatttaacagatcagatggtagcaaaatcacctatatagactactacaggcagngcagcaacataaagaaattgtcactgtgaagaaacagccacttttggtcagccagggcagatggaaaaagggcctaacgggtacacagcgtgaacctatcctgctgattcctcagctatgctccatgacaggtnnnnnnnnnnnnnnnnnnnnnnnnnnnnnnnnnnnnnnnnnnnnnnnnnnnnnnnnnnnnnnnnnnnnnnnnnnnnnnnnnnnnnnnnnnnnnnnnnnnnnnnnnnnnnnnnnnnnnnnnnnnnnnnnnnnnnnnnnnnnnnnnnnnnnnnnnnnnnnnnnnnnnnnnnnnnnnnnnnnnnnnnnnnnnnnnnnnnnnnnnnnnnnnnnnnnnnnnnnnnnnnnnnnnnngttaaagccaattcacaaggagactggtcaagagaaataagagaattgccgttacttaatgcaatgccgctacatagttggctcatactccatagtaggagcagtcacagggaagccatgtccttaaagagtcatctacagagtgtcacagcccccatgggcataactatgaaaccagcagaaat

SEQ ID NO: 22635 - DNA, 652 bp, Macaca Mulatta
gggttttaaacgaatggggtaggccctagaggtcagatgtctgggtccccagtggggcagaatccatggctcttgaggaggtgggggaagggttctatctggaaccctcttggatggcctgaagtgatgctgggagatttagctactggcctgctagggaggaaggagttaagtggctcttctgtcacctgagctgggcatcaaatggccgggtccaggttcctcttggaaggggcggagccagacctgtcctgggcctctcctgcagcctcaggcccctgtgactacagcgtaggagctctgggacacccttgtctagggaagaggtcttactggctcccctcacctgactaagtgtccccaggcccccagccatgaaaaaatacctgcctctgggccctagacttggctcagagcccttcaaccaccccccgggagcacctagggagccggacattgttggatgcaccgtctgccccgcatccggagaggagggcacgaggtgggggcctgggctttggaagcttgtttccaagagggtaggcgtggtggcaggggccatatgagggtaggaggtgccatggctgtgatcacctggggacacaggagaggccgccggggttggggtgagggtaggctgaaaagtgaggtg

SEQ ID NO: 22636 - DNA, 327 bp, Macaca Mulatta
  misc_feature (1)...(327): n = A,T,C or G
gaaagctgggctggagaactcgctggctgagacagagtgccgctatgccacgcagctgcagcagatccaggggctcatcggtggcctggaggcccagctgagtgagctccgatgcgagatggaggctcagaaccaggagtacaagatgctgcttgacataaagacgcggctggagcaggagattgccacctaccgcagcctgctggagggccaggatgccaannnnnnnnnnnnnnnnnnnnnnngcctcttccggaggtggcggtagcagcagcaatttccgcatcaacgtagaggagtcagtggatggaaaggtggtttcttccc

SEQ ID NO: 22637 - DNA, 843 bp, Macaca Mulatta
  misc_feature (1)...(843): n = A,T,C or G
tcattctgcagtacctccaagcctttggctggctctgggtgtggctgactatggtcacttacttagggcagaatttggtgggcattggacagaatctatggcttagtgcatgggcaaaagaagcaaaaaacatgaatgacttcacagaatggaagcaaataagaagcaataaacttaatatctatggaatattgggattaataaaaggnnnnnnnnnnnnnnnnnnnnnnnnnnnnnnnnnnnnnnnnnnnnnnnnnnnnnnnnnnnnnnnnnnnnnnnnnnnnnnnnnnnnnnnnnnnnnnnnnnnnnnnnnnnnnnnnnnnnnnnnnnnnnnnnnnnnnnnnnnnnnnnnnnnnnnnnnnnnnnnnnnnnnnnnnnnnnnnnnnnnnnnnnnnnnnnnnnnnnnnnnnnnnnnnnnnnnnnnnnnnnnnnnnnnnnnnnnnnnnnnnnnnnnnnnnnnnnnnnnnnnnnnnnnnnnnnnnnnnnnnnnnnnnnnnnnnnnnnnnnnnnnnnnnnnnnnnnnnnnnnnnnnnnnnnnnnnnnnnnnnnnnnnnnnnnnnnnnnnnnnnnnnnnnnnnnnnnnnnnnnnnnnnnnnnnnnnnnnnnnnnnnnnnnnnnnnnnnnnnnnnnnnnnnnnnnnnnnnnnnnnnnnnnnnnnnnnnnnnnnnnnnnnnnnnnnnnnnnnnnnnnnnnnnnnnnnnnnnnnnnnnnnnnnnngtggctgtctgttagactcgaatttcttggcaccttaatggtgctttttgctgcactgcttgctgtgttggctggcaattctatagattcagcaacagttggtttgtccatatcctatgccctaaa

SEQ ID NO: 22638 - DNA, 1988 bp, Macaca Mulatta
  misc_feature (1)...(1988): n = A,T,C or G
ttcctctaaatattcctcactgctccttcattcccaagaagaaaagacagtactgctacttccaaaactcagacangacttgaaggtgaagtgaatcctaattccttgtcaaccagctataagacagtgtcattgccattaagctctccaaacataaagctgaatctcactagccctaaaaggggtcagaaaagagaagaagggtggaaagaagttgtacgaaggtnnnnnnnnnnnnnnnnnnnnnnnnnnnnnnnnnnnnnnnnnnnnnnnnnnnnnnnnnnnnnnnnnnnnnnnnnnnnnnnnnnnnnnnnnnnnnnnnnnnnnnnnnnnnnnnnnnnnnnnnnnnnnnnnnnnnnnnnnnnnnnnnnnnnnnnnnnnnnnnnnnnnnnnnnnnnnnnnnnnnnnnnnnnnnnnnnnnnnnnnnnnnnnnnnnnnnnnnnnnnnnnnnnnnnnnnnnnnnnnnnnnnnnnnnnnnnnnnnnnnnnnnnnnnnnnnnnnnnnnnnnnnnnnnnnnnnnnnnnnnnnnnnnnnnnnnnnnnnnnnnnnnnnnnnnnnnnnnnnnnnnnnnnnnnnnnnnnnnnnnnnnnnnnnnnnnnnnnnnnnnnnnnnnnnnnnnnnnnnnnnnnnnnnnnnnnnnnnnnnnnnnnnnnnnnnnnnnnnnnnnnnnnnnnnnnnnnnnnnnnnnnnnnnnnnnnnnnnnnnnnnnnnnnnnnnnnnnnnnnnnnnnnnnnnnnnnnnnnnnnnnnnnnnnnnnnnnnnnnnnnnnnnnnnnnnnnnnnnnnnnnnnnnnnnnnnnnnnnnnnnnnnnnnnnnnnnnnnnnnnnnnnnnnnnnnnnnnnnnnnnnnnnnnnnnnnnnnnnnnnnnnnnnnnnnnnnnnnnnnnnnnnnnnnnnnnnnnnnnnnnnnnnnnnnnnnnnnnnnnnnnnnnnnnnnnnnnnnnnnnnnnnnnnnnnnnnnnnnnnnnnnnnnnnnnnnnnnnnnnnnnnnnnnnnnnnnnnnnnnnnnnnnnnnnnnnnnnnnnnnnnnnnnnnnnnnnnnnnnnnnnnnnnnnnnnnnnnnnnnnnnnnnnnnnnnnnnnnnnnnnnnnnnnnnnnnnnnnnnnnnnnnnnnnnnnnnnnnnnnnnnnnnnnnnnnnnnnnnnnnnnnnnnnnnnnnnnnnnnnnnnnnnnnnnnnnnnnnnnnnnnnnnnnnnnnnnnnnnnnnnnnnnnnnnnnnnnnnnnnnnnnnnnnnnnnnnnnnnnnnnnnnnnnnnnnnnnnnnnnnnnnnnnnnnnnnnnnnnnnnnnnnnnnnnnnnnnnnnnnnnnnnnnnnnnnnnnnnnnnnnnnnnnnnnnnnnnnnnnnnnnnnnnnnnnnnnnnnnnnnnnnnnnnnnnnnnnnnnnnnnnnnnnnnnnnnnnnnnnnnnnnnnnnnnnnnnnnnnnnnnnnnnnnnnnnnnnnnnnnnnnnnnnnnnnnnnnnnnnnnnnnnnnnnnnnnnnnnnnnnnnnnnnnnnnnnnnnnnnnnnnnnnnnnnnnnnnnnnnnnnnnnnnnnnnnnnnnnnnnnnnnnnnnnnnnnnnnnnnnnnnnnnnnnnnnnnnnnnnnnnnnnnttcaccaggatccccagtctatttttgttacaaatccagttactttaacaccacctcaaggcccaccagctacagtgcagctttcttcagctgtgaacattatgaatggttctcagatgcacataaacccagcaaataaatctttgccacctacatttggcccagccacacttttcaatcacttcagcagtctttttgatagtagtcaggtgccatctaaccagggctggggagatggtccactgtcctcacgagtggctgcagatgcctctttcactgttcagtcagcgttcctgggtaactcagtgcttggacacttggaaaacatgcatcctgataactcaaaggcacctggcttcagaccaccttcccagcgagtttctactagtccagttgg

SEQ ID NO: 22639 - DNA, 611 bp, Macaca Mulatta
ggcagtggctacttgaagtcaccagattcgaatcgagtcactggcatttacgaactcagcttatgcaaaatgtcagacacaggtagtccaggcatgcagagaaggagaagaaaaatcttagatacctcagtggcatatgtgcggggagaagagaacttagcaggctggcggccccgtggagacagtctcatccttgagcaccagtgggagctggagaagctggagctcctacatgaggtggaaaaaacccgccactttttgctgctgcgtgagagacttggtgacagcatccccaaatccatgagtgactcgttatcccccagcctcagcagtgggaccctcagcacctccaccagtatctcctctcagatctcaaccaccacctttgaaagcgccatcacacccagcgagagcagtggctacgattcagcagacatcgaaagcctggtggaccgagagaaagagctggctaccaagtgcctgcaacttctcacccacactttcaacagagaattcagccaggtgcacggcagcatcagtgactgtaagttgtctgatatctctccaattggacgggatccctcggagtccagtttcagcagtgccaccct

SEQ ID NO: 22640 - DNA, 232 bp, Macaca Mulatta
gttgcagtcacatgaatccccctgccgttccagaacgcttctgccaccacccagcagatcatccctcatcgtgtcttggcccctgtgtgcttcacgggtgctgcccaagagacccttctgcagctgatccctccttgcctctcagcagcacattctgttctgggaacacacccgttctctcggctggatgttctcatcgtccctgccaactttccaagtctggggatggcca

SEQ ID NO: 22641 - DNA, 328 bp, Macaca Mulatta
catagcttcagatcagtactgcatagccacggtgctcagtgaagcaagcctctgggtcacattatgagaactgcctgaagacgtgtgtttgcatgctcatagccagtggaatttatcacagtgtctgagcacagagcagaatatatcccttgaaggcagtcgggatcaatagcaaacaggctttccactagctccatgctgatggtcttctctccagaagacaccttgagctaggtggtaactcctgatcactggagcagtcacccaccctgagggcctctggctgatgtgtttctagtctcatggctacttctgttttcttttagca

SEQ ID NO: 22642 - DNA, 927 bp, Macaca Mulatta
ttatttagcaacaagtctaacctcattaaacatcggagagttcacactggggaaaggccatatgagtgcagtgaatgtgggaaatcctttagccaaaggtctgcactccttcaacatcggggagttcacactggggagaggccttatgagtgcagtgaatgtgggaagttctttacatatcattccagtctcataaagcaccagaaagttcatagtggatccaggccttatgagtgcagcgagtgtgggaagtcatttagccaaaactctagcctcattgaacatcatagagttcacactggagaaaggccttataagtgcagcgaatgtgggaaatcctttagccaaaggtctgcgctccttcaacatcggggagttcacactggggagaggccttatgagtgcagtgaatgtgggaagttctttccctacagctccagtctccgaaaacaccagagagttcacactggatcaagaccctatgagtgcagtgaatgtgggaaatcctttactcaaaattccggcctcattaagcacagaagggttcacactggggagaagccttatgagtgcactgaatgtgggaaatcctttagccataactccagccttattaaacatcagagaattcatagtcgataaaagccttgagtggcaaatgtggaaaatctgttagcaccctggagaaagtccttgagtacacagtgaatgtgagaaagcttcagctgaaggctgtatctcattgagtgccacagaatgcacaagggaaagacacttttgatatgtagggatgtccagttgatataacagttctgaaggagatcccttatgagggtggcatcagcctgaattaaacatcctctatctgaacatctgcataaattccaaggtatgtgggaactgcattgcacctttgccccgcccagg

SEQ ID NO: 22643 - DNA, 1248 bp, Macaca Mulatta
  misc_feature (1)...(1248): n = A,T,C or G
gatgcatctgcaagagtgttcatactacctccctccacacagagatcaggcatctgaggcacagggagggaaacagaggcagggcccaaacttcacagcacaattcagtgggtcttaaaccaggccattgtccctcctgctgactacacacaggctctgcctaccagctgacatgctacttctccaactgggcccagtaccggtcaggtctggggcgcttcacgcctgacgacatcagcccctgcctctgtacccacctgatctacgcctttgctgggatgcagaacaacaagatcaccaccatcgaatggaatgatgtgactctctaccaagctttcaatggcctgaaaaataagaacaggcagctgaaaactctcctggccattggaggctggaacttcgggactgcccnnnnnnnnnnnnnnnnnnnnnnnnnnnnnnnnnnnnnnnnnnnnnnnnnnnnnnnnnnnnnnnnnnnnnnnnnnnnnnnnnnnnnnnnnnnnnnnnnnnnnnnnnnnnnnnnnnnnnnnnnnnnnnnnnnnnnnnnnnnnnnnnnnnnnnnnnnnnnnnnnnnnnaggaaatgcatcaagcttttgagcaggaggccaagcagagcaacaagcccaggctgttggtcactgctgcagtagctgctggtatctccaccatccagtctggctatgagatcccccagctgtcacagnnnnnnnnnnnnnnnnnnnnnnnnnnnnnnnnnnnnnnnnnnnnnnnnnnnnnnnnnnnnnnnnnnnnnnnnnnnnnnnnnnnnnnnnnnnnnnnnnnnnnnnnnnnnnnnnnnnnnnnnnggattatgtcatgaactactggaaggacaacggagccccagctgagaagctcctagttggattccctacctatggacacgtctcatcctgagcaacccctccaatgatggaattggtgcccccacctctggtgctggtcctgctgggccctataccagggagtctgggacatgggcttactnnnnnnnnnnnnnnnnnnnnnnnnnnnnnnnnnnnnnnnnnnnnnnnnnnnnnnnnnnnnnnnnnnnnnnnnnnnnnnnnnnnnnnnnnnnnnnnnnnnnnnnnnnnnnnnnnnnnnnnnnnnnnctcaatggcttaagagcaaccaatttggaggcgccatggtctgggccattgatctggatgactttactggcactttctgcaaccagggcaagtttcccctaatctccaccctgaaga

SEQ ID NO: 22644 - DNA, 788 bp, Macaca Mulatta
tgtctgtcagtgtggatgcactcacaatccacaaccacctgtggcagcccaagcggcccgcagtgccaaagaagggccagactcgtaaatgaccccggtgcagccggtgtccgaagggtgacccagactcgtaaatgacgccctcgtggctggcatccagagggtgccacggggtccttatttattgttttcatctatttgggtacgaagtgtgcaaagtcacagaccttttgcaaagacgtttctagacaacagaagaaaacccttctctcagcgctcatctcacgcagaggacgccaggcagggcgaggatgggggagtagatgccgcctttgcagtggctcgcactgctgtggccaccactgaccactgaggctcccggaggagggtgttcacagcgaggtcccaggccacggagctcccttacttgaagttctccttcagcatagattagatgcgatccactttgctttctcgcttctcacctcacccccttgcacattgcctgacaccctcatgttggccagctgtaatctcatgtgactgtaggactgaggctcaatcttggcttggggtgtttgaatgtctatagcaaaggaattcataatgggaaatctttttcatttgagaaattgtatgatacttattgattgtgtctactgccaacatttatattcaattctaagatttctgaaaaaaaattcttatcccttgctgctcagaaaaagtttactggaaataccagttcactaaaagcactgaaatctgcaaagtctgtcttctgctaa

SEQ ID NO: 22645 - DNA, 1442 bp, Macaca Mulatta
  misc_feature (1)...(1442): n = A,T,C or G
aggtacttggaccagtcacagcccagcaaggcagagcaggatgcttctcttcctcctggcacccatgaggccctgcttcagacagcgcttcctcctcctccttctcccaccaggcctgtgtctcctccccaaaagacaaaagaggcaccaaacacccaagcccannnnnnnnnnnnnnnnnnnnnnnnnnnnnnnnnnnnnnnnnnnnnnnnnnnnnnnnnnnnnnnnnnnnnnnnnnnnnnnnnnnnnnnnnnnnnnnnnnnnnnnnnnnnnnnnnnnnnnnnnnnnnnnnnnnnnnnnnnnnnnnnnnnnnnnnnnnnnnnnnnnnnnnnnnnnnnnnnnnnnnnnnnnnnnnnnnnnnnnnnnnnnnnnnnnnnnnnnnnnnnnnnnnnnnnnnnnnnnnnnnnnnnnnnnnnnnnnnnnnnnnnnnnnnnnnnnnnnnnnnnnnnnnnnnnnnnnnnnnnnnnnnnnnnnnnnnnnnnnnnnnnnnnnnnnnnnnnnnnnnnnnnnnnnnnnnnnnnnnnnnnnnnnnnnnnnnnnnnnnnnnnnnnnnnnnnnnnnnnnnnnnnnnnnnnnnnnnnnnnnnnnnnnnnnnnnnnnnnnnnnnnnnnnnnnnnnnnnnnnnnnnnnnnnnnnnnnnnnnnnnnnnnnnncagggcttccgaagtctggaagacatccgcagccaggcctccctgacaacccagcaggccattggcctgaagcattacaatgacttcctggaacgcatgcccagggaggaggctacagagattgagcagacagnagaaagcatgccaggcctttagctccggactgctatgtgtggcatgtggttcataccgacgtggaaaggcaacctgtgctgatgacgacgtgatcatcactcacccagatggactgacccaccggagaatcttcagccgtctgcttgagagacttcgnnnnnngggttcctcacagatgacttggtgagccaagaggagaatggtcagcaacagaagtacttgggggtgtgccggctcccagggccagggtggcgacaccggcgcctggacatcatcgtggtgccctacagcgagtttgcctgtgccctgctctactttaccggctctgcacacttcaaccgctccatgcgagccctggctaagaccaagggcatgagtctgtcagaacatgccctcagcactgctgtggtccggaacacccatggctgcaagatggggcctggccgagtgctgcccactcccactgagaaggatgtcttcaggctcttaggcctcccctaccgagaacctgctgagcgggactggtgacccatggctgggggtgcggaggagagctgagttggactggctacccctcctggccacccagtggagtactccctccagcctcagctggccaaaccttgctgctccactaccagcttcctcagcgag

SEQ ID NO: 22646 - DNA, 145 bp, Macaca Mulatta
ggtgggcttcatagactatattgttcatcccctctgggagacatgggcagacctcgtccaccctgacgcccaggacattttggacactttggaggacaatcgtgaatggtaccagagcacaatccctcagagcccctctcctgca

SEQ ID NO: 22647 - DNA, 644 bp, Macaca Mulatta
ccaactctagagaaaataccatctaggtccaatagttttgctaactgaactgtttattcttttactctggaaagctatagatgagtattaatatattaggttcagagttccctgtttttaaattttccatatgaatattacaagacaatggggaaaaccacattgcatataattgtttaattataggaagagcagaagaaattcaaggaagagtattcacctgaccctaattttttttccagataacttctacaatcgaagaccccagcatttttggccatgtagaagaaatgctgaaacaaacataatgagtttgttttattcctattttgagttgatttaatttcttaattgaaattaaattatttgagttgtttctcagaaataaatatttcagtagaaattactgcaaactgaaacgcgaattgtaaaacttggcctaaacaaatctaatgaaaacttgtgaaagacctgtgccttttggttgatttgaccctgttagcattgttattagttatctataacatggctcattatacgtcatctactgctttaggaaaaatgtatctagtgtattatttttaaaattgtacctcccaagaaaaacactttaattgaaagcaacactaatatagagacacttt

SEQ ID NO: 22648 - DNA, 597 bp, Macaca Mulatta
  misc_feature (1)...(597): n = A,T,C or G
gtgatgaaactacagaatctctttgtagatgattcaggtcgatacttggctattcaattccatctggaatgtgcatatgtgtttttatattattatgagtacagaaaagcaaaagatcagttgaatattgctaagaacatcagccaattacaaattgatttgacaggtnnnnnnnnnnnnnnnnnnnnnnnnnnnnnnnnnnnnnnnnnnnnnnnnnnnnnnnnnnnnnnnnnnnnnnnnnnnnnnnnnnnnnnnnnnnnnnnnnnnnnnnnnnnnnnnnnnnnnnnnnnnnnnnnnnnnnnnnnnnnnnnnnnnnnnnnnnnnnnnnnnnnnnnnnnnnnnnnnnnnnnnnnnnnnnnnnnnnnnnnnnnnnnnnnnnnnnnnnnnnnnnnnnnnnnnnnnnnnnnnnnnnnnnnnnnnnnnnnnnnnnnnnnnnnnnnnnnnnnnnnnnnnnnnnnnnnnnnnnnnnnnnnnnnnnnnnnngtttgctttcacaaccaaagttctgggccattcagacatcggccttgatcctccggacaaaacttgagagaggaagtacacgccgagtggaacgggcaatgaggcagacacagg

SEQ ID NO: 22649 - DNA, 663 bp, Macaca Mulatta
agtgggggcccctgaagccactgatggaagccacactacctgggcatcggaccatgaacccctgtcctgtatgggaacggaagagtggttatgtgttcctgttcttcatctgtgtgcggggccatgtcacagagcgtcaacagattgtatcaggcaggaatgctgcccgcctttgcttcatctgcagtcaggatgctggatgttcatggagtgaggtgagggacttgactgaggaggtcattggctcagagctgaagcactgggccacatttgctgtgggcccaggtcatggcatccagctgcagtcagggagactcgtcatccctgcatatacctactacatcccttcctggttcttttgcttccagctaccatgtaaaaccaggcctcattctctgatgatctatagtgatgacctaggggtcacatggcaccatgggagactcattaggcctatggttacagtagaatgcgaagtggcagaggtgactgggagggctggccaccctgtgctatattgcagtgcccggacaccaaacaggtgccgggcagaggctctcagcactgaccatggtgaaggctttcagaggctggccctgagtcaacagctctgtgagcccccacatggttgccaaaagggaagtgtggtaagtttccggcccc

SEQ ID NO: 22650 - DNA, 248 bp, Macaca Mulatta
agcctcaggattcagccgacatcagagtttccaccctggcgagaaaacctaggaatgtaagacatgtgggaaggcccttagacaacttacccaggttactggacatgggagaattcatgacctaacataattaaagtaggaaaccgttctcatgccatttgtcatggatcatcagcagattccatatgtgggtcaaatacaatggatgtgggaattccttttacttcatattcactttttccagaatt

SEQ ID NO: 22651 - DNA, 5762 bp, Macaca Mulatta
  misc_feature (1)...(5762): n = A,T,C or G
gttctctgctgctactgtaaaaacaaaatgagtggtnnnnnnnnnnnnnnnnnnnnnnnnnnnnnnnnnnnnnnnnnnnnnnnnnnnnnnnnnnnnnnnnnnnnnnnnnnnnnnnnnnnnnnnnnnnnnnnnnnnnnnnnnnnnnnnnnnnnnnnnnnnnnnnnnnnnnnnnnnnnnnnnnnnnnnnnnnnnnnnnnnnnnnnnnnnnnnnnnnnnnnnnnnnnnnnnnnnnnnnnnnnnnnnnnnnnnnnnnnnnnnnnnnnnnnnnnnnnnnnnnnnnnnnnnnnnnnnnnnnnnnnnnnnnnnnnnnnnnnnnnnnnnnnnnnnnnnnnnnnnnnnnnnnnnnnnnnnnnnnnnnnnnnnnnnnnnnnnnnnnnnnnnnnnnnnnnnnnnnnnnnnnnnnnnnnnnnnnnnnnnnnnnnnnnnnnnnnnnnnnnnnnnnnnnnnnnnnnnnnnnnnnnnnnnnnnnnnnnnnnnnnnnnnnnnnnnnnnnnnnnnnnnnnnnnnnnnnnnnnnnnnnnnnnnnnnnnnnnnnnnnnnnnnnnnnnnnnnnnnnnnnnnnnnnnnnnnnnnnnnnnnnnnnnnnnnnnnnnnnnnnnnnnnnnnnnnnnnnnnnnnnnnnnnnnnnnnnnnnnnnnnnnnnnnnnnnnnnnnnnnnnnnnnnnnnnnnnnnnnnnnnnnnnnnnnnnnnnnnnnnnnnnnnnnnnnnnnnnnnnnnnnnnnnnnnnnnnnnnnnnnnnnnnnnnnnnnnnnnnnnnnnnnnnnnnnnnnnnnnnnnnnnnnnnnnnnnnnnnnnnnnnnnnnnnnnnnnnnnnnnnnnnnnnnnnnnnnnnnnnaggagaagagacaaatatcactttaaatgatctcaagccagccacggattaccatgcaaannnnnnnnnnnnnnnnnnnnnnnnnnnnnnnnnnnnnnnnnnnnnnnnnnnnnnnnnnnnnnnnnnnnnnnnnnnnnnnnnnnnnnnnnnnnnnnnnnnnnnnnnnnnnnnnnnnnnnnnnnnnnnnnnnnnnnnnnnnnnnnnnnnnnnnnnnnnnnnnnnnnnnnnnnnnnnnnnnnnnnnnnnnnnnnnnnnnnnnnnnnnnnnnnnnnnnnnnnnnnnnnnnatgggctcacagaaacaatttaaaattactaaactgtcaccagcaatgggctgtaaattcagactgtcggccagaaatgactatggtacaagnagtggttttagtgaagaagtcttatattacacttcaggctgtgctccttctatgccagcaagtcctgtgttaacaaaggctggaattacttggttatccttacagtggagtaagccttcaggaacaccatcagannnnnnnnnnnnnnnnnnnnnnnnnnnnnnnnnnnnnnnnnnnnnnnnnnnnnnnnnnnnnnnnnnnnnnnnnnnnnnnnnnnnnnnnnnnnnnnnnnnnnnnnnnnnnnnnnnnnnnnnnnnnnnnnnnnnnnnnnnnnnnnnnnnnnnnnnnnnnnnnnnnnnnnnnnnnnnnnnnnnnnnnnnnnnnnnnnnnnnnnnnnnnnnnnnnnnnnnnnnnnnnnnnnnnnnnnnnnnnnnnnnnnnnnggaaacaaatgggaaatgatatacagtggcgctaccagggaacatctttgtgatcgactgaatccaggctgtttctatcgtnnnnnnnnnnnnnnnnnnnnnnnnnnnnnnnnnnnnnnggtctctgaatctttacttgtgcagactccagctgtgcctcctggcccatgcctccctcccagattgcagggtagacccaaagcaaaagaaatacagttacgatggggnggaccccctctggttgatggtggatcacccatttcctgttacagtgtggaaatgtctcctatagaaaaagatgaacctagagaagtttaccaaggtaaagaagtagaatgtacagtgagcagccttcttcctggaaagacatacagcttcagactgcgtgcagctaacaaaatggggngtttggaccattttcagaaaaatgtgatattactacagcccctgggccaccagatcagtgcaagccccctcaagtgacatgcaaatctgcaacttgtgcacaagtgaattgggaggtnnnnnnnnnnnnnnnnnnnnnnnnnnnnnnnnnnnnnnnnnnnnnnnnnnnnnnnnnnnnnnnnnnnnnnnnnnnnnnnnnnnnnnnnnnnnnnnnnnnnnnnnnnnnnnnnnnnnnnnnnnnnnnnnnnnnnnnnnnnnnnnnnnnnnnnnnnnnnnnnnnnnnnnnnnnnnnnnnnnnnnnnnnnnnnnnnnnnnnnnnnnnnnnnnnnnnnnnnnnnnnnnnnnnnnnnnnnnnnnnnnnnnnnnnnnnnnnnnnnnnnnnnnnnnnnnnnnnnnnnnnnnnnnnnnnnnnnnnnnnnnnnnnnnnnnnnnnnnnnnnnnnnnnnnnnnnnnnnnnnnnnnnnnnnnnnnnnnnnnnnnnnnnnnnnnnnnnnnnnnnnnnnnnnnnnnnnnnnnnnnnnnnnnnnnnnnnnnnnnnnnnnnnnnnnnnnnnnnnnnnnnnnnnnnnnnnnnnnnnnnnnnnnnnnnnnnnnnnnnnnnnnnnnnnnnnnnnnnnnnnnnnnnnnnnnnnnnnnnnnnnnnnnnnnnnnnnnnnnnnnnnnnnnnnnnnnnnnnnnnnnnnnnnnnnnnnnnnnnnnnnnnnnnnnnnnnnnnnnnnnnnnnnnnnnnnnnnnnnnnnnnnnnnnnnnnnnnnnnnnnnnnggtttgtatccctatacagaggaccatgtcatacatacaaagtacaaagacttaatgagtcaacatcctataaattctgtattcaagcttgtaatgaagctggggaaggtcccctctcccaagaatatattttcactactccaaaatctgtcccacctgccttgaaagnnnnnnnnnnnnnnnnnnnnnnnnnnnnnnnnnnnnnnnnnnnnnnnnnnnnnnnnnnnnnnnnnnnnnnnnnnnnnnnnnnnnnnnnnnnnnnnnnnnnnnnnnnnnnnnnnnnnnnnnnnnaacagatttacaaaggtcccgactcttccttccggtattccagccttcagctgaactgtgaatatcgcttccgtgtatgtgccattcgccagtgcccagactctctgggacaccaggatctcgtaggttcctacagcaccacagtgctcttcatctctcagaggactggaccacccgccagcaccaacagagaccctgtggaaagcacaaagaccccgacgggcaccgaattgaagagcagtgtgctgccccccacccttggggctgtttgctttctttttccttttttattgcctttannnnnnnnnnnnnnnnnnnnnnnnnnnnnnnnnnnnnnnnnnnnnnnnnnnnnnnnnnnnnnnnnnnnnnnnnnnnnnnnnnnnnnnnnnnnnnnnnnnnnnnnnnnnnnnnnnnnnnnnnnnnnnnnnnnnnnnnnnnnnnnnnnnnnnnnnnnnnnnnnnnnnnnnnnnnnnnnnnnnnnnnnnnnnnnnnnnnnnnnnnnnnnnnnnnnnnnnnnnnnnnnnnnnnnnnnnnnnnnnnnnnnnnnnnnnnnnnnnnnnnnnnnnnnnnnnnnnnnnnnnnnnnnnnnnnnnnnnnnnnnnnnnnnnnnnnnnnnnnnnnnnnnnnnnnnnnnnnnnnnnnnnnnnnnnnnnnnnnnnnnnnnnnnnnnnnnnnnnnnnnnnnnnnnnnnnnnnnnnnnnnnnnnnnnnnnnnnnnnnnnnnnnnnnnnnnnnnnnnnnnnnnnnnnnnnnnnnnnnnnnnnnnnnnnnnnnnnnnnnnnnnnnnnnnnnnnnnnnnnnnnnnnnnnnnnnnnnnnnnnnnnnnnnnnnnnnnnnnnnnnnnnnnnnnnnnnnnnnnnnnnnnnnnnnnnnnnnnnnnnnnnnnnnnnnnnnnnnnnnnnnnnnnnnnnnnnnnnnnnnnnnnnnnnnnnnnnnnnnnnnnnnnnnnnnnnnnnnnnnnnnnnnnnnnnnnnnnnnnnnnnnnnnnnnnnnnnnnnnnnnnnnnnnnnnnnnnnnnnnnnnnnnnnnnnnnnnnnnnnnnnnnnnnnnnnnnnnnnnnnnnnnnnnnnnnnnnnnnnnnnnnnnnnnnnnnnnnnnnnnnnnnnnnnnnnnnnnnnnnnnnnnnnnnnnnnnnnnnnnnnnnnnnnnnnnnnnnnnnnnnnnnnnnnnnnnnnnnnnnnnnnnnnnnnnnnnnnnnnnnnnnnagtgtagaaatatgtattacacacatacactcactctgtcgggtataggctaattttgaagaactcccaaaagtttttgctgcttctcccataactgctgccaccaccatcagaattcataatcaaacctaacctttttgtttggggcaccaaatctgaagacaaaattaatttgcaccagtaaacttcaagctgctttctttcttgaaaactaaacgtttaatgtataatgtctgtttggatactgttccaaattgttgattgcatgtggttaatgttgcattagagcactttgcaattgcataattcattaatgttttgtgagcttgcatttgtgagttattggatgatcagactgaattttgtcaagtatcacattgtacatcttgcctagatgtcaatgactgccagtaataatacagtttataatgaaactatctacaattcctgttttagcacatctgttatccgtaaaacacctgtaactagcttttttaatttattatttgaattttaggatagcaaatcactaatttttagttgctgaggttggcattttagtgattaagcacttctgtcagtctttgaaaaaagaacgtatgttttgtgctttgaagatctctgaagaatttcttttataatagaatgggcatgtattgtaacagttttatgtcaaatgatctgtgctgtagaaaaacattaacccttgttcaaaaaagaaatggataaacttggcctttctaagtggtaagaatgacctgtcactataatatactgtatgtttacattttatttaaatttaatctcttatgtataagggtgataaccttcccccaaaacaacagtgattgcgattgttttctagaaacttctttaaagtgccacatttggcagtacaaatgagtctgagtgtaatagcccagagatttatatatagttgaatgtctaaaatggtaaaatgtgccactgtgtcaagttacagtggcttatgtttttcatagtaattcaaatgaacctcctatttttgatagtaaatgtcatttaatagtatacttgccatttgagcctcactgcaaaattagtgcagaagagaaaacaatttttaatgtaatcttgattttacctcatatgctgtacattccaaaaactctaaactttttaaagattatagatacactaccaaacatatcaccttaaaattgtataaggctgaatgaacttcatacaaatgaaaaaaagctcataaaaatacctaaactatgtagcaaaagtatctttaaaatccatggaaaataaaagttgtatcattctttttgagatatgtttattgtattcatatatattcattatttgctgcctgtttaagaaaatgaaatgttatggtctcccctcttccaatgagcttaaacatttttcccaacagtatacaaatcatcaacatgagaggatgtatatttattatataaagcccagtaaagaatgaaattagaagttttatcctag

SEQ ID NO: 22652 - DNA, 808 bp, Macaca Mulatta
  misc_feature (1)...(808): n = A,T,C or G
ggggcagttcggcggtcccgcgggtctgtctcttgcttcaacagtgtttggacggaacagatccggggactctttcttccagcctccgagcgccctccgatttcctctccacttgcaacctccgggaccatcttctcggccatctcctgcttctgggacctgccagcaccgtttttgtggttagctccgtcttgccgaccaaccatgagctcccagattcgtcagaattattccaccgacgtggaggcagccgtcaacagcctggtcaatatgtacctgcaggcctcctacacctacctctctctgggcttctatttcgaccgcgatgatgtggctctggaaggcgtgagccacttcttccgcgaattggccgaggagaagcgcgagggctacgagcgtctcctgaagatgcaaaaccggcgtggcgggcgcgctctttttcaggacgtcnagaagccagctgaagatgagtggggtaaagccgccggatgccatgaaagccggcatggggcctggagaaaaaactggatcaggccccttttgggatcttcatgcccctggggttctggccccccggggatccccgtcctctgtgagattcctggaagaaatcagctttcgtaaaatggacgaaggggagagcttgttccaagaaggaatggaggtggacccccacttagaggaaccctgcaacaaggagctgagagcggagtctacgaaagaaccgcggacactggggaccgaaataaaccgcttctgtccaaaagaggaggtgcagatctcgtcgctagggggcggcacagatgat

SEQ ID NO: 22653 - DNA, 639 bp, Macaca Mulatta
caaagagtaaacctggaccctcatgctgtctctgcctcctttctgctgccaccaccacctaactgaaagcctgggtccagaaggcctgggggaaggatgggaggatgcttggaccaggcctgagggaatagtaggaacaccctctagctcccaggttggaagagatattgctgtagccaagacacctaggctggagcccttcagaatactgccattgcccttggggtggggtggttgcactagtgtcatcaaccctgccatccccattaaattagtcccaacatgcatgtatgcatacatttatttaatcaacagcgctgattactaggcccctagctctgtcctgcattgttctgccctgaacaaaggttgatctagtccatagctaccatgccaacctgggagaatggtaaggaagtgagggaaggcttcatggagaaagcttttgacaggaatagcaggcttcctaggtacaggacttgaggctttgggctgcaagtggggtagggctgggtccatttggtagtgaagaaatggagtggggttttgacttccaggaggggtgtctggtgtggagttaaatacagcatcgaacttgcatatggttgaggagggctatagaaagggactgcgtgtgtg

SEQ ID NO: 22654 - DNA, 616 bp, Macaca Mulatta
  misc_feature (1)...(616): n = A,T,C or G
agatacagacatccangaaaaaacaggtgaatcacatgctttaaagaacactttctcttaggttccttgagatatgttcctccagtgcaagcaagataatggttacagaatttgctttacacaaaactttacaagaactcatctgttacacaaaagcaaggaataactagtttatattttccaataatgttcaaggttttctccttaatatgtttgaaattattgattttggcatttttgtaagcaatttatgtaattttatttgaaggaaatgttttatataatgtttttcccaacctaaacagggagagtcctaacagtgttgtgcttgtatgattatgagactttatttgcgtaagtgatactactatactttatttttgacccatgcctttttaagctgtttcatattgaaagttggaatattgtaaaaattttgtcaaagatgtactgtagtgctatttgaagtacctgttacaaaacacagttggccctctgtatccatgtactctgcatctgtggattaaaccaattgcagatcaaaaatattagaaaaaatattacaataataccaataaaaatgccatataacagttatttaaatagcatttacact

SEQ ID NO: 22655 - DNA, 446 bp, Macaca Mulatta
cggggcctaagtgggcggctctgaggagccgagcagggcggtgactctccacccgggtgctcgcaggtgtcccaggcagcagcggaactcctggctttctgcgaaacgcatgccaaagatgaccccctggtgacgccagtacccgccgcggagaaccccttccgcgacaagcgcctcttttgtgttctgctctgaaccctccagacagcttaccctcccctgccaaagtatggatccaataaacttggtaactgtggtagtgcctgtgctttcagggaaactgaggtacgcacagagcttggggccaccgtgggggaagctgtgtccgttctcattccttctgagtgtgtgtgttgggggtaggggtggacgtggagtgagtatgactccaccaaagcctcagaggagatgagtattcagtgctgtctcctccacgatcgatcctg

SEQ ID NO: 22656 - DNA, 86 bp, Macaca Mulatta
aattcgattttttaaccatgaaccagaagatgctgaagccacacggaacagctccggccctggtgactgaagagatgctacagcgg

SEQ ID NO: 22657 - DNA, 976 bp, Macaca Mulatta
  misc_feature (1)...(976): n = A,T,C or G
taggtttcaaggtcaccctcccacctttcgtgcataataaacgggccgcagacttccaggggaatgattttgnnnnnnnnnnnnnnnnnnnnnnnnnnnnnnnnnnnnnnnnnnnnnnnnnnnnnnnnnnnnnnnnnnnnnnnnnnagatcatgcccgagaagccagcagaggaaggaaatgattcaaagggagtcccagaagcatctggccctcaaaatgatgtgaagcagctgtgccccccgggaaaaccaagtacctctgagaagattaacaagagatctggnggacccaaaagggggaaacatgcctggacccacagactgtgtgagagaaagcagttggtgatttatgaagagatcagcgaccctgaggaagatgacgagtaactcnnnnnngatgtgacacatgcccatgatgagaagcagaacgtggtgacctttcaccaacatgggaatggctgctgacccctcgtcatcaggtgcatagcaagcgaaagcgagtgttcacaacagtgcaaacttgagcgtcatttttcttagtgtgccaagagttcaatgttagcgtttccgttgtattgtctaacagagtgccattctgttatacattatccttttcattgatgatcaacacatgcttaacacctatttcggtttggatatccatgcatctccctaaaaaacaagtatagtcagatattctctgcatagaacagcactaccctcctctctccccagatgtgactactgagggcagttctgagtgcttaatttcnnnnnnnnnnnnnnnnnnnnnnnnnnnnnnnnnnnnnnnnnnnnnnacaccaagtaccactataagcatctcccatctgcttttccccagtgccatgcgtcctggtcaagcccccctcactccgtatcctgttcagcatgtactcccctcatccaattcccgtgtatcacttactgacagttaataaacctttgcgaacgttc

SEQ ID NO: 22658 - DNA, 192 bp, Macaca Mulatta
aggccgcggacactgcagtgggctgggcgctcggctacatgctgaacctgactaacctgatccccgccgacccgccggggctgcgcaagggcacggacttcagctcttgggtcgtactcctgctgctcttcgcctccgcgctgctggctgcgcttgtcctgttttcgtaaggtgcactccgccaagctgcca

SEQ ID NO: 22659 - DNA, 569 bp, Macaca Mulatta
  misc_feature (1)...(569): n = A,T,C or G
tacaaaatttagctgagtgttatggcaggcgcctgtaatcccaactactcgggaggctgaggcaggagaatcacttgaacccaggaggtggaggttgcagtgagccaagatcatcatgtcactgcattccagcctgagcaacatagtgaaactgtnnnnnnnnnagagacctctgggacaatcattatcagatagaccccaaacctgtgatttttcttgggtaagattggtatttacttaggggtgctttaaaaatatatttttacatgtatatttgtaagaaattggnnnnnnnnnnnnnnnnnnnnnnnnnnnnnnnnnnnnnnnnnnnnnnnnnnnnnnnnnnnnnnnnnnnnnntcttactaaagtgaagttttcctaaggcaagcaagaagaggagtggaagcacagttgcctagatttggaggcacagctgttaggcttttcaagctgagtcttgtgcttgggttttccagattaatttgaaaagacctcccatcggtggctttgtacataaccaacaggcagatattgagtgccttggctcctagagttttgtggtggggtt

SEQ ID NO: 22660 - DNA, 821 bp, Macaca Mulatta
ggggctgctatggaggcgctgaccatgggtgtccgggcgctgcggctctggcgggtcgcatccggtttggggatcagctggagatttatagcaacatctccagcttctcagctgtcgccgacagaattgacagaaatgcggaatgacctctttaataaagagaaagccaggcagttatcattaactccccgaactgagaagatagaagttaagcatgttgggaaaactgaccccggtactgtcttcgtgatgaataaaaacatttcaactccctacagttgtgccatgcatttaagtgagtggtactgcaggaagtccattctggctctggtggatggacagccttgggacatgtataagcctttaacaaagtcgtgtgaaattaaatttcttactttcaaagatcgtgatccaggagaagtgaataaggcttattggcgttcctgtgctatgatgaatgggttgtgtgatagagagggcattcaaagatgaatatatgggtcaatttggttcaaagctcccggaagttccctgtaatttctggtgccttctggtttcgaacgtagtttttggatagcaaacttgatgaagttggatgccaaccaaaagagaaattttacgttcctttcacaaaagggatgcgtcatggcttttaattttattaaagaattctttccattttttgaaaactccttggggggttggaacccaaaagttggcccttgggaaaatatttcccccccaacccagttcccaaaatataattttctctaaaaaaaaagaagggctttcttccaaaaccctctgaaaagaaataattt

SEQ ID NO: 22661 - DNA, 211 bp, Macaca Mulatta
ccggctggagaggcctgggtgtgggccatgccctgtgcttgtggcagtaggtggctgcctgctggaagcctcacttgccctggcaggcaggggaggtaaaggacacgaggtcatttggagccctagtgccgggcagaggtgggatgcagggggctcctgaaagggggcgcctggaggcttccctatgggatgcttggactggtctccaagg

SEQ ID NO: 22662 - DNA, 2529 bp, Macaca Mulatta
  misc_feature (1)...(2529): n = A,T,C or G
ggaagagtcagtgaatggctgcagtgtgacaacatgcaccaccagtggctgctgcnnnnnnnnnnnnnnnnnnnnnnnnnnnnnnnnnnnnnnnnnnnnnnnnnnnnnnnnnnnnnnnnnnnnnnnnnnnnnnnnnnnnnnnnnnnnnnnnnnnnnnnnnnnnnnnnnnnnnnnnnnnnnnnnnnnnnnnnnnnnnnnnnnnnnnnnnnnnnnnnnnnnnnnnagccaactgggaaggagcttccagacagccggctcgttcaacccctggtctacatggagcgcctggaactcatcagaaacgtctgcagggatgacgccctgaagaatctctcgcacactcccgtctccaagtttgtcctggaccgaatatttgtctgtgacaagcacaggattcttttctgccagactcccaaagtggggaacacccagtggaagaaagtactgattgttcnnnnnnnnnnnnnnnnnnnnnnnnnnnnnnnnnnnnnnnnnnnnnnnnnnnnnnnnnnnnnnnnnnnnnnnnnnnnnnnnnnnnnnnnnnnnnnnnnnnnnnnnnnnnnnnnnnnnnnnnnnnnnnnnnnnnnnnnnnnnnnnnnnnnnnnnattgaaaacatacttcaagttttttattgtaagagatcccttcgaaagacttatttctgcatttaaggataaatttgttcacaatccccggtttgagccttggtacaggcatgagattgcccctggcatcatcagaaaatacaggaggaaccggacggagacccgggggatccagtttgaagatttcgtgcgctacctgggcgatccgaaccacagatggctagaccttcagtttggggaccacatcattcactgggtgacgtatgtggagctctgtgcgccctgtgagataatgtacagtgtgattggacaccacgagaccctggaggacgatgccccatacatcataaaagaagctggcattgaccacctggtatcatacctggtcatccctccaggcggggcattatcatgtataacagaaccaaagtgcagcactatcttctggacatcaacaagacatctgatgcccgtatgcacgtttcaaaggggactttaagctctttgggtatcagaaaccnnnnnttttactaaactaaggcatagaacctacaaatttgaatatctttgttagaccaggggctaaccaggtggagatctgagcacaaaatgacacttcctccaccacacctcctccttttaggatgtctgagatctcccatgggcctgtgagcacctcgacctatgacacagggccaaactgttaccacttagtttggatgtaagatgctctgaggacactgccccctcccctnnnnnnnnnnnnnnnnnnnnnnnnnnnnnnnnnnnnnnnnnnnnnnnnnnnnnnnnnnnnnnnnnnnnnnnnnnnnnnnnnnnnnnnnnnnnnnnnnnnnnnnnnnnnnnnnnnnnnnnnnnnnnnnnnnnnnnnnnnnnnnnnnnnnnnnnnnnnnnnnnnnnnnnnnnnnnnnnnnnnnnnnnnnnnnnnnnnnnnnnnnnnnnnnnnnnnnnnnnnnnnngaggagggacagagaagcaaggggactgctgaaaccacagaggctcttgcagcatcagatctgaggaataaaacggcacctctggccttcatctgggtgctgctacgattgtggaggcaaagcattctttctgtgactgttttgttcnnnnnnnnnnnnnnnnnnnnnnnnnnnnnnnnnnnnnnnnnnnnnnnnnnnnnnnnnnnnnnnnnnnnnnnnnnnnnnnnnnnnnnnnnnnnnnnnnnnnnnnnnnnnnnnnnnnnnnnnnnnnnnnnnnnnnnnnnnnnnnnnnnnnnnnnnnnnnnnnnnnnnnnnnnnnnnnnnnnnnnnnnnnnnnnnnnnnnnnnnnnnnnnnnnnnnnnnnnnnnnnnnnnnnnnnnnnnnnnnnnnnnnnnnnnnnnnnnnnnnnnnnnnnnnnnnnnnnnnnnnnnnnnnnnnnnnnnnnnnnnnnnnnnnnnnnatctccacctgtctcctccagggagctcccaccttggagctgaagactagcaggggccacgtgccagcatcacaggattcagtgtcgtttacatatttcgattcctttcatctcagcaaaatgggcaccgccagagccatttctcatcatgccaccatcctggaccatgtgactggaaggtgggtaaccaagttcaccagcaataaaacccatggcccaggtagcctccagcagcgtgacttcctggcagcgaggtaggccctggtgcagggcaagccacagcgaccatctcagataccatccacagccagggccgccatgacccgggacagtttcctggggtgagtgccagcctgagcctgcatggtgctgccgagcccggggtagaggagggagtcaggctttgcttcaaggaggcctctaccttttctcagaatggtttcctgaatgtgtcaatgtgaaagtaaaataaaatgtatgtgccaa

SEQ ID NO: 22663 - DNA, 126 bp, Macaca Mulatta
tatgctcctatactggtgttacgtgtctcctcatccctcaccctgacctttctcctgtcctcctcttggctggaagaagctagcctcctgggagtatagttttctgttttaaatcccccacccctg

SEQ ID NO: 22664 - DNA, 442 bp, Macaca Mulatta
cataagcagctttatgggtcctgaaagtcaagggtgcccaggggtgattgtctctgagccctgttatccctcccccatggccacagagcaggcaagggggcagcacggcccagacccggccactggccctcagaagccccctgcaggggttgtgactcccaagagtgatgcagaggagcccccgctgaccaggaagaggagcaagaaggagagggggctccgagggtctcgaaagcgcaccggcagctctggggagcagtcaggccccgaggccccggggagcagcaataaccctccgaggactggagagggcccagtgggggcaccccctgcatcccctgggccggcctcttctcgccagtcccaccgacatcgtcctgactcccggcatgatgctgctcagaggatgtacgggcccctgctcaatcgagtcttcgggaag

SEQ ID NO: 22665 - DNA, 639 bp, Macaca Mulatta
  misc_feature (1)...(639): n = A,T,C or G
gggccccacctggaaacagtgatcctgagcaattgaagaaggaactgaatgaactggtcagtgctattgaagaacattttttccagccacggaagttcaatctgcagccaaaagcagactaaaatagtccagtcttgggtatacttgcatttgcctacaattaagctgagtttaacttgttaagcaatatttttaagggccaaatgattcaaaatgttacaggtatttatgtgttttacaaagacctacattcctcattgtttcatgtttgaccttcaaggtgaaaaaagaaaagatggccaaacccaacaaactaacattcctactaaaaagttgagtttggacatattttgaatttttataaatgaagattctttaacttaaaaaaatagattgtaattgatgtgccttaatttgcataaatcataaatgtatgtcctctctgtaattgttttaatgtgtgcttgaaatatccagaaaacctatggagttagtaaattctaggctgtcatatgtaggatagccactttttaggcatacgtacatttatatttctatcaattccttataaagtaaaataaatgaatagatcaaannnnnnnnnnnnnnnnnnnnnnnnnnnnntgtcgggccgcnctc

SEQ ID NO: 22666 - DNA, 383 bp, Macaca Mulatta
gtggacaaggatgtgcaaggcaggaccagtcctagcccctcctcgtggccacctgcaggcctcagtaacttgagctcactagggcctccctgcctcagcctgagagctctggggacactggtctagtgggccggaaacatctagtgagccagccaagctgggcccaaggatggatctgagggcaagcaggagattcggtggctcaggcttcccctggcctggcccctcgtctctggctctcaggcttgggtgtgggtccccacctggcccgtcccatggagaaggacagctgcctgctggacaggtcagctccagctgccagaggtggggtgtcatttctcccccctcattctcagagcggagacagcaaagtccagaatggt

SEQ ID NO: 22667 - DNA, 984 bp, Macaca Mulatta
cttatctcctgcctgcagtgccggcggtgtccccactactttctaccgaacttagatctgtttcaaggcaaacctcactcagctctggaaaacgctgccaaacaaacgtggcgactggcaagagagatcctgaccaacccgaaaagtttggaaaaactttagaggatgagttaatcaagagccgaaattattacccttctcaaagtccttattaagtgtaaacttctgttcaattcctaatattccactccgcagtgtaaacaatctcttcctttaaaaaggagtaataatacaatatttagacatcatctcacccacccccacaaggggagaaaaagtaggggaagcggatggagaaaaacccaaagccactagtattagaagacttcttgccacacgatttcctatctcccttgaaaagtacaccgtaacactccgtaaacagcccggttgtaatgcaagaccgcgacgaacactccgcctaactatcaaaggattattgcaatcctggtgatttaggtgcatctgcctgtgagtaaacacgatttggatatgccatctgaaagaaactgtaatgtatattttgatttgcaacaaatattgtgatctcacattgtctttgaaagtgtggatgttggtgtttgtgatttggtgaacagaacttaaattgccattctcgatacttccagacattttccactaacaaagttatcatttaaaggtagatttcctcctggtactttcctctgtctttgaaagtgtctgaactttaaaaagtttacattttgtttcaaatattgcttgttctatttctaacattccataaatatacttgaaatgttatttaaatatattcaaagaaatttgaattcagcttatataataacgcttgaatatctgaattatatatttgaaaaatgcacttgaaatacactggataattacttttgtgatttagattttaatttgttgctggtttttatt

SEQ ID NO: 22668 - DNA, 95 bp, Macaca Mulatta
gggtggacagtgttccagacggaagcctgccagtgcacggtgaacaggtgctgcccaagaaccagcaagtcactgccttggggagagaggaacct

SEQ ID NO: 22669 - DNA, 611 bp, Macaca Mulatta
ccctttcacagagtgttgatttgtccattcttaatatttattaataggtatatgtgcataaaatagctattttgtaacattaagctttttaagtcattttggtcatcatataacatcttcctgtttatttaagcttctttttacctagtagcctttaaccaaacaatagctattaacgttttaaccaaataaaatgtgttaaatacctttgcattggttatcttgtatactagtctgtcttgttttgctgtgtgtttttaatccattcaatatatgtggacatctaaaagggtttaaaagccacctcctggcctggcccgttttctctcccttcattcttctattttcagaaatacatgttgaatgtcagcttctgtattacttctactatatgtaatctgatgacttagaggaggagattaacctttcaggctcttttgaatttggtttttataactttgttttaaagatcacttactcttccagtaataagtagtaaaaaatcctgttcatatctgagatcaatacacagtttattgaattcaaataactactaaaactctattccacctagacggaaaacttttttaaaagacagtatctgaccacta

SEQ ID NO: 22670 - DNA, 1102 bp, Macaca Mulatta
  misc_feature (1)...(1102): n = A,T,C or G
ccacatctgaggctgtgatgggacttggagaccccagaagcacaatggctatgcctatgaaatgcctccanngcatccagtaaccggaaagccgcggttgcccagacatagttttggccgaaatgctctggaacgacatgtggcacaaaagaaaagtcgcctgaggagattcgcctcccaactgaaaatcaccatccctgacttgactgatgtcaatgccatagatcggtggtcccgcatattcttcccagtggttttttccttcttcaacatcgtctattggctttattatgtgaactaaaacatggcctcccactggaagcaaggactagattcctcctcaaaccagttgtacagcctgatgtaggacttggaaaacacatcaatccaggacaaaagtgatgctaaaataccttagttgctggcctatcctgtggtccatttcataccatttgggttgcttctgctaagtaacgaatacactaaggtccttgtggttttccagttaaaacgcaagtgatttgtacacatggtggcaagacagcctgagtgctccatgttgtctgtttagtgtgcagcctactcagaggggaataatttggaagatattcttagaagactcaatagcattgtcagtcatttggtcataaccagatactcctcatcttcctttttaaggttggcatgctgttgagatggcattgtgcttatgaaacattatctgtaatgccatgcaaacacattacttgaagatgatctatgcttttcttactaagatgacaatggtgtcatgggaaggttattcccaccggtttctaaaagattctgttgtgattggagcaggctagcggaatcaagacagagactcanggaactgatttggccagtctcttagcttgagcacagaggattcactatgacgtctttcattttggcatttagagatgaggagacttctgaacattatcgtgcatggtggccgaagaaatttttgctgaacagctatttccctagtggtttaaagtagagttacagcncagagcagagtaaaaatcggaaatgacggttgtaacaaaaatcaagcaagcagcaagcatgacct

SEQ ID NO: 22671 - DNA, 3175 bp, Macaca Mulatta
  misc_feature (1)...(3175): n = A,T,C or G
agtcttttgtgtacgtgcaggaccatggtggcttcagttcctaccccacccttcctaggaactctacttgtggcaaacggatgttcgagcttacaagtccaccctccccactctgataaatgcaagaaaagctgagaagggaggagcaagttgggatgaaagtgtctgggccaaagtgacctggaaaccactggagaagaagctgctgactgagaaggaggtgtgtggctccggcgggatccccagctggaggactggttagcagctgcacgttctnnnnnnnnnnnnnnnnnnnnnnnnnnnnnnnnnnnnnnnnnnnnnnnnnnnnnnnnnnnnnnnnnnnnnnnnnnnnnnnnnnnnnnnnnnnnnnnnnnnnnnnnnnnnnnnnnnnnnnnnnnnnnnnnnnnnnnnnnnnnnnnnnnnnnnnnnnnnnnnnnnnnnnnnnnnnnnnnnnnnnnnnnnnnnnnnnnnnnnnnnnnnnnnnnnnnnnnnnnnnnnnnnnnnnnnnnnnnnnnnnnnnnnnnnnnnnnnnnnnnnnnnnnnnnnnnnnnnnnnnnnnnnnnnnnnnnnnnnnnnnnnnnnnnnnnnnnnnnnnnnnnnnnnnnnnnnnnnnnnnnnnnnnnnnnnnnnnnnnnnnnnnnnnnnnnnnnnnnnnnnnnnnnnnnnnnnnnnnnnnnnnnnnnnnnnnnnnnnnnnnnnnnnnnnnnnnnnnnnnnnnnnnnnnnnnnnnnnnnnnnnnnnnnnnnnnnnnnnnnnnnnnnnnnnnnnnnnnnnnnnnnnnnnnnnnnnnnnnnnnnnnnnnnnnnnnnnnnnnnnnnnnnnnnnnnnnnnnnnnnnnnnncaacctatttttcagatgttagcagtcgatttggatgaagaaaacactccaaattctcaagtcctttacttcctcatttctcaaacaccattactgaaagaaagtggtttccaggttgatcgcattagtggagaaatacgactctccgggtgcttagattatgannnnnnnnnnnnnnnnnnnnnnnnnnnnnnnnnnnnnnnnnnnnnnnnnnnnnnnnnnnnnnnnnnnnnnnnnnnnnnnnnnnnnnnnnnnnnnnnnnnnnnnnnnnnnnnnnnnnnnnnnnnnnnnnnnnnnnnnnnnnnnnnnnnnnnnnnnnnnnnnnnnnnnnnnnnnnnnnnnnnnnnnnnnnnnnnnnnnnnnnnnnnnnnnnnnnnnnnnnnnnnnnnnnnnnnnnnnnnnnnnnnnnnnnnnnnnnnnnnnnnnnnnnnnnnnnnnnnnnnnnnnnnnnnnnnnnnnnnnnnnnnnnnnnnnnnngcctttggattatgagacttgcccagcacgaagcctcgtcattgccgtggagaatgaggagaggctcttctactgcgagagaggaaagcttcagccaccaaggaaggcagcagcaagcgccactgtgagtgtgcaggtgacagacgccaacgacccaccaacctttcacccccagagcttcattgtcagtcaaaaggagggcaccgggcctgggaccctgttgggaacttttaatgccacggatccagacagccagataagnnnnnnnnnnnnnnnnnnnnnnnnnnnnnnnnnnnnnnnnnnnnnnnnnnnnnnnnnnnnnnnnnnnnnnnnnnnnnnnnnnnnnnnnnnnnnnnnnnnnnnnnnnnnnnnnnnnnnnnnnnnnnnnnnnnnnnnnnnnnnnnnnnnnnnnnnnnnnnnnnnnnnnnnnnnnnnnnnnnnnnnnnnnnnnnnnnnnnnnnnnnnnnnnnnnnnnnnnnnnnnnnnnnnnnnnnnnnnnnnnnnnnnnnnnnnnnnnnnnnnnnnnnnnnnnnnnnnnnnnnnnnnnnnnnnnnnnnnnnnnnnnnnnnnnnnnnnnnnnnnnnnnnnnnnnnnnnnnnnnnnnnnnnnnnnnnnnnnnnnnnnnnnnnnnnnnnnnnnnnnnnnnnnnnnnnnnnnnnnnnnnnnnnnnnnnnnnnnnnnnnnnnnnnnnnnnnnnnnnnnnnnnnnnnnnnnnnnnnnnnnnnnnnnnnnnnnnnnnnnnnnnnnnnnnnnnnnnnnnnnnnnnnnnnnnnnnnnnnnnnnnnnnnnnnnnnnnnnnnnnnnnnnnnnnnnnnnnnnnnnnnnnnnnnnnnnnnnnnnnnnnnnnnnnnnnnnnnnnnnnnnnnnnnnnnnnnnnnnnnnnnnnnnnnnnnnnnnnnnnnnnnnnnnnnnnnnnnnnnnnnnnnnnnnnnnnnnnnnnnnnnnnnnnnnnnnnnnnnnnnnnnnnnnnnnnnnnnnnnnnnnnnnnnnnnnnnnnnnnnnnnnnnnnnnnnnnnnnnnnnnnnnnnnnnnnnnnnnnnnnnnnnnnnnnnnnnnnnnnnnnnnnnnnnnnnnnnnnnnnnnnnnnnnnnnnnnnnnnnnnnnnnnnnnnnnnnnnnnnnnnnnnnnnnnnnnnnnnnnnnnnnnnnnnnnnnnnnnnnnnnnnnnnnnnnnnnnnnnnnnnnnnnnnnnnnnnnnnnnnnnnnnnnnnnnnnnnnnnnnnnnnnnnnnnnnnnnnnnnnnnnnnnnnnnnnnnnnnnnnnnnnnnnnnnnnnnnnnnnnnnnnnnnnnnnnnnnnnnnnnnnnnnnnnnnnnnnnnnnnnnnnnnnnnnnnnnnnnnnnnnnnnnnnnnnnnnnnnnnnnnnnnnnnnnnnnnnnnnnnnnnnnnnnnnnnnnnnnnnnnnnnnnnnnnnnnnnnnnnnnnnnnnnnnnnnnnnnnnnnnnnnnnnnnnnnnnnnnnnnnnnnnnnnnnnnnnnnnnnnnnnnnnnnnnnnnnnnnnnnnnnnnnnnnnnnnnnnnnnnnnnnnnnnnnnnnnnnnnnnnnnnnnnnnnnnnnnnnnnnnnnnnnnnnnnnnnnnnnnaccttctagtcctagatgaggacacactattagtttgaattaaatgctttgatattctgagaccagccatcttgaaccaaagcaaaaccacaagttgtgcttttttaaaatttgatttgtcatattttctagagaaacttgaatttaattgtgttattcttagcttccactggcagcctaactttgagggtaaatgaaaatataacccatcgattacccagtcacttgggaacagcaggtaatactgaagaaaaataaaaatagattttaaaacgtt

SEQ ID NO: 22672 - DNA, 540 bp, Macaca Mulatta
  misc_feature (1)...(540): n = A,T,C or G
catgtctggtcgcggcaaaggcggaaaaggcttgggtaaagggggcgctaagcgtcaccgcaaagtcttgcgagataacatccagggtattaccaaacctgccatccggcgtcttgctcggcgcggcggtgtcaagcgcatttctggactcatctatgaggagacccgcggggtgctgaaggtgtttctagagaacgtaatccgtgacgctgttacttacacggagcacgccaagcgcaagaccgtaacagctatggatgtggtctacgctctcaaacgacagggacgcactctttacggcttcggcggctaaggctcttgcttgaacgactcaacatctcaactatcccaaattaaaggcccttttcagggccgcccacacttttccttaaaagagctaatgactnnnnnnnnnnnnnnnnnnnnnnnnnnnnnnnnnnnnnnnnnnnnnnnnnnnnnnnnnnnnnnnnnnnnnnnnnnnnnnnnnngttccaaattatatttggtttcagcatacgatttttaaggctaggatccttt

SEQ ID NO: 22673 - DNA, 1306 bp, Macaca Mulatta
  misc_feature (1)...(1306): n = A,T,C or G
ccacgtggaagatggcatcccggagagccctcccctcctttctcagtttaaagtgcaaatcgactcctacgaaacgctctatgaagaggtgtgcaggctggagcccatcaaggtgtttgacagctggatgaaaattgatattcaaccctttaaggcatccctgctgaatattattaagaggtggagcctcctgttcaaacagcatcttgtggaccacgtcactcagnnnnnnnnnnnnnnnnnnnnnnnnnnnnnnnnnnnnnnnnnnnnnnnnnnnnnnnnnnnnnnnnnnnnnnnnnnnnnnnnnnnnnnnnnnnnnnnnnnnnnnnnnnnnnnnnnnnnnnnnnnnnnnnnnnnnnnnnnnnnnnnnnnnnnnnnnnnnnnnnnnnnnnnnnnnnnnnnnnnnnnnnnnnnnnnnnnnnnnnnnnnnnnnnnnnnnnnnnnnnnnnnnnnnnnnnnnnnnnnnnnnnnnnnnnnnnnnnnnnnnnnnnnnnnnnnnnnnnnnnnnnnnnnnnnnnnnnnnnnnnnnnnnnnnnnnnnnnnnnnnnnnnnnnnnnnnnnnnnnnnnnnnnnnnnnnnnnnnnnnnnnnnnnnnnnnnnnnnnnnnnnnnnnnnnnnnnnnnnnnnnnnnnnnnnnnnnnnnnnnnnnnnnnnnnnnnnnnnnnnnnnnnnnnnnnnnnnnnnnnnnnnnnnnnnnnnnnnnnnnnnnnnnnnnnnnnnnnnnnnnnnnnnnnnnnnnnnnnnnnnnnnnnnnnnnnnnnnnnnnnnnnnnnnnnnnnnnnnnnnnnnnnnnnnnnnnnnnnnnnnnnnnnnnnnnnnnnnnnnnnnnnnnnnnnnnnnnnnnnnnnnnnnnnnnnnnnnnnnnnnnnnnnnnnnnnnnnnnnnnnnnnnnnnnnnnnnnnnnnnnnnnnnnnnnnnnnnnnnnnnnnnnnnnnnnnnnnnnnnnnnnnnnnnnnnnnnnnnnnnnnnnnnnnnnnnnnnnnnnnnnnnnnnnnnnnnnnnnnnnnnnnnnnnnnnnnnnnnnnnnnnnnnnnnnnnnnnnnnnnnnnnnnnnnnnnnnnnnnnnnnnnnnnnnnnnnnnnnnnnnnnnnnnnnnnnnnnnnnnnnnnnnnaaggtcccctatgatgatttacgctacctgtttggagagatcatgtatggaggccacatcacagacgactgggacagaagactctgcagaacctacctggaggaattcattcgaccagaaatgttagaaggagaactgtctttggccccagggttcccactcccaggcaacatggactacaatggttatcatca

SEQ ID NO: 22674 - DNA, 620 bp, Macaca Mulatta
tggagaatacttttgcgaagcctaactagactttgattcgaagcccagttgggctgaccaggtggaggaagagggggaggacgacaaatgtgtcccagcgagctcctcaaggggatccctctggccactggcgacaccagcccagaaccagagctactgccgggagctccactgccacctcccaaggaagtcatcaacggaaacataaagacagtgacagagtacaaaatagatgaggatggcaacaagttcaagattgtccgcaccttcaggattgagacccggaaggcttcaaaggctgttgcaaggaggaagaactggaagaagttcgggaactcggagtttgaccccccgggacccaatgtggccaccaccaccgtcagtgatgacgtctctatgacgttcatcaccagcaaagaggacctgaactgccaggaggaggaggaccccatgaacaaactcaagggccagaagatcgtgtcttgccgcatctgccaaggcgaccactggaccacccgctgaccctacaaggacacgctgggtcccatgcagaaggagctggccgagcagctgggcctgtctaccggcgagaaggagaagctgccgggagagctggagcc

SEQ ID NO: 22675 - DNA, 2797 bp, Macaca Mulatta
  misc_feature (1)...(2797): n = A,T,C or G
atggtggagaatgagcgactgagacaggagatgcggcgctgcgaggccgagctgcaagagctacgtgcaaagccagcaggtccctgcctgggttgtgagcacagccaggtgagcncaggagagtgcccagctccgtgacaagctgtcccagctgcagctggagatggcggagagcaaaggcatgctgtcagagctgaacctggaggtgcagcagaagactgaccggctggctgaggtggagctgcggctcaaggactgcctggctgagaaggcacaggaggaggagcgactcagccggcgcctgcgtgacagccacgagaccattgccagcctgcgggcccagtccccacctgtcaagnagtatgtcatcaagacagtggaggtggagtcgtctaagaccaagcaggccctcagcgagtcccaggcccgcaaccagcacctgcaggagcaggtggctatgcagaggcacgtgctgaaggagatggaacagcagctgcagagctcacaccagctgaccgcgcggctccgggcgcagncagattgccatgtacgagtcagagctggagcgggcccatgggcagatgctggaggagatgcagtccctggaagaggacaagaaccgggccattgaggaggcctttgccagagcccaggtggagatgaaggctgtgcacgagaatctagcaggnaggcgtccggaccaacctgctgaccctgcagccagcactgcggaccctcaccaacgactacaacgggctcaagcggcaggtacgcggcttcccgctgctgctgcaggaggccctcaggagtgtcaaggccgagnagataggccaggccatcgaggaggtcaacagcaacaaccaggagctgctgcgcaagtaccgccgtgagctgcagctgcgcaagaagtgccacaacgagctcgtgcggctgaaaggnagggaacatccgagtgattgctcgtgtccggccagtcaccaaagaggatggggaaggacctgaggccaccaatgctgtgactttcgatgccgacgacgactccatcatccacctgctgcacaagggaaagcctgtgtccttcgagctggacaaggtgttctccccacaggcctcgcagcaggacgtgngtgttccaggaagtgcaggccctgatcacctcttgcatcgatggcttcaatgnnnnnnnnnnnnnnnnnnnnnnnnnnnnnnnnnnnnnnnnnnnnnnnnnnnaggggacccctgagaacccaggtatcaaccagcgggccctgcagctgctcttctccgaggtgcaggagaaggcgtctgactgggagtacaccatcaccgtcagcgccgcggagatctacaacgaggtcctcaggnnnnnnnnnnnnnnnnnnnnnnnnnnnnnnnnnnnnnnnnnnnnnnnnnnnnnnnnnnnnnnnnnnnnnnnnnnnnnnnnnnnnnnnnnnnnnnnnnnnnnnnnnnnnnnnnnnnnnnnnnaggtgtttgagttcggccacaccaatcgcacgacggagttcaccaacctcaacgagcacagctcccgctcgcatgcgctgctcatcgtgacggtgcgaggcatggactgcagcacgggcctccgcaccacgggngggaagctgaacctggtggacttggctggctccgagcgcgtgggcaagtcaggggctgagggcagccgcctgcgggaggcacagcacatcaacaagtcgctgtcagctctgggggacgtcattgctgccctgcgctcccgccagggccacgtgcccttccgcaactccaagctcacctacctgctgcaggattcacttagtggtgacagcaagaccctcatggtggtacaggtgnaggtgtcccctgtggagaagaacactagcgagacgnnnnnnnnnnnnnnnnnnnnnnnnnnnnnnnnnnnnnnnnnnnnnnnnnnnnnnnnnnnnnnnnnnnnnnnnnnnnnnnnnnnnnnnnnnnnnnnnnnnnnnnnnnnnnnnnnnnnnnnnnnnnnnnnnnnnnnnnnnnnnnnnnnnnnnnnnnnnnnnnnnnnnnnnnnnnnnnnnnnnnnnnnnnnnnnnnnnnnnnnnnnnnnnnnngggaagtcgcggccactgcctgtgtgacggatgtgaccccgctgggcgtggagctgggccccgaggcctcactggcctgttcctgctgcagcgccaggacccccggaggtggaggcaagagtgaaggctcctcttctgccccgtctcccctcagagatgagaaacatgttcagaaggaaacggtgtctctcggctgtggctctgggtgcaattgcatgggcggaaaagcgggggtggctgctcttcctggcgggcctggggctatcagtgagctgggccccgtgaggagggcaggagagtggaggagggcgggcctctcacccaggctgccccagctcctctcctcagtttgcaggactggccagcccccttccttcgtgggtgggcaaggagcctcctggcaggctcaagaaccatgcggactggggtgggttggtggcaccaagggcagccctccccgcccctctccttcaaggaggggtcccgcagctggggtgtgtacagaggcgcacggcctcctgccacggggccgcgccatatttatggctgacagaggcagccagtgggtgggggattctgctgctccctcacctgcctggctcactggtctcttgaattttcttccctctgaaatctatttaagaacttttggaagcttagccatttttacttattaaaataaaagcctttttacacaa

SEQ ID NO: 22676 - DNA, 2590 bp, Macaca Mulatta
  misc_feature (1)...(2590): n = A,T,C or G
aggatgaaacgaggaggaagagatagtgaccgtaattcatcagaagaaggaactacagagaaatccaagaaactgaggactacaaatgagcattctcagacttgtgattggggtaatctccttcaggacattattctccaagtatttaagtatttgcctcttcttgaccgggctcatgcttcacaagtttgccgcaactggaaccaggtatttcacatgcctgacttgtggagatgttttgaatttgaactgaatcagccagctacatcttacttgaaagctacccatccagagctgatcaaacagataattaaaagacattcaaaccatctacaatatgtcagcttcaaggtnnnnnnnnnnnnnnnnnnnnnnnnnnnnnnnnnnnnnnnnnnnnnnnnnnnnnnnnnnnnnnnnnnnnnnnnnnnnnnnnnnnnnnnnnnnnnnnnnnnnnnnnnnnnnnnnnnnnnnnnnnnnnnnnnnnnnnnnnnnnnnnnnnnnnnnnnnnnnnnnnnnnnnnnnnnnnnnnnnnnnnnnnnnnnnnnnnnnnnnnnnnnnnnnnnnnnnnnnnnnnnnnnnnnnnnnnnnnnnnnnnnnnnnnnnnnnnnnnnnnnnnnnnnnnnnnnnnnnnnnnnnnnnnnnnnaggtatcctttgtgtggctgatcagtgtcatggcttaagagaactagccctgaactaccacttattgagtgatgagttgttacttgctttgtcttctgaaaaacatgttcgattagaacatttgcgcattgatgtagtcagtgagaatcctggacagacacacttccatactattcagaagagcagctgggatgctttcatcagacattcacccaaagtgaacttagtgatgtatttttttttatatgaagaagaatttgacccattctttcgctatgaaatacctgccacccatctgtattttgggagatcagtaagcaaagatgtgcttggccgtgtgggaatgacatgccctagactagttgaactagtagtgtgtgcaaatggattacggccacttgacgaaaagttaattccgcattgcagaacgttgcaaaaatttgtcagctattggactaggggaatgtgaagtcccatgtagtgcctttgttgagtttgggaaaatgtgtgggggccccctatcttcattatccattatggaagaagtactaattcctgaccaaaagtatagtttgggagcaaattcattgggaaagtgtccaagcttcttggtagggnnnnnnnnnnnnnnnnnnnnnnnnnnnnnnnnnnnnnnnnnnnnnnnnnnnnnnnnnnnnnnnnnnnnnnnnnnnnnnnnnnnnnnnnnnnnnnnnnnnnnnnnnnnnnnnnnnnnnnnnnnnnnnnnnnnnnnnnnnnnnnnnnnnnnnnnnnnnnnnnnnnnnnnnnnnnnnnnnnnnnnnnnnnnnnnnnnnnnnnnnnnnnnnnnnnnnnnnnnnnnnnnnnnnnnnnnnnnnnnnnnnnnnnnnnnnnnnnnnnnnnnnnnnnnnnnnnnnnnnnnnnnnnnnnnnnnnnnnnnnnnnnnnnnnnnnnnnnnnnnnnnnnnnnnnnnnnnnnnnnnnnnnnnnnnnnnnnnnnnnnnnnnnnnnnnnnnnnnnnnnnnnnnnnnnnnnnnnnnnnnnnnnnnnnnnnnnnnnnnnnnnnnnnnnnnnnnnnnnnnnnnnnnnnnnnnnnnnnnnnnnnnnnnnnnnnnnnnnnnnnnnnnnnnnnnnnnnnnnnnnnnnnnnnnnnnnnnnnnnnnnnnnnatgttctcaaatgttacaacagctgttaaaaaggtatatataagtaatctggaacacttagaaaactgataaatgtcacacagtggtattatagaaggataatacagagccaagatcaaattaaaagacaataaatggaacagaagggaggcaatgtttagctttgtataaacttttaggtttgctctgtaatctgctaaaccatatacattcttttgtgatatgttaccatgtatgtggcacttgaggcacttatgtaaagtaaggaatgctttactagttctcctttgttttatctttgtttaaactagctttgaagtattaaacaataattgaaatgaaaagcttatctattttaaaaagccaaatttaaataaatatagaactttaaaatgtttatcagttgtttccatgaaagaatattagtttccagtaaattttagtgatggctcactcatttttccgttttggaattacatagttatataagtagaatttttaaaatcataaagggagcaccattgtacagtctagcataaaaagcaaattttaaagaggatatatttaagttcataatcatttttcagtaaatattgctcagtgaactggaaaactttaatagaaaatgtctgcagttttgtgattgttatttgggtaaactgatattttatattattttagttaggtaacattttatattactttcatatgaataaaggtaatccatgcattgtagagcctaaaaatgttgcgtttttttagtgatataaactttgattctgggcactagtgctagtagatat

SEQ ID NO: 22677 - DNA, 428 bp, Macaca Mulatta
  misc_feature (1)...(428): n = A,T,C or G
gacagccacgtaccccgtgggtcacatgccatacggctggttgacggagatccgtgctgtctatcctgctttcgacaannnnnnnnnnnnnnnnnnnnnnnnnnnnnnnnnnnnnnnnnnnnnnnnnnnnnnnnnnnnnnnnnnnnnnnnnnnnnnnnnnnnnnnnnnnnnnnnnnnnnnnnnnnnnnnnnnnnnnnnnnnnnnnnnnnnnnnnnnnnnnnnnnnnnnnnnnnnnnnnnnnnnnnnnnnnnnnnnnnnnnnnnnnnnnnnnnnnnnnnnnnnnnnnnnnnnnnnnnnnnnnnnnnnnnnnnnnnnnnnnnnnnnnnnnnnnnnnnnnnnnnnnnnnnnnnnnnnnnnnnnnnnnnnnnngctctgtgctgcggatcatcgtcctcatcgccagcctcgtggtcctgccctacctgggg

SEQ ID NO: 22678 - DNA, 748 bp, Macaca Mulatta
  misc_feature (1)...(748): n = A,T,C or G
gggctcttttccgtggcgcctcggaggcgttcagctgcttcaagatgaagctgaacatctccttcccagccactggctgccagaaactcattgaagtggacgatgaacgcaaacttcgtactttttatgagaagcgtatggccacagaagttgctgctgacgctctgggtgaagaatggaagggttatgtggtccgaatcagtggtgggaacgacaaacaaggtttccccatgaagcagggtgtcttgacccatggccgtgtccgcctgctactgagtaaggggcattcctgttacagaccaaggagaacgggagaaagaaagagaaaatcagttcgtggttgcattgtggatgccaatctgagcgttctcaacttggttattgtaaaaaaaggagagaaggatattcctggactgactgatactacagttccctccccgcctggggcccccaaaagaagctagcccaaaatccgcaaactttttcaaatcctctcctaaagaaaaaggacgtcccgccccagaatgggtgtaagaaaaaccccctttaaaccccaagnnnnnnnnnnnnnnnnnnnnnngggacccaaagcccccccccaaaatttcccccgggctcttgtggttacccccccccccggtttccctgtggcagcccaacnnnnnnnnnnnnnnnnnnnnnntgggccccctnnnnnnnnnnnnnnnnnnnnccttttttatggggaaaaaaacaccccgggggggaa

SEQ ID NO: 22679 - DNA, 1351 bp, Macaca Mulatta
  misc_feature (1)...(1351): n = A,T,C or G
agatactacaagccataagactttgcagaaatgtccttctacagaaccagaagaaaaaagaaagatcgtggaagaacagccccagaaaaataccacggagaaattgggcgtgtcacctcccactctacctgttagaaggcggctggcttgggatacagagaacactagtgaagacatacagaaacagcccagggagaaannnnnnnnnnnnacaatgaggagaaaggggacaggaaaacgggcaagcaggcttttatgggagagcaagagaagttggatgtacatgagaaatctaaggcagacaagatgaaagaagggtnnnnnnnnnnnnnnnnnnnnnnnnnnnnnnnnnnnnnnnnnnnnnnnnnnnnnnnnnnnnnnnnnnnnnnnnnnnnnnnnnnnnnnnnnnnnnnnnnnnnnnnnnnnggtggtgctgttttagtgtctccatctaagatgaagcctccagccccagaacagaggaaaagaatgacctctcaggattgtttagaaacttcaaagaatgattttactaannnnnnnnnnnnnnnnnnnnnnnnnnnnnnnnnnnnnnnnnnnnnnnnnnnnnnnnnnnnnnnnnnnnnnnnnnnnnnnnnnnnnnnnnnnnnnnnnnnnnnnnnnnnnnnnnnnnnnnnnnnnnnnnnnnnnnnnnnnnnnnnnnnnnnnnnnnnnnnnnnnnnnnnnnnnnnnnnnnnnnnnnnnnnnnnnnnnnnnnnnnnnnnnnnnnnnnnnnnnnnnnnnnnnnnnnnnnnnnnnnnnnnnnnnnnnnnnnnnnnnnnnnnnnnnnnnnnnnnnnnnnnnnnnnnnnnnnnnnnnnnnnnnnnnngatgaggacagattgtctgagatttctgctcgctctgcagcttctagtctccgggcttttcagactctggcacgagctaagaaaaggaaggaggatttctggggtaaaacataaacctagttgagttgcctttatctaaggaaacattggcataatttttctttattgcttactgtgttaaaattttgagtgtttgaaatttttcctaacattttctagtttgaaatatttaatttccaatagaacggtttacttggaaatttttaacataggcttatacaaatttaacttttaacgaattctttttacatctatcccagagtacaaagacatagattattgaattctttacatgttgtaacttttgtaataggtgtcatggatagattttcacctatccagagaatattctaaaaagataaacaaagtgaagtaaaagttaagatcccagtgtgaagtatgtatttccctaagatttgatatatgtatctttataattgatga

SEQ ID NO: 22680 - DNA, 781 bp, Macaca Mulatta
catcaatgccatctgggttcctcaacttggcggtagctgacttcctctcctgcctggcgctgcccatcttgttcacgtccattgtgcagcatcaccactggccctttggcgggaccgcctgccgcatcctgccctcccttatcctactcaacatgtacgccagcatcctgctcctggccaccatcagtgccgaccgctttctgctggtgtttaaccccatctggtgccagaacttccgaggggccggcttggcctggatagcctgtgccgtggcttggggtttagccctgctgctgaccataccctccttcctgtaccgggcggtccggcaggaggagtattcaccaaaggtgttgtgtggcgtggactacaacaacgacacacggcgggagcgagctgtggccattgtccggctggtcctgggcttcctgtggcccctactcacactcatgatctgttacaccttcctcctgctccggacgtggagccgcagggccacgaggtccaccaagacactcaaggtggtggtggcggtggtggccagtttctttatcttctggttgccctaccaggtgacggggacaatgatgtccttcctgcgcccgtcgtcacccacatacctgcagctgaagaagctggactccctgagtatctcctttgcctacatcaactgctgcatcaaccccgtcatctacgtagtggctggccagggcttccagggccgactgcggaaatccctccccagcctcctccggaacgtgttgactgaagagtccgtggt

SEQ ID NO: 22681 - DNA, 427 bp, Macaca Mulatta
gtcttctttcattctcttttccctctagcagaggctttaacatcccaggctgggttctggatgcctacagaactagtaaccattggtatttgcatactgagcctacagaatttcatgatttccctaagaccatctttcctgggccatgccaccattggaaatcaaaggtccagtcactgcaaaccccactgatcaaactctcccacccaacctttccacgggttccagagggatcagtatgttctccttccgcttaccaccaccagtggtatttccctaatgctgctgcctcctgccagctctgaacacttgtagctaagaatgaagaatcagcctttttgcagtaaatcccatgttgaggctgatgcccacaagcctgccatcccccacctggagctcaagaaggagcaggcatccccaggcatgc

SEQ ID NO: 22682 - DNA, 788 bp, Macaca Mulatta
  misc_feature (1)...(788): n = A,T,C or G
gggaagaacagtttcatttccggcgtcaccggaagcagcttgaaaatggcgtctccctctttagagcggcgaggaaaaggggctggaaaaagtgaatttcgtaaccagaagacaaagccggagaaccaagatgaatcagaactccttactgttcccgatggctggaaggaaccagctttttccaaagaggacaatcccagaggacttttggaggagagcagtttctcaactttgttcccaaaatacagagaagcttacttgaaagagtgttggccattggtgcagaaagccttgaatgaacatcatgttaatgcaaccctggacctgatcgaaggcagcatgactgtctgtactacaaagaagacttttgatccatatatcatcattagggcaagagatctgataaaactgttagcaaggagtgtttcatttgaacaggtaaatctaaaattacagagactttgctttgtttgcatcagtgttaacctataacatcccatcttttccgccttccaccatcaagttttcgtatttgtgcttagataacaatagcatgggcttggaaaataaatgtaattgtaaaaaatgttgataatgtnnnnnnnnnnnnnnnnnnnnnnnaaaaggcagtacgaattcttcaggatgatgttgcatgtgacatcattaaaatagggttctttagtaagggaaaaaagagagaatttgtaaaaacgaaagaaccaccggctttattgggtccccaaaagggatcttaccattggaaaggnnnnnnnnnnnnnnnnnna

SEQ ID NO: 22683 - DNA, 3109 bp, Macaca Mulatta
  misc_feature (1)...(3109): n = A,T,C or G
agctggtggtaggggaccttggccctggtgggcagcagccccgcctgaaggtgctcaaaggaccactggtgatgaccgaaagcccactacctgctctgccagctgctgctgccaccttcatcatggagcaacatgagccccggactccagctctggcacttgcttcaggcccttgtgtctatgtgtataagaatctcagaccttacttcaagttcagcctgccccaattgactgcaaatcctcggaacaagannnnnnnnnnnnnnnnnnnnnnnnnnnnnnnnnnnnnnnnnnnnnnnnnnnnnnnnnnnnnnnnnnnnnnnnnnnnnnnnnnnnnnnnnnnnnnnnnnnnnnnnnnnnnnnnnnnnnnnnnnnnnnnnnnnnnnnnnnnnnnnnnnnnnnnnnnnnnnnnnnnnnnnnnnnnnnnnnnnnnnnnnnnnnnnnnnnnnnnnnnnnnnnnnnnnnnnnnnnnnnnnnnnnnnnnnnnnnnnnnnnnnnnnnnnnnnnnnnnnnnnnnnnnnnnnnnnnnnnnnnnnnnnnnnnnnnnnnnnnnnnnnnnnnnnnnnnnnnnnnnnnnnnnnnnnnnnnnnnnnnnnnnnnnnnnnnnnnnnnnnnnnnnnnnnnnnnnnnnnnnnnnnnnnnnnnnnnnnnnnnnnnnnnnnnnnnnnnnnnnnnnnnnnnnnnnnnnnnnnnnnnnnnnnnnnnnnnnnnnnnnnnnnnnnnnnnnnnnnnnnnnnnnnnnnnnnnnnnnnnnnnnnnnnnnnnnnnnnnnnnnnnnnnnnnnnnnnnnnnnnnnnnnnnnnnnnnnnnnnnnnnnnnnnnnnnnnnnnnnnnnnnnnnnnnnnnnnnnnnnnnnnnnnnnnnnnnnnnnnnnnnnnnnnnnnnnnnnnnnnnnnnnnnnnnnnnnnnnnnnnnnnnnnnnnnnnnnnnnnnnnnnnnnnnnnnnnnnngatgcagtgaccagtctttgctttggccgctacgggcgggaggacaacaccctcatcatgaccactcgaggtgnnnnnnnnnnnnnnnnnnnnnnnnnnnnnnnnnnnnnnnnnnnnnnnnnnnnnnnnnnnnnnnnnnnnnnnnnnnnnnnnnnnnnnnnnnnnnnnnnnnnnnnnnnnnnnnnnnnnnnnnnnnnnnnnnnnnnnnnnnnnnnnnnnnnnnnnnnnnnnnnnnnnnnnnnnnnnnnnnnnnnnnnnnnnnnnnnnnnnnnnnnnnnnnnnnnnnnnnnnnnnnnnnnnnnnnnnnnnnnnnnnnnnnnnnnnnnnnnnnnnnnnnnnnnnnnnnnnnnnnnnnnnnnnnnnnnnnnnnnnnnnnnnnnnnnnnnnnnnnnnnnnnnnnnnnnnnnnnnnnnnnnnnnnnnnnnnnnnnnnnnnnnnnnnnnnnnnnnnnnnnnnnnnnnnnnnnnnnnnnnnnnnnnnnnnnnnnnnnnnnnnnggtacccttgctggtgcccgggctcaactaccccctggagacctttgtggagagtctcagtaacaagggcatctcagacatcatcaaggtaggcgccacacttgtaccatgtggaaggtaagtgggaccctggggaggacagtcagggtgagtgccaacaaagcccttnnnnnnnnnnnnnnnnnnnnnnnnnnnnnnnnnnnnnnnnnnnnnnnnnnnnnnnnnnnnnnnnnnnnnnnnnnnnnnnnnnnnnnnnnnnnnnnnnnnnnnnnnnnnnnnnnnnnnnnnnnnnnnnnnnnnnnnnnnnnnnnnnnnnnnnnnnnnnnnnnnnnnnnnnnnnnnnnnnnnnnnnnnnnnnnnnnnnnnnnnnnnnnnnnnnnnnnnnnnnnnnnnnnnnnnnnnnnnnnnnnnnnnnnnnnnnnnnnnnnnnnnnnnnnnnnnnnnnnnnnnnnnnnnnnnnnnnnnnnnnnnnnnnnnnnnnnnnnnnnnnnnnnnnnnnnnnnnnnnnnnnnnnnnnnnnnnnnnnnnnnnnnnnnnnnnnnnnnnnnnnnnnnnnnnnnnnnnnnnnnnnnnnnnnnnnnnnnnnnnnnnnnnnnnnnnnnnnnnnnnnnnnnnnnnnnnnnnnnnnnnnnnnnnnnnnnnnnnnnnnnnnnnnnnnnnnnnnnnnnnnnnnnnnnnnnnnnnnnnnnnnnnnnnnnnnnnnnnnnnnnnnnnnnnnnnnnnnnnnnnnnnnnnnnnnnnnnnnnnnnnnnnnnnnnnnnnnnnnnnnnnnnnnnnnnnnnnnnnnnnnnnggccagggagatcagaagctcttctggggtgagactgagcctcctgttgctccctggagttccagaggctgggctgcagcccacttagctttcgggcaaaacatgtgctctcctctctgcttgtcagctgagcaagcccagggaatagccctcatctccccaagacacttctctgaaatcttagacttagccagtctcaggcctataatgccacaaaaaggttgttcagggagaagggggtgcaggagggcagagggtgccccgcagggagctggtagctccagcctcactagagctcctaaagatcacacagcagctgctcctgacagggatgctcatgcccagaaagaaaccccaggagaggaaggcagagcgagacagagcagagccagggtcaggagcaccaggagaggtgtttctggggctccggggaggtgccacaggaggcagaagtccagaactgcccatatagatgcccttctatgtcctggggcccaaatcagtcctgggtgggaagttcccagggcagtggccacatcatgagaattagcaggaaaggcggggcctttctcatcatagctgtttctgaggatgaaatgggagacatatgcccagcacctgatgtaaatttatgtcatgtaatactatgtacctaccactaagaaatacatgagccacgccatgtggacagtaagtgttcataaagcaacgtgaagcaagaaacagtgcagggtgcccagtgcacacactagagagaaattgtggacattaagcacaagcagaattgttgtttttctaaaacataattatttaaaaacatgtatccacttactaatgtggaattacacagtttgtaacaagaaaacagtct

SEQ ID NO: 22684 - DNA, 301 bp, Macaca Mulatta
tcgagctcgccaggccgcgtcgcgccatgcccgccggctgagcgctgcagggccttgtcccgccaggcgtgggggccgcgcgcgcccaggccggggcccggcggccgaccatggtgctgccgcccccggaccggcgccacgtgtgcctgaccacgctggtgatcatgggcagcatggcggtcatggacgcgtacctggtggagcagaaccagggcccgcgcaagatcggcgtgtgcatcatcgtgctggtgggcgacgtgtgcttcctgctggtgctgcgctacgtggccgtgtgggtggg

SEQ ID NO: 22685 - DNA, 886 bp, Macaca Mulatta
  misc_feature (1)...(886): n = A,T,C or G
tacaacttgctcctcaaattcaactatcattggttctcagggaagtgagacacctaaagaggtcccagactcccctacaaatgtacagcatttgacagacaaacccttgccagaatcagtccccaagctcccattgcagtcagaggcaccaaaaatgcacaccttgcaggttcctgaaaaccactcagtagccttaaaccaaactacaaatggccatactgaatcaaataactatatatatacaaccttgtgtgtaaataagcagacagaaaatctaaagaatcaacagactgagaatctacttaaaaggcgaagtttcccattatttgacaactcaagagccaacttagatcctggaaatagtaagcattatgtatatagtacacttaccaggaatcgagttagacaaccagaaaagcccaaagaagatttgctgaaaagttctaaaagcatgcacaacgtgactcataacttggaggaggatgaggaggaagtcaccaaggaaaaccctccaagtagcactactaccaagtcaatttccattgctgctttacttgatgtgaataaagaggaatccaacaaagaactcacttcaaagaaggaagttaagggttccccaagttttttgaagaaggggtctcagaagttaaggtcattacttagccttaccccagataagaaagaaaatctatccaaaaataaagcacctgccttttatagattgtgtagtagctctgacacattagtttctgagggtgaagaanatcanaaaccaaagaaatcagacacaaaagttgattcatctcctagaagaaaacattcttcctcatcgaattctcaatgcagcatccacaagagtaaggaagatgtaacagttagtccatct

SEQ ID NO: 22686 - DNA, 145 bp, Macaca Mulatta
tcggagcccctgcagagtgtggtggaccacatggccacccaccttggggtgtccccaagcaggatccttttgctttttggagagacagagctatcacctactgccactcccaggaccctaaagctcggagtggctgacatcattg

SEQ ID NO: 22687 - DNA, 1436 bp, Macaca Mulatta
  misc_feature (1)...(1436): n = A,T,C or G
ccctgcagctgctgctgtggcacagcgcactctggacagtgcaggaagccacccccctgggccctgccagctccctgccccagagcttcctgctcaagtgcttagagcaagtaaggaagatccagggcgacggtgccgcgctgcaggagaagttggtgagtgagnnnnnnnnnnnnnnnnnnnnnnnnnnnnnnnnnnnnnnnnnnnnnnnnnnnnnnnnnnnnnnnnnnnnnnnnnnnnnnnnnnnnnnnnnnnnnnnnnnnnnnnnnnnnnnnnnnnnnnnnnnnnnnnnnnnnnnnnnnnnnnnnnnnnnnnnnnnnnnnnnnnnnnnnnnnnnnnnnnnnnnnnnnnnnnnnnnnnnnnnnnnnnnnnnnnnnnnnnnnnnnnnnnnnnnnnnnnnnnnnnnnnnnnnnnnnnnnnnnnnnnnnnnnnnnnnnnnnnnnnnnnnnnnnnnnnnnnnnnnnnnnnnnnnnnnnnnnnnnnnnnnnnnnnnnnnnnnnnnnnnnnnnnnnnnnnnnnnnnnnnnnnnnnnnnnnnnnnnnnnnnnnnnnnnnnnnnnnnnnnnnnnnnnnnnnnnnnnnnnnnnnnnnnnnnnnnnnnnnnnnnnnnnnnnnnnnnnnnnnnnnnnnnnnnnnnnnnnnnnnnnnnnnnnnnnnnnnnnnnnnnnnnnnnnnnnnnnnnnnnnnnnnnnnnnnnnnnnnnnnnnnnnnnnnnnnnnnnnnnnnnnnnnnnnnnnnnnnnnnnnnnnnnnnnnnnnnnnnnnnnnnnnnnnnnnnnnnnnnnnnnnnnnnnnnnnnnnnnnnnnnnnnnnnnnnnnnnnnnnnnnnnnnnnnnnnnnnnnnnnnnnnnnnnnnnnnnnnnnnnnnnnnnnnnnnnnnnnnnnnnnnnnnnnnnnnnnnnnnnnnnnnnnnnnnnnnnnnnnnnnnnnnnnnnnnnnnnnnnnnnnnnnnnnntgttccccatctgggtccttgcacccctcactctggcctcagccgactgcacagcgacccctccatccctttgggcgtgaggtccctggacaagcacaggcagccagagctgggaagcatggccctggggtcccacgaacttgctggggaatctcgtttttcttcttaagacttttgggacatggtttgactcccnnnatcaccgacgtgtctcctgtttttctgggtgccctcgggacacctgccctgcccccatgatgttcaagactatgactctttttagggctgggcaggtgttangtcatttgcccccccccacggggactggtgatgtgggagggagcagacaggaggaatgatgacagacatgtgtgtgaatggaaggtcgactgtcaccctccacctcttcacccccgactcaccagtgtcccctccactgtcgcattgtaaccaaacttcaggataataaagtgtttgcctcca

SEQ ID NO: 22688 - DNA, 757 bp, Macaca Mulatta
caaagataacaatagctttacaagctgacttggaattgtgtgctgcttgctgttagcaaggggaaaggccctgccaatgtttaacttttaaaagcatcttatctaaaagaaaggctatccagtagagcctagtgctcccttttccctcctttatgatcagggtgaaatgtacttcctgatgtaatgaacctaatttgatttccattttaaggtggtgtctgtgcagctggtatcccggttctggctgtcctatgtccaggaagaagcccatttgtcgaggctgaccttccttatccacacagacacacagcccagcaaaagcctctcctgaaccaaacagacctgttggttgggagactgcccagacatgactgatgacgggttcccgcctgcctgtcccctccctgatcacacagctaacgaggctgcctccagcatttcctgatttcctctgtggtaataaaagctttctgtgcttaggtctgggttgggttgtgaattttgtcacgtaatgacaactaaggcagaagccttctctggctttgggagcagtgttggttttaagcagggttactcataacagattccacaaatctgcccaaagtttttgttgccttgtagatttatcttgaagagttgaccattctaccatgtactaaaattcagaaagtccaccttacaagctgtcttgggccccaccaggtttgtgtagataattataaatctgtttttgaccaaatgttagtatttttaactt

SEQ ID NO: 22689 - DNA, 801 bp, Macaca Mulatta
  misc_feature (1)...(801): n = A,T,C or G
gaaaccaaatctgcataattaaactccagaccctgccagaacatgagccctcaattacattaaagtagggtcagctataaaatcagacagatattacctgggcctataccatggcataacactaaggcgcagactcctaaggcacccattggctgcnngtcagggtgtcagatccttaaacgtgtgtgaatgctgcatcatctatgtataacatcaaagcaaaatcctatacgtgtcctctattggaaaatttgggagtttgttgttgcattgttggtgattacatgtgaaagggttccccatacaattgtttatgaatcataagaaatgtcttgatattgacctggaattttgacttgttgcagttttactaagaaaatctctaaggggaaagaaattatttttgccttcacttattattctgttaaaacttaattcctgctttgagtataaattattgaaatgtatagagaaagaattaacattggtctaaattgttgaaacacaaataatggctaattttctatgaaaaatttgccatgaatcaaatgccttatgaagaatggcttctttgccaaaaataaaacacaattgatgaccaattaaattttgatggagtaatgaactgatggtttgaaaatagtacctaagaaattattaaactaaaggtgcttgagggagaaattagaatatgtgacatatttccttataaatgtaagcaagcccttaataagtgaatggatgtaatgtttcttttgttcacagtaatgtagtgctagccagatatttaaaaatgctcta

SEQ ID NO: 22690 - DNA, 189 bp, Macaca Mulatta
agaagctgcagcaagagctggagttcctggaggtgcaggaggaatacatcaaagatgagcaaaagaacctgaaaaaggaattcctccatgcccaggaggaggtgaagcgaatccaaagcatcccgctggtcatcggacaatttctggaggctgtggatcagaatacagctattgttggctctaccacag

SEQ ID NO: 22691 - DNA, 8465 bp, Macaca Mulatta
  misc_feature (1)...(8465): n = A,T,C or G
tagagatgcagcctcccgcagggccttgcaggcagccatccagcagttggccgaggcccagccagaagccactgctaagaaccttctacactctctgcagtcttgtggtatgggcaccaaagcaggnnnnnnnnnnnnnnnnnnnnnnnnnnnnnnnnnnnnnnnnnnnnnnnnnnnnnnnnnnnnnnnnnnnnnnnnnnnnnnnnnnnnnnnnnnnnnnnnnnnnnnnnnnnnnnnnnnnnnnnnnnnnnnnnnnnnnnnnnnnnnnnnnnnnnnnnnnnnnnnnnnnnnnnnnnnnnnnnnnnnnnnnnnnnnnnnnnnnnnnnnnnnnnnnnnnnnnnnnnnnnnnnnnnnnnnnnnnnnnnnnnnnnnnnnnnnnnnnnnnnnnnnnnnnnnnnnnnnnnnnnnnnnnnnnnnnnnnnnnnnnnnnnnnnnnnnnnnnnnnnnnnnnnnnnnnnnnnnnnnnnnnnnnnnnnnnnnnnnnnnnnnnnnnnnnnnnnnnnnnnnnnnnnnnnnnnnnnnnnnnnnnnnnnnnnnnnnnnnnnnnnnnnnnnnnnnnnnnnnnnnnnnnnnnnnnnnnnnnnnnnnnnnnnnnnnnnnnnnnnnnnnnnnnnnnnnnnnnnnnnnnnnnnnnnnnnnnnnnnnnnnnnnnnnnnnnnnnnnnnnnnnnnnnnnnnnnnnnnnnnnnnnnnnnnnnnnnnnnnnnnnnnnnnnnnnnnnnnnnnnnnnnnnnnnnnnnnnnnnnnnnnnnnnnnnnnnnnnnnnnnnnnnnnnnnnnnnnnnnnnnnnnnnnnnnnnnnnnnnnnnnnnnnnnnnnnnnnnnnnnnnnnnnnnnnnnnnnnnnnnnnnnnnnnnnnnnnnnnnnnnnnnnnnnnnnnnnnnnnnnnnnnnnnnnnnnnnnnnnnnnnnnnnnnnnnnnnnnnnnnnnnnnnnnnnnnnnnnnnnnnnnnnnnnnnnnnnnnnnnnnnnnnnnnnnnnnnnnnnnnnnnnnnnnnnnnnnnnnnnnnnnnnnnnnnnnnnnncagttcacgaagggaccttagtacacgctgtctcagtcctggctctctggtgtaaccgattcactacagaagtgcccaagaagctcactgaatggttcaaaaaagctttcagccttaaaacctccacatctgcggtgaggcacgcctacctgcagtgcatgttggcctcttatcggggnnnnnnnnnnnnnnnnnnnnnnnnnnnnnnnnnnnnnnnnnnnnnnnnnnnnnnnnnnnnnnnnnnnnnnnnnnnnnnnnnnnnnnnnnnnnnnnnnnnnnnnnnnnnnnnnnnnnnnnnnnnnnnnnnnnnnnnnnnnnnnnnnnnnnnaggccaaactgagcagtttctggcagctgattgtggatgagaaaaagcaggttttcacttctgagaaattcctgcttatggcttcagaggatgnnnnnnnnnnnnnnnnnnnnnnnnnnnnnnnnnnnnnnnnnnnnnnnnnnnnnnnnnnnnnnnnnnnnnnnnnnnnnnnnnnnnnnnnnnnnnnnnnnnnnnnnnnnnnnnnnnnnnnnnnnnnnnnnnnnnnnnnnnnnnnnnnnnnnnnnnnnnnnnnnnnnnnnnnnnnnnnnnnnnnnnnnnnnnnnnnnnnnnnnnnnnnnnnnnnnnnnnnnnnnnnnnnnnnnnnnnnnnnnnnnnnnnnnnnnnnnnnnnnnnnnnnnnnnnnnnnnnnnnnnnnnnnnnnnnnnnnnnnnnnnnnnnnnnnnnnnnnnnnnnnnnnnnnnnnnnnnnnnnnnnnnnnnnnnnnnnnnnnnnnnnnnnnnnnnnnnnnnnnnnnnnnnnnnnnnnnnnnnnnnnnnnnnnnnnnnnnnnnnnnnnnnnnnnnnnnnnnnnnnnnnnnnnnnnnnnnnnnnnnnnnnnnnnnnnnnnnnnnnnnnnnnnnnnnnnnnnnnnnnnnnnnnnnnnnnnnnnnnnnnnnnnnnnnnnnnnnnnnnnnnnnnnnnagtcttccatgaacgccatgggctccctttccatcctgtcaccggaccgggtcctcccacagctcatcagcaccatcaccgcctccgtgcagaaccctgcactgcgcctggtgacgcgggaggagtttgccattatgcagacccctgctggggagctgtatgacaaatccatcatccagagnagtgcccagcaggacagcataaaaaaggnnnnnnnnnnnnnnnnnnnnnnnnnnnnnnnnnnnnnnnnnnnnnnnnnnnnnnnnnnnnnnnnnnaggagataaagaagaagaaaggcatcaaagaggaggtgcagctgaccagcaagcagaaggagatgctgcaggcccagctggacagggaggcgcaggtccggaggcggctgcagganagctggatggggagctggaggcggcgcttggactgctggacatcatcctggtcaagaacccatccagcctgacccagtacatccctgttttggtcgactctttcctgcccttgctgaagtctcccttggctgctcccaggatcaagaaccccttcttgtccttggctgcctgtgtcatgccctctaggctcaaggctttggnnnnnnnnnnnnnnnnnnnnnnnnnnnnnnnnnnnnnnnnnnnnnnnnnnnnnnnnnnnnnnnnnnnnnnnnnnnnnnnnnnnnnnnnnnnnnnnnnnnnnnnnnnnnnnnnnnnnnnnnnnnnnnnnnnnnnnnnnnnnnnnnnnnnnnnncaggtgctgtgcccttgtccgcgccagccttctccttagtcttcccgtttctgaagatggtgctgacggagatgtcccaccacagtgaggaggaggaggagcggatggcccagattcttcagatcctcactgtccacgcccaactgagggcctcccctagcaccccacccgggcgagtggacgannnnnnnnnnnnnnnnnnnnnnnnnnnnnnnnnnnnnnnnnnnnnnnnnnnnnnnnnnnnnnnnnnnnnnnnnnnnnnnnnnnnnnnnnnnnnnnnnnnnnnnnnnnnnnnnnnnnnnnnnnnnnnnnnnnnnnnnnnnnnnnnnnnnnnnnnnnnnnnnnnnnnnnnnnnnnnnnnnnnnnnnnnnnnnnnnnnnnnnnnnnnnnnnnnnnnnnnnnnnnnnnngggctgatggaactccacatggtattgccagcacctgataccgatgagaagaatggcctgaaccttttgcggagactctgggtggtcaagtttgacaaggaagaggagatccggaagctggctgagaggnaggctctggtcaatgatgggcctagacctgcagccagacctctgctccttgctgatcgatgacgtaatctatcatgaggcggctgtaaggcaggcgggggccgaagccctttcccaagcagtggcacgttaccagcggcaggcagcggaggttatgggcaggctcatggagatttaccaggagaagctctacnggccacccccagtgctggatgctttgggacgagttatttcagaatctcctccagatcagtgggaagccaggtnccaggtgtggcttggcattggccctcaacaagctctcccagtatctggacagctctcaggtgaagccactctttcaattttttgtccctgatgccctcaacgaccgacacccagatgtccggaagtgcatgttggatgcagccctcgcaacgctcaacactcnnnnnnaggagaacgtcaactcactgttgccagtattcgaggagttcctgaagaacgcgcccaatgatgccagctacgatgctgtgcgacagagtgtggtggtcctgatgggctctctggccaagcacctggacaagagtgaccccaaagtgaagcccattgttgccaagctcatcgctgccctctctaccccctcccagcaggnnncaggtccaggagtccgtggccagctgtttgccaccccttgtgccagccatcaaggaggacgctggagggatgatccagaggctcatgcagcagctcctggagtcagacaagtacgcagagcgcaaaggggccgcgtatgggctggcaggcctggtgaagggcctgggcatcctctcgctgaagcaacaggagatgatggcagcactgactgatgccatccaggataagaagaacttccgccggcgagaggnnnnnnnnnnnnnnnnnnnnnnnnnnnnnnnnnnnnnnnnnnnnnnnnnnnnnnnnnnnnnnnnnnnnnnnnnnnnnnnnnnnnnnnnnnnnnnnnnnnnnnnnnnnnnnnnnnnnnnnnnnnnnnnnnnnnnnnnnnnnnnnnnnnnnnnnnnnnnnnnnnnnnnnnnnnnnnnnnnnnnnnnnnnnnnnnnnnnnnnnnnnnnnnnnnnnnnnnnnnnnnnnnnnnnnnnnnnnnnnnnnnnnnnnnnnnnnnnnnnnnnnnnnnnnnnnnnnnnnnnnnnnnnnnnnnnnnnnnnnnnnnnnnnnnnnnnnnnnnnnnnnnnnnnnnnnnnnnnnnnnnnnnnnnnnnnnnnnnnnnnnnnnnnnnnnnnnnnnnnnnnnnnnnnnnnnnnnnnnnnnnnnnnnnnnnnnnnnnnnnnnnnnnnnnnnnnnnnnnnnnnnnnnnnnnnnnnnnnnnnnnnnnnnnnnnnnnnnnnnnnnnnnnnnnnnnnnnnnnnnnnnnnnnnnnnnnnnnnnnnnnnnnnnnnnnnnnnnnnnnnnnnnnnnnnnnnnnnnnnnnnnnnnnnnnnnnnnnnnnnnnnnnnnnnnnnnnnnnnnnnnnnnnnnnnnnnnnnnnnnnnnnnnnnnnnnnnnnnnnnnnnnnnnnnnnnnnnnnnnnnnnnnnnnnnnnnnnnnnnnnnnnnnnnnnnnnnnnnnnnnnnnnnnnnnnnnnnnnnnnnnnnnnnnnnnnnnnnnnnnnnnnnnnnnnnnnnnnnnnnnnnnnnnnnnnnnnnnnnnnnnnnnnnnnnnnnnnnnnnnnnnnnnnnnnnnnnnnnnnnnnnnnnnnnnnnnnnnnnnnnnnnnnnnnnnnnnnnnnnnnnnnnnnnnnnnnnnnnnnnnnnnnnnnnnnnnnnnnnnnnnnnnnnnnnnnnnnnnnnnnnnnnnnnnnnnnnnnnnnnnnnnnnnnnnnnnnnnnnnnnnnnnnnnnnnnnnnnnnnnnnnnnnnnnnnnnnnnnnnnnnnnnnnnnnnnnnnnnnnnnnnnnnnnnnnnnnnnnnnnnnnnnnnnnnnnnnnnnnnnnnnnnnnnnnnnnnnnnnnnnnnnnnnnnnnnnnnnnnnnnnnnnnnnnnnnnnnnnnnnnnnnnnnnnnnnnnnnnnnnnnnnnnnnnnnnnnnnnnnnnnnnnnnnnnnnnnnnnnnnnnnnnnnnnnnnnnnnnnnnnnnnnnnnnnnnnnnnnnnnnnnnnnnnnnnnnnnnnnnnnnnnnnnnnnnnnnnnnnnnnnnnnnnnnnnnnnnnnnnnnnnnnnnnnnnnnnnnnnnnnnnnnnnnnnnnnnnnnnnnnnnnnnnnnnnnnnnnnnnnnnnnnnnnnnnnnnnnnnnnnnnnnnnnnnnnnnnnnnnnnnnnnnnnnnnnnnnnnnnnnnnnnnnnnnnnnnnnnnnnnnnnnnnnnnnnnnnnnnnnnnnnnnnnnnnnnnnnnnnnnnnnnnnnnnnnnnnnnnnnnnnnnnnnnnnnnnnnnnnnnnnnnnnnnnnnnnnnnnnnnnnnnnnnnnnnnnnnnnnnnnnnnnnnnnnnnnnnnnnnnnnnnnnnnnnnnnnnnnnnnnnnnnnnnnnnnnnnnnnnnnnnnnnnnnnnnnnnnnnnnnnnnnnnnnnnnnnnnnnnnnnnnnnnnnnnnnnnnnnnnnnnnnnnnnnnnnnnnnnnnnnntgctgtatttctctgaatcccttgtgcctacggcaaggaaggctttgtgtgacccactggaggaggtcagagaggcggcagccaagacattcgagcagctgcattccaccattggccaccaggctctggaggacattctcccatttttactaaagcagctggnnnnnnnnnnnnnnnnnnnnnnnnnnnnnnnnnnnnnnnnnnnnnnnnnnnnnnnnnnnnnnnnnnnnnnnnnnnnnnnnnnnnnnnnnnnnnnnnnnnnnnnnnnnnnnnnnnnnnnnnnnnnnnnnnnnnnnnnnnnnnnnnnnnnnnnnnnnnnnnnnnnnnnnnnnnnnnnnnnnnnnnnnnnnnnnnnnnnnnnnnnnnnnnnnnnnnnnnnnnnnnnnnnnnnnnnnnnnnnnnnnnnnnnnnnnnnnnnnnnnnnnnnnnnnnnnnnnnnnnnnnnnnnnnnnnnnnnnnnnnnnnnnnnnnnnnnnnnnnnnnnnnnnnnnnnnnnnnnnnnnnnnnnnnnnnnnnnnnnnnnnnnnnnnnnnnnnnnnnnnnnnnnnnnnnnnnnnnnnnnnnnnnnnnnnnnnnnnnnnnnnnnnnnnnnnnnnnnnnnnnnnnnnnnnnnnnnnnnnnnnnnnnnnnnnnnnnnnnnnnnnnnnnnnnnnnnnnnnnnnnnnnnnnnnnnnnnnnnnnnnnnnnnnnnnnnnnnnnnnnnnnnnnnnnnnnnnnnnnnnnnnnnnnnnnnnnnnnnnnnnnnnnnnnnnnnnnnnnnnnnnnnnnnnnnnnnnnnnnnnnnnnnnnnnnnnnnnnnnnnnnnnnnnnnnnnnnnnnnnnnnnnnnnnnnnnnnnnnnnnnnnnnnnnnnnnnnnnnnnnnnnnnnnnnnnnnnnnnnnnnnnnnnnnnnnnnnnnnnnnnnnnnnnnnnnnnnnnnnnnnnnnnnnnnnnnnnnnnnnnnnnnnnnnnnnnnnnnnnnnnnnnnnnnnnnnnnnnnnnnnnnnnnnnnnnnnnnnnnnnnnnnnnnnnnnnnnnnnnnnnnnnnnnnnnnnnnnnnnnnnnnnnnnnnnnnnnnnnnnnnnnnnnnnnnnnnnnnnnnnnnnnnnnnnnnnnnnnnnnnnnnnnnnnnnnnnnnnnnnnnnnnnnnnnnnnnnnnnnnnnnnnnnnnnnnnnnnnnnnnnnnnnnnnnnnnnnnnnnnnnnnnnnnnnnnnnnnnnnnnnnnnnnnnnnnnnnnnnnnnnnnnnnnnnnnnnnnnnnnnnnnnnnnnnnnnnnnnnnnnnnnnnnnnnnnnnnnnnnnnnnnnnnnnnnnnnnnnnnnnnnnnnnnnnnnnnnnnnnnnnnnnnnnnnnnnnnnnnnnnnnnnnnnnnnnnnnnnnnnnnnnnnnnnnnnnnnnnnnnnnnnnnnnnnnnnnnnnnnnnnnnnnnnnnnnnnnnngcggacgtgtccggcattgactggatggttcggcacgggcggagcctggcactttccgtggctgtgaatgtggctcctggcagactctgtgctggcagatacagcagtgatgttcaggaaatgatcctgagcagtgccacggcggacagnnnnnnnnnnnnnnnnnnnnnnnnnnnnnnnnnnnnnnnnnnnnnnnnnnnnnnnnnnnnnnnnnnnnnnnnnnnnnnnnnnnnnnnnnnnnnnnnnnnnnnnnnnnnnnnnnnnnnnnnnnnnnnnnnnnnnnnnnnnnnnnnnnnnnnnnnnnnnnnnnnnnnnnnnnnnnnnnnnnnnnnnnnnnnnnnnnnnnnnnnnnnnnnnnnnnnnnnnnnnnnnnnnnnnnnnnnnnnnnnnnnnnnnnnnnnnnnnnnnnnnnnnnnnnnnnnnnnnnnnnnnnnnnnnnnnnnnnnnnnnnnnnnnnnnnnnnnnnnnnnnnncagtccctctccaagatcctggatgtggccagtttggaggtgctgaatgaggttaaccgaaggtccctgaagaagctggccagccaggccgactccatggagcaggtggacgacaccatcctgacatgagaggcctgggcccacagcagcatttgccgctccacatctttgctcaatgttttcatttttgaaaatacatttgttccgatggggagcttggaagatggcgttcccagaaagtattttaatatatcaatagaccacagccaaagccttaaatcaaacccacacacaactgaaaattgcctcctccatctctcaccttttcctgtggagaagagaaggaaaagcacacgcatgcgcctcagcaaatggcagcccaggagctgtttgtccagtttagcacggctaggtcggaactataatannnnnnnnnnnnnnnnnnnnnnnnnnnnnnnnnnnnnnnnnnnnnnnnnnnnnnnnnnnnnnnnnnnnnnnnnnnnnnnnnnnnnnnnnnnnnnnnnnnnnnnnnnnnnnnnnnnnnnnnnnnnnnnnnnnnnnnnnnnnnnnnnnnnnnntctgattggatctgtcccctgtcagatgaaaatgatccacagctctggcagttctcaagtctggggaggggtataggtttgaaaggctgtttgaaagaggaatgtttaataaaggctttgatttaatcttgatataaacagatttttaaaaa

SEQ ID NO: 22692 - DNA, 1750 bp, Macaca Mulatta
  misc_feature (1)...(1750): n = A,T,C or G
gggggataaccattttaactgtattttttgcagcccgtaccttcttgggaatacaattgtctaactttttatttttggtctggctgttgtggtgtgcaaaactccgtacattgctattttgccacactgcaacaccttacagatgtggaagatgtgaaatttgtcatcaattatgactaccctaactcctcagaggattatattcatcgaattggaagaactgctcgcagtaccaaaacaggcacagcatacactttctttacacctaataacataaagcaagtgagcgaccttatctctgtgcttcgtgaagctaatcaagcaattaatcccaagttgcttcagttggtcgaagacagaggttcaggtaaggatgactgataggaaatgttggtagttgtgagtcacatcgttgtctacaaatccatttaaatggtattggagggtgagtaaaaccttgaacggataacttatgttgaaaaactgtaaaaccatttcacgcctgcaatgaatagatctaattctttctgtccacaatgatttgtgtcatagacataattgatcaatttgnnnnnnnnnnnnnnnnnncaggtcgttccaggggtagaggaggcatgaaggatgaccgtcgggacagatactctgcgggcaaaaggggtggatttaatacctttagagacagggaaaattatgacagaggttactctagcctgctaaagagagattttggggcaaaaactcagaatggtgtttacagtgctgcaaattacactaatgggagctttggaagtaattttgtgtctgctggtatacagaccagttttaggactggtaatccaacagggacttaccagaatggttatgatagcactcagcaatacggaagtaatgttccaaatatgcacaatggtatgaaccaacaggcatatgcatatcctgctactgcagccgcacctatgattggttatccaatgccaacaggatattctcaataagactttagaagtatatgtaaatgtctgtttttcataattgctctttatattgtgtgttatctgacaagatagttatttaagaaacatgggaattgcagaaatgactgcagtgcagcagtaattatggtgcactttttcgctatttaagttggatatttctctacattcctgaaacaatttttaggttttttttgtactagaaaatgcaggcagtgttttcacaaaagtaaatgtacagtgatttgaaatacaataaatgaaggcaatgcatggcctttcaataaaaaatatttgaagactgaattagtggaattgtacnnnnnnnnnnnnnnnnnnnnnnnnnnnnnnnnnnnnnnnnnnnnnnnnnnnnnnnnnnnnnnnnnnnnnnnnnnnnnnnnnnnnnnnnnnnnnnnnnnnnnnnnnnnnnnnnnnnnnnnnnnnnnnnnnnnnnnnnnnnnnnnnnnnnnnnnnnnnnnnnnnnnnnnnnnnnnnnnnnnnnnnnnnnnnnnnnnnnnnnnnnnnnnnnnnnnnnnnnnnnnnnnnnnnnnnnnnnnnnnnnnnnnnnnnnnnnnnnnnnnnnnnnnnnnnnnnnnnnnnnnnnnnnnnnnnnnnnnnnnnnnnnnnnnnnnnnnnnnnnnnnnnnnnnnnnnnnnnnnnnnnnnnnnnnnnnnnnnnnnnnnnnnnnnnnnnnnnnnnnnnnnnnnnnnnnnnnnnnnnnnnnnnnnnnnnnnnnnnnnnnnnnnnnnnnnnnngtc

SEQ ID NO: 22693 - DNA, 664 bp, Macaca Mulatta
ggagcatttacctctcccacaggtacaagaagctttgcgcaaacgcttctgccgtgcccaagcccccagctccaccatctccgtggtgagttgctggcttcaggtcctcagctctccctccgagagcatgtcagaaggcattccacggccttcctcagaggacatgggcacagccagaagttgagagaagactggggttgttttttagaatgagcaggtttcaggttccagctccccaccggtgaaatgagcagcctggtcagagcagtcaggatcagggtcccgggttcctgatcatcacctggactcctgctgattctcttgtctctggtttctccatctaaaaatctgcctccagttagcatttgaaggaaaagtgtgggatcagaactcatgggagttactatagcggagagcaaaatttctaggattcctgcagcccaggcaggagtgcatgtgagaaagtaaaacggatacaacttcttcaagggagagttgacaataataataatcgccctgcaattgggcctttccaccccttcctagtccacaaatgaaggctacatcttggaacacagcaaaggaggaagtgacactgccaggtgagaactagactttctcaggggcagtgtaagcagggtggattgaggagggtgtggcaaag

SEQ ID NO: 22694 - DNA, 692 bp, Macaca Mulatta
tcattgattctggagtctgtcgaagattggtggaacttttgatgcacaatgattataaagttgtatcacctgcattgagggcagttggtaatattgtgactggtgatgatattcaaacacagcccaaaggagtcaattagacaagaagcctgctggactgtttctaacatcactgctggaaatagagctcagattcaggctgttatagatgcaaatatttttcctgttttgattgagattcttcagaaagcagagtttcgtaccagaaaagaagcagcttgggctataactaatgcgacatcaggaggtactccagagcaaataaggtatttggtagccttaggctgcattaaaccactttgtgatcttttgactgttatggactccaaaatagtccaagtggctttaaatggacttgaaaatattttacgtcttggagaacaagaatctaagcagaatggaatcggcgttaatccatactgtgctctcattgaagaagcatatggtctggataaaattgagtttttgcaaagccatgaaaatcaggaaatttaccagaaggcatttgatctgattgaacattactttggtgtagaagaagatgaccccagcattgtacctcaggtggatgaaaaccaacaacagtttatatttcagcagcaggaagcaccaatggatggatttcaactttt

SEQ ID NO: 22695 - DNA, 345 bp, Macaca Mulatta
ggaaggagggaaaaagtaaatgaagttccaggaatgtcattctgaagtaatgaggcatggacagaaaatatacccctcacatcatcggattgagatggcagtcgaaatagcttcattgaagtgtcagcactcatccatcaatcaatcacccacaaggaaaaatagcaacagtacaaccgggcggcttttatgggatttactcttgggcatagggaatagcggctcaaatgtagttctgacatgaaaagcaaggtgctgatattattttttatgatgggaggatcataaaagtgaattgagaacagtgaggtctgtctttgcttaacctattcaaccagaaatgaa

SEQ ID NO: 22696 - DNA, 826 bp, Macaca Mulatta
  misc_feature (1)...(826): n = A,T,C or G
ggggcgtgcgtggcgtggcgtccataatggaaagatggagaatggctcccgttccttccggacccgcttgagggcgcactgcggcggcgtggggatgacttggagactcgtcttcgggaggaaactgctgctgtctgtggccctgactgcttaggtgcagccgtgttgcgggaaagagaaaatgccctgaattttgatggctgaaaagtattccattgtgcctgtgtcctgaagattcttcatcccttcatctgtggatggacaggacatgctgaagtgcacacctgtggaccacccagactgcctgccgctacacgatgccctccgcatcccccaggacttctttctgtcatcagtgaggacattgacccccctgaactgcagtcacaatggactcccaagggcaggtgacctcagggcccagcaaggcctcacactcaggttgaggagcccggggtggaccagatccccagtttcttctcttacggcacaggatccatctctgatgttcagtgaagactaccagaacagtctgctagagcagtaccatcagggtctggatcaaaaacacagaaaatacgtggttggagagctcatctggaattttgctgattcatgactaacagttcaattctttcttctgaggngcaagaatgacttgttgcgatgtgtatggatcccacgggactcgaactatcccatacagtcaaatcagtgaatgttgactctgctttcatggagtgtcctgcgccacctgctggtactctaacatgnnnnnnnnnnnnnnnnnntggcccgccgactacatttgccggcaagagaagac

SEQ ID NO: 22697 - DNA, 699 bp, Macaca Mulatta
  misc_feature (1)...(699): n = A,T,C or G
catttattcattcttgtttctatatagcaaaactgaatgtcaaaagtaccttctgtccacacacacaaaatctgcatgtattggttggtggtcctgtcccctaaagatcaagctacacatcagttttacaatataaatacttgtactaccttaatgataaggactccttaaagttccatttgctaatgatacactgtttgggctggccagtttttcatgcatgcagcttgacgattgagcacagtcaggcctttgtatnnnnnnnnnnnnnnnnnnnnnnnncaaaacctattcaaatgggttctagttcaatttgtttagtataaattgtcatagctggtttacttgaaacaaacacatttaaaattggtttacctcaggatgacgtgcagaaaaatggggtgaaggataaaaccgttgagacttggccccactggtaggaatggtcctcttgtaccttcgtgtgctccgacccttggtgacgacacccccttggtggcatccccggtttttttggttaaccgtttcccccttgtttctaggggaaacaggggtcagggtttccttttttcannnnnnnnnnnnnnnnnnnnnnnncaggggaacttttggacccccttttttaaacctctaaaaaaattttgaccccccaaaaaggttggttttgacccccccaaccccaaatttttgtaaaaaaaa

SEQ ID NO: 22698 - DNA, 661 bp, Macaca Mulatta
  misc_feature (1)...(661): n = A,T,C or G
gttgctttcttgggctctctatatcaataacctgtctgcagatatctatctatataaagatattatatataaatataaatttacatatatatgcacatgtatatatagttgtacatatatgtgtgtatatatatacttaaatgtaatatttacaaaataaaactgtgatctcgtctagagaaaatgtattcatattacaaactgctcttccatatttatgtatcatattatacctttttattattgttataattattatgggtatttctaattaatatgatgttgaaacctgtttggcaccttctggaagctaccaaaaaaatgacactccattgaagtgcttaaaagctgttctcataagaattctactggcctatggnnnnnnnnnnnnnnnnnnnnnnnnnnnnnnnnnnnnnnnnnnnnnnnnnnnnnnnnnnnnnnnnnnnnnnnnnnnnnnnnnnnnnnnnnnnnnnnnnnnnnnnnnnnnnnnnnnnnnnnnnnnnnnnnnnnnnnnnnnnnnnnnnnnnnnnnnnnnnnnnnnnnnnnnnnnnnnnnnnnnnnnnnnnnnnnnnnnnnnnnnnnnnnnnnnnnnnnnnnnnnnnnnnnnnnnnnnnnnnnnnnnnnnnnnnnnnnnnnnnnnnnnnnnnnnnnnnnnnnnnnn

SEQ ID NO: 22699 - DNA, 720 bp, Macaca Mulatta
  misc_feature (1)...(720): n = A,T,C or G
nnnnnnnnnnnnnnnnnnnnnnnnnnnnnnnnnnnnnnnnnnnnnnnnnnnnnnnnnnnaacnnnnnnnnnnnnnnnnnnnatggagttaaaaataaaacagtattaaaaggttaaagtttatataatacatatgtacacaattagtggtgtttctttttcagacaaaatactgaaacaaatattagttaaaaacaaactatacagaagacttcataccgtaacaatagcttaaatttacaatttcttcaaagggagaagagattcacatatctgacaacaaactagcaatctagttttctaattaaatctactttatgatgctnnnnnnnnnnnnnnnnnntaatttaaaatatttagaaatagctagcctatgtacagcaagtttttgtgtctttttttaataaatagatttctaggagtcagtatatatttgatactcttccttaagaaaatagaagtttaggtcaagtgttcagctttatcactttgacactgtccttatctcacaatggaggaatttagaaaggaccttaacagttttacaaacataaataaagccttagtcacacnnnnnnnnnnnnnnnnnnnnttagggatatcttagagtaataaagtgacttcctcatataaatagtttgaaagggtacttaagtttttcacccaaattgtgatatacaaaaaggttattaccaagcaacctacatgtcaataaagcccc

SEQ ID NO: 22700 - DNA, 599 bp, Macaca Mulatta
acaagatgaaggagaggcttcatccaaaatagctaagacatgatttccttgaatgtggcttaagaaatatggacacttaatactaccttgaatataagattagtaataaaggatgtgattgtggaatggagattcagttttcatctggttcattaattctataaggccataaaacaggtaatataaaaagcttccatgattttatttatatgtacattagaaggaacttctaggtgttactgcaatttctcaacgtgttgtttcaacagtactaatttaatgctgatatattctagatgaagttttacattgttgagctattgccgttctcttgggaactgaactcactttcctcttgagtctttggatttgacattgcatttgaccttttatgtagtaattgacatgtgccagggcaatggtgaatgagaatttacccctgggtccaagcattctgagaaactctcgattattcatatagagtcaaatggtaggcatttcctatcacctatttccattcaacaagagagctacattcatttagctaaacagattccaaagagtagaattgtattgactgtgactaatttcaaaatgct

SEQ ID NO: 22701 - DNA, 892 bp, Macaca Mulatta
tggtgaccgagtttattttactaggattttctggacaatgggaactacaaattttcttctttgtgacattttccttaatctacggtgctactgtggcgggaaacattctcattatggtcacagtgacatgtagttcgacccttcattctcccatgtactttctccttggaaatctctcttttttggacatgtgtctttccactgccacgacacccaagatgatcatagatttgctcactgaacacaagaccatctctgtgtggggctgcatgacccaaatgttctttatgcacttctttgggggtgctgagatgactcttctgataatcatggcctttgacaggtatgtagccatatgtaaacccctgcactataggacactcatgagccacaggctgctacatgggtttgtgacactttcatggataactggtttcatgcataccatgagccagatagttttaacagtgaacttgcctttctgtggtcacaatgtcataaacaacatattttgtgatcttccccttgtgatcaagcttgcttgcattgaaacatataccctggaattatttgtcattgctgacagtgggctgctctcttttacttgtttcatcctcttgcttgtttcttacattgtcatcctggtcagtgtaccaaaaaaatcatcagttgggctctccaaggcactgtccacattgtctgcccacatcattgtggtcactctgttctttggaccttgtatttttatctatgcttggccattcagtagtttggcaagcaataaaactctagctgtattttatacagttatcacaccgttactgaatccgattatttacaccctgagaaataagaaaatgcaagaggccataagaaaattgcggttccaata

SEQ ID NO: 22702 - DNA, 96 bp, Macaca Mulatta
tacgtcggtaacctttccagagatgtgacagaagctctaattctgcaactctttagccagattggaccttgtaaaaactgcaaaatgattatggat

SEQ ID NO: 22703 - DNA, 840 bp, Macaca Mulatta
acacccttggattagcaagtctgtccccagacctctcactctccatagacaaggtgtcagggaaacggatagttaatcctgcaagtgctttccagggattgggttctaagctgcctccagttgttggaatagctaataagcttaaagctaacttaatgtcagaaaccaatggtagtatacccctatgcagtgtgttgccaaaactgattagctagtggacagagatatgcccagagatgcatatgtatgtatttttatgatcttgcaaacctgcagatggaaaaattgcaagcccattggtggatgtttttgttagactagactttttttaaacaagacaaaacatttttatataactataaaggaattctttaagggctaattacctaaccagcttgtattggccatctggaatatgcattaaatgactttttataggtcaatgcatctttgttattatcgtcagaggtatttcaactgatgtattatactattggcttaaatctctttctctcaagatagaaggtatagcaaaaaatgtatcccaactactcctcacttctagtgtccctcggtgtctgttctggaaagggtaatttgggatatggtgttagttgtggctgaaagccaatgctaggtcccttaccccagtagggcattctctaggctcatcgtaggtgaaagagctcacagcagactggggggtgggggagcaccaggaagctgttggtgacctggacaattggtgtccctggttttcagtgactcattcctcttcccttcagttctctgatgtttggtgttattatgttcttattttgcctctgatttgtttcctag

SEQ ID NO: 22704 - DNA, 87 bp, Macaca Mulatta
gtacaaggtgaagaatgcacaccgaggacattggcaagggagagaagagcctggcgctggcgcttttgtttctttgctcttttaata

SEQ ID NO: 22705 - DNA, 1055 bp, Macaca Mulatta
  misc_feature (1)...(1055): n = A,T,C or G
cagattcccgatacattcttctgcctgtcgtgttacatcacctccacattcacttgcaagaacagaaggacctgatcatgtgtgcacgtatccttagcaacgtattttgtctcatcaagaaaaatagctcnnnnnnnnnnnnnnnnnnnnnnnnnnnnnnnnnnnnnnnnnnnnnnnnnnnnnnnnnnnnnnnnnnnnnnnnnnnnnnnnnnnnnnnnnnnnnnnnnnnnnnnnnnnnnnnnnnnnnnnnnnnnnnnnnnnnnnnnggggagtttgtcgcttgtctcctgtccctattacgacaaatgactgatagacattatcaacagcttcttgatagtttcaatacgaaggaagaactaagggnnnnnnnnnnnnnnnnnnnnnnnnnnnnnnnnnnnnnnnnnnnnnnnnnnnnnnnnnnnnnnnnnnnnnnnnnnnnnnnnnnnnnnnnnnnnnnnnnnnnnnnnnnnnnnnnnnnnnnnnnnnnnnnnnnnnnnnnnnnnnnnnnnnnnnnnnnnnnnnnnnnnnnnnnnnnnnnnnnnnnnnnnnnnnnnnnnnnnnnnnnnnnnnnnnnnnnnnnnnnnnnnnnnnnnnnnnnnnnnnnnnnnnnnnnnnnnnnnnnnnnnnnnnnnnnnnnnnnnnnnnnnnnnnnnnnnnnnnnnnnnnnnnnnnnnnnnnnnnnnnnnnnnnnnnnnnnnnnnnnnnnnnnnnnnnnnnnnnnnnnnnnnnnnnnnnnnnnnnnnnnnnnnnnnnnnnnnnnnnnnnnnnnnnnnnnnnnnnnnnnnnnnnnnnnnnnnnnnnnnnnnnnnnnnnnnnnnnnnnnnnnnnnnnnnnnnnnnnnnnnnnnnnnnnnnnnnnnnnnnnnnnnnnnnnnnnnnnnnnnnnnnnnnnnnnnnnnnnnnnnnnnnnnnnnnnnnnnnnnnnnnnnnnnnnnnnnnnnnnnnnnnnnnnnnagtctactaaagaaaattgagcgggaaacatggcgggaaagtggcgtttcattaattgctactgtaactcgtctaatggagaggttgttggattacagg

SEQ ID NO: 22706 - DNA, 179 bp, Macaca Mulatta
taattcaggggatcctagtggccaacttccttggctcctatactggctacacaagcagttttgtggtgatttggggaaacagattcttgggagcttatcagagcatctcagcattgattgacacatccatagtttttagtgtagaaagggtgaccagcagctgggcacagtggcttgct

SEQ ID NO: 22707 - DNA, 1736 bp, Macaca Mulatta
  misc_feature (1)...(1736): n = A,T,C or G
agacagagggagcagtgaacagtgatagggtgtttccaccatggtcgtcactcaggccccggctggaatcaggggccacctccggatccgcagcctcctggcccggcagtgcctggcagagtttctgggtgtgtttgtgctcatgnnnnnnnnnnnnnnnnnnnnnnnnnnnnnnnnnnnnnnnnnnnnnnnnnnnnnnnnnnnnnnnnnnnnnnnnnnnnnnnnnnnnnnnnnnnnnnnnnnnnnnnnnnnnnnnnnnnnnnnnnnnnnaggggcccacctgaatccagccttctccctggccatgtgcatcgttggacgcctgccctgggtcaagctccccatttacatcttagtgcagttgctgtctgctttctgtgcttcgggagccacctatgttctctacnnngatgccctacagaactatacaggtgggaacctgacagtgactggccccaaggaaacagcctccatttttgccacctatcctgccccctatctgtccctgaacaacggcttcctggatcaggtnaggttctgggcaccggtatgctgatggtggggctcttagccatcctggacagacggaacaagggagtccctgcgggtctggagcctgtggtggtggggatgctgatcctggccatcgggttatccatgggtgccaactgtgggtttccactcaaccctgcccgggacttgggcccacgtctcttcacctacgtggctggctggggtcctgaagtcttcagncagtgctggtaatggctggtggtgggtgcctgtggtggcccctctggtgggggccaccctttggcacagccacttaccagctattggtggctctgcaccaccctgaggacccagagccagctcaggatctggtgtctgcccaacacaaagcctcagagttggaaactcctgcctcagctcagatgctggagtgtaagctatgattaggacaacccttacttcactcatggaccctgaagccagccactgaccccgcctgggagcaacagttattcttcccctttgttaatgtgccagaacctgggaggcttctctgtttacccatttggcatcccttcttcctaaactaagaaggatcctggacagggagaagtggaggaggataaggtaccaggactcaggcttctcattccctccttctgcaaagcggttttctgaccctcaaggcctctcgtaaagtagttgctcgaggtagccgctagagggtgcacacctggccgctggatggggactgctccgggcatctgcagggtggagggggcccccatcccagtgtagggcacaaccctggggactgccctccgtagcctgtcccgactgccgactcccagctcgcatcgcctcggcgcctcccactttcaccccctcaggggcgcctcccccagagggtnnnngagggcggtggagcacagagacagagagcaaggcggggaaactgaggcaccgttcctagaaatctcggtgctgtgtcgttcattcaaagagagttgagaaacagtgaaatgagccagggcgaggaggtaaggtgaaggaaccgagggcggacggctccgaggtgcgaaagtctggggctgaaggcaacctagcgctggggaaaattctggttgttcaccacttctacagctctcctgccgctccctgcagaggatgctcgttttgcagagaaggcagtgttcctctattcccttcttccgaattaaaaa

SEQ ID NO: 22708 - DNA, 343 bp, Macaca Mulatta
tttgggaagttattcctttattttccgttgtatcattgttaaaaatactgtcaaatccgtaatacctttaggagctactgagggaaatcagtatcattatttaaagtcacaccttgtgtttttactactttattcaggaggattaaacctgaataacttttggctgttgtgctaatagtgtaaataaaataagcctgccttcataaaacactaacttttaaaaggaatagctaaatgacttctaaaattatgcctattaacatgtgtaattagttggcagctcaaatgtttgggagtgcaagaaattaggcaccccaggatataggtcatacagggatatata

SEQ ID NO: 22709 - DNA, 276 bp, Macaca Mulatta
agaaagaggacagtaggccataaaatgttagcaatgttatgctatgtctatgtagataagcatgggccattaaaaatagcaaactggaaacagttcatgtgtggggggcaagattggaagtaattttaatgtatctaagaagtgatttcctttattgttgtactcatgtacaaagactaaagatcaggacaaatccagaaaataaaaacaaaacagtatttattaggctacttcctgtcgtagtgaaattaaacactaaaagtaatgtaatctcag

SEQ ID NO: 22710 - DNA, 830 bp, Macaca Mulatta
ggggttggttggtccctgagctcgcgcgactgtgcggcaagacgtttggctttgaaatgcagcgggatttggtgagtttcccgctgtctccagcggtgcgggtgaagctggtgtctgcgggtttccagactgctgaggaactcctagaggtgaaaccctccgagcttagcaaagaagttgggatatctaaagcggaagccttagaaactctgcagattatcagaagagaaagtctcacaaataaaccaagatatgctggtacatctgagtcaggcaagaagtgtacagcactggaacttcttgagcaggagcatacccagggcttcataattaccttctgttcagcactagatgatattcttgggggtggagtacccttaatgaaaacaacagaaatttgtggtgcaccaggtgttggaaaaacacaattatgtatgcaatttggcagtagatgtgcagataccagaatgttttggaggagtggcaggtgaaacagtttttattgatacagagggaagttttatggttgatagagtggtagaccttgctactgcctgcattccgccacttcagcttatagcagaaaaacacaagggagaggaaacaccgaaaaagctttggaggaatttcactcttgataataatcctttcccatatttattatttttcgcggccgtgactacccagagtttactggccccagttttaaccttcttcccgaatttccctttcgaaacccttcaagggttcaactaagtgaaaatgggaaggggattggctttttccgtttccccccgggacccaaaaagaacctgtccccttcgcaaccc

SEQ ID NO: 22711 - DNA, 1037 bp, Macaca Mulatta
  misc_feature (1)...(1037): n = A,T,C or G
aaggaggtggctgttttgtagctggagagctctgtgggtggcaggactgagcttgaaaaccagaaacagcccccgagccttgtgacgtgggaggcaggaggcgggtctgtctccctgggcctggggtnnnnnnnnnnnnnnnnnnnnnnnnnnnnnnnnnnnnnnnnnnnnnnnnnnnnnnnnnnnnnnnnnnncctcctgcacgggccggcccggttagcacagaggcaccagggcagcagcgcacgcaggnccccctagaacccgccctgnggaccagatggtggctctggccccttgtggccgtctgcactgcagacttctttcgggacttggcagagaggatcatgagggactcccctgtcattgatgggnnnnnnnnnnnnnnnnnnnnnnnnnnnnnnnnnnnnnnnnnnnnnnnnnnnnnnnnnnnnnnnnnnnnnnnnnnnnnnnnnnnnnnnnnnnnnnnnnnnnnnnnnnnnnnnnnnnnnnnnnnnnnnnnnnnnnnnnnnnnnnnnnnnnnnnnnnnnnnnnnnnnnnnnnnnnnnnnnnnnnnnnnnnnnnnnnnnnnnnnnnnnnnnnnnnnnnnnnnnnnnnnnnnnnnnnnnnnnnnnnnnnnnnnnnnnnnnnnnnnnnnnnnnnnnnnnnnnnnnnnnnnnnnnnnnnnnnnnnnnnnnnnnnnnnnnnnnnnnnnnnnnnnnnnnnnnnnnnnnnnnnnnnnnnnnnnnnnnnnnnnnnnnnnnnnnnnnnnnnnnnnnnnnnnnnnnnnnnnnnnnnnnnnnnnnnnnnnnnnnnnnnnnnnnnnnnnnnnnnnnnnnnnnnnnnnnnnnnnnnnnnnnnnnnnnnnnnnnnnnnnnncagcgtgtggtgaaggagctgaaccgcctgggagtcctcattgacttggctcacgtgtctgtggccaccatgaaggccaccctgcagctgtccagagcccccgtcatcttcagccactcctcggcctacagcgtgtgcgcaagccggcgcaacgtgcccgacgacgtcctgaggctggt

SEQ ID NO: 22712 - DNA, 777 bp, Macaca Mulatta
  misc_feature (1)...(777): n = A,T,C or G
gggtccaccctattatctttatctttnncagnacatcgtagctgcattaaaaaaaatacaatatggacatgtaaaaagacaaaaaccaagttatctgtttcctgttctcttgtatagctgaaattccagttttaggagctcagttgagaaacagttccatccaactggnnnnnnnnnnnnnnnnnnnnaagaaagcttcttgtgatccttcggggcttctgtgaaaaacctgacgcagtgctccattccaaactcagaaggctttgggatatgctgtattttaaagggacggtttgtaaattgggctgtaaagcaaactggggctgtgttttnnnnnnnnnnnnnnnnnnnnnntttaacagttttacttctggcctttcctagctagagaaggagttaatatttctaaggtaactcccatatctcatctaatgacattgatttctaatgatacaaatttcaacctgacattgatgccaagctttttttttgccacaaagaagattcttatcaagagtgggctttgtggaaacagctggtactgatgttcacctttctatatgtactagcatttttccatgctgatgtttatgtactggaaaacagttctgcactcnnnnnnnnnnnnnnnnnnnnntgtcacatctaaataaaaaatccggtcttttaagnnnnnnnnnnnnnnnnnnnnntgaatgtgcccaattcagtacctcaatccctgaaaaacactccttctaaccctaaacccttaccttgaatgggaaacccccttta

SEQ ID NO: 22713 - DNA, 303 bp, Macaca Mulatta
tgtcatcagcctggtggggctactacagtgtgctgccaaatgggacagcacacagcctgtgcacacggcacatgtaatggatctccccacgccggccgcatttcacactcctacacatgtctcaaactgtaaggtcggcacttgacaccaaggtaaattatctcctgctcatgtgtcagtgtctacctgcccaataagtggctttcatatatcaagtcaccaggtacctcccatcctaacagaggtaacccagcaagtcaaggccaggaggaccaggggtgcagacagaacacatactggaac

SEQ ID NO: 22714 - DNA, 420 bp, Macaca Mulatta
  misc_feature (1)...(420): n = A,T,C or G
aggaagaagagctgatccagtcagagaactcagcctccatcttcaacacgctatcggatatcccgtcgcagatggaggacgcggagctgcttctgggggtggccatgcggctggccggctccctcaccgacgtggctgtggagactcagcgccgcaagcacctggcctatctcattgcagaccagggtcagctcctggggaccggcaccctcaccaacctctctcaggtncaggttgttcgccgcaggacccagcggaggaagtccaccatcactgctctgctcttcggnggggaggatgacctggaggcactcaaggccaagaacatcaagcagacggaactggtggctgacctccggggagccatcctgcgcgtggcgcgtcacttccagtgcgcagaccccaaaaactgcagcgtgg

SEQ ID NO: 22715 - DNA, 540 bp, Macaca Mulatta
  misc_feature (1)...(540): n = A,T,C or G
ttgaggtcaattaaaaggagaaaaaaatataatttctcacttngcttttagtcaaaagaaaaaatgctttatagcaaaatgaaagagaacatgaaatgcttctttctcagtttattggttgaatgtgtacctatgtgaatctggaaataactaatgtgtntgataattagttnagttcgtggcttcatggaaactccctgtaaactaaaagcttcagggttatgtctacgttcattctatanaagaaatgcanactatcactgtattttaatatttgttattctttcatgaatagaaattnatgtanaagcaaacaaaatacttttacccacttaaaaagagaatataacattttatgtcactataatcttctgntttttaagttagtgtatattttgntgngactatctttcttttgcggcgtgaataaatcttttatcttgaatgtaatngaatctggtggnatcaattgcttacctgtctcccacagtngtccanccattaataagaacatgatcttttttactgcctataaannaa

SEQ ID NO: 22716 - DNA, 404 bp, Macaca Mulatta
  misc_feature (1)...(404): n = A,T,C or G
ggtctcagccacctttgcggctagtcttgtcagcagcccggccattggagcatatctttctgccagttatggagacagcctcgttgtgctggtggctacagtggtggctcttctggacatctgcttcatcttagtggctgttccagaatctctgcctgagaaaatgagaccggtttcctggggagctcagatttcttggaaacaagcggacccttttgcnnnnnnnnnnnnnnnnnnnnnnnnnnnnnnnnnnnnnnnnnnnnnnnnnnnnnnnnnnnnnnnnnnnnnnnnnnnnnnnnnnnnnnnnnnnnnnnnnnnnnnnnnnnnnnnnnnnnnnnnnttttggatctgttaaaattgcagcattcatagctatggtaggaattctgtctattgtggctcag

SEQ ID NO: 22717 - DNA, 809 bp, Macaca Mulatta
  misc_feature (1)...(809): n = A,T,C or G
gtatacaatgttactagggaggcccccatttgaaactacaaatctcaaagaaacttataggtgcataagggaagcaaggtatacaatgccgtcctcattgctggctcctgccaagcacttaattgctagtatgttgtccaaaaacccagaggatcgtcccagtttggatgacatcattcgacatgannnnnnnnncagggcttcactccggacagactgtcttccagctgttgtcacacagttccagatttccacttatcaagcccagctaagaatttctttaagaaagcagctgctgctctttttggtggcaaaaaagacaaagcaagatatattgacacacatannnnnnnnnnnnnnnnnnnnnnnnnnnnnnnnnnnnnnnnnnnnnnnnnnnnnnnnnnnnnnnnnnnnnnnnnnnnnnnnnnnnnnnnnnnnnnnnnnnnnnnnnnnnnnnnnnnnnnnnnnnnnnnnnnnnnnnnnnnnnnnnnnnnnnnnnnnnnnnnnnnnnnnnnnnnnnnnnnnnnnnnnnnnnnnnnnnnnnnnnnnnnnnnnnnnnnnnnnnnnnnnnnnngccttgaagacagtacgatgggaagtgttgcagacacagtggcaagagttcttcggggatgtctggaaaacatgccagaagctgattgcattcccaaagagcaactgagcacatcatttcagtgggtcaccaaatgggttgattactctaacaaatacggcttcgggtaccagctttcagaccacaccgtcggtgtccttttcaacaatggtgctcacatgagcctccttccaga

SEQ ID NO: 22718 - DNA, 2043 bp, Macaca Mulatta
  misc_feature (1)...(2043): n = A,T,C or G
gggaagctcaccacacacaaagaggaactctgtcccaagaacccttatctccaggactttctgagtgcagagnnnnnnnnnnnnnnnnnnnnnnnnnnnnnnnnnnnnnnnnnnnnnnnnnnnnnnnnnnnnnnnnnnnnnnnnnnnnnnnnnnnnnnnnnnnnnnnnnnnnnnnnnnnnnnnnnnnnnnnnnnnnnnnnnnnnnnnnnnnnnnnnnnnnnnnnnnnnnnnnnnnnnnnnnnnnnnnnnnnnnnnnnnnnnnnnnnnnnnnnnnnnnnnnnnnnnnnnnnnnnnnnnnnnnnnnnnnnnnnnnnnnnnnnnnnnnnnnnnnnnnnnnnnnnnnnnnnnnnnnnnnnnnnnnnnnnnnnnnnnnnnnnnnnnnnnnnnnnnnnnnnnnnnnnnnnnnnnnnnnnnnnnnnnnnnnnnnnnnnnnnnnnnnnnnnnnnnnnnnnnnnnnnnnnnnnnnnnnnnnnnnnnnnnnnnnnnnnnnnnnnnnnnnnnnnnnnnnnnnnnnnnnnnnnnnnnnnnnnnnnnnnnnnnnnnnnnnnnnnnnnnnnnnnnnnnnnnnnnnnnnnnnnnnnnnnnnnnnnnnnnnnnnnnnnnnnnnnnnnnnnnnnnnnnnnnnnnnnnnnnnnnnnnnnnnnnnnnnnnnnnnnnnnnnnnnnnnnnnnnnnnnnnnnnnnnnnnnnnnnnnnnnnnnnnnnnnnnnnnnnnnnnnnnnnnnnnnnnnnnnnnnnnnnnnnnnnnnnnnnnnnnnnnnnnnnnnnnnnnnnnnnnnnnnnnnnnnnnnnnnnnnnnnnnnnnnnnnnnnnnnnnnnnnnnnnnnnnnnnnnnnnnnnnnnnnnnnnnnnnnnnnnnnnnnnnnnnnnnnnnnnnnnnnnnnnnnnnnnnnnnnnnnnnnnnnnnnnnnnnnnnnnnnnnnnnnnnnnnnnnnnnnnnnnnnnnnnnnnnnnnnnnnnnnnnnnnnnnnnnnnnnnnnnnnnnnnnnnnnnnnnnnnnnnnnnnnnnnnnnnnnnnnnnnnnnnnnnnnnnnnnnnnnnnnnnnnnnnnnnnnnnnnnnnnnnnnnnnnnnnnnnnnnnnnnnnnnnnnnnnnnnnnnnnnnnnnnnnnnnnnnnnnnnnnnnnnnnnnnnnnnnnnnnnnnnnnnnnnnnnnnnnnnnnnnnnnnnnnnnnnnnnnnnnnnnnnnnnnnnnnnnnnnnnnnnnnnnnnnnnnnnnnnnnnnnnnnnnnnnnnnnnnnnnnnnnnnnnnnnnnnnnnnnnnnnnnnnnnnnnnnnnnnnnnnnnnnnnnnnnnnnnnnnnnnnnnnnnnnnnnnnnnnnnnnnnnnnnnnnnnnnnnnnnnnnnnnnnnnnnnnnnnnnnnnnnnnnnnnnnnnnnnnnnnnnnnnnnnnnnnnnnnnnnnnnnnnnnnnnnnnnnnnnnnnnnnnnnnnnnnnnnnnnnnnnnnnnnnnnnnnnnnnnnnnnnnnnnnnnnnnnnnnnnnnnnnnnnnnnnnnnnnnnnnnnnnnnnnnnnnnnnnnnnnnnnnnnnnnnnnnnnnnnnnnnnnnnnnnnnnnnnnnnnnnnnnnnnnnnnnnnnnnnnnnnnnnnnnnnnnnnnnnnnnnnnnnnnnnnnnnnnnnnnnnnnnnnnnnnnnnnnnnnnnnnnnnnnnnnnnnnnnnnnnnnnnnnnnnnnnnnnnnnnnnnnnnnnnnnnnnnnnnnnnnnnnnnnnnnnnnnnnnnnnnnnnnnnnnnnnnnnnnnnnnnnnnnnnnnnnnnnnnnnnnnnnnnnnnnnnnnnnnnnnnnnnnnnnnnnnnnnnnnnnnnnnnnnnnnnnnnnnnnnnnnnnnnnnnnnnnnnnnnnnnnnnnnnnnnnnnnnnnnnnnnnnnnnnnnnnnnnnnnnnnnnnnnnnnnnnnnnnnnnnnnnnnnnnnnnnnnnnnnnnnnnnnnnnnnnnnnnnnnnnnnnnnnnnnnnnnnnnnggactagctacaccaacatatgcactttttacatttagaaacactgtgattagaccacagaacaataaatatgtgccatcagac

SEQ ID NO: 22719 - DNA, 523 bp, Macaca Mulatta
  misc_feature (1)...(523): n = A,T,C or G
cacagctcctgctgactcccacttatggatctcagtttgctcctttttatggacctttaatggagagagagtaacctccacagaatgtctgaattcttgcattctttacccttccatcactgtatacttttttaaaaaaacatcaacccaaactcccgcctcacttcgtctctacagaatgttcacagcaaaacacgtttggtctgtatttagattcttcaagaattcagtagtctttcaagaggttgaatgtgtttaacagctgggaacctgttgggagctcacaagcgctgcatatacagggtagcaaaagaaaatggaattaaacccacaaaacaaacnnnnnnnnnnnnnnnnnnnnnnnnngaaggggggcccggtaaccaaannnnnnnnnnnnnnnnnnnnnnnnnnnnannnnnnnnnnnnnnnnnnnnnnnnnnnnnnnnnnnnnnnnnnnnnnnnnnnnnnnnnnnnnnnnnnnnnnnnnnnnnnnnnnnnnnnnnnnnnnnnnnnnnnnnnn

SEQ ID NO: 22720 - DNA, 1248 bp, Macaca Mulatta
  misc_feature (1)...(1248): n = A,T,C or G
aggtttggtcaagcctcctctaaaacgctcccgatctgcacctgatggaggagatgaggagaaccaggagcagctacaagaccagattgccgagggcagctccatagaagaggaggagaaaacagataatgctaccttactgcgtctgttagaggaaggagaaaannnnnnnnnnnnnnnnnnnnnnnnnnnnnnnnnnnnnnnnnnnnnnnnnnnnnnnnnnnnnnnnnnnnnnnnnnnnnnnnnnnnnnnnnnnnnnnnnnnnnnnnnnnnnnnnnnnnnnnnnnnnnnnnnnnnnnnnnnnnnnnnnnnnnnnnnnnnnnnnnnnnnnnnnnnnnnnnnnnnnnnnnnnnnnnnnnnnnnnnnnnnnnnnnnnnnnnnnnnnnnnnnnnnnnnnnnnnnnnnnnnnnnnnnnnnnnnnnnnnnnnnnnnnnnnnnnnnnnnnnnnnnnnnnnnnnnnnnnnnnnnnnnnnnnnnnnnnnnnnnnnnnnnnnnnnnnnnnnnnnnnnnnnnnnnnnnnnnnnnnnnnnnnnnnnnnnnnnnnnnnnnnnnnnnnnnnnnnnnnnnnnnnnnnnnnnnnnnnnnnnnnnnnnnnnnnnnnnnnnnnnnnnnnnnnnnnnnnnnnnnnnnnnnnnnnnnnnnnnnnnnnnnnnnnnnnnnnnnnnnnnnnnnnnnnnnnnnnnnnnnnnnnnnnnnnnnnnnnnnnnnnnnnnnnnnnnnnnnnnnnnnnnnnnnnnnnnnnnnnnnnnnnnnnnnnnnnnnnnnnnnnnnnnnnnnnnnnnnnnnnnnnnnnnnnnnnnnnnnnnnnnnnnnnnnnnnnnnnnnnnnnnnnnnnnnnnnnnnnnnnnnnnnnnnnnnnnnnnnnnnnnnnnnnnnnnnnnnnnnnnnnnnnnnnnnnnnnnnnnnnnnnnnnnnnnnnnnnnnnnnnnnnnnnnnnnnnnnnnnnnnnnnnnnnnnnnnnnnnnnnnnnnnnnnnnnnnnnnnnnnnnnnnnnnnnnnnnnnnnnnnnnnnnnnnnnnnnnnnnnnnnnnnnnnnnnnnnnnnnnnnnnnnnnnnnnnnnnnnnnnnnnnnnnnnnnnnnnnnnnnnnnnnnnnnnnnnnnnnnnnnnnnnnnnnnnnnnnnnnnnnnnnnnnnnnnnnnnnnnnnnnnnnnaggctgtaaacaaaatggcaccaagcttggagatgttatccttccaccctgggcaaaaggggacccacgagaattcatcagagtccatcgtgagg

SEQ ID NO: 22721 - DNA, 409 bp, Macaca Mulatta
  misc_feature (1)...(409): n = A,T,C or G
cagaacaagcagagcagtgagtcagccgtcagcagcaccgtcaaccctgtcgccattcacaagcgcagcaaggtcaagaccgagcctgagggcctgcggccggcctcccctctggcgctgacgcagnnnnnnnnnnnnnnnnnnnnnnnnnnnnnnnnnnnnnnnnnnnnnnnnnnnnnnnnnnnnnnnnnnnnnnnnnnnnnnnnnnnnnnnnnnnnnnnnnnnnnnnnnnnnnnnnnnnnnnnnnnnnnnnnnnnnnncacatcaacaacgagcacatccacggggagaagaaggagttcgtgtgccgctggcaggcctgcacacgggagcagaagcccttcaaggcgcagtacatgctggtggtgcacatgcggcggcacacgggcgagaagcctcacaagtgcac

SEQ ID NO: 22722 - DNA, 924 bp, Macaca Mulatta
  misc_feature (1)...(924): n = A,T,C or G
ggggaaatagatggaggctaaaaatgaaggtttttctttgaaactgaattaacttgagaatatttgttgttaaaaacttctttttgcacaaaataactcattttgtattatctgaaaatatataatttctggtcatgtgtatgtttaaaatagaaaattttgaggaaaaatggaaatagggtggaaaagtacttggtaaacagtagtaaccaacttcaaatattttcactccagattggtgttttctctggcacagagtagatcttttgggaaatatatataattaagtttgactacccttgtgtaagccacatctggatgagaacagttacaaagagtttgggtctctaagtttgattcctaacccagcaggtcaactttttgccaaattcccgtaaccgtggtgttaagtattaaaataagtggataaaaatgggggagttttacctggaatacttaattaaccttgccccgaattttaatctccccttgtttcctaaaaatttttctggaaaacccctggccactgggggtttggaaagagatttttagtcattnnnnnnnnnnnnnnnnnnnnnnnnnnnnacctttgggagaaattccattttgggtaagggaaaaatccatgtggaaggtaaagggctaaaaaatcctttataaatattagaaaagagaaaacccccccccaataaaccctttaaggggtttattaagaatttgtgggccttcctttttatattcctggggaaaacaaccctcttcaggttttggggggtaaaaaaaaatcctaataaaaaagacccctttataccgtggnctagagatatatgaataaaggtggagacctgggcacaaaaattattcttcctctcccctttttgggtgacccatatattttgacccaagaattttataaaatgtggc

SEQ ID NO: 22723 - DNA, 251 bp, Macaca Mulatta
  misc_feature (1)...(251): n = A,T,C or G
gggccggaggaggctcggacttcggctgcagcgcggcggcaccgcgttccgagagcggcttcctgccatactcggccgcggtgcttagtaagacggccgtgagcccgccggaccagagggacgaggctccgctcaccagataactacgtcgccaccgccagggggccgcgcccgccgctctgagtgtgcccgggagtcccaaaagagccccctganccctccgcgcgctgcccgctgctaccgctgccgcc

SEQ ID NO: 22724 - DNA, 426 bp, Macaca Mulatta
tgctaccatgtctctgttctccatgtctcttatccttagatgctctctgactttataaatcagcagttttgaagactcaagacaaacagtgaaattattggtttatcaatggagaggaaaaactcttccagcgttacatatagagcttgatggtcagtaggtgtttttgaaatcagcttaaatataatcatacgtatcaatttgaaattgaacttttcagcactctcacttattcatgacacaggaatgaccctttactcaaaactcttgtggttattcaaaggtgagcttctttttcccttagtcttagcgtatttgttgctattgtatattgctaacaagtttaattacctaattttgaagctctttccaaataagatacaaattaaaaagggaagcattgctagtaacaggtccctagagagc

SEQ ID NO: 22725 - DNA, 303 bp, Macaca Mulatta
  misc_feature (1)...(303): n = A,T,C or G
cccagaacgctggacaaacattcctttgctggtcagatcctaaagctgatcatncacgagctctccaacgtcatggaagctaatgccgctcgcccaggcactcctgcagagtggagtcaagnnnnnnnnnnnnnnnnnnnnnnnnnnnnnnnnnnnnnnnnnnnnnnnnnnnnnnnnnnnnnnnnnnnnnnnnnnnnnnnnnnnnnnnnnnnnnnnnnnnnnnnngaggaggattactacgaggatgatgaggaagatgaccctgatgccctgaaggatcctctctatcagattgatctgcag

SEQ ID NO: 22726 - DNA, 1337 bp, Macaca Mulatta
  misc_feature (1)...(1337): n = A,T,C or G
ttcacaaaataattgatggcatttgtggtcgagcttatcctgtgtaccaagattatcacactgtttgggaatcagaagaatggatgcacgttttagaagatattgccaaattttttaaagctgtagttggtaaaaacttatctgatgaagannnnnnnnnnnnnnnnnnnnnnnnnnnnnnnnnnnnnnnnnnnnnnnnnnnnnnnnnnnnnnnnnnnnnnnnnnnnnnnnnnnnnnnnnnnnnnnnnnnnnnnnnnnnnnnnnnnnnnnnnnnnnnnnnnnnnnnnnnnnnnnnnnnnnnnnnnnnnnnnnnnnnnnnnnnnnnnnnnnnnnnnnnnnnnnnnnnnnnnnnnnnnnnnnnnnnnnnnnnnnnnnnnnnnnnnnnnnnnnnnnnnnnnnnnnnnnnnnnnnnnnnnnnnnnnnnnnnnnnnnnnnnnnnnnnnnnnnnnnnnnnnntaaggtggtcctgcagttgaaataactggcaatgatgaataccactgctatcagattttattgctccaacttatatggcagagtgaatactgtgtgttcagaaacgctgtgatgtcttgactgttgcaacaggctgagaaagcagcaatgttgatattataaagataaaaatgtatccacattccttaacaggaaattacatggttgagaggaaatgcataaaatgaaagatgaaaaatctatagtagcagtttatattttcatgattgttttgcctcatttattaaatacttgagaaatctttagagatacacagttttattgaaagctaaaaataggttctaaagtaatgtaaaaatgtaaagcacaaatatacttgaatattgcttaaagaattatgtgaatagcaacatatattatgggtatataattactttgtgatattttttaaaagtttttcaaagaatgtataagctgcatatataactcaggagattccatgtctttctcatatttcagaggaaagattataaaatctaaaatttcttagagaacacctctttgtcagagataaacaagaacaaatactctaaacttatgtgaacaattttgagtttatgaattctagaaactaaagaatacagaaaaatgaaaataacagttttacttctgcacttctatgtttgggaaacgttgctctgataaaaaatagttgccattgtgcagtgtgtgtattattcaaatatgagataagactatgtacaggtccacttttgttaataaactcaatattgaatacttttgaatgttaaattcattggaaaaacaaaccatttgtaacctcagttaacttgaacaacaagcattctgagcaaatgaaa

SEQ ID NO: 22727 - DNA, 2114 bp, Macaca Mulatta
  misc_feature (1)...(2114): n = A,T,C or G
gtggaagaggccctagaagctgtcaaaaatgctacaaatgagcaagaccttgcaaaccgttttaaagagtttggaaaagagatggtgaaacttaactatgtagcagcaagaagacaacaggnnnnnnnnnnnnnnnnnnnnnnnnnnnnnnnnnnnnnnnnnnnnnnnnnnnnnnnnnnnnnnnnnnnnnnnnnnnnnnnnnnnnnnnnnnnnnnnnnnnnnnnnnnnnnnnnnnnnnnnnnnnnnnnnnnnnnnnnnnnnnnnnnnnnnnnnnnnnnnnnnnnnnnnnnnnnnnnnnnnnnnnnnnnnnnnnnnnnnnnnnnnnnnnnnnnnnnnnnnnnnnnnnnnnnnnnnnnnnnnnnnnnnnnnnnnnnnnnnnnnnnnnnnnnnnnnnnnnnnnnnnnnnnnnnnnnnnnnnnnnnnnnnnnnnnnnnnnnnnnnnnnnnnnnnnnnnnnnnnnnnnnnnnnnnnnnnnnnnnnnnnnnnnnnnnnnnnnnnnnnnnnnnnnnnnnnnnnnnnnnnnnnnnnnnnnnnnnnnnnnnnnnnnnnnnnnnnnnnnnnnnnnnnnnnnnnnnnnnnnnnnnnnnnnnnnnnnnnnnnnnnnnnnnnnnnnnnnnnnnnnnnnnnnnnnnnnnnnnnnnnnnnnnnnnnnnnnnnnnnnnnnnnnnnnnnnnnnnnnnnnnnnnnnnnnnnnnnnnnnnnnnnnnnnnnnnnnnnnnnnnnnnnnnnnnnnnnnnnnnnnnnnnnnnnnnnnnnnnnnnnnnnnnnnnnnnnnnnnnnnnnnnnnnnnnnnnnnnnnnnnnnnnnnnnnnnnnnnnnnnnnnnnnnnnnnnnnnnnnnnnnnnnnnnnnnnnnnnnnnnnnnnnnnnnnnnnnnnnnnnnnnnnnnnnnnnnnnnnnnnnnnnnnnnnnnnnnnnnnaggtcatcaatgccgctctgacactggctgcccgaccacagagcaaagttgctcaggataacatggacgtcttcaaagaccagtgggagaagcaggtccgagtattgacagaggccgtggatgacatcacctcagtggatgacttcctctctgtctcagnnnnnnnnnnnnnnnnnnnnnnnnnnnnnnnnnnnnnnnnnnnnnnnnnnnnnnnnnnnnnnnnnnnnnnnnnnnnnnnnnnnnnnnnnnnnnnnnnnnnnnnnnnnnnnnnnnnnnnnnnnnnnnnnnnnnnnnnnnnnnnnnnnnnnnnnnnnnnnnnnnnnnnnnnnnnnnnnnnnnnnnnnnnnnnnnnnnnnnnnnnnnnnnnnnnnnnnnnnnnnnnnnnnnnnnnnnnnnnnnnnnnnnnnnnnnnnnnnnnnnnnnnnnnnnnnnnnnnnnnnnnnnnnnnnnnnnnnnnnnnnnnnnnnnnnnnnnnnnnnnnnnnnnnnnnnnnnnnnnnnnnnnnnnnnnngaccccagaagaactagaggatgattctgactttgagcaggaagattacgatgtgcgtagtaggacaagtgttcagactgaggatgaccagctcattgcagggcagagcgcacgggnnnnnnnnnnnnnnnnnnnnnnnnnnnnnnnnnnnnnnnnnnnnnnnnnnnnnnnnnnnnnnnnnnnnnnnnnnnnnnnnnnnnnnnnnnnnnnnnnnnnnnnnnnnnnnnnnnnnnnnnnnnnnnnnnnnnnnnnnnnnnnnnnnnnnnnnnnnnnnnnnnnnnnnnnnnnnnnnnnnnnnnnnnnnnnnnnnnnnnnnnnnnnnnnnnnnnnnnnnnnnnnnnnnnnnnnnnnnnnnnnnnnnnnnnnnnnnnnnnnnnnnnnnnnnnnnnnnnnnnnnnnnnagtgtcctgattcagcatgtaagcaggatttattagcctaccttcaacgaattgccttgtattgtcatcagcttaatatctgcagcaaggtgaaggcagaagtgcagaatctgggaggagagctcattgtgtcagggngacaggagttcagagcactttcactaccttttatgaggtagattgtgatgtcatagatgggggcagggctagtcaactttctacccacctcccaacctgtgctgagggagctccgatcgggagtggaagcagtgattcctccatg

SEQ ID NO: 22728 - DNA, 686 bp, Macaca Mulatta
agatggcgtccgcaaggaaggcaccggctctactgccacctcttccagctccaccaccggcggagcagggaaaggtaaaggcaaaggcggctccggagattcagccgtgaagcaagtgcagatagatggcctcgtggtattaaagataatcaaacattatcaagaagaaggacaaggaactgaagttgtcaaggagtgcttttgggcctggttgtagaagatcggcttgaaattaccaactgctttcctttccctcagcacacagaggatgatgctgactttgatgaagtccaatatcagatggaaatgatgcggagccttcgccatgtaaacattgatcatcttcatgtgggctggtaccagtccacatactatggctcattcgttacccgggcgctcctggactctcagttcagttaccagcatgccattgaagaatctgtcgttctcatttatgatcccataaaaactgcccaagggtctctctcactaaaggcttacagactgactcctaaactgatggaagtttgtaaagaaaaggatttttcccctgaagctttgaaaaaagcaaatatcacctttgagtacatgtttgaagaagtgccgattgtaattaacaattcacatctgatcaatgtcctaatgtgggaacttgaaaagaaggtcagctgttgcagataaacatg

SEQ ID NO: 22729 - DNA, 137 bp, Macaca Mulatta
gagccatcctttgctgtttacctcctgaaagcattattgacgttgatgaaatggccactagtgttgccagagcccaggttgcctggtgccactgccagaaataccacaagaagcaggggaaaaagtggtttatctca

SEQ ID NO: 22730 - DNA, 147 bp, Macaca Mulatta
cagctagctcaggaggcccgcaacatctaccaggagttcctgtccagccaggcgctgagcccagtgaacatcgaccgtcaggcctggcttggcgaggaggtgctggccgagccccggccggacatgtttcgggcacagcagcttcag

SEQ ID NO: 22731 - DNA, 159 bp, Macaca Mulatta
aagtaagtggcatgagggggaaatgtggaaatgtttagaacttgtggtacatctaatatcctctgaaatgccttaaaaataataatgtaggtccaagagtgctataggaggtccacgatatattgatgagagaaacaaagaaagtgccagaacaaatga

SEQ ID NO: 22732 - DNA, 281 bp, Macaca Mulatta
tggatcccctgagccagaataagggaggagcctaggacgaggaggggtccggccacgtcccccagccctgcctcctgtcttcccacagatctaccccaacgagagacacagtattcgctgccccgagtcgggcgagcactatgaagtcacgttgctgcactttctacaggaatacctctgagcctgcccgccgggagccgccacatcacagcacaagtggctgcagcctccgcggggaccaggcagaagggactgagtggcccgcgggccccaatgaggca

SEQ ID NO: 22733 - DNA, 920 bp, Macaca Mulatta
aagaacctggttaaggagattagcaagcagcagaaagagccagggggactgcttcaggtctcagggggccctgggcttgatgaggctgatagggcatgtatgtgccactcccaagtgctaaggcagggacagatggaagagtgactgggtcttgggtgggaagagggatgggaatgcaatctggaaaacttcctggaggaccgaggaggaagggaagtcagaagtttccctttaggtgaagggaaaatagattgagaggggaaatggccctgccaaggcctgatgggccgggcagtttgggtgtgagtctgtccacatggaggcctcactctgctgtctgttgcaggggagaagaggcggggctgtgtgtctgcaccaggtgagtcgctcttccatcctccctcagctgctttgactccccctcaccctgctgaccccttccttttcttctccctccagcaggggtgcagccagtcacaatctgagggggcctcctctctgcccccctggaagaccctgctcttggcccctggggagttccagctctcagggattgggccctgaaactccaacatctgccacttaggagccctgggaacgggtgaccttcatatgaagaagaggcgcctccaacagccttgagaagcaagaacgtggttccagacccagccctagcagccttctccccaaccaggatgtggggctggggaggccacggcagggctgagggaactctgctatgtggtggggacttcccgggacaagcaagggaagtactgaggcagccacttgattgaacggtgttgcagtgtggagacatggaattttattgaggcagccacttgattgaaaggtattgcagtgtggagacatggaattttatgattggtttattccatgagactagaccatctgcccca

SEQ ID NO: 22734 - DNA, 616 bp, Macaca Mulatta
ggcgtctggcgggaagcaggggtggggcggtgagggagcctcttgggtttcactgctctcacttctttgggaccttgaccctgaagccaacagcctggctctggctccttgttttgtttttctgtgggctgccttgttctcttccctcagagaacttgccagaacactcgtctttgagttgaatgacgttttccgcgtgggagggagactgatttttgaggccccacccattcccctattctgtgcgtcccacagtcccctgtcccttaacacagtggaagttctcccagaccggccacactagaggccgtggggcacccgactgtcttcccctgggtgcctgggtccgttcttccggaggacctgcgggtccggaccgctgcccgcagctgcagttttcacctttctctgtgttcccggagctgggctccgcctgattcttggtgagcttgaagattcagacctgaaagtcatttaagaaatgagcatccattttgatggctgttaatagtgacagttaactatttccattttacacataaactgtaggagcttttcaatcggaggcattgtttttctctgaagggtgaaacggtaaggctgcacacagcctaat

SEQ ID NO: 22735 - DNA, 145 bp, Macaca Mulatta
gcacgtgcaagctgcccgcaatacgtcatggcgaccagacgccttttaggggctgcccggatatgggccggctgggggacccgggagctcctagaccccgcctctcctagaaggctcctggtccgggattatgctaagaaaccag

SEQ ID NO: 22736 - DNA, 721 bp, Macaca Mulatta
  misc_feature (1)...(721): n = A,T,C or G
gcgagacggtcatctgttccagccgggccactgtgatgctttatgatgacggcaacaagcgatggctccctgctggcacaggtccccaggccttcagccgcgtccagatctaccacaaccccacggccaattcctttcgcgtcgtgggccggaagatgcagcccgaccagcaggtnaggtggtcatcaactgttccatcgtccggggcgtcaagtataatcaggccacccccaacttccatcagtggcgcgacgcccgccaggtctggggcctcaacttcggcagcaaggaggatgcagcccagtttgctgccggcatggccagtgccctagaggcgttggaaggnnnnnnnnnnnnnnnnnnnnnnnnnnnnnnnnnnnnnnnnnnnnnnnnnnnnnnnnnnnnnnnnnnnnnnnnnnnnnnnnnnnnnnnnnnnnnnnnnnnnnnnnnnnnnnnnnnnnnnnnnnnnnnnnnnnnnnnnnnnnnnnnnnnnnnnnnnnnnnnnnnnnnnnnnnnnnnnnnnnnnnnnnnnnnnnnnnnnnnnnnnnnnccacccccaggtttgccctcctcgggggtcccagctgcagcacatggagcagggggaggaccacccccctgcaccccctctcccggcagcacagggtcctggtggtgggggagctggggccccaggcctggccgcagctattgctggagccaaactcaggaaagtcagcaa

SEQ ID NO: 22737 - DNA, 392 bp, Macaca Mulatta
tgcctggtcagaactacagcaccatgtctgaatttatcctctttggcttctcagccttcccccagcagctcctgcccgtcttgttcctgctgtacctcctgatgttcctgttcacattgctgggcaaccttctcatcatggccacaatctggattgaacacagactccacacacccatgtacctcttcttgtgtgccctctccatctctgagattctgttcactgttgccatcacccctcgcatgctggctgatctgctctccacccatcgttccatcacctttgtgtcttgtgtcagtcagatgttcttctccttcatgtttggcttcactcactccttccttctcatggtcatgggttatgatcgttacgtggccatctgccacccactg

SEQ ID NO: 22738 - DNA, 1177 bp, Macaca Mulatta
  misc_feature (1)...(1177): n = A,T,C or G
aaggaagagaagaaaccaccccctccggtcccgaagaagccagccaaatccaagccggcagtgagccgcgacaaggcctcagacgccagcgacaagcagcgccaggaggcccgcaagagactcctggcagcgaagcgggcagcttctgtgcggcagaactcagccaccgagagcgcagacagcatcgagatttatgtcccggaggcccagaccaggctctgagaccgtgcaggaggaaagaaatgattttaaatcattaaaaccacaaaaactaagtgcgaatggaacagagttttctcaacctttgctatggttattctgtctagagaccctgagccaactttcaaattgacgcatacaagggctcacatttggcttttttgggtccctcccagctttaggttatgaaaattttactcacaaaaaatcaacaaaaatcacgaaactagaaaacttttttttcctcttgctggccgtggtggactagatagatggacgtcagcaactcccggcccagcctccagactgcggtctttttactccttctatctgacgagaactcacactagcttgtttacaagatgacgacagtccaagggcagccttgggcacctgccatgttccctcttcctttccccggctaccccccgctctgaccttggattttcattcttatgtttttctcttttcccttcagagctcacacagtggtcaccattgtggcaagcggctttctgggtctcagccctctctgcggtttgagggcccagaggacagagagatggacacgcgtcccctccctcccccgccaagtgcnnnnnnnnnnnnnnnnnnnnnnacacacacgcagatggaggcgcctcgctgggaggtgccccgccagccctgggcagtgtcaggcaggactcaccactgagcagatgagggaggttttagtcttggagggggaaatgagacgaagccacagttatcacactccagactcccgcctttttattctctccagccccttcttccttcagcaaaatctatttctcacagtggcttccaaggggctgtctgtcctctgccgcgcctgtgtctggtgcccgaggggcgggcggcggtgtctgtatgtatgtgtacatatgcacatagaccttagagtgtatatttaacgcccatctgctcacccatg

SEQ ID NO: 22739 - DNA, 2097 bp, Macaca Mulatta
  misc_feature (1)...(2097): n = A,T,C or G
gacacaccatctcagcgtgttcagttcattcttggcaccgaggaagatgaagagcatgtgcctcatgagctgtttacagagctggatgagatctgtatgaaagagggagaagatgctgagtggaaggaaacagccaggnnnnnnnnnnnnnnnnnnnnnnnnnnnnnnnnnnnnnnnnnnnnnnnnnnnnnnnnnnnnnnnnnnnnnnnnnnnnnnnnnnnnnnnnnnnnnnnnnnnnnnnnnnnnnnnnnnnnnnnnnnnnnnnnnnnnnnnnnnnnnnnnnnnnnnnnnnnnnnnnnnnnnnnnnnnnnnnnnnnnnnnnnnnnnnnnnnnnnnnnnnnnnnnnnnnnnnnnnnnnnnnnnnnnnnnnnnnnnnnnnnnnnnnnnnnnnnnnnnnnnnnnnnnnnnnnnnnnnnnnnnnnnnnnnnnnnnnnnnnnnnnnnnnnnnnnnnnnnnnnnnnnnnnnnnnnnnnnnnnnnnnnnnnnnnnnnnnnnnnnnnnnnnnnnnnnnnnnnnnnnnnnnnnnnnnnnnnnnnnnnnnnnnnnnnnnnnnnnnnnnnnnnnnnnnnnnnnnnnaggtagaccttcatttcatgaaaaaaattcctactggggctgaggcctccaatgtcctggttggtgaggtggatattttggaccgtcccattgttgcctttgtgaggctgtctccagctgttcttctctcaggcctaacagaagtgccaatcccaacaannnnnnnnnnnnnnnnnnnnnnnnnnnnnnnnnnnnnnnnnnnnnnnnnnnnnnnnnnnnnnnnnnnnnnnnnnnnnnnnnnnnnnnnnnnnnnnnnnnnnnnnnnnnnnnnnnnnnnnnnnnnnnnnnnnnnnnnnnnnnnnnnnnnnnnnnnnnnnnnnnnnnnnnnnnnnnnnnnnnnnnnnnnnnnnnnnnnnnnnnnnnnnnnnnnnnnnnnnnnnnnnnnnnnnnnnnnnnnnnnnnnnnnnnnnnnnnnnnnnnnnnnnnnnnnnnnnnnnnnnnnnnnnnnnnnnnnnnnnnnnnnnnnnnnnnnnnnnnnnnnnnnnnnnnnnnnnggctatttgggggcttggtgctggacatcaagcggaaggccccctggtactggagtgactaccgggatgcactcagcttacagtgtttggcctcctttctgttcctgtactgtgcctgcatgtcacctgtcatcacctttgggggattgcttggagaagccactgagggacgcatnnnnnnnnnnnnnnnnnnnnnnnnnnnnnnnnnnnnnnnnnnnnnnnnnnnnnnnnnnnnnnnnnnnnnnnnnnnnnnnnnnnnnnnnnnnnnnnnnnnnnnnnnnnnnnnnnnnnnnnnnnnnnnnnnnnnnnnnnnnnnnnnnnnnnnnnnnnnnnnnnnnnnnnnnnnnnnnnnnnnnnnnnnnnnnnnnnnnnnnnnnnnnnnnnnnnnnnnnnnnnnnnnnnnnnnnnnnnnnnnnnnnnnnnnnnnnnnnnnnnnnnnnnnnnnnnnnnnnnnnnnnnnnnnnnnnnnnnnnnnnnnnnnnnnnnnnnnnnnnnnnnnnnnnnnnnnnnnnnnnnnnnnnnnnnnnnnnnnnnnnnnnnnnnnnnnnnnnnnnnnnnnnnnnnnnnnnnnnnnnnnnnnnnnnnnnnnnnnnnnnnnnnnnnnnnnnnnnnnnnnnnnnnnnnnnnnnnnnnnnnnnnnnnnnnnnnnnnnnnnnnnnnngaatgccaggagatgcatggagagttcatgggatctgcgtgtggccatcatggaccctacactcctgatgtcctcttttggtcctgtattctcttcttcaccaccttcatcctctcaagcaccttaaagacgtttaagacgagccgttatttcccaacnnnnnnnnnnnnnnnnnnnnnnnnngctggagtgcggtggtgtgatcttggctcactgcaacctcnnnnnncaccaccatggccagctaatttttgtaggtttagtagagaggggggttcggcaggttggtcaggatggtctcgatctcgtgacctcgtagtctgcccgcctcggcgtcccaaagtgctgggattacaggcatgagcc

SEQ ID NO: 22740 - DNA, 2424 bp, Macaca Mulatta
  misc_feature (1)...(2424): n = A,T,C or G
atgaacttaatgattacacatgtatcatcactgcagaataccaacttgggagatgtctctaacggactgcagtcaagtaatttcggtgttaatatacaaacgtacaccccatctttaacttcacagaccaagactggagtaggaccttttaaccctggtagaatgaatgtggcaggagacgtatttcagaatggagaatctgcaactcatcataatcctgnnnnnnnnnnnnnnnnnnnnnnnnnnnnnnnnnnnnnnnnnnnnnnnnnnnnnnnnnnnnnnnnnnnnnnnnnnnnnnnnnnnnnnnnnnnnnnnnnnnnnnnnnnnnnnnnnnnnnnnnnnnnnnnnnnnnnnnnnnnnnnnnnnnnnnnnnnnnnnnnnnnnnnnnnnnnnnnnnnnnnnnnnnnnnnnnnnnnnnnnnnnnnnnnnnnnnnnnnnnnnnnnnnnnnnnnnnnnnnnnnnnnnnnnnnnnnnnnnnnnnnnnnnnnnnnnnnnnnnnnnnnnnnnnnnnnnnnnnnnnnnnnnnnnnnnnnnnnnnnnnnnnnnnnnnnnnnnnnnnnnnnnnnnnnnnnnnnnnnnnnnnnnnnnnnnnnnnnnnnnnnnnnnnnnnnnnnnnnnnnnnnnnnnnnnnnnnnnnnnnnnnnnnnnnnnnnnnnnnnnnnnnnnnnnnnnnnnnnnnnnnnnnnnnnnnnnnnnnnnnnnnnnnnnnnnnnnnnnnnnnnnnnnnnnnnnnnnnnnnnnnnnnnnnnnnnnnnnnnnnnnnnnnnnnnnnnnnnnnnnnnnnnnnnnnnnnnnnnnnnnnnnnnnnnnnnnnnnnnnnnnnnnnnnnnnnnnnnnnnnnnnnnnnnnnnnnnnnnnnnnnnnnnnnnnnnnnnnnnnnnnnnnnnnnnnnnnnnnnnnnnnnnnnnnnnnnnnnnnnnnnnnnnnnnnnnnnnnnnnnnnnnnnnnnnnnnnnnnnnnnnnnnnnnnnnnnnnnnnnnnnnnnnnnnnnnnnnnnnnnnnnnnnnnnnnnnnnnnnnnnnnnnnnnnnnnnnnnnnnnnnnnnnnnnnnnnnnnnnnnnnnnnnnnnnnnnnnnnnnnnnnnnnnnnnnnnnnnnnnnnnnnnnnnnnnnnnnnnnnnnnnnnnnnnnnnnnnnnnnnnnnnnnnnnnnnnnnnnnnnnnnnnnnnnnnnnnnnnnnnnnnnnnnnnnnnnnnnnnnnnnnnnnnnnnnnnnnnnnnnnnggctctaagtatgcagtcatctccaaatggccagtttgtagcgccaagtgatattcagttgaaatgcaactactgcaaaaattccttttgttcaaaaccagaaatcctggaatgggaggcaagttnnnnnnnnnnnnnnnnnnnnnnnnnnnnnnnnnnnnnnnnnnnnnnnnnnnnnnnnnnnnnnnnnnnnnnnnnnnnnnnnnnnnnnnnnnnnnnnnnnnnnnnnnnnnnnnnnnnnnnnnnnnnnnnnnnnnnnnnnnnnnnnnnnnnnnnnnnnnnnnnnnctgcaaattattatacaaacaggattttgcaagacgtttaggattgagatgtgttacttgcaactattgttctcagctgtgtaagaagggagcaactaaagaactcgatggtgttgtgagagatttctgcagtgaagactgctgtaaaaaatttcaggattggtactacaaggcgannaggtgtgactgttgtaaatctcaaggaactcttaaagagcgagttcagtggcgtggggaaatgaaacatttctgtgatcaacattgcttactgcgtttctactgtcaacaaaatgagcccaacatgacaactcagaaaggacctgaaaacttgcattatnnnnnnnnnnnnnnnnnnnnnnnnnnnnnnnnnnnnnnnnnnnnnnnnnnnnnnnnnnnnnnnnnnnnnnnnnnnnnnnnnnnnnnnnnnnnnnnnnnnnnnnnnnnnnnnnnnnnnnnnnnnnnnnnnnnnnnnnnnnnnnnnnnnnnnnnnnnnnnnnnnnnnnnnnnnnnnnnnnnnnnnnnnnnnnnnnnnnnnnnnnnnnnnnnnnnnnnnnnnnnnnnnnnnnnnnnnnnnnnnnnnnnnnnnnnnnnnnnnnnnnnnnnnnnnnnnnnnnnnnnnnnnnnnnnnnnnnnnnnnnnnnnnnnnnnnnnnnnnnnnnnnnnnnnnnnnnnnnnnnnnnnnnnnnnnnnnnnnnnnnnnnnnnnnnnnnnnnnnnnnnnnnnnnnnnnnnnnnnnnnnnnnnnnnnnnnnnnnnnnnnnnnnnnnnnnnnnnnnnnnnnnnnnnnnnnntgtaattattgaaacagatataattggttcagatcttttgaagaactctgacccagagacacagtccagcatgcctgatgtaccatatgaaccagatttggatatcgaaatagattttcccagag

SEQ ID NO: 22741 - DNA, 3039 bp, Macaca Mulatta
  misc_feature (1)...(3039): n = A,T,C or G
catctggaagacaaccaggtcagcgtcatcgagagaggcgccttccaggacctgaagcagcttgagcgactgnnnnnnnnnnnnnnnnnnnnnnnnnnnnnnnnnnnnnnnnnnnnnnnnnnnnnnnnnnnnnnnnnnnnnnnnnnnnnnnnnnnnnnnnnnnnnnnnnnnnnnnnnnnnnnnnnnnnnnnnnnnnnnnnnnnnnnnnnnnnnnnnnnnnnnnnnnnnnnnnnnnnnnnnnnnnnnnnnnnnnnnnnnnnnnnnnnnnnnnnnnnnnnnnnnnnnnnnnnnnnnnnnnnnnnnnnnnnnnnnnnnnnnnnnnnnnnnnnnnnnnnnnnnnnnnnnnnnnnnnnnnnnnnnnnnnnnnnnnnnnnnnnnnnnnnnnnnnnnnnnnnnnnnnnnnnnnnnnnnnnnnnnnnnnnnnnnnnnnnnnnnnnnnnnnnnnnnnnnnnnnnnnnnnnnnnnnnnnnnnnnnnnnnnnnnnnnnnnnnnnnnnnnnnnnnnnnnnnnnnnnnnnnnnnnnnnnnnnnnnnnnnnnnnnnnnnnnnnnnnnnnnnnnnnnnnnnnnnnnnnnnnnnnnnnnnnnnnnnnnnnnnnnnnnnnnnnnnnnnnnnnnnnnnnnnnnnnnnnnnnnnnnnnnnnnnnnnnnnnnnnnnnnnnnnnnnnnnnnnnnnnnnnnnnnnnnnnnnnnnnnnnnnnnnnnnnnnnnnnnnnnnnnnnnnnnnnnnnnnnnnnnnnnnnnnnnnnnnnnnnnnnnnnnnnnnnnnnnnnnnnnnnnnnnnnnnnnnnnnnnnnnnnnnnnnnnnnnngtcctctatgggaacaagatcaccgagattgccaagggactgtttgatgggctggtgtccctacagctgctnnnnnnnnnnnnnnnnnnnnnnnnnnnnnnnnnnnnnnnnnnnnnnnnnnnnnnnnnnnnnnnnnnnnnnnnnnnnnnnnnnnnnnnnnnnnnnnnnnnnnnnnnnnnnnnnnnnnnnnnnnnnnnnnnnnnnnnnnnnnnnnncacttagcccaaaatccatttgtgtgcnnnnnnnnnnnnnnnnnnnnnnnnnnnnnnnnnnnnnnnnnnnnnnnnnnnnnnnnnnnnnnnnnnnnnnnnnnnnnnnnnnnnnnnnnnnnnnnnnnnnnnnnnnnnnnnnnnnnnnnnnnnnnnnnnnnnnnnnnnnnnnnnnnnnnnnnnnnnnnnnnnnnnnnnnnnnnnnnnnnnnnnnnnnnnnnnnnnnnnnnnnnnnnnnnnnnnnnnnnnnnnnnnnnnnnnnnnnnnnnnnnnnnnnnnnnnnnnnnnnnnnnnnnnnnnnnnnnnnnnnnnnnnnnnnnnnnnnnnnnnnnnnnnnnnnnnnnnnnnnnnnnnnnnnnnnnnnnnnnnnnnnnnnnnnnnnnnnnnnnnnnnnnnnnnnnnnnnnnnnnnnnnnnnnnnnnnnnnnnnnnnnnnnnnnnnnnnnnnnnnnnnnnnnnnnnnnnnnnnnnnnnnnnnnnnnnnnnnnnnnnnnnnnnnnnnnnnnnnnnnnnnnnnnnnnnnnnnnnnnnnnnnnnnnnnnnnnnnnnnnnnnnnnnnnnnnnnnnnnnnnnnnnnnnnnnnnnnnnnnnnnnnnnnnnnnnnnnnnnnnnnnnnnnnnnnnnnnnnnnnnnnnnnnnnnnnnnnnnnnnnnnnnnnnnnnnnnnnnnnnnnnnnnnnnnaaacctcctgtccaaccccttcaactgcaactgccacctggcctggctcggcaagtggttaaggaagaggcggattgtcagtgggaaccctaggtgccagaagccgtttttcctcaaggagattcccatccaggatgtggccatccaggacttcacctgtgnnnnnnnnnnnnnnnnnnnnnnnnnnnnnnnnnnnnnnnnnnnnnnnnnnnnnnnnnnnnnnnnnnnnnnnnnnnnnnnnnnnnnnnnnnnnnnnnnnnnnnnnnnnnnnnnnnnnnnnnnnnnnnnnnnnnnnnnnnnnnnnnnnnnnnnnnnnnnnnnnnnnnnnnnnnnnnnnnnnnnnnnnnnnnnnnnnnnnnnnnnnnnnnnnnnnnnnnnnnnnnnnnnnnnnnnnnnnnnnnnnnnnnnnnnnnnnnnnnnnnnnnnnnnnnnnnnnnnnnnnnnnnnnnnnnnnnnnnnnnnnnnnnnnnnnnnnnnnnnnnnnnnnnnnnnnnnnnnnnnnnnnnnnnnnnnnnnnnnnnnnnnnnnnnnnnnnnnnnnnnnnnnnnnnnnnnnnnnnnnnnnnnnnnnnnnnnnnnnnnnnnntgggaaccaacccactgcactgtgactgcagtcttcggtggctgtcagagtgggtgaaggcggggtacaaggagcctggcatcgcccgctgcagtagccctgagcccatggctgacaggctcctgctcaccaccccaacccaccgcttccagtgcaaaggnnnnnnnnnnnnnnnnnnnnnnnnnnnnnnnnnnnnnnnnnnnnnnnnnnnnnnnnnnnnnnnnnnnnnnnnnnnnnnnnnnnnnnnnnnnnnnnnnnnnnnnnnnnnnnnnnnnnnnnnnnnnnnnnnnnnnnnnnnnnnnnnnnnnnnnnnnnnnnnnnnnnnnnnnnnnnnnnnnnnnnnnnnnnnnnnnnnnnnnnnnnnnnnnnnnnnnnnnnnnnnnnnnnnnnnnnnnnnnnnnnnnnnnnnnnnnnnnnnnnnnnnnnnnnnnnnnnnnnnnnnnnnnnnnnnnnnnnnnnnnnnnnnnnnnnnnnnnnnnnnnnnnnnnnnnnnnnnnnnnnnnnnnnnnnnnnnnnnnnnnnnnnnnnnnnnnnnnnnnnnnnnnnnnnnnnnnnnnnnnnnnnnnnnnnnnnnnnnnnnnnnnnnnnnnnnnnnnnnnnnnnnnnnnnnnnnnnnntgcgagtgtgtccctggctacagcgggaagctctgtgagacagacaatgatgactgtgtggcccacaagtgccgccacggggcccagtgcatggacacaatcaatggctacacatgcacctgcccccagggcttca

SEQ ID NO: 22742 - DNA, 861 bp, Macaca Mulatta
aactacagtaatcaggcaacgtattgtcagcctttaagaggaataaaatcagtgagtctctaaggagtgctctgtatacaattgcaaagaacaaaatggtcaactttaaggtacctgattgcatgcacttaaatgcagattatttttgagtttgaaaagggactattaatgaaatctttcttttccctcctttctctttttgccttccccaccactgatttagtgagctggagattggatcacaggtataattcaagcttttcatgtagtcatgtagatcactagactacttggtgcactgatgtagcagtttaaaagcagattatgtgtagtacatttagaagtagatctacaaatattctgaagagttgtaaccttttaaaatatagtgacatggttttgtttttaaggtttagcaatatttagcccattatttttgttttatttctaacttgaatgtttgtaagttttattttttgatgcttgcattgtgttaatataacatcaaaataagttgatattctaggttactaataattgtggtgcatgaatgttactacttttggaatttaagactttaaaagaattttaaaggcagttgctgactaaacttctttctcttgattcacagccgaaagagtaaaggtgctgcagtaaaggctacctgtgtccattttggatttttcacaagcagattaataaactaaaaactttcatgtgtctggttgtttgaaatgtatttacggtttattgggactgctaagaggttagtctgctgattttaagttgctgcccaagttcacatgctcccttgaaccattcggtgaaaatcttatggccatggggtggtggtttgtttgg

SEQ ID NO: 22743 - DNA, 296 bp, Macaca Mulatta
  misc_feature (1)...(296): n = A,T,C or G
ggcccagagtgcggtagactagagggctacaggccagcgccgacgccctgaggaatgctcctctgccttggacaccatcccttcctagcacaaggagtgcccgccttgagtgacctgcggctgcccacgctcctgccctcgtccctggccacccttggcctgtccacctgtgctgctgcaccaacctcactgccctcccttggccccgcccgccctctggtccttctgaccccacatatgctgctgtgannnnnnnnnnnnatgattccaaataaaacttgagcccactcctgcca

SEQ ID NO: 22744 - DNA, 201 bp, Macaca Mulatta
agctgggcagctgcggggccccaggccacaggccagtctcacttggctctcatgactatggcggtggagatagtgtggggagcctggcccatggtctcaggtggcaagaagtgcccttggctctggatcccaaccgtttgacacagctttgcccacagccaggcccctctggaattgtccttattaaaccagtgtcccgag

SEQ ID NO: 22745 - DNA, 376 bp, Macaca Mulatta
ttttgcagataaagactatttcctgattgtgattcagaatccaaccgaataagccactctcggctccctgtgtcattccttaatttaatgtcccccaagaatgttagtcgatcatgtcagtggactggcacgtggcagtcgccttggaacccactcagaccaatccagtgaccatgtgtgggctggcagctcttcctcccccaccaaaggaacccctgtgtgcgccaaccttccccagagctccggagggccgtctctcctcacttccaggttttagagcaagagcttgcaagaagcccgcacccagcttccttctgaccttcagttcactttgtcgcccttggagaaagctgtttttctttaactaaaaataacc

SEQ ID NO: 22746 - DNA, 703 bp, Macaca Mulatta
  misc_feature (1)...(703): n = A,T,C or G
ggggtcttctgggtgggcactccctggcaatcatgctgaaagaaaaaggtgaacatatgcagtggtacaatgatgaacttctccaaatggcaaagcagttaggctacaaacttctaccggctttcaacactaccagcggccttccttatccaagnnnnnnnnnnnnnnnnnnnnnnnnnnnnnnnnnnnnnnnnnnnnnnnnnnnnnnnnnnnnnnnnnnnnnnnnnnnnnnnnnnnnnnnnnnnnnnnnnnnnnnnnnnnnnnnnnnnnnnnnnnnnnnnnnnnnnnnnnnnnnnnnnnnnnnnnnnnnnnnnnnnnnnnnnnnnnnnnnnnnnnnnnnnnnnnnnnnnnnnnnnnnnnnnnnnnnnnnnnnnnnnnnnnnnnnnnnnnnnnnnnnnnnnnnnnnnnnnnnnnnnnnnnnnnnnnnnnnnnnnnnnnnnnnnnnnnnnnnnnnnnnnnnnnnnnnnnnnnnnnnnnnnnnnnnnnnnnnnnnnnnnnnnnnnnnnnnnnnnnnnnnnnnnnnnnnnnnnnnnnnnnnnnnnnnnnnnnnnnnnnnnnnnnnnnnnnnnnnnnnnnnnnnnnnnnnnnnnnnnnnnnnnnnnnnnnnnnnnnnnnnnaggtgttaaagggggatattagacctgctattgaaactcatgaaatgttatatcaggtgattaaaaaacacaattttctaccagag

SEQ ID NO: 22747 - DNA, 212 bp, Macaca Mulatta
taggccggaaggaggaagaatggggcctgcgggagggagctgagaagactcaagtccccacctgcctggcaggttgttagaaaaatgaaatatccattagagtaactttctgaggtctaataaaattgatgtgaaattactaaagtgttcatccttgaggggctgggatagggagaaacagctgtaagggtggtggatgtgggcagaggtgc

SEQ ID NO: 22748 - DNA, 174 bp, Macaca Mulatta
ctatttgagtagtcaaaatacaagtaaaggagagcaaataaacaacatttgaaaaaaatgaatttggtgttggtactattaagtataaattgataatgtcgtattcctccaaagcctccaactataccctacaattgccaaggttatgtttactacaattcatggatatggagg

SEQ ID NO: 22749 - DNA, 1512 bp, Macaca Mulatta
  misc_feature (1)...(1512): n = A,T,C or G
agatttccacatggaagaggcactggattggcctggagtatacttgttgccaggccaggtttctggggtggctctagaccctaagaataacctggtgattttccacagaggtgaccatgtctgggatggaaanctcgtttgacagcaagtttgtttaccagcaaataggactaggaccaattgaagaagacactattcttgtcatagatccaaataatgctgcggtactccagtccagtggaaaaaatctgtnnnnnnnnnnnnnnnnnnnnnnnnnnnnnnnnnnnnnnnnnnnnnnnnnnnnnnnnnnnnnnnnnnnnnnnnnnnnnnnnnnnnnnnnnnnnnnnnnnnnnnnnnnnnnnnnnnnnnnnnnnnnnnnnnnnnnnnnnnnnnnnnnnnnnnnnnnnnnnnnnnnnnnnnnnnnnnnnnnnnnnnnnnnnnnnnnnnnnnnnnnnnnnnnnnnnnnnnnnnnnnnnnnnnnnnnnnnnnnnnnnnnnnnnnnnnnnnnnnnnnnnnnnnnnnnnnnnnnnnnnnnnnnnnnnnnnnnnnnnnnnnnnnnnnnnnnnnnnnnnnnnnnnnnnnnnnnnnnnnnnnnnnnnnnnnnnnnnnnnnnnnnnnnnnnnnnnnnnnnnnnnnnnnnnnnnnnnnnnnnnnnnnnnnnnnnnnnnnnnnnnnnnnnnnnnnnnnnnnnnnnnnnnnnnnnnnnnnnnnnnnnnnnnnnnnnnnnnnnnnnnnnnnnnnnnnnnnnnnnnnnnnnnnnnnnnnnnnnnnnnnnnnnnnnnnnnnnnnnnnnnnnnnnnnnnnnnnnnnnnnnnnnnnnnnnnnnnnnnnnnnnnnnnnnnnnnnnnnagcactttgatatgcctcatgatattgttgcatctgaagatgggaccgtgtacattggagatgctcataccaacactgtgtggaagttcactttgactgagannnnnnnnnnnnnnnnnnnnnnnnnnnnnnnnnnnnnnnnnnnnnnnnnnnnnnnnnnnnnnnnnnnnnnnnnnnnnnnnnnnnnnnnnnnnnnnnnnnnnnnnnnaggaaagggaagtggaggcttaaaccttggaaatttctttgcaagccgtaagggttacagtcgaaaagggtttgaccggcttagcaccgagggcagtgaccaagagaaagaggaggatgacggaagtgaatcagaagaggagtattcagcacctctgcctgcacccgcaccttcctcctcctgaaaaccaagctttgatttagattaagtgagatttacccagaatgtcagattcctttccctttagcacgtttaaagttctgtgtatttaattgtaaactgtactagtctatgtgggactgtacacactttatttacttcgttttggttaagttggcttctgtttctagttgaggagtttcctaaaagttcataacaatgccattgtctttatatgaacatagactagagacacagtcctctttttccatcgtagtactaatctacctatggaa

SEQ ID NO: 22750 - DNA, 650 bp, Macaca Mulatta
  misc_feature (1)...(650): n = A,T,C or G
caggcgacctcgagtatcctccacagaaatgaacaagaaaatgaccggccgaaaactgatcagactgtctcagatcaaggaaaagatggccagagagaagctggaagaaatagactgggtgacatttggggttatattaaagaaggttacgccacagagtgnnnnnnnnnnnnnnnnnnnnnnnnnnnnnnnnnnnnnnnnnnnnnnnnnnnnnnnnnnnnnnnnnnnnnnnnnnnnnnnnnnnnnnnnnnnnnnnnnnnnnnnnnnnnnnnnnnnnnnnnnnnnnnnnnnnnnnnnnnnnnnnnnnnnnnnnnnnnnnnnnnnnnnnnnnnnnnnnnnnnnnnnnnnnnnnnnnnnnnnnnnnnnnnnnnnnnnnnnnnnnnnnnnnnnnnnnnnnnnnnnnnnnnnnnnnnnnnnnnnnnnnnnnnnnnnnnnnnnnnnnnnnnnnnnnnnnnnnnnnnnnnnnnnnnnnnnnnnnnnnnnnnnnnnnnnnnnnnnnnnnnnnnnnnnnnnnnnnnnnnnnnnnnnnnnnnnnnnnnnnnnnnnnnnnnnnnnnnnnnnnnnnnnccgcagaggcacagcctcaagacgactgtgccagatggcttttactacggaggagtttcttctgcctcatatgcagcttcaat

SEQ ID NO: 22751 - DNA, 2082 bp, Macaca Mulatta
  misc_feature (1)...(2082): n = A,T,C or G
tcagcttcagagaatggcaaccattgatttgtcccnnnnnnnnnnnnnnnnnnnnnnnnnnnnnnnnnnnnnnnnnnnnnnnnnnnnnnnnnnnnnnnnnnnnnnnnnnnnnnnnnnnnnnnnnnnnnnnnnnnnnnnnnnnnnnnnnnnnnnnnnnnnnnnnnnnnnnnnnnnnnnnnnnnnnnnnnnnnnnnnnnnnnnnnnnnnnnnnnnnnnnnnnnnnnnnnnnnnnnnnnnnnnnnnnnnnnnnnnnnnnnnnnnnnnnnnnnnnnnnnnnnnnnnnnnnnnnnnnnnnnnnnnnnnnnnnnnnnnnnnnnnnnnnnnnnnnnnnnnnnnnnnnnnnnnnnnnnnnnnnnnnnnnnnnnnnnnnnnnnnnnnnnnnnnnnnnnnnnnnnnnnnnnnnnnnnnnnnnnnnnnnnnnnnnnnnnnnnnnnnnnnnnnnnnnnnnnnnnnnnnnnnnnnnnnnnnnnnnnnnnnnnnnnnnnnnnnnnnnnnnnnnnnnnnnnnnnnnnnnnnnnnnnnnnnnnnnnnnnnnnnnnnnnnnnnnnnnnnnnnnnnnnnnnnnnnnnnnnnnnnnnnnnnnnnnnnnnnnnnnnnnnnnnnnnnnnnnnnnnnnnnnnnnnnnnnnnnnnnnnnnnnnnnnnnnnnnnnnnnnnnnnnnnnnnnnnnnnnnnnnnnnnnnnnnnnnnnnnnnnnnnnnnnnnnnnnnnnnnnnnnnnnnnnnnnnnnnnnnnnnnnnnnnnnnnnnnnnnnnnnnnnnnnnnnnnnnnnnnnnnnnnnnnnnnnnnnnnnnnnnnnnnnnnnnnnnnnnnnnnnnnnnnnnnnnnnnnnnnnnnnnnnnnnnnnnnnnnnnnnnnnnnnnnnnnnnnnnnnnnnnnnnnnnnnnnnnnnnnnnnnnnnnnnnnnnnnnnnnnnnnnnnnnnnnnnnnnnnnnnnnnnnnnnnnnnnnnnnnnnnnnnnnnnnnnnnnnnnnnnnnnnnnnnnnnnnnnnnnnnnnnnnnnnnnnnnnnnnnnnnnnnnnnnnnnnnnnnnnnnnnnnnnnnnnnnnnnnnnnnnnnnnnnnnnnnnnnnnnnnnnnnnnnnnnnnnnnnnnnnnnnnnnnnnnnnnnnnnnnnnnnnnnnnnnnnnnnnnnnnnnnnnnnnnnnnnnnnnnnnnnnnnnnnnnnnnnnnnnnnnnnnnnnnnnnnnnnnnnnnnnnnnnnnnnnnnnnnnnnnnnnnnnnnnnnnnnnnnnnnnnnnnnnnnnnnnnnnnnnnnnnnnnnnnnnnnnnnnnnnnnnnnnnnnnnnnnnnnnnnnnnnnnnnnnnnnnnnnnnnnnnnnnnnnnnnnnnnnnnnnnnnnnnnnnnnnnnnnnnnnnnnnnnnnnnnnnnnnnnnnnnnnnnnnnnnnnnnnnnnnncacgcctaagtagacatgaaagaattcacactggggagaaaccccatgaatgtaagagtatgagtgttaccatttagcccatcagttgccatctttaattattggcaatgacaccaaagattatcagatttgtcctaaatgccttgcggaggttgtaatggctcatggattggctttggatgccatcctgaaggtctgaaattaaacctacaggttctgaatacaacttcatggttgcctaagtctgggcatctgtgaagaagggtcatggatggtgaggtcagtactgaagcctgcctcaccttggtgactagattcctaagatcatagcgttgacaagttctgtatgagatacatcatgcagattgatcccagcccctgttgattagtggctgccagtgtggcacatttatgtcaaaatttaccagaaaccaagatgatgtaggaccccagaggtgggttgttaagagatgctcctccaagggtctcttctatttcccagatcctgcagagcatggcaggaatgaaaccatccttaactgccagtgcactttcacagctgattatttctgtgtccccttgtaaaatctaagaagtgtgacagccttgcctgttctaccttgtatgtctattttaggtggcacaatgtaggtggcagtggctcttctagtataatccagtctct

SEQ ID NO: 22752 - DNA, 884 bp, Macaca Mulatta
cttgtgtcagaacttctttttctgggtctttctggaaacccaaagattgagattctttactttgctctcattctagttatgtacctagtgattctaattggcaatggtgttctaatcatagcaagcatcttggattctcgtcttcacacacccatgtacttcttcctgggcaacctctctttcctggatatctgctatacatcctcctccgttccctcaacattggtgagcttaatctcaaagaaaagaaacatttctttctctggatgtgcagtgcagatgttctttgggtttgcgatggggtcaacagaatgtttacttcttggcatgatggcatttgatcgttacgtggccatctgtaacccgctgagataccccatcatcatgagcaaggtggcatatgtcctgatggcttctgtgtcctggctctccggtggaatcaattcagttgtacaaacattacttgccatgaggctgcctttctgtgggaataatattatcaatcatttcacatgtgaaatattagctatcctcaagctagcttgtgctgatatatccctcaatattatcaccatggtgatatcaaatatggccttcctggttcttccactgatggtcatttttttctcctatatgttcatcctgtacaccatcttgcaaatgaattcagccacaggaagacgcaaggcattttctacgtgttcagctcacctgactgtggtgatcatattttatggtaccatcttatttctgtatgcaaaaccaaagtctcaggacctgactggggaagaaaaattgcaagcatcagacaagctcatttctctgttttatggggtagtgacccccatgctgaatcctataatctatagcttgagaaataagga

SEQ ID NO: 22753 - DNA, 1175 bp, Macaca Mulatta
  misc_feature (1)...(1175): n = A,T,C or G
cttccggatggctcctcccttgctgagcccgggtctgggcctacagagggagtctctctacgatctaccctggtacagcaagctgccaccgtggtacccaattccccacgtccccagggaagtgccgcccttcctgagcagcagccacgagtacacggctgccagcagtgaagatctgggccaccaaatcgttggtggcgacaacgagagtggcccgtgttgtggacctgacactttaattccaccgccccttgtggatgcttctctgttacctgaggggcttaggacctcccagttattaccttgctcacccagcaagcagtcagagaatggtcccaaaccctccaaccaagaagggaagtcccctgctcggttccagttcacggagcaggacctgcacttcgttctgtacggggtcactcccagcctggatcacccagccagcctgcaccatgcgatttcaggcctcctggtccccacagacagctctggnnnnnnnnnnnnnnnnnnnnnnnnnnnnnnnnnnnnnnnnnnnnnnnnnnnnnnnnnnnnnnnnnnnnnnnnnnnnnnnnnnnnnnnnnnnnnnnnnnnnnnnnnnnnnnnnnnnnnnnnnnnnnnnnnnnnnnnnnnnnnnnnnnnnnnnnnnnnnnnnnnnnnnnnnnnnnnnnnnnnnnnnnnnnnnnnnnnnnnnnnnnnnnnnnagatatttgaagatggtcatttaagccactttatagatggaaaaggaggtacggggaattggatgtcctatgtcaactgtgcccgctnnnnnnnnnnnnnnnnnnnnnnnnnnnnnnnnnnnnnnnnnnnnnnnnnnnnnnnnnnnnnnnnnnnnnnnnnnnnnnnnnnnnnnnnnnnnnnnnnnnnnnnnnnnnnnnnnnnnnnnnnnnnnnnnnnnnnnnnnnnnnnnnnnnnnnnnnnnnnnnnnnnnnnnnnnnnnnnnnnnnnnngagtctgcagaaggctacagatgtgaaagatgtgggaaggtatttacctacaaatattacagagataagcacctcaagtacaccccctgtgtggacaagggcgataggaaatttccctgttctctctgcaaacggtcctttgagaagcgggacaggcttcggatccacattcttcatgttcatgagaagcaccggcctcacaag

SEQ ID NO: 22754 - DNA, 557 bp, Macaca Mulatta
attgggaagagttatgcaaattctcctataagcaaaacaaaggatgcctttgagtaacaatgacctggaactacccaattccaagttctccatttcacaagccttcaagactgacgacccattaaggttttcatactattagccaatgctgtagacagaagcattttgacaagaagaaagcaaacaaaataatggccctgaggaatggcatgtcattactaaagatcatatggggaaaatgaaaccctccccaaaatacaggaaattctggaaggagacattttcttcagactacaatgtccagtctctcacctagactcaggcttcctttggagattaaggcccctcagagatcaacagacaaacatttttctcttcctcaagcaatactcctagggcctggcttctgtctgatcaaggcaccccgcaacccagaaaggagctgatggggcagaacgaactttaagtatgagaaaagttcagcccaagtgaaataaaaactcaatcacattcaattccagagtagtttcgagtttcacatcgtaaccattttcgcc

SEQ ID NO: 22755 - DNA, 426 bp, Macaca Mulatta
ttctatttaagaatttgttttattaaattaatataaaaatctttgtaaatctctatatacatctggtcattggaggttccagttataaacccatcttagttctacccctttcccctcaaagggggagcaggggtcaagtgaccctgccagggcagggctgatcttcctgcccctggaaaagttgctgtaggtgggcagtgggtcagattccaggtaggataaactgggagaagctggcaccccaggtctggagggggctggggttcagcctccggctgtagctgcctcctgccttcccaaggcagaaggaatgagagatgcacattctgggatgacaggcatggctagcaccatcctaggccacccacgaggggctcattggcatttgtcatcgctgtcggaagggctgccctcccgggggaggcc

SEQ ID NO: 22756 - DNA, 1690 bp, Macaca Mulatta
  misc_feature (1)...(1690): n = A,T,C or G
aggggacgcagcgaagccggggcccgcgccaggccggccgggacggatgccgatgcccggagctgcgacggctgcannnnnnnnnnnnnnnnnnnnnnnnnnnnnnnnnnnnnnnnnnnnnnnnnnnnnnnnnnnnnnnnnnnnnnnnnnnnnnnnnnnnnnnnnnnnnnnnnnggaaccagacagcacctacttcgaccttccccagtcaagccgggggaataatgaggtggtgggcggcacggattccagcatggacgtcttccacatagagggcatgaccacatctgtcatgnnnnnnnnnnnnnnnnnnnnnnnnnnnnnnnnnnnnnnnnnnnnnnnnnnnnnnnnnnnnnnnnnnnnnnnnnnnnnnnnnnnnnnnnnnnnnnnnnnnnnnnnnnnnnnnnnnnnnnnnnnnnnnnnnnnnnnnnnnnnnnnnnnnnnnnnnnnnnnnnnnnnnnnnnnnnnnnnnnnnnnnnnnnnnnnnnnnnnnnnnnnnnnnnnnnnnnnnnnnnnnnnnnnnnnnnnnnnnnnnnnnnnnnnnnnnnnnnnnnnnnnnnnnnnnnnnnnnnnnnnnnnnnnnnnnnnnnnnnnnnnnnnnnnnnnnnnnnnnnnnnnnnnnnnnnnnnnnnnnnnnnnnnnnnnnnnnnnnnnnnnnnnnnnnnnnnnnnnnnnnnnnnnnnnnnnnnnnnnnnnnnnnnnnnnnnnnnnnnnnnnnnnnnnnnnnnnnnnnnnnnnnnnnnnnnnnnnnnnnnnnnnnnnnnnnnnnnnnnnnnnnnnnnnnnnnnnnnnnnnnnnnnnnnnnnnnnnnnnnnnnnnnnnnnnnnnnnnnnnnnnnnnnnnnnnnnnnnnnnnnnnnnnnnnnnnnnnnnnnnnnnnnnnnnnnnnnnnnnnnnnnnnnnnnnnnnnnnnnnnnnnnnnnnnnnnnnnnnnnnnnnnnnnnnnnnnnngggcaggtgctgggccgccggtcctttgagggccgcatctgcgcctgtcctggccgcgaccgaaaagccgacgaggaccactaccgggagcagcaggccttgaatgagagctccaccaagaacggggctgccggcaagcgnnnnnnnnnnnnnnnnnnnnnnnnnnnnnnnnnnnnnnnnnnnnnnnnnnnnnnnnnnnnnnnnnnnnnnnnnnnnnnnnnnnnnnnnnnnnnnnnnnnnnnnnnnnnnnnnnnnnnnnnnnnnnnnnnnnnnnnnnnnnnnnnnnnnnnnnnnnnnnnnnnnnnnnnnnnnnnnnnnnnnnnnnnnnnnnnnnnnnnnnnnnnnnnnnnnnnnagtcacctacagcccccatcctacgggccggtcctctctcccatgaacaaagtgcacgggggcatgaacaagctgccctccgtcaaccagctggtgggccagcctcccccgcacagctcggcagctacacccaacctggggcctgtgggnnnnggatgctcaacaaccatggccacgcagtgccagccaacggcgagatgagcagcagccacagcacccagtccatggtctcggggtcccactgcactccgccacccccctaccacgccgaccccagcctcgtcagnnnagttttttaacaggattggggtgtccaaactgcatcgagtatttcacgtcccaggggttacagagcatttaccacctgcagaacctgaccatcgagg

SEQ ID NO: 22757 - DNA, 858 bp, Macaca Mulatta
ggggacgtgggggaggaccggctcaccgggtcgcttggtggctcagtctgtctgtccgtccgcgggtgccatcatggcggacgcggccagtcaggtgctcctgggctccggtctcaccatcctgtcccagccgcttatgtacgtgaaagtgctcatccaggtgggttatgagcctcttcctccaacaataggacgaaatatttttgggcggcaagtgtgtcagcttcctggactctttagttatgctcagcacattgccagtatcgatgggaggcgtgggttgttcacaggcttaactccaagactgtgttcgggagtccttggaactgtggtccatggtaaagttttacagcattaccaggagagtgacaagggtgaggagttaggacctggaaatgtacagaaagaagtctcatcttcctttgaccgcgttatcaaggagacaactcgagagatgatcgctcgttctgctgctaccctcatcacacatcccttccatgtgatcactctgagatctatggtacagttcattggcagagaatccaagtactgtggactttgtgattccatagtaaccatctatcgggaagagggcattctaggatttttcgcgggtcttgttcctcgccttctagtgacatcctttctttgtggctgtgtaactcactggcctacctcgtcaatacctatgcactggacagtggggtttctaccatgaatggaatgaagagttattcttcagctgtcacaggattttttgcgagtatgttgacctacccccttgtgcttggtctccaatcttatggctgtcaacaacctgtggtcttgcttggtggatgcccttcttactccccaaaa

SEQ ID NO: 22758 - DNA, 780 bp, Macaca Mulatta
  misc_feature (1)...(780): n = A,T,C or G
cagccagacgggaccttgccctttggtgatactgaggacacttcatgggcccagagctcttggtactgcccttcctctgagggccgtggagggctgtggacagcccagcaacctgttgctcttggaggctggtatggccttgaggagggaagccttgcatggccgctggaagagaggcgccgcctggcctggctctgcagaacccaggggcacgctctgggcctgggctgagaaggccccactctccctgcggctctgagttgggctgaggacaggtgtgggcgtcagtgtgggcgcaggtgcaggcacagggccactgtcctccaggcaggctttttggtgctaggccctgggactttaagctgcccagcccgtatttatgtaaaggtatttatgggccactgcgcatgcccgctgcaaccctgggatcagctggaagctgcccgtcatctcctgcccgatgcccagaaaccctgattcaggtctgtagggttctgcgggctcaccaggctgctggcgccggtaccgtgtanacccaggaaggtaaaggagcaggcagcctcctcgtggcctgtgtgtgtgctgcgttacgtggactctgtgtgggctcctcccctgggcctggccaggataagggtgcacacgggggacctcccagtgtacctgggaccctttgcaggggtgggggtgccacaccagttgagaagttgggactcatctcagttccccggtgctattggggagaatgctgggggctgcatccgttacacctgagacccc

SEQ ID NO: 22759 - DNA, 311 bp, Macaca Mulatta
  misc_feature (1)...(311): n = A,T,C or G
ttggcacagctgaagcagaggaacacgctgaaggacgtcatcatcatgatccagacgctgctgatcatcctcttcatcatcgtgcccatcttcctgctgctggacaaggnaggatgacagcaaggccggcatggaggaagatcacacctacgaggnagggcctggacattgaccagacggccacctacgaggacatagtgacgctgcggacaggggaagtgaagtggtctgtgggtgagcacccaggtcaggagtgagagccaggacctccccacggcctgggtgcaggctccccagcctcagtgactgct

SEQ ID NO: 22760 - DNA, 245 bp, Macaca Mulatta
  misc_feature (1)...(245): n = A,T,C or G
ngccatatcaatgactcccaggcagcccctgccccactcctgcctgtctatgaactagacggagcgcccacagctgcccaggtgctgatcatgggacctgatgacttcattgtggccatggttangctccctgaaccagccctttggcagcggtcttatcaccccctcggggatcctgctcaacagccagatgctagacttctcctggcccaaccggacggctaaccactctgcacccagcctgg

SEQ ID NO: 22761 - DNA, 1159 bp, Macaca Mulatta
  misc_feature (1)...(1159): n = A,T,C or G
gactatccagatcttgtgtggtgtgaaggtattgagcttgggaatcattttggcatctgcttccttctctccaaattttacccaagtgatttctatgctgttgaagtctgcttacccattcatagcaccctnnnnnnnnnnnnnnnnnnnnnnnnnnnnnnnnnnnnnnnnnnnnnnnnnnnnnnnnnnnnnnnnnnnnnnnnnnnnnnnnnnnnnnnnnnnnnnnnnnnnnnnnnnnnnnnnnnnnnnnnnnnnnnnnnnnnnnnnnnnnnnnnnnnnnnnnnnnnnnnnnnnnnnnnnnnnnnnnnnnnnnnnnnnnnnnnnnnnnnnnnnnnnnnnnnnnnnnnnnnnnnnnnnnnnnnnnnnnnnnnnnnnnnnnnnnnnnnnnnnnnnnnnnnnnnnnnnnnnnnnnnnnnnnnnnnnnnnnnnnnnnnnnnnnnnnnnnnnnnnnnnnnnnnnnnnnnnnnnnnnnnnnnnnnnnnnnnnnnnnnnnnnnnnnnnnnnnnnnnnnnnnnnnnnnnnnnnnnnnnnnnnnnnnnnnnnnnnnnnnnntcaaagatgactcatggccctggatatgaagaactattgacttcttaagaaaaaagggagaaatattaatcagaaagttgattcttatgataatacggaaaagttaaccgttataaaaaagcaaagcttgagtttcctaaatgtaagcctttaaagtaatgaacattaaaaccaaacattatttcactgtcatttaagatatgtgttcattggggaatctcttgatttgcctgacattgacttcagcaaaagcaaagagctgtaaattaccatttactaaactagccaaatagtctgaatttccagaaaactaggcagaatgatcattcccagaaacatttcccggaaaatgtttcccagaaaactaggcagaatgatcattcaatggatcacagtgaagcaaagggcacaaccttttattttaccccttaattgtcaacagtcaacaggagttaactgacttcttgtggtgctcagactcttttatactggtgccaatgttttatcccatggattttactcattagtgtgtaaaggcaagccccatacaatgaagtctcagggtccatgaaagtagctggcttcaaaataaaatctttgagtgcat

SEQ ID NO: 22762 - DNA, 1561 bp, Macaca Mulatta
  misc_feature (1)...(1561): n = A,T,C or G
ggaaactcgactttgctcgagcttgccctgaggacgcgccacgccccctcccctacctaagccagacagggagcagggatggaaacggcgtccgcaacccagcgccaagcagacgtggactctgcgcccgctccccgggaccttcggcgttaaggagaactccgaagagagcggggggagtggaggggaacggcggcgacaaagcggatttgaaactaggcttcaaggaggacgtggggagctggcgccgcaggagctaccgaggcggcggccgggggagcctcgcggcctgcgggagctcccggcggtcatgggcgagtcggcggtggggcgcctgggagccggctgagcgccggggcccttatttcccgggggagggcgagactccgcnnnnnnnnnnnnnnnnnnnnnnnnnnnnnnnnnnnnnnnnnnnnnnnnnnnnnnnnnnnnnnnnnnnnnnnnnnnnnnnncacctgaacgaggacaacgcgcgctttctgctgctggccgcgctcatcgtgctctacctgctgggcggcgccgccgtcttctccgcgctggagctggcgcacgagcgccaggccaagcagcgctgggaggagcgcctggccaacttcagccgcggccacaacctgagccgcgacgagctgcgcggcttcctccgccactacgaggaggccactcgggccggcatccgcgtgnnnnnnnnnnnnnnnnnnnnnnnnnnnnnnnnnnnnnnnnnnnnnnnnnnnnnnnnnnnnnnnnnnnnagggtttgggatgacaactccggcaacagtaggtggaaaaatctttcttatcttttacggccttgttgggtgttccagcaccatcttgttcttcaacctcttcctggagcgcctgatcaccgtcatcgcctacatcatgaagtcgtgccaccagcggcagctccggagacgaggggccctgccccaggagagcctgaaggatgcggggcagtgcgaggtggacagcctggctggctggaaaccctccgtgtactatgtcatgctgatcctatgcacggcctccgtcctcatctcctgctgcgcctcggccatgtacacccccatcgaaggctggagctactttgattcactctacttctgttttgtggctttcagcaccatcggctttggggacctggtcagcagccagaacgcccactatgagagccaaagcctctatcgctttgccaacttcgtcttcatcctcatgggtgtctgctgcatctactccttgttcaatgtcatctctatcctcatcaaacagtccttgaactggatcctgaggaaaatggacagcgggtgctgcccgcaatgccagagaggactcttgcgatcacgcaggaacgtggtgatgccaggcagcatccggaaccgctgcaacatctccatagagacagacggggtggcagagagtgacacagacgggcgcccgctctcgggagagatgatctccatgaaggacttgctgccagccaacaaggcctcgctggccctcctgcaaaaacaactgtctgagatgggccatggctgccc

SEQ ID NO: 22763 - DNA, 699 bp, Macaca Mulatta
  misc_feature (1)...(699): n = A,T,C or G
ctgcagctcctgctatgcccagcccagacatggtgtacggggccctgccaccaccaggctgtgaccccagtgggcttggggaggcactgcccgcccagagccgcccatctcccttccgaccagcagcccccaaagccgggcccccaggnccccaggcctggtgcaccctctcttctcaccaagccacctcacgagcaagacaccacccccactgtacctgccgacnnnnnnnnnnnnnnnnnnnnnnnnnnnnnnnnnnnnnnnnnnnnnnnnnnnnnnnnnnnnnnnnnnnnnnnnnnnnnnnnnnnnnnnnnnnnnnnnnnnnnnnnnnnnnnnnnnnnnnnnnnnnnnnnnnnnnnnnnnnnnnnnnnnnnnnnnnnnnnnnnnngccgaagcctgggcgaggagggccccccaacccgcggcgcctccccgccgacccccccagtcagcatcaagtccgagcgcctctctccggcccccgggggccccggcgactttcctaagaccttcccctaccccttgctcctcgcccggtccctggcagagcctctgcggcccgggcccgccctgcgccggctgcccttggccgacggctggccccggtaggagacccctggtggcacaggcccaggactctcgccggcacggcgagggcacgtggggaccccacctccctccaggcctcttcagagaaga

SEQ ID NO: 22764 - DNA, 1847 bp, Macaca Mulatta
  misc_feature (1)...(1847): n = A,T,C or G
cttctacgcagattttggaccactcaatctggcaatggtttacagatattgttgcaagataaataagaaattaaannnnnnnnnnnnnnnnnnnnnnnnnnnnnnnnnnnnnnnnnnnnnnnnnnnnnnnnnnnnnnnnnnnnnnnnnnnnnnnnnnnnnnnnnnnnnnnnnnnnnnnnnnnnnnnnnnnnnnnnnnnnnnnnnnnnnnnnnnnnnnnnnnnnnnnnnnnnnnnnnnnnnnnnnnnnnnnnnnnnnnnnnnnnnnnnnnnnnnnnnnnnnnnnnnnnnnnnnnnnnnnnnnnnnnnnnnnnnnnnnnnnnnnnnnnnnnnnnnnnnnnnnnnnnnnnnnnnnnnnnnnnnnnnnnnnnnnnnnnnnaaagcagaaaatggagatttaaattggataataccagaccgatttattgccttctgtggacctcattcaagagccagacttgaaagtggnnnnnnnnnnnnnnnnnnnnnnnnnnnnnnnnnnnnnnnnnnnnnnnnnnnnnnnnnnnnnnnnnnnnnnnnnnnnnnnnnnnnnnnnnnnnnnnnnnnnnnnnnnnnnnnnnnnnnnnnnnnnnnnnnnnnnnnnnnnnnnnnnnnnnnnnnnnnnnnnnnnnnnnnnnnnnnnnnnnnnnnnnnnnnnnnnnnnnnnnnnnnnnnnnnnnnnnnnnnnnnnnnnnnnnnnnnnnnnnnnnnnnnnnnnnnnnnnnnnnnnnnnnnnnnnnnnnnnnnnnnnnnnnnnnnnnnnnnnnnnnnnnnnnnnnnnnnnnnnnnnnnnnnnnnnnnnnnnnnnnnnnnnnnnnnnnnnnnnnnnnnnnnnnnnnnnnnnnnnnnnnnnnnnnnnnnnnnnnnnnnnnnnnnnnnnnnnnnnnnnnnnnnnnnnnnnnnnnnnnnnnnnnnnnnnnnnnnnnnnnnnnnnnnnnnnnnnnnnnnnnnnnnnnnnnnnnnnnnnnnnnnnnnnnnnnnnnnnnnnnnnnnnnnnnnnnnnnnnnnnnnnnnnnnnnnnnnnnnnnnnnnnnnnnnnnnnnnnnnnnnnnnnnnnnnnnnnnnnnnnnnnnnnnnnnnnnnnnnnnnnnnnnnnnnnnnnnnnnnnnnnnnnnnnnnnnnnnnnnnnnnnnnnnnnnnnnnnnnnnnnnnnnnnnnnnnnnnnnnnnnnnnnnnnnnnnnnnnnnnnnnnnnnnnnnnnnnnnnnnnnnnnnnnnnnnnnnnnnnnnnnnnnnnnnnnnnnnnnnnnnnnnnnnnnnnnnnnnnnnnnnnnnnnnnnnnnnnnnnnnnnnnnnnnnnnnnnnnnnnnnnnnnnnnnnnnaacaaaacacaattgcaaaagccttagttgctttccacctaagaagcgatcaatggagaaaatgtccactggagtttcaataatgaactttgagtttgggtgcaagcaaatgactcaaagaaggacccagctctcaagctgaaggacaaaaatgctgttgtaaatttagtctcaggtgtaaatactcaagccctctggtacccagggagctggctggtctgtggtgaatgtgtgtccctgtgatggcaagcactgtagttgctggccttcagaagacttgaggatctgatggaggttttttatgtatttattttctgttcaaccttgtgaccctgtgtcaaaatttatacagatacaaaaggcattactgagatggtactttctgtaatttgattctatttggctttatcatcttcactcgactatttgtaatactgttgtaatgttaactctgttaagtaacccacgctgcattgtcttcccccaaagagtgctttattaacaataatctgtgaaaatcatcatttaa

SEQ ID NO: 22765 - DNA, 2248 bp, Macaca Mulatta
ggggatcagatcattgagatgtggaagctgttgctgtgggttgggctggttcttgtgctgaaacaccacgatggtgctgcccataaactggtgtgttatttcaccaactgggcacacagtcggccaggccccgcctcgatcttgccccatgacctggacccctttctctgcacccacctgatatttgcctttgcctcaatgaacaacaatcagattgttgctaaggatctccaggatgagaaaattctctacccagagttcaacaaactaaaggagaggaacagagagctgaaaacactgctgtccatcggcgggtggaactttggcacctcaaggttcactactatgttgtccacatttgccaaccgtgaaaagtttattgcctcagttatatcccttctgaggatacatgactttgatggtcttgatctttttttcttatatcctggactaagaggcagccccatgcatgaccggtggacttttctcttcttaattgaagagctcctgtttgccttccggaaggaggcactgctcaccatgcgcccaaggctgctgctgtctgctgctgtttctggggtcccacacatcgtccaaacatcctatgatgtgcgcttttctagggaagactcctgggatttcatccaatgtcttggtccttatgaacttacatggaagttgggaaaagttcacaggacataatagccccctgttctctctgcctgaagaccccaaatcttcggcatatgctatgaattattggaggaagcttggggcaccctcagagaagctcatcatggggatccccacctatggacgcacctttcgcctcctcaaagcctctaagaatgggttgcaggccacagcagtcggaccagcatctccagggaagtacaccaagcaagcaggcttcttggcttattttgagatttgttcctttgtctggggagcgaagaagcactggattgattatcagtatgtcccatatgccaacaaggggaaagagtgggttggctatgacgatgccatcagcttcagttacaaggcgtggtttataaggcgagagcattttgggggggccatggtgtggacattggacatggatgacgtcaagggcacgttctgtggcactggccctttcccccttgtctacgtattgaatgatatcctggtgcgggctgagttcagttcaacttctttaccacagttttggctgtcatctgctgtgaattcttcaagcactgaacctgaaaggctggctgtgaccaaggcatggaccactgatattaagattttgcccccaggaggagaggctggggtcactgagatcaatggaaaatgtgaaaatatgactataacccctagagttacaattgtgacccctacaaaggaaactgtatcccttggaaagcacactgtagctctaggagagaagactgagatcactggggcaacgaccatgacttctgtgggtcatccgtccatgacccctggagagaaggccctgacccctgtgggtcaccagtctgagctccctgggaagaagaccctgacccctgtgggtcatcaatctgtgaccactggacagaagaccctgatctctgtgggttatcactctgtgaccccccctggggaaaagaccctgacccctgtggatcatccatctgtgacccctgtgagtcatcagtctgtgagccctggaggaatgactatgacccctgtccattttcagaccgagacccttagacagaatacaatggcccctagaaggaaggctgtagcccgtgaaaaggtgactgtcccctccagaaagatatcagtcacccctgaagggcagactgtgcctttaagaggggagtatttgacttctgagacaggtactcacccccagggtgggtaacttgggtctttagagggaagctgaaaacaggatgatgctgtcctccagccctgtcatccagctcccagaacatactcctcaagcttttgacaaccactttgttcctgtctatggaaaccattcctctgtcaactcagtaacccctcaaacaagtcctctttctctaaaaaaagaaatcccagaaaactctgctgtggatcaaggagcctaagccgtgctggtgtcagaaaccagggaaaacccttgtcttttcttctaagtgacatgcttcctcatcccggagcaaaacaggcatcaaaaccacaataggccaatctcttttccattaaataaactgtaaacacaaga

SEQ ID NO: 22766 - DNA, 811 bp, Macaca Mulatta
gttcataatcttcaaatgaaattgagaagagatgatattcatgtgggaacagtaacaaaatagcaaaactgtcaccttaatgaactttgtcaatgagaccttgaattgtctaaagtggttttaatttaatataactttgtgacattttgaatcatgtttctagcttctataagacatgaagttgcagtatttttaaattaatgcctaatgacctactgggttccaaataataaattaattgcttttttgtttttcttattgattgaagcctataacctcatcttgtcttagaaacattgtttgctttgcagatatcttaagctaaatttgagaaattgtactagattgacaatattcaaaattgagttaaatctgagctacaagtaccattcattccacttttcataggtttgcaaccttaaaaacaaatgttaaatgaacagagttcagaaagatcatttagctttcctggtgtcttctttctattttgttttaaagctgtgaaatgtttttctcttttggaaaaggaaaagcttaacaattagacagttttatgaagaagcctttaatccaagttttatgagacaataggaacccatagctacttaatttttaggagacagtaattcagttgcagaagttttcagctgctattcccattctcttttacaaaactagttttttaaaaaaaaataatgatccattttatcttactactttataacttttgctgacttctattctttgcattgtatgtaatgtccatcagtataaattgagactgaatttctaggacccacaaaagtggtat

SEQ ID NO: 22767 - DNA, 493 bp, Macaca Mulatta
aggattcatactggggagaagccttttgaatgtggggagtgtggaaaatctttcagcatcagttctcagcttgccactcatcagagaatccatactggagagaagccctatgaatgtaaggtttgtagtaaagcgttcacccagaaggctcaccttgcacagcatcagaaaacccatacaggagagaaaccatatgagtgcaaggaatgcggtaaagccttcagccagaccacacacctcattcaacatcagagagttcacactggtgagaaaccctataaatgtatagaatgtgggaaggcctttggtgataactcatcctgtactcaacatcaaagactgcacactggccaaagaccttatgaatgtattgagtgtggaaaggcattcaagacaaaatcctcccttatttgtcatcgcagaagtcatactggagaaaaaccttatgaatgtagtgcgtgtggcaaagcctttagtcatcgtcaatccctta

SEQ ID NO: 22768 - DNA, 2178 bp, Macaca Mulatta
  misc_feature (1)...(2178): n = A,T,C or G
gaatggcgtcatggcactaggaaccctacttctcctgctctcggcccttaccaagacctgggcgggctcccactccttgaagtatttccacacttccgtgtcccggcccggccgcggggggccccgcttcatctccgtgggctacgtggacgacacccagttcgtgcggtatgacagcgacgccgcgagtccgaggatggagccgcgggcgccgtgggtggagcaggaggggccggagtattgggaccaggagacacggagcgccagggacaccgcacagactttccgagtgaacctggagaccctgcgcggctactacaaccagagcgaggccgggtctcataccctccagtggatgcatggctgcgacctggggcccgacgggcgcttcctccgcgggtatgaacagttcgcctacgacggcaaggattatctcaccctgaatgaggacctgcgctcctggtccgcggtggacacggcggctcaaatctccgagcaaaagtcaaatgatggctctgaggctgagcaccagagagcctacctggaagacacatgcgtggagtggctccacagatacctggagaatgggaaggagacgctgcagcgctcagaacccccaaagacacacgtggcccaccaccccgtctctgatcatgaggccaccctgaggtgctgggccctgggcttctatcctgcggagatcacagtgacctggcagcgggatggggaggaccagacccaggacacggagcttgtggagaccaggcctgcaggggatggaactttccagaagtgggcagctgtggtggtaccttctggagaggagcagagatacacgtgccatgtgcagcatgaggggctacccgagcccctcaccctgagatgggagccgtcttcccagtccattatcgccatcgtgggcatcattgctggcctggttcttggcgctgtggtcactggagctgtggttgctgctgtgatgtggaggaggaagagctcaggtagaaaaggatggagctactctcaggctgtgggtagtgacagttcccagggatctgatgattctctcacagcttataaaccctgagacagctgcttcatgtgcgactgagatgcaggattccttcacgcctcccctctgtgtcttaagggactctggcttctcttttcgcaagggcctctgaatctgtctgtgtccctgtgagcataatatgaggaggcagacacacactccacctccatgtctaccatgacccccttcctcacactgacctgtgtgccttccctgttctacttttctattaaaaataagaaactgagcagtgcacggcggctcacannnnnnnnnnnnnnnnnnnnnnnnnnngccaaggcaggcagatcacgaggtcaggaaatcaaaaccaacacnnnnnnnnnnnnnnnnnnnnnnnnnnnnnnnnnnnnnnnnnnnnnnnnnnnnnnnaggcacctgtagtccccnnnnnnnnnnnnnnnnnnnnnnnnnnnnnnnatgtcatcccaggaggcagaggttgctgtgcgccgagattgtgccactgcactccggcctgagtgacagggtnnnnnnnnnnnnnnnnnnnnnnnnnnnnnnnnnnnnnnnnnnncaggatctcaattaatttttccatattctgcagtgaaatggagttgaggaagctaaggtcatagttagaaatacagacagataattccacagcacatctctggcaaatttagcctattccttaccacctgtaatcttgaccatataccttggagttgaatattgttttcatactgcttcgcgttgaatgttccttccaacactcatgttgagacttaatccctaatgtggnaatactgacaggtggagcctttgacatgtcttgcgagacaagctctacttcttcaggcgtaaggatacgggtatcccgaatggaccgcgggtttaaaaaagaaacaaactgctcgtgttcggcccaagaaccccttataagccacgaataaggtgtgtccaaaaccccaaagaaggttagatgtctgaagacaacttttgggacgcaacaacaagggtatcccggccgtaaacactatccgggaaacagctgtcccccccccccttttccccctctcctctcttcgcgtgcttctgctcgttatcaaacacaaacaaaa

SEQ ID NO: 22769 - DNA, 135 bp, Macaca Mulatta
atcaaacttgtagcaagctgttgacaccttccttgaaggaagacacatgcaatcagtgtgtcctaagcctaaacacaggggaaagggttataaatatcgtaatgtaatagactataaaatggtcatggcctagct

SEQ ID NO: 22770 - DNA, 722 bp, Macaca Mulatta
  misc_feature (1)...(722): n = A,T,C or G
aaggagagaacaatgtcatcactaccccaaggacccacagctggaggtgaatttctacactgggacggatgaggactcagatattgctttccaattccgactgcactttggtcatcctgcaatcatgaacagtcgtgtgtttggcatatggaggtacgaggagaaatgctactatttgccctttgaagatggcaaaccatttgagctgtgcatctatgtgcgtcacaaagaatacaaggtaatggtaaatggccaacgcatttacaactttgcccatcgattcccgccagcatctgtgaagatgctgcaagtgttgagagatatctccctgaccagagtgcttatcagcgattgagggagatgatcagactcctcattgttaaggaatcccactttctacctgaccatgggattcccagagcctgctaacagaataatccctcctcaccctttcccctacactggatcattaaaacagcaccaaannnnnnnnnnnnnnnnnnnnnnnnnnnnnnnnnnnnnnnnnnnnnnnnnnnnnnnnnnnnnnnnnnnnnnnnnnncnnnnnnnnnnnnnnnnnnnnnnnnnnnnnnnnnnnnnnnnnnnnnnnnnnnnnnnnnnnnnnnnnnnnnnnnnnnnnnnnnnnnnnnnnnnnnnnnnnnnnnnnnnnnnnnnnnnnnnnnnnnnnnnnnnnnnnnnnnnnnnnnnnnnnnnnnnnnnnnna

SEQ ID NO: 22771 - DNA, 506 bp, Macaca Mulatta
  misc_feature (1)...(506): n = A,T,C or G
tggctacgcccccggnggccggtcctgcagctctacgcttcgccgccgcagctagctggcaggttgtgcgcggacgctgtgtggnnnnnnnnnnnnnnnnnnnnnnnnnnnnnnnnnnnnnnnnnnnnnnnnnnnnnnnnnnnnnnnnnnnnnnnnnnnnnnnnnnnnnnnnnnnnnnnnnnnnnnnnnnnnnnnnnnnnnnnnnnnnnnnnnnnnnnnnnnnnnnnnnnnnnnnnnnnnnnnnnnnnnnnnnnnnnnnnnnnnnnnnnnnnnnnnnnnnnnnnnnnnnnnnnnnnnnnnnnnnnnnnnnnnnnnnnnnnnnnnnnnnnnnnnnnnnnnnnnnnnnnnnnnnnnnnnnnnnnnnnnnnnnnnnnnnnnnnnnnnnnnnnnnngctgcaggaacttgaacaagaatatggggaaccctttctggctgccatggaaaagctgctttttgagtacttgtgtcagctggagaaagcactgcctacaccgcaggcacagca

SEQ ID NO: 22772 - DNA, 1251 bp, Macaca Mulatta
  misc_feature (1)...(1251): n = A,T,C or G
caccatggcagacgccactttctcggtgagaatttatcccactattcctctggcgtgcccttccaccccagcgaggcttcccaccatggtgggtcctacctgccccctggagccaatccctacagtgagtccttccaccacagcgaggcttcctaccttagcgggctccaacacaacgagtcccagcatcaccaagtctcccaccatggctggtccacccaccaccaaagccaccaccatggcaggtcccatcatcacgaagcccaccagcatagaaggccttctcatcacggacagatcatttccccttattcctctgtggggtcctaccagcatgggatatctgaccatcacagcgagtaccnnnnnnnnnnnnnnnnnnnnnnnnnnnnnnnnnnnnnnnnnnnnnnnnnnnnnnnnnnnnnnnnnnnnnnnnnnnnnnnnnnnnnnnnnnnnnnnnnnnnnnnnnnnnnnnnnnnnnnnnnnnnnnnnnnnnnnnnnnnnnnnnnnactacgtccagagcacttcccagctctccatcccacaaacgtcctggagcctggttcacgatgcctccggccctgctgcttctcatacaggagcctccccccatcacatggcacacccacagggctcggcccacagcatgactcggtctgtcagcacagtcccctcacgtgccacccagaggtccaaaaaagttcatccctgggatacctccaccaaagattcagaagactggggcaaagaagnnnnnnnnnnnnnnnnnnnnnnnnccggccggctccagcggacccacaagaagggacactctactaatctcttgcagtggctgtgggaaaagctaaccttcctcattcagggcttccgggaaatgatccggaaggtgacccaatccctggcctttgaaaccttcgatcttcttcatcgtctgcctcaacaccttcatgctggtggcccagactttcgctgaagtagagatccggggcnnnnnnnnnnnnnnnnnnnnnnnnnnnnnnnnnnnnnnnnnnnnnnnnnnnnnnnnnnnnnnnnnnnnnnnnnnnnnnnnnnnnnnnnnnnnnnnnnnnnnnnnnnnnnnnnngacttcttcatcatggccatggccgtgctggacttcttgctgatgcagacccactccttcgccatctaccaccaaagcctcttccggatcctcaaggtcttcaagagcctgcgagcgctgagggccatccgggtcctgcggaggctca

SEQ ID NO: 22773 - DNA, 729 bp, Macaca Mulatta
  misc_feature (1)...(729): n = A,T,C or G
ggcgtcgggtttggagttcaagtcggtagccgacagcgttctgtttttacgtgacaaaagatgggaagaggtcagaggtgccctgatgtctgctttcagtcctgaaaagctgaacgannnnnnnnnnnnnnnnnnnnnnnnnnnnnnnnnnnnnnnnnnnnnnnnnnnnnnnnnnnnnnnnnnnnnnnnnnnnnnnnnnnnnnnnnnnnnnnnnnnnnnnnnnnnnnnnnnnnnnnnnnnnnnnnnnnnnnnnnnnnnnnnnnnnnnnnnnnnnnnnnnnnnnnnnnnnnnnnnnnnnnnnnnnnnnnnnnnnnnnnnnnnnnnnnnnnnnnnnnnnnnnnnnnnnnnnnnnnnnnnnnnnnnnnnnnnnnnnnnnnnnnnnnnnnnnnnnnnnnnnnnnnnnnnnnnnnnnnnnnnnnnnnnnnnnnnnnnnnnnnnnnnnnnnnnnnnnnnnnnnnnnnnnnnnnnnnnnnnnnnnnnnnnnagaggcgcagggacttcctccaaatggtcctggatgcccgacattctgcaagtcccgtgggcgtgcaagactttgacatggtcggagatgtcttctcctctacccgatgcaagccgaacccttcccggcaacaccaggccgggcccatggccaggcctttgactgtggacgagattgtgggccaggccttcataatcctcatcgctggctatgaaatcgtcaccaacacactttcttttgccacc

SEQ ID NO: 22774 - DNA, 823 bp, Macaca Mulatta
cctaacttcaggggagaactcccttcagctagaggggagatctggatggcacctattttgtatgactattgcaaaatgcccatgggtgacatttggaaggaagacggggacaagcgctgtaaactggtggtaggaattctggggctcctggtcatagtgcttctgggggtgctgctgattttcttcatcatcaaggccaacagcgaggcctgccaggatggcctccgggcagtgatggagtgtcgcaatgtcacctatctcctgcaacaagagctggccgaggcccagcggggctttcgggatgcagaggcccaggctgtcacctgcaaccagactgtgatggccctaatggcttccctggatgcagagaaggcccaaggacgaaagaaagtggaggagcttgagggggagatcactacattgaaccacaagcttcaggacgcgtctgcggaggtggagccgactgagaagagaaaaccacgtcttaaacgcgagaatcgcggacacggactccggcagctcccaagactccagctgggcggcagagcccccggctcctgattctgctgctgggcttggaccgctctgcctgttgggagatcccaggaacctggcatatcctgggaagatccgggttccgggttcaaattaatggccgggacgttgcccttggattcccatccgtcccgaagcgggggtcttgggggcggccgcgggttaaggggggaaggcccctcgcgcccccctggaccagcgcccactcttgccgcccaggccctctcccgccccccggtgctccaaaaccttcccctagaacccccca

SEQ ID NO: 22775 - DNA, 467 bp, Macaca Mulatta
  misc_feature (1)...(467): n = A,T,C or G
tcagctcgcccatgcttcgtgggggaatggagcccctggagtggttgtgcagaccagtgcaagcctacaacccgtgtgcggaggcgctctgtgcagcaggagcctcagaacggcggggcgccctgcccacccctggnnnnnnnnnnnnnnnnnnnnnnnnnnnnnnnnnnnnnnnnnnnnnnnnnnnnnnnnnnnnnnnnnnnnnnnnnnnnnnnnnnnnnnnnnnnnnnnnnnnnnnnnnnnnnnnnnnnnnnnnnnnnnnnnnnnnnnnnnnnnnnnnnnnnnnnnngatactgtatggagtttaagacagagtccttgactcctcactgtgctctggaaaaccggcccttgactagatggatgcagtatctccgagagggatacacggtgtgtgtggattgtcagcctccagctatgaactctgtgagccttcgttgttccggagatggcctggactccgatgg

SEQ ID NO: 22776 - DNA, 880 bp, Macaca Mulatta
  misc_feature (1)...(880): n = A,T,C or G
gggctcttttccgtggcgcctcggaggcgttcagctgcttcaagatgaagctgaacatctccttcccagccactggctgccagaaactcattgaagtggacgatgaacgcaaacttcgtactttttatgagaagcgtatggccacagaagttgctgctgacgctctgggtgaagaatggaagggttatgtggtccgaatcagtggtgggaacgacaaacagtgtttccccatgaagcacggtgtcttgacccatggccgtgtccgcctgctactgagtaaggggcgttcctgttacagagcagggagagcgggagaaagaaagagaagatccgtgcgtggttgcattgtggaagccaatctgagcgttctcaacttgggttattggtaaaagaaggannaagaaggatattcctgggagtgactgaaatatacggtttccgtcggccggctggggccccaaggagaaactnagccggaagtcccggaaaactgtgttcgagtctccggcgaaaggaaaggatgaacctcccgcccagttgtggtttggtaaagaaaagccccctgtgaaaacaagggaaggggagggaaaaaccctaagggaacccgaagccaacgcaggagaattcagacggtccggggtnggcgccncgcggcggtcgcaggcaaggaccgacacggggcgggcggcgacgcgcggcccagaaggaaggcagcggcgcgtgggggagaagacgacaggggaaaaaggcgggcccgnaccgggcggggggnaggtcgggtggcgcgagaaaatggagagaaggggagggcccagccgaaaagaggcgaccccgagaaacgaaatgttgacgaaagtaagtacttcataaaatttttcgg

SEQ ID NO: 22777 - DNA, 3030 bp, Macaca Mulatta
  misc_feature (1)...(3030): n = A,T,C or G
attcaggcaacaggtacctgggcaagtatattctgctcatcaaatggtcattggctatgtactttgttcagggaagtacattatctataatcacaaaaatgtctcacgggaaagccctgccagattcagacacatatatccaaattcataaccagcaaggcccccatacaccatctattccataagccactcaggttagatatgcatgctttcctatttctatctctacacataaacttttattggaagtactcataattggacattccagcaacctgctacagtccccacccctgtatgtcttgatacagacacaccaagtttatgtgcctctgacgcctcacctgtgccaagatatttaaagcgtcatggttcaaaattcattgaaagctcttttcttgtaactcatgacaaggtccgtcctcattgccactgagaggtgtttaatgtggtccaagacctctctttgaaacatgaccccccaaaaccactcagcaaagtgcctttctccacaaacagctcttggtagtaactgctagaaagctatggaagcccactcatttatgtcagtggactgcaactgggtacctgtgcaatntttacagatggagagggtaaggagatgctacatgtgagctaggtatctcctatataaccaaagtttccagcagggaaggaactagacaatcatcaggacagtctcacagaaggcaacactggaagtgatgtcataaggttgtaatgcgtgcatggtatggcacaggcgggatgcagaggtaatggagtttaaatgaaagtaggattaagctataaagaggtttatttatgtttatcttgaagctcaggcaagtgccttgcacacagtaggtacttataactgtctgtggttactgttggatatgtgatgttgttaagggtaagcttgtaatacctcaccaattctccccaagtgatcttctcttctaagtgagcccactaattgctgcaatggatgaaattgggtgtttaatgctgcaggtgggtacatgtaggtgacacgtgtgccctgaggtatgtgaggacatgtatattagatccacagtgagctgaggagggctttccccaccagagagaggttgggaggcagagttaatccacttataggatgaactggttggtattttgattgtattgtgactgtattgcaaagatggacagttcactccttgagagcaagttgtgctctagaagtttatttgcaaagatgctgggaagctctcttgaagtattttcccaaggaannnnnnnnnnnnnnnnnnnnnnnnnnnnnnnnnnnnnnnnnnnnnnnnnnnnnnnnnnnnnnnnnnnnnnnnnnnnnnnnnnnnnnnnnnnnnnnnnnnnnnnnnnnnnnnnnnnnnnnnnnnnnnnnnnnnnnnnnnnnnnnnnnnnnnnnnnnnnnnnnnnnnnnnnnnnnnnnnnnnnnnnnnnnnnnnnnnnnnnnnnnnnnnnnnnnnnnnnnnnnnnnnnnnnnnnnnnnnnnnnnnnnnnnnnnnnnnnnnnnnnnnnnnnnnnnnnnnnnnnnnnnnnnnnnnnnnnnnnnnnnnnnnnnnnnnnnnnnnnnnnnnnnnnatcaaccccttgaccagagaaagaagcactctggttctctatccccttgtcatatagagagtttttcacggagcctctggctgtgcccttcccataatagaatgacttgccatctgcctgcaccaaacccagggatgtgggagatgtctccccacatctcccactgctcaccaggacaagctgcccttcctgtctccacctctcagtccccctaaaatggatggctggggagacgtggaggctgacagctgagacgtggtgtcagatatgatctaggagggcggatcaccgggatccgggaccatacaagtaacatggtttccatggcaactgcttgctcctttgaattaagacagcagtcagttgtcattgccataacaaggcctctatctccaggcacagtgtccgtgctgtcttctaatccaatggacttgctgtcacgccaggcatgaaacacccaggacctcacttctcagtcacttccacagcctatgactcagaagagccaaacccagaatgaggcctctcttttcctcaccacagcctcccctgacaacatttcgtggtggagctagaggagtcccagcgcaggattggccttaaaagttttgttaaataaacaggtgcatgaaaggagcctaaggcctttcgttggtgtctgctctcttctttccacttccttctcatctttttctccgtgttttatgcttctctgattccctcttctgcctgcaccaggccagccccagccctttattcctctccatttttactctttccagcctctgtccctgaactgctactggcaacccaggggacctcagaaccagagactgcttgactcatctggggaagttaagttcacggggggacaaaaaaaggattcctaaagaagaggcttcctagaccagcacaggctcgagaaagagatcccctaggcctggacttctnnnnnnnnnnnnnnnnntccggccggcagccagaggcggcctttccccattgctcncctttccccattgctcgatggattccatgtttttatttctccggggggagcagggagggagaaaggtagaaaaatggcagtcacctttccaagaaaaatataaatggtccaagctgtatagtatttgtcagtannnnnnnnnnnnnnnnnnnnnnnnnnnnnnnnnnnnnnnnnnnnnnnnnnnnnnnnnnnnnnnnnnnnnntcttgatggagtcagacggttactttcccaacattaggtattacccccactcagacatcactcagcaatgatcgatgcagggactctttctgtgacataaatgtcccagccctccccggtcactgccctcaccatggtagagtcataggtctgaggaccaggaatgtggctggctcacccttgcttgcaaacagatggccttggagaccagac

SEQ ID NO: 22778 - DNA, 817 bp, Macaca Mulatta
  misc_feature (1)...(817): n = A,T,C or G
ctacctgtccccgggggccaccccaggggggacctttcccgggcccccggaaaagggaaaggggggaggtttcgcttnnnnnnnnnnnnnnnnnnnnnggtatttttttggcattatcacggtccccgggggcacccagttggccggccccttgggccacaggggccgggaaggaaacaggggctaagttctagcaagggggagggagagttccgccaggtggggatgggggcagcctcacagggccccgtgttgggcctggtatcgagacagcacggcgcggtagtgggacagctcctggcgcacagccaccatttcctgcggcagcagggcgttctctttctccaggaaggccgcccgcaccgatatctggttctccttgagccgccgggcgtcccgggaccgcttggctgcctcgttgttcttgtaccggcggctccaatatttctcgtccttctgctcctctggcacctggattttcctcgccttcttcatgattggctggggcttaagttcctcctctgagaagcggtgtcttcgagggtcaaaggtctcatggccaggaatgcttgatagggcaagatcagctgggtcgggttcaaaggtcatcagcacctccacggtgtctgggtccacagggctgggtgtgtcccgagaggtcaggccgaatccaccacctaagcttagaccccagattgtccagagaaaaataatctactgcactgaaaagctctcaagttacagtctaagagctactcgctgagaagagtaagggaagagaagaggagaagctgctctaagattccagaagattccc

SEQ ID NO: 22779 - DNA, 91 bp, Macaca Mulatta
ggtctttcctttcggagaccaaatgtgatcaccttattggagaaagggaaagcgccctggatggtagagccagtaagaagacgccgggctc

SEQ ID NO: 22780 - DNA, 100 bp, Macaca Mulatta
acaggtcctccagactgttggttcaatgcttacaaaatcaagacataaaacatctagaataaatttagtcagtaccctctagttacattttagattttta

SEQ ID NO: 22781 - DNA, 586 bp, Macaca Mulatta
  misc_feature (1)...(586): n = A,T,C or G
tcgatgctccacgtaggagctggctcggctgccggctgcggtcagggccaccgtataaagagggcggcagacccgagcgcccaggactnnnnnnnnnnnnnnnnnnnnnnnnnnnnnnnnnnnnnnnnnnnnnnnnnnnnnnnnnnnnnnnnnnnnnnnnaatgctcttgctcagcctcggcctcctggctggtctgctgccggcgctggccgcctgcccccagaactgccactgccacggcgacctgcagcacgtcatttgcgacaaggtggggctgcagaagatccccaaggtatcagagaagacaaagctgctcaacctacagcgcaacaacttcccggtgctggctgccaactcgtttcgggccatgccgaacctcgtgtcgctgcacctgcagcactgccagattcgcgaggtggccgccggtgccttccgcggcctcaagcagcttatctacttgtacctgtcccataacgacatccgcgtgctgcgcgcaggtgccttcgacgacctgaccgagctgacctacctctacctggaccacaacaaggtcaccgagctgccccgggggtgctctccccgctg

SEQ ID NO: 22782 - DNA, 370 bp, Macaca Mulatta
gcatattctttctataatgtgtacattgaccgggtggcacaggcgggcctcttagggcctgggtgggccagggtgggcctgagtggtcctcctcaacctttcagacgacaaggacaagatgagcagcaaacaccagctcctcagcttcgtgtccctgctggagaccaacaagccatacctggtgaactgcgtccgcatccctgccctccaggtgggcctctgccccaccctgcccccatgcccagatatgagagctgcgttgcccagggtggtgggtaggggcaccgcgtgggcttggaggggccgcctggcacctgggctggctgcaggcgtccgccttgggccgttgctgtggccgctttttctctca

SEQ ID NO: 22783 - DNA, 133 bp, Macaca Mulatta
gctcgcaggaggccgggaacatggcggggcagcccgcggcctcaggctcccagtctcccgacagggacggaatggagcccaacgtcgtggctcggatctcgcagtgggcagacgaccacctgcgcatagtccg

SEQ ID NO: 22784 - DNA, 788 bp, Macaca Mulatta
gggatgggagtgaaggagtctgggtgacaggaagcaagcggcctgtcatgcctattgcctagctgccagattaaccttgccttgaaaataacgtgattgccccataggctattcagtataaggaagacaaaaattccttgggaacctactagtgggtttgccttccagatttggtagacgcaaaaagcaaagggggagcatgggcaaaggaagatttgatgaaaaagaaaatgtgtccaactgcatccagttgaaaacttctgttattaagggtattaagaatcaattgatagagcaatttccaggtattgaaccatggcttaatcaaatcatgcctaagaaagatcctgtcaaaatagtccgatgccatgaacatatagaaattcttacagtaaatggagaattactcttttttagacaaagagaagggcctttttatccaaccctaagattacttcacaaatatccttttatcctgccacaccagcaagttgataaaggagccatcaaatttgtactcagtggagcaaatatcatgtgtccaggcttaacttctcctggagctaagctttaccctgctgcagtagataccatttgttgctatcatggcagaaggaaaacagcatgctctatgtgttggagtcatgaagatgtctgcagaagacattgagaaagtcaacaaaaggaattggcattgaaaaatatccctttattttaattgatggggcttgtggccttatgaaagacattataaaatggagccctccagaaaaggaaatgccacctta

SEQ ID NO: 22785 - DNA, 137 bp, Macaca Mulatta
  misc_feature (1)...(137): n = A,T,C or G
ngcaggtcctggccaacgtggcctacatcgtcatcgagtcccgcgaggagggcgccagcgactacgtgctgtggaaggagattttgttcctggtggatctcatctgctgcggcgccatcctgttccccgtagtctgg

SEQ ID NO: 22786 - DNA, 233 bp, Macaca Mulatta
  misc_feature (1)...(233): n = A,T,C or G
ntacgtggagaccctggcacacttaagattatctcccttccaggaagcccagggccacctggcacacctggagaaccagggatgcagggagaacctgggccaccagggccacctggaaacctagnnnnncctaggaccctgtgggccaagaggtaagccaggcaaggatggaaaaccaggaactcctggaccagctggagaaaaaggcaacaaaggttctaaaggagagccag

SEQ ID NO: 22787 - DNA, 792 bp, Macaca Mulatta
  misc_feature (1)...(792): n = A,T,C or G
gggcctgtggatgctgcgcctctctgagcgcaacatgaaggtgctccttgccgccgccctcatcgcggggtccgtcttcttcctgctgctgccgggaccttgggcggccgatgagaagaagaaggggcccaaagtcaccgtcaaggtgtatttggacctgcgaattggagatgaagatgtaggcggggtgatctttggtctcttcggaaagactgttccaaaaacagtggataattttgtggccttagctacaggagagaaaggatttggctacaaaaacagcaaattccatcgtgtaatcaaggacttcatgatccggggcggagacttcaccaggggagatggcacaggaggaaagagcatctatggtgagcgcttcgccgatgagaactgcaagctgaagcactacgggcccggctgggtgagcatggccaacgcaggcaaagacaccaacggctcccagttcttcatcacaacagtcaagacggccttggctagattgcaagcatgtggtgtttggcaaagtgctaaagggcatggaaggtggttgcgaaaagtggaaaaacaaccatgaaaaaaatcccggggataaaaccccctgaagggaatgtgatccttccccaaaaccggcggcaaggaattgaannnnnnnnnnnnnnnnnntttgtccaacccccccaagggaaaataaggacccccaggggggacccttcttttttcctttttgagggtgaacaccttatctggtgtgcacagggggcccctctggagaaaatccctgggcacaaaaat

SEQ ID NO: 22788 - DNA, 303 bp, Macaca Mulatta
tttatatgtgaaatcttgcccagtcacagaggtagaattgagcactcacagatgctccagtaagaatcgcagcgctgggaatctagatgctccaatatgaggcagctgcgtgtgcagcttagcacttcctgttgagatcggaccctgctggaaccacggagaacgagcgtgaagatcataggattgagaacgtagggaagcacattagcttgcttgaagtgctgattccatttcggccaagcgagggaaagaggaattggagtcattttgcgtttgaggggggaggaaaaattgatacccagg

SEQ ID NO: 22789 - DNA, 753 bp, Macaca Mulatta
ggatgatttagcaggctgcatcaaaacattgcgctactgtgcaggttgggctgacaagatccagggccgtacaataccaattgatggaaacttttttacatatacaagacatgaacctattggtgtatgtggccaaatcattccttggaatttcccgttggttatgctcatttggaagatagggcctgcactgagctgtggaaacacagtggttgtcaaaccagcagagcaaactcctctcactgctctccacgtggcatctttaataaaagaggcagggtttcctcctggagtagtgaatattgttcctggttatgggcctacagcaggggcagccatttcttcccacatggatatagacaaagtagccttcacaggatcgacagaggtcggcaagttgatcaaagaagctgccgggaaaagcaatctgaagaaggtgaccctggagctgggaggaaagacccttgcattgtgttagctgatgctgacttggacaatgctgttggatttgcacaccaatggggtggttctaccaccaagggccagtgttggataacccgcctcccagaattttttgtgggaagaattcaattttatgaaccaatttggttccaaagggaagggtttaaaccggggccttaaaaaagtatatcccccttgggaaaatccctctgggaaccccccaggaaaatccacccccaaaggggcgcctttaagaatatggaccaaagggggacacactttatggttaac

SEQ ID NO: 22790 - DNA, 324 bp, Macaca Mulatta
atcaacaatgtatagcatattaagacatatgtactaaatgcattactctaaatacttcaaaatgtatggatttttataacaggttacaggaatacttaaagatgctggagtaaacaatttaacaattcaagtggaaaaggaggcatactttcaacatatgtctggcctaagtactggatttcatgatgttcttgctatgacaaaacaaatggagtccatgaaatactgcaaagatggtacttacatcatgtgagataactcaagaattacctctggagtctgaacaatgaagattaaatgactcagtatttgtgacattgccag

SEQ ID NO: 22791 - DNA, 420 bp, Macaca Mulatta
atgacatggtgcagaagcttataacattgatcacattcttactgtaaatggtgtctttcttctgggggttttcagttattgcaaagaaatgaagagattctggaaatgcatcaataatctaagaaaaagcgacataaaaatatacttatggcttgtgtttatgctctttatcattgtgcgttgtgtggggttacttgcttgagtgatcctgaacttctagcaacagagggactcactggactctgttatgatttgtctgtttaagagagaaaacagaaagtggacttggtttttattaagactgttcgtttttaagtgtcgatagtgaatgaaaagatgtgaagtaatgatatttttctgcttataacttacccccactcattggagtgaacagtgaagcaagctcaatagacttcataa

SEQ ID NO: 22792 - DNA, 122 bp, Macaca Mulatta
tggtgaagaacattcagctggaggatggcaaaatgatcctggcctcgaacttctttaaaggggcagccagcagtgcccttgaactgacagaggcggagctggttactgcagaggctgtgcgg

SEQ ID NO: 22793 - DNA, 689 bp, Macaca Mulatta
ctcccagccccatgtacagagctcaccaagcccctgcccgtgtacagcccccagaccccctgcaatatcacttttttgtgaataaatttattaagaaaaaatgatgtgcttatttgtatttttgcttagggagtgacagaaaactgggcctaattggagtcttcctgggacccaagttccctctctaataggtgggggcgctctcagatccaagggggaaggtttcggagatggtgctggacccggacctgtgccccccagcagtgtacattaagcactgggaggaaaaagagggaaggcatacttgaggctgcgtgcaggctctggggcgtctggtttggtcggcgatgggggatgccgctgttgacaaacactgggtacgttgccgggtggccctagctcccgtaggcccggtctgttgctaacatcaaggagctgtttatggagccacctcccagtggactggcttccagtgtccctatctattctccctacgaccaaagctcctggggccttccctctagggttgtcaccctagctggacctgggaaacttgtgctggggaacgctaactccagcattaagcgctcgtcgcctcggtcctgaggagggcagtgccgggtagggccgctcactcccagctcggagctgacgcggttaacctcaagctcttacagctgccgtcgctc

SEQ ID NO: 22794 - DNA, 745 bp, Macaca Mulatta
  misc_feature (1)...(745): n = A,T,C or G
tattggcaagcaggaactttaacataactgttctggccgaagaattaatatttcgatatttgccggatgaattgtctgataggaagagaatttatgatgaagaaatgtcagaactgtcaaannnnnnnnnnnnnnnnnnnnnnnnnnnnnnnnnnnnnnnnnnnnnnnnnnnnnnnnnnnnnnnnnnnnnnnnnnnnnnnnnnnnnnnnnnnnnnnnnnnnnnnnnnnnnnnnnnnnnnnnnnnnnnnnnnnnnnnnnnnnnnnnnnnnnnnnnnnnnnnnnnnnnnnnnnnnnnnnnnnnnnnnnnnnnnnnnnnnnnnnnnnnnnnnnnnnnnnnnnnnnnnnnnnnnnnnnnnnnnnnnnnnnnnnnnnnnnnnnnnnnnnnnnnnnnnnnnnnnnnnnnnnnnnnnnnnnnnnnnnnnnnnnnnnnnnnnnnnnnnnnnnnnnnnnnnnnnnnnnnnnnnnnnnnnnnnnnnnnnnnnnnnnnnnnnnnnnnnnnnnnnnnnnnnnnnnnnnnnnnnnnnnnnnnnnnnnnnnnnnnnnnnnnnnnnnnnnnnnnnnnnnnnnnnnnnnnnnnnnnnnnnnnnnnncagagtaatcccagcggccctgcctggtcctggtggatcctggctgtgctgcccctggagcgcaaggctcagctggccatcctcggcatgacctcactcaaagagcggctccttgccatccgacggatattagtcatcatcacgcgtaagatgaa

SEQ ID NO: 22795 - DNA, 753 bp, Macaca Mulatta
  misc_feature (1)...(753): n = A,T,C or G
ctgattcccgggactaggttgcgggagaaagcctgttgcgtggaagataaggcagcgcgggaactggaaatagggtgggctggaggtgnnnnnnnnnnnnnnnnnnnnnnnnnnnnnnnnnnnnnnnnnnnnnnnnnnnnnnnnnnnnnnnnnnnnnnnnnnnnnnnnnnnnnnnnnnnnnnnnnnnnnnnnnnnnnnnnnnnnnnnnnnnnnnnnnnnnnnnnnnnnnnnnnnnnnnnnnnnnnnnnnnnnnnnnnnnnnnnnnnnnnnnnnnnnnnnnnnnnnnnnnnnnnnnnnnnnnnnnnnnnnnnnnnnnnnnnnnnnnnnnnnnnnnnnnnnnnnnnnnnnnnnnnnnnnnnnnnnnnnnnnnnnnnnnnnnnnnnnnnnnnnnnnnnnnnnnnnnnnnnnnnnnnnnnnnnnnnnnnnnnnnnnnnnnnnnnnnnnnnnnnnnnnnnnnnnnnnnnnnnnnnnnnnnnnnnnnnnnnnnnnnnnnnnnnnnnnnnnnnnnnnnnnnnnnnnnnnnnnnnnnnnnnnnnnnnnnnnnnnnnnnnnnnnnnnnnnnnnnnnnnnnnnnnnnnnnnnnnnnnnnnnnnnnnnnnnnnnnnnnnnnnnnnnnnnnnnnnnnnnnnnnnnnnnnnnnggagtcacccacttgcaatctgttccctgcatccaaaagcccagcatcttctcttacccgatcgactaaaacagtccgggggagagccgggcccagtgggagagcagcagcca

SEQ ID NO: 22796 - DNA, 499 bp, Macaca Mulatta
  misc_feature (1)...(499): n = A,T,C or G
gacaaagatttatttttttatgttataattttgataagaaacagattctcactctgtcatccaggctggagtatagtggcgtgatcatggctcagtgcagtctcaagctcctggaaccaagagagactttcacttcagcctccagagtaactgagactacaggcatgcaccatcattccaagctaatttttaacactttttgtaaagacatagtcttgctatgttgaccaggatggacttgaactcctggccacaagtaatcatcccannnnnnnnnnnnnnnnnnttgaaattacactatgcctggctaatgtcctaaattctagtttcttatatgcaaagattagggtagaaaactagtacaaacacgaatcaaaaaccagaaatatggcagggatttctgcagaaacaacgagaaaccaaggcagaactgatcaggaggcttactcctattacctagagtatacataatagtaattcctactaaaggtgagctccc

SEQ ID NO: 22797 - DNA, 491 bp, Macaca Mulatta
taaaaaatgcaaagtttaatgtcttagagcaataaagactgttttagttcatacattaaaaaatgcgaacctttttggataagaattgtttttgtcactggtttactattactggaagcttggttatttacagtaaccagttacagtcttatcagttaggttaaccctagccaagtaacaggtaaagccccaaatctcagtggctcgctgaagacacatgatttctgaggtgtccaacccatgtcagccgtggggtgaggcagggtgagggtcggccacgtgtgaccctggctcccttttgtcttgtgacacagtctcctttgccccagagtccccagtgaatcctcccactgctggtggaggggcaggaggacattgttccaggccacgcttggaagtggcgctcatcactccagccacaggtaactacaaggggcaaggaaagggcagggtgtgggcctaaggggaggaaaccaagtgggtgtacacat

SEQ ID NO: 22798 - DNA, 2565 bp, Macaca Mulatta
  misc_feature (1)...(2565): n = A,T,C or G
agcttctcgctgaattccgagggggctgagaggatggccaccaccgggaccccaacagccgaccgaggcgacgcagccgccacggatgacccggccgcccgcttccaggtgcagaagcactcttgggacgggctccggagcatcatccacggcagccgcaagtactcaggcctcattgttaacaaggcgccccacgacttccagtttgtgcagaagacggatgagtctgggccccactcccaccgcctctactacctggnnnnnnnnnnnnnnnnnnnnnnnnnnnnnnnnnnnnnnnnnnnnnnnnnnnnnnnnnnnnnnnnnnnnnnnnnnnnnnnnnnnnnnnnnnnnnnnnnnnnnnnnnnnnnnnnnnnnnnnnnnnnnnnnnnnnnnnnnnnnnnnnnnnnnnnnnnnnnnnnnnnnnnnnnnnnnnnnnnnnnnnnnnnnnnnnnnnnnnnnnnnnnnnnnnnnnnnnnnnnnnnnnnnnnnnnnnnnnnnnnnnnnnnnnnnnnnnnnnnnnnnnnnnnnnnnnnnnnnnnnnnnnnnnnnnnnnnnnnnnnnnnnnnnnnnnnnnnnnnnnnnnnnnnnnnnnnnnnnnnnnnnnnnnnnnnnnnnnnnnnnnnnnnnnnnnnnnnnnnnnnnnnnnnnnnnnnnnnnnnnnnnnnnnnnnnnnnnnnnnnnnnnnnnnnnnnnnnnnnnnnnnnnnnnnnnnnnnnnnnnnnnnnnnnnnnnnnnnnnnnnnnnnnnnnnnnnnnnnnnnnnnnnnnnnnnnnnnnnnnnnnnnnnnnnnnnnnnnnnnnnnnnnnnnnnnnnnnnnnnnnnnnnnnnnnnnnnnnnnnnnnnnnnnnnnnnnnnnnnnnnnnnnnnnnnnnnnnnnnnnnnnnnnnnnnnnnnnnnnnnnnnnnnnnnnnnnnnnnnnnnnnnnnnnnnnnnnnnnnnnnnnnnnnnnnnnnnnnnnnnnnnnnnnnnnnnnnnnnnnnnnnnnnnnnnnnnnnnnnnnnnnnnnnnnnnnnnnnnnnnnnnnnnnnnnnnnnnnnnnnnnnnnnnnnnnnnnnnnnnnnnnnnnnnnnnnnnnnnnnnnnnnnnnnnnnnnnnnnnnnnnnnnnnnnnnnnnnnnnnnngcctgggccatgttcctggaccgtccccagcagtggctccagctcgtcctcctccccccggccctgttcatcccaagcacagagaatgaggagcagcggctagcctctgccagagccgtccccaggaatgtccagccgtatgtggtgtacgaggaggtcaccaacgtctggatcaatgtnnnnnnnnnnnnnnnnnnnnnnnnnnnnnnnnnnnnnnnnnnnnnnnnnnnnnnnnnnnnnnnnnnnnnnnnnnnnnnnnnnnnnnnnnnnnnnnnnnnnnnnnnnnnnnnnnnnnnnnnnnnnnnnnnnnnnnnnnnnnnnnnnnnnnnnnnnnnnnnnnnnnnnnnnnnnnnnnnnnnnnnnnnnnnnnnnnnnnnnnnnnnnnnnnnnnnnnnnnnnnnnnnnnnnnnnnnnnnnnnnnnnnnnnnnnnnnnnnnnnnnnnnnnnnnnnnnnnnnnnnnnnnnnnnnnnnnnnnnnnnnnnnnnnnnnnnnnnnnnnnnnnnnnnnnnnnnnnnnnnnnnnnnnnnnnnnnnnnnnnnnnnnnnnnnnnnnnnnnnnnnnnnnnnnnnnnnnnnnnnnnnnnnnnnnnnnnnnnnnnnnnnnnnnnnnnnnnnnnnnnnnnnnnnnnnnnnnnnnnnnnnnnnnnnnnnnagatcttccacttccacacgcgctcagacgtgcggctctacggcatgatctacaagccccacgccttgcagccagggaagaagcaccccaccgtcctctttgtgtatggaggcccccaggtnnnnnnnnnnnnnnnnnnnnnnnnnnnnnnnnnnnnnnnnnnnnnnnnnnnnnnnnnnnnnnnnnnnnnnnnnnnnnnnnnnnnnnnnnnnnnnnnnnnnnnnnnnnnnnnnnnnnnnnnnnnnnnnnnnnnnnnnnnnnnnnnnnnnnnnnnnnnnnnnnnnnnnnnnnnnnnnnnnnnnnnnnnnnnnnnnnnnnnnnnnnnnnnnnnnnnnnnnnnnnnnnnnnnnnnnnnnnnnnnnnnnnnnnnnnnnnnnnnnnnnnnnnnnnnnnnnnnnnnnnnnnnnnnnnnnnnnnnnnnnnnnnnnnnnnnnnnnnnnnnnnnnnnnnnnnnnnnnnnnnnnnnnnnnnnnnnnnnnnnnnnnnnnnnnnnnnnnnnnnnnnnnnnnnnnnnnnnnnnnnnnnnnnnnnnnnnnnnnnnnnnnnnnnnnnnnnnnnnnnnnnnnnnnnnnnnnnnnnnnnnnnnnnnnnnnnnnnnnnnnnnnnnnnnnnnnnnnnnnnnnnnnnnnnnnnnnnnnnnnnnnnnnnnnnnnnnnnnnnnnnnnnnnnnnnnnnngccctgcctcctgtcttcccacagatctaccccaacgagagacacagtattcgctgccccgagtcgggcgagcactatgaagtcacgttgctgcactttctacaggaatacctctg

SEQ ID NO: 22799 - DNA, 252 bp, Macaca Mulatta
tgtttcatgctctgccttttggcttctaaaaggaaagatgcggatttctagtgcattaagcctgagccatattctcacgtgtaagtgaagtcattaaagaactttacatatgtgagatagaaacaatggttccttagttttgcactaggaagaaaatattttgtaaaataatgtttatttgaaataatgataactatcaattgttcacaatgtggtagaaattaaaataccatctcagctttaacttttaaa

SEQ ID NO: 22800 - DNA, 171 bp, Macaca Mulatta
  misc_feature (1)...(171): n = A,T,C or G
nttcaggagtgtgttccagaagacctagaactgaagaagaagatttttgctcagttagattccatcgtggatgatcgagtgatcttaagcagttccacttcttgtctcatgccttccaagctgtttgctggcttggtccatgtaaagcaaggcatcgtggctcatcctgtg

SEQ ID NO: 22801 - DNA, 1723 bp, Macaca Mulatta
  misc_feature (1)...(1723): n = A,T,C or G
tcttgccacgcgcatgtcctgacaccgccccgcagaaacgcttcggttacccacagtcttttgccagatgagactggtgcccatggtactggctcctcatctcactcgggcttatgccaaagatgtaaaatttggtgcagatgcccaagccttaatgcttcaaggtgtagaccttttagccgatgctgtggccgttacaatggggccaaagggaagaacagtgattactgagcagagctggggaagttccaaagtaacaaaagatggtgtgactgttgcaaagccaattgacttaaaggataaatataaaaacactggaggtaaacttgttcaagaggttgccaataacacaaatgaagaggctggggatggcactaccactgctactgtactggcatgctctatggccaaggaaggctttgagaagattagcaaaggtgctactccagtggaaatcacgagaggtgtgatgttagttgttgatgctgtacttgctgaacttaaaagcagtctaaacctgtgaccacccctgaagaaactgcacaggttgctacgatttctgcaaannnnnnnnnnnnnnnnnnnnnnnnnnnnnnnnnnnnnnnnnnnnnnnnnnnnnnnnnnnnnnnnnnnnnnnnnnnnnnnnnnnnnnnnnnnnnnnnnnnnnnnnnnnnnnnnnnnnnnnnnnnnnnnnnnnnnnnnnnnnnnnnnnnnnnnnnnnnnnnnnnnnnnnnnnnnnnnnnnnnnnnnnnnnnnnnnnnnnnnnnnnnnnnnnnnnnnnnnnnnnnnnnnnnnnnnnnnnnnnnnnnnnnnnnnnnnnnnnnnnnnnnnnnnnnnnnnnnnnnnnnnnnnnnnnnnnnnnnnnnnnnnnnnnnnnnnnnnnnnnnnnnnnnnnnnnnnnnnnnnnnnnnnnnnnnnnnnnnnnnnnnnnnnnnnnnnnnnnnnnnnnttggtgactatagaaagaaccagcttaaagatatggctactgctactggtggtgcagtgtttggacaagaggggttgaccctaactcttgaagacgttcaacctcatgacttaggaaaaggtggagaggtcattgtgaccaaagacggtgccatgctcttaaaaggaaaaggtgacaaggctcaaattgaaaaatgtattcaagaaatcattgagcagttagatgtcacaactagtgaatatgaaaaggaaaaactgaatgaacggctggcaaaactttcagatggagtagctgtgctgaaggttggtgggacaagtgatgttgaagtgaatgaaaagaaagacagagttacagatgcccttaatgctacaaaagctgctgttgaagaaggcattgttttgggaggcggttgtgccctgcttcgatgcattccagccttggactcattgactccagctaatgaagatcaaaaaattggtatagaaattgttaaaagaacactcaaaattcccacaatgaccactgctaagaatgcaggtgttgaaggatctttgatagttgagaaaattatgcaaagttcctcagaagttggttatgatgctatgattggagattttgtgaatatggtggaaaaaggaattattgacccaacaaaggttgtgaaaactgctttatcggatgctgctggtatggcctctctgttagctacagcagaagttgtagtcatagaaattcctaaagagaaggaccctggagtggatgcaatgggtagaa

SEQ ID NO: 22802 - DNA, 1540 bp, Macaca Mulatta
  misc_feature (1)...(1540): n = A,T,C or G
tatttaattgaaaatttatttcagaagcagagaaacttaagctaaaggctgttatacaaaattgaaagacttcatatattgaacctcccaacatttttcttatggctgttgaaaagtatagagctaaattgatttaattatactttccttggtactttaaaaagtatgctagcattattgtaccttgaaaggatttccaccagactttcttgagaagtgacttctttggtgaggcaagaaggaaatacattattttagaatcatttactatttaaatgagacaatcttattattttagaatcatttatttaaatgagacaatcattttaagttttaagacagaagtgaccaatgtaatttcaaaacacctaaggattttttggttgatcaggttactgtagatttttactgattgtcctggataaatagactgtgctttttctttttctctcccttcctttcttcttggtttcccatagtataataagcatgcatactttaacttctatagttttcttgtttagagggtcttcagttttagagaattatttctcccttgcctttgactcattggactagttcagaggctttaagtagtttaaaatgggcttttgcttttctaggtcattaacggtttttatttagtttctttagccaatagtggctgagtttcgcacttgattttcaatattttatagtaagaaatgacagattgcttgggttcatttcataaactgaaactctgcatttagataactgttaaaggttattaagatgaagatttactgtttctttgttactcggtacagctgtttgttttacttgcacatttgtacatatacctaatgttttcaagtgccttaattgtttaaaatctctggcttcaaaggtttcttggggaaaggtaggtttacctcacattttttgtttccattagtaatattctaggtacctcacaaaatgtattatggtgccatggctgttagtttttagtaagtgctgtaggattaatttgaaaataggcagaattccattcctccaaggtggcaaaaattagctacaatgatgtaattgtcctttacctgggtatgaattccctgacacacattaatgtcaacatatgtagcaaattttgtgaaaatgtaacaatttgaaggttctgtaattttgagcactgctctaacaacaacaagcataatataaaattagttagattttgcaggtctacagatgagctcttgcaacagaactcacagcctttttactttttcccctaactttagcaatgtagtatcttgagccattcataannnnnnnnnnnnnnnnnnnnnnnnnccagaaggtaatagaaaccttttcagatttttcatctgatttgttcttgcagatgttcttctatcagataccttattttaccttacagatatttgttgcacaggcagatactgctgtatttagacatttctatttcagttcattaaaaactgcaaaaccaatctgtatcatgtaccaaactgacttaaaataaatctacatgttt

SEQ ID NO: 22803 - DNA, 722 bp, Macaca Mulatta
gtctgcattttagtgtctttttatattctgacttaatttcctgatctgttagtttaactgtttgtttgtattttagtaaatgaagcatttggaagacgagagaggcttgttcttgggagtgcaagaaattcatctattagtggcccttttggcagcaggagctcagacacacccatggagtcttaatgaagatcatctaatttcctctttaccttaactggaaattttgaaaagttggcctaaaaatgttccatgtgtggcagcaaccatgcagagtgactgagacacaattcatttctgattgcctgacattcctttctgcaactgtggtggcaccacaaacagagccggtctttgtgcttgctcttcaaatggatggtttgtaaggctcttgttgcatttcttaaaaaagagtaataaaaaggatttttaaaaagtaattccttaaacataccgtaatctgtcacagttaatctaggtttgtaaacaaatagtaatttatagaatttttaaagcgtaaaatcctgtaatattaaggtaaacctaggcctggaaaggttgttatttggctaagattgcacaggaggccacagacagaggcaagtgccccacagactccactttccttcctaactgttctcaaattaatgctcgtgattgagaaatatgctcaatgcaacttgtagagtttggtaagtaaaagttacatgcccctttttcct

SEQ ID NO: 22804 - DNA, 220 bp, Macaca Mulatta
agataccccagatcagctacgcctccaccgcgccagacctgagcgacaacagccgctacgacttcttctcccgcgtggtgccctcggacacgtaccaggcccaggccatggtggacatcgtccgtgccctcaagtggaactacgtgtccacggtggcctcggagggcagctatggcgagagcggtgtggaggccttcatccagaagtcccgtgaggacgg

SEQ ID NO: 22805 - DNA, 3438 bp, Macaca Mulatta
  misc_feature (1)...(3438): n = A,T,C or G
cagagctggatccccaagatcttcaagaagaagacctgtacgacgttcatagttgactccacagatccggnnnnnnnnnnnnnnnnnnnnnnnnnnnnnnnnnnnnnnnnnnnnnnnnnnnnnnnnnnnnnnnnnnnnnnnnnnnnnnnnnnnnnnnnnnnnnnnnnnnnnnnnnnnnnnnnnnnnnnnnnnnnnnnnnnnnnnnnnnnnnnnnnnnnnnnnnnnnnnnnnnnnnnnnnnnnnnnnnnnnnnnnnnnnnnnnnnnnnnnnnnnnnnnnnnnnnnnnnnnnnnnnnnnnnnnnnnnnnnnnnnnnnnnnnnnnnnnnnnnnnnnnnnnnnnnnnnnnnnnnnnnnnnnnnnnnnnnnnnnnnnnnnnnnnnnnnnnnnnnnnnnnnnnnnnnnnnnnnnnnnnnnnnnnnnnnnnnnnnnnnnnnnnnnnnnnnnnnnnnnnnnnnnnnnnnnnnnnnnnnnnnnnnnnnnnnnnnnnnnnnnnnnnnnnnnnnnnnnnnnnnnnnnnnnnnnnnnnnnnnnnnnnnnnnnnnnnnnnnnnnnnnnnnnnnnnnnnnnnnnnnnnnnnnnnnnnnnnnnnnnnnnnnnnnnnnnnnnnnnnnnnnnnnnnnnnnnnnnnnnnnnnnnnnnnnnnnnnnnnnnnnnnnnnnnnnnnnnnnnnnnnnnnnnnnnnnnnnnnnnnnnnnnnnnnnnnnnnnnnnnnnnnnnnnnnnnnnnnnnnnnnnnnnnnnnnnnnnnnnnnnnnnnnnnnnnnnnnnnnnnnnnnnnnnnnnnnnnnnnnnnnnnnnnnnnnnnnnnnnnnnnnnnnnnnnnnnnnnnnnnnnnnnnnnnnnnnnnnnnnnnnnnnnnnnnnnnnnnnnnnnnnnnnnnnnnnnnnnnnnnnnnnnnnnnnnnnnnnnnnnnnnnnnnnnnnnnnnnnnnnnnnnnnnnnnnnnnnnnnnnnnnnnnnnnnnnnnnnnnnnnnnnnnnnnnnnnnnnnnnnnnnnnnnnnnnnnnnnnnnnnnnnnnnnnnnnnnnnnnnnnnnnnnnnnnnnnnnnnnnnnnnnnnnnnnnnnnnnnnnnnnnnnnnnnnnnnnnnnnnnnnnnnnnnnnnnnnnnnnnnnnnnnnnnnnnnnnnnnnnnnnnnnnnnnnnnnnnnnnnnnnnnnnnnnnnnnnnnnnnnnnnnnnnnnnnnnnnnnnnnnnnnnnnnnnnnnnnnnnnnnnnnnnnnnnnnnnnnnnnnnnnnnnnnnngtccttccatctggaagcctccctcatggacgccctgctgaatgaccgacctgagttcgtgggcttgctcatctcccacggcctcagcctgggccgctttctgaccccgatgcgcctggcccaactctacggcgcggcgcccccccactcgctcatccgcaaccttttggaccaggcgtcccacagcgcaggcaccaaagccctagcccagaaagggggagctgcggagccccggccccctgacgtggggcatgtgctgaggatgctgctggggaagatgtgcgcgccgagatacccctccgggggcgcctgggaccctcacccaggccagggcttcggggagagnnnnnnnnnnnnnnnnnnnnnnnnnnnnnnnnnnnnnnnnnnnnnnnnnnnnnnnnnnnnnnnnnnnnnnnnnnnnnnnnnnnnnnnnnnnnnnnnnnnnnnnnnnnnnnnnnnnnnnnnnnnnnnnnnnnnnnnnnnnnnnnnnnnnnnnnnnnnnnnnnnnnnnnnnnnnnnnnnnnnnnnnnnnnnnnnnnnnnnnnnnnnnnnnnnnnnnnnnnnnnnnnnnnnnnnnnnnnnnnnnnnnnnnnnnnnnnnnnnnnnnnnnnnnnnnnnnnnnnnnnnnnnnnnnnnnnnnnnnnnnnnnnnnnnnnnnnnnnnnnnnnnnnnnnnnnnnnnnnnnnnnnnnnnnnnnnnnnnnnnnnnnnnnnnnnnnnnnnnnnnnnnnnnnnnnnnnnnnnnnnnnnnnnnnnnnnnnnnnnnnnnnnnnnnnnnnnnnnnnnnnnnnnnnnnnnnnnnnnnnnnnnnnnnnnnnnnnnnnnnnnnnnnnnnnnnnnnnnnnnnnnnnnnnnnnnnnnnnnnnnnnnnnnnnnnnnnnnnnnnnnnnnnnnnnnnnnnnnnnnnnnnnnnnnnnnnnnnnnnnnnnnnnnnnnnnnnnnnnnnnnnnnnnnnnnnnnnnnnnnnnnnnnnnnnnnnnnnnnnnnnnnnnnnnnnnnnnnnnnnnnnnnnnnnnnnnnnnnnnnnnnnnnnnnnnnnnnnnnnnnnnnnnnnnnnnnnnnnnnnnnnnnnnnnnnnnnnnnnnnnnnnnnnnnnnnnnnnnnnnnnnnnnnnnnnnnnnnnnnnnnnnnnnnnnnnnnnnnnnnnnnnnnnnnnnnnnnnnnnnnnnnnnnnnnnnnnnnnnnnnnnnnnnnnnnnnnnnnnnnnnnnnnnnnnnnnnnnnnnnnnnnnnnnnnnnnnnnnnnnnnnnnnnnnnnnnnnnnnnnnnnnnnnnnnnnnnnnnnnnnnnnnnnnnnnnnnnnnnnnnnnnnnnnnnnnnnnnnnnnnnnnnnnnnnnnnnnnnnnnnnnnnnnnnnnnnnnnnnnnnnnnnnnnnnnnnnnnnnnnnnnnnnnnnnnnnnnnnnnnnnnnnnnnnnnnnnnnnnnnnnnnnnnnnnnnnnnnnnnnnnnnnnnnnnnnnnnnnnnnnnnnnnnnnnnnnnnnnnnnnnnnnnnnnnnnnnnnnnnnnnnnnnnnnnnnnnnnnnnnnnnnnnnnnnnnnnnnnnnnnnnnnnnnnnnnnnnnnnnnnnnnnnnnnnnnnnnnnnnnnnnnnnnnnnnnnnnnnnnnnnnnnnnnnnnnnnnnnnnnnnnnnnnnnnnnnnnnnnnnnnnnnnnnnnnnnnnnnnnnnnnnnnnnnnnnnnnnnnnnnnnnnnnnnnnnnnnnnnnnnnnnnnnnnnnnnnnnnnnnnnnnnnnnnnnnnnnnnnnnnnnnnnnnnnnnnnnnnnnnnnnnnnnnnnnnnnnnnnnnnnnnnnnnnnnnnnnnnnnnnnnnnnnnnnnnnnnnnnnnnnnnnnnnnnnnnnnnnnnnnnnnnnnnnnnnnnnnnnnnnnnnacacgttcggcaaagtacagggcaacagcgatctctactggaaggcgcagcgctaccgcctcatccgggaattccactctcggcccacgctggccccgccctttatcgtcatctcccacttgcgcctcctgctaaggcaattgtgcaggcgcccccggagcccccagccgtcctccccgaccctcgagcatttccgnnnnnnctttctaaggaagccgagcggaagctgctaacgtgggaatcggtgcataaggagaacttcctgctggcacgcgctagggacaagcgggagagcgactccgagcgtctgaagcgcacgtcccagaag

SEQ ID NO: 22806 - DNA, 710 bp, Macaca Mulatta
gccaacctcatgaatactctgcagcatgataagttcgtgaggctgtacgctgtggtcaccagtggaggagcccatttacattatcaccgagtacatggccaagggcagtttgctggatttcctgaagagcgatgaaggtggcaaagtgctgcttccaaagctcattgacttttctgctcagattgcagagggaatggcgtacatcgagcggaagaactacattcaccgggacctgcgagcagctaatgtcctggtctctgagtcactcatgtgcaaaattgcagattttggccttgctagagtaattgaagataatgagtacacagcaagggaaggtgctaagttccctattaagtggacggctccagaagcaatcaactttggatgtttcactattaagtctgatgtgtggtcctttggaatcctcctatacgaaatcgtcacctatgggaaaattccctacccagggagaactaatgccgacgtgatgaccgccctgtcccagggctacaggatgccccgtgtggagaactgcccagatgagctctatgacattatgaaaatgtgctggaaagaaaaggcagaagagagaccaacatttgattacttacagagcgtcctggatgatttctacacagccacggaagggcagtaccagcagcagccttagagcacagagaaacccgtccgtctggcagggtggctgctca

SEQ ID NO: 22807 - DNA, 474 bp, Macaca Mulatta
  misc_feature (1)...(474): n = A,T,C or G
gtctgccctctctggtcaccctgcctagctagaagagctgtgaccccagccatgaggaccctcgtcatccttgctgccattctcctggtggccctgcaggcccaggctgagccactccaggcaagaactgacgaggctactgcagcccaggagcagattccaacagacaacccagaagtggttgtttcccttgcctgggatgaaagcttggctccaaaggattcagtcccaggcttaaggaaaaacatggcctgctattgcagaataccagcgtgcttagcaggagaacgtcgctatggaacctgcttctacctgggaagagtctgggcattctgctgctgagcttgnnnnnnnnnnnnnnnnnnnnnnnnnngagctcaaaatttgctttgaggggtatagggaattgctatcaactcctgtaccttctgctcaatttcctttcctcatccaaaataaatgccttgtaacaag

SEQ ID NO: 22808 - DNA, 374 bp, Macaca Mulatta
  misc_feature (1)...(374): n = A,T,C or G
gggaactgggattggttgtcactcttctgtaatgcctacttgtccctgcccagaattcccagctgcctgtgtcagcctgtgcccctgagatcagagtcctacagtggctgtcacacagccaccaggtcatctcctttcatccccaccgcaaggcgctggctgtgaccctgcttcctgcactgacccagagcctctgcctgtgcttgaccagctgcgtctactgaggccccaaggggtttctgtttctattctctcctcagactgctcaagacaagcacataaaaaccattacctgactttagagcttttttacataattaaacatgatcctgagttatcncnnnnnnnnnnnnnnnnnnnnnnnnnnnnatgtc

SEQ ID NO: 22809 - DNA, 657 bp, Macaca Mulatta
  misc_feature (1)...(657): n = A,T,C or G
tgcccctctgccatatccaaggcccccctcagacttaacgtctctgctcatcagcatcgtcccaggatcctggagagggagaacccccgaccccaggggaaagaagggggggtctcccctttcctgtgtctgcgccagccctgcccccattgcgtctgcacacccctgcgtgtaactgcattccaaccactaataaagtgcctattgtacaggnnnnnnnnnnnnnnnnnnnnnnnnnnnnnnnnnnnnnnnnnnnnnnnnnnnnnnnnnnnnnnnnnnnnnnnnnnnnnnnnnnnnnnnnnnnnnnnnnnnnnnnnnnnnnnnnnnnnnnnnnnnnnnnnnnnnnnnnnnnnnnnnnnnnnnnnnnnnnnnnnnnnnnnnnnnnnnnnnnnnnnnnnnnnnnnnnnnnnnnnnnnnnnnnnnnnnnnnnnnnnnnnnnnnnnnnnnnnnnnnnnnnnnnnnnnnnnnnnnnnnnnnnnnnnnnnnnnnnnnnnnnnnnnnnnnnnnnnnnnnnnnnnnnnnnnnnnnnnnnnnnnnnnnnnnnnnnnnnnnnnnnnnnnnnnnnnnnnnnnnnnnnnnnnnnnnnnnnnnnnnnnnnnnnnnnnnnnnnnnnnnnnnnnnnnnnnnnnnnnnnnnnnnnnnnnnnnnnnnnnnnnn

SEQ ID NO: 22810 - DNA, 822 bp, Macaca Mulatta
  misc_feature (1)...(822): n = A,T,C or G
ggcatcagtttgtgagaaattactgtgaccagagattggaatttttggtgtattgtgacccttagaatctagaatacagtgtagtactactcaggtgcagcccatgttacatgacatgtagctattgaagatgattttgacatatgtaaaattaagcatgttaatctaagaatctctctccacattcgtaggatgtaatccctgttcattactacttaatacctccaccaacaaagactaagaacggcagcaaagataaggaaaaagattcagaaaaagagaaagatttgaaagaagagtttactgaagccattacgagatcttaaaattcagtggatgacaaagctggattctagtgacatttataacgaattgaaagaaacatatcctaattatcttcctctgtacgttgctcgacttcatcaattggatgctgaaaaggaacgaatganaagacttaatganattgttgacgcggcaaatgctgttatttctcatatagatcaaacagccctagcagtttatattgcgatgaagactgatcccaggcctgatgcagctactataaaaaagtacctaaccatgactgggacaaaccaaaatccacccctcgtagatgcccttttgtagggaaaggtgtgcccctgggcaaaccatcttcttcccacccaaggctcaagatggagccatttccactggatgccgaaaggaaaagaaggagaagggggaaaagtcctttgggattctctgggcaaaaactgttttgggaaacttacctaatggaactgaatcttttttgaaaaaataggggtttttaacttt

SEQ ID NO: 22811 - DNA, 576 bp, Macaca Mulatta
ctgacttcatcatcgccaccctggcactctcaattatcattctgctgtgtattatcttgactgatagttttttaatagtattctctgtcaacgaacatgattcagggataataatgcaaattattgatgttttctggacctttacaaaccatctgagcatttggtttgccacttgtcttggtgtcctctactgcttgaaaatcgccattttctctcaccccacattcctctggctcaagtggagagtttctagggtgatggtatggatgctgttgggtgtactgctcttatcctgtggtagtaccgcatctctgatcaatgagtttaagctctattctgtccttaggggaattgaggccaccaggaatgtgactgaacacttcagaaagaagaggaatgagtattatctgatccatgttcttgggactctgtggtacctgcctcccttagttgtgtccctggcctcctactttttgctcatcttctccttggggaggcacacacggcagatgctgcaaaatagtacaagctccagagatccaagcactgaggcccacaagagggccatcagaatca

SEQ ID NO: 22812 - DNA, 765 bp, Macaca Mulatta
  misc_feature (1)...(765): n = A,T,C or G
aaacggaatggttctaggaaagctttctcgagggccgganggcgcccgacatgnnnnnnnnnnnnnnnnnnnnnnnnnnnnnnnnngcaaaacaccaaatctatatttacacttccacatataataacataactttaagctgaaatatatcataaataaaacaagtaatgtctactgtttgacaacttaagtatcaacaattaaaataaatcaaactggaatgaaataaatacataaacaaaatccaacgaattgtacctctattatatgtactgttgtcnnnnnnnnnnnnnnnnnnnataaaaccagtagtataccaatagttaatactgatggacacaaaaacatattttgaagtacaaagggctgtaggaaaataattggtattttcatacattcagaaatgtggttaaaaagagaaatctgaaagcccaaaaaattccagcataacacaaattgacttgttttcaaatagatttggtgattcttttttttaaatacaggtttaaattccagccctctattatcacatacccccttttaagatttatggttctagttcaagctctctgtaacactcattggattaggcaaagattgagtcaatcatcttgcaaatgtgttaatcttcaaaaataggctataaaagtgcaaaactatgaaaacaaaaatctagattatgtacatatggctcagcttgtgaacaggaaaaaaggtcaatagtgtacactttcctgatacaaagcacttcattgcaatgccacc

SEQ ID NO: 22813 - DNA, 79 bp, Macaca Mulatta
atgttccggaagctacacaactcctacacagacgtgatgtgcaaccccttctacaacccgggggaccgcatccagtcca

SEQ ID NO: 22814 - DNA, 192 bp, Macaca Mulatta
ggttgtcgatgagcatgagagtgtggagcagagtcggcgagcacaagccgagcccatcaacctggacagctgtctccgtgctttcaccagtgaggaagagctaggggaaaatgagatgtactactgttccaagtgtaagacccactgcttagcaacaaagaagctggatctctggaggcttccacccatcct

SEQ ID NO: 22815 - DNA, 820 bp, Macaca Mulatta
  misc_feature (1)...(820): n = A,T,C or G
ggaagattagatgatctttactgacctcttctcatagactttgtataaatgaagtgctggactttacctgaaagctgcaaaaattaatggtttagatatatttataataaactgatttaaactttttctataagaagaaaaattaagaccacttatttgaaaacaaagatgaagtctcaccttccaatttactttcttattagttttttccaaagtaagttattaaagctgtgattgacgtttttctcataatgaatcctctcaggacattgtgtagcctgtggtaagtacaaagggagaggaagacattttgaattttaagagctttattatcagtataaccctccctagttgaatgttgttttcttcttgttccattaagtcaaaatacaaatcagcacagatactcggtttccaatattttaaaatgtaatgttacttatgaaaagtattttgcttaaggttgtgtgtgtattgtgtatatacctcaagttcaagttaatggcattgatttatgttccagagaaaaataacacaaatattaataatatccttcgttataaccataatgagataagtattggcattggtgttcagtgccattttatactttctctctatgttctctgtattgtactaaccaaacctcccaaatcattgagctgctnnnnnnnnnnnnnnnnnnnnnnnggaaaagcatgacattgcgtattgattttttgttgttgaccaaaatcacaaacatggaaacacataatttcaccaaagtggggatagctatcagaattcttggcttantattactaaaggggcaggattg

SEQ ID NO: 22816 - DNA, 121 bp, Macaca Mulatta
cagcgcttcaagtcctccgtgtacagacggtacaatgacttcgtggtcttccaggagatgctcctgcacaagtttccctaccgtatggtgcctgccctgccacccaagagaatgctgggag

SEQ ID NO: 22817 - DNA, 496 bp, Macaca Mulatta
tggccgaatcactggaaatatctgtggtgagattgctgagtcaggtgatatgatatcataagctttcttggaaagggggaaagaaaatgaaactttttggtgtgaatattttttatgctgatgtgaattatttggttaggtagtgtgattgtagcactactactgtcaggttttaaattgtatgtgtacttgcatttaagactgtggtagagaagtaaagagaagtcaattccttcttcctcacctctcagcctccagatcccttcctgcccatcccttccctacaatgccgactccagacgcaaagatacatttttttcctttggactgtgaacatggaagcctcagcctgaatgtgagtggcaagtggcttatctggaaccacctgcccaagtcttactaaaatgcagctgttgttagacaactgtttaaaactccagaaatacatcacccaaggtggcacttctccgtatttggcagaacaattgcaattgca

SEQ ID NO: 22818 - DNA, 309 bp, Macaca Mulatta
  misc_feature (1)...(309): n = A,T,C or G
gccttggtcctacaaagattagctacctctgtcctgaaagatgaaaaaagtaatctgaaggaagtacttaatgctgtgaaagaactggagcttgcacatagnnnnnnnnnnnnnnnnnnnnnnnnnnnnnnnnnnnnnnnnnnnnnnnnnnnnnnnnnnnnnnnnnnnnnnaggcagtgttctgacttactgagccaggcccagtaccatgtggcccgggcacgcaaacaagatgaagaagagcgggagttgcgggccaagcaagagcaagaaaaggaactgttaaggcagaaacttcttaaagaacag

SEQ ID NO: 22819 - DNA, 219 bp, Macaca Mulatta
aggcgcagatagaacagaagacagtgcattagcagcggggcctcctgaggctgctggggagaactccgccccctgccctgtggcacctggcaagtccctgtaacgttgacgacagcgcatcctcccaggccaccaatccggccataggctcttctctgtccgcagggcttctgaggcccaatcggtgaatctttgctttcaacattgtgtaatttcttt

SEQ ID NO: 22820 - DNA, 1341 bp, Macaca Mulatta
  misc_feature (1)...(1341): n = A,T,C or G
gggatttcctaatcaagaagttggcgtgcagccgggcgagctggagtgagttggtcatgatgcagaagctactcaaatgcagtcggctcgtcctggctcttgccctcatcctggttctggaatcctcagttcaaggttatccagccaggtaccaatgggtgcgctgctatccagacagtaattctgcaaactgcattgaagaaaaaggaccaatgttcgacctacttccaagtgaatccaataagatcacccggctgaggactgacctttttccaaagacgagaatccaggacttgaagcgtatcttccccctttctgaagactattctgagatcaggttcctggctccgagttctggatttaggaatttgggcaatgggcttacttttcctgaaatagggaacaaggaattaaccaactctcgtagaattggaaaagtgaatagcgttttccacatgaaaaagacctataaagggatcctcctttggaaccaagaggaaaattctctagtcacccaatcataaaaaatagaacgacagatagataactattgaagtatattcacaacacaaatgtggtataatttaaggaacaaagtaatgtggaatatcttttgtgtgtgctgcgaaccaaaatcacaactctcacgggaagctagagcatgacatctttatcacaccccaagtgacgcacacatattttgaagataggaacattaaacccctattatcacatggccacccccaaaaaattgagggggattcactttcggaattttatagaaaagtggggccgatgttgatgatggaatcttcttttttctgtttgtccccacatcatttacacnacctcgtaaacctgcgggggagggtattattctttacaggatgaataatcgggacatattcttccccggaatagctctcctttcctgcgtggaggggagtagtagtcgccaaattaaattgggagaagttcattatgattacacgcgatggccatttccactatgtatgaacctatcattataagaaagaaccgaatatttacgaaagagcaaaaactcgacgcagagagaaaatgagctcttttgtaagaaatgatagtgtgaaaaaaaacccncctgcaacacaacacattattacgcattttatacacggggggaggaggagtaaaattacctcagtatataaaggagtggagcatagagacggtgctccgcgttggttaaatcgtctcacatgtattaaatatttcggttgccacttgtaatagtaggataactattggagctaacgagaaagcacacaacagcccatattttctattattttgataggc

SEQ ID NO: 22821 - DNA, 3767 bp, Macaca Mulatta
  misc_feature (1)...(3767): n = A,T,C or G
aagatgaaattgaaatggccagtgagcacacgctcattcatccagcgagcattgaggaccccctagaggctgggcccacgagtggtgaagatcccaaggatgaagacgccttgccnnnnnnnnnnnnnnnnnnnnnnnnnnnnnnnnnnnnnnnnnnnnnnnnnnnnnnnnnnnnnnnnnnnnnnnnnnnnnnnnnnnnnnnnnnnnnnnnnnnnnnnnnnnnnnnnnnnnnnnnnnnnnnnnnnnnnnnnnnnnnnnnnnnnnnnnnnnnnnnnnnnnnnnnnnnnnnnnnnnnnnnnnnnnnnnnnnnnnnnnnnnnnnnnnnnnnnnnnnnnnnnnnnnnnnnnnnnnnnnnnnnnnnnnnnnnnnnnnnnnnnnnnnnnnnnnnnnnnnnnnnnnnnnnnnnnnnnnnnnnnnnnnnnnnnnnnnnnnnnnnnnnnnnnnnnnnnnnnnnnnnnnnnnnnnnnnnnnnnnnnnnnnnnnnnnnnnnnnnnnnnnnnnnnnnnnnnnnnnnnnnnnnnnnnnnnnnnnnnnnnnnnnnnnnnnnnnnnnnnnnnnnnnnnnnnnnnnnnnnnnnnnnnnnnnnnnnnnnnnnnnnnnnnnnnnnnnnnnnnnnnnnnnnnnnnnnnnnnnnnnnnnnnnnnnnnnnnnnnnnnnnnnnnnnnnnnnnnnnnnnnnnnnnnnnnnnnnnnnnnnnnnnnnnnnnnnnnnnnnnnnnnnnnnnnnnnnnnnnnnnnnnnnnnnnnnnnnnnnnnnnnnnnnnnnnnnnnnnnnnnnnnnnnnnnnnnnnnnnnnnnnnnnnnnnnnnnnnnnnnnnnnnnnnnnnnnnnnnnnnnnnnnnnnnnnnnnnnnnnnnnnnnnnnnnnnnnnnnnnnnnnnnnnnnnnnnnnnnnnnnnnnnnnnnnnnnnnnnnnnnnnnnnnnnnnnnnnnnnnnnnnnnnnnnnnnnnnnnnnnnnnnnnnnnnnnnnnnnnnnnnnnnnnnnnnnnnnnnnnnnnnnnnnnnnnnnnnnnnnnnnnnnnnnnnnnnnnnnnnnnnnnnnnnnnnnnnnnnnnnnnnnnnnnnnnnnnnnnnnnnnnnnnnnnnnnnnnnnnnnnnnnnnnnnnnnnnnnnnnnnnnnnnnnnnnnnnnnnnnnnnnnnnnnnnnnnnnnnnnnnnnnnnnnnnnnnnnnnnnnnnnnnnnnnnnnnnnnnnnnnnnnnnnnnnnnnnnnnnnnnnnnnnnnnnnnnnnnnnnnnnnnnnnnnnnnnnnnnnnnnnnnnnnnnnnnnnnnnnnnnnnnnnnnnnnnnnnnnnnnnnnnnnnnnnnnnnnnnnnnnnnnnnnnnnnnnnnnnnnnnnnnnnnnnnnnnnnnnnnnnnnnnnnnnnnnnnnnnnnnnnnnnnnnnnnnnnnnnnnnnnnnnnnnnnnnnnnnnnnnnnnnnnnnnnnnnnnnnnnnnnnnnnnnnnnnnnnnnnnnnnnnnnnnnnnnnnnnnnnnnnnnnnnnnnnnnnnnnnnnnnnnnnnnnnnnnnnnnnnnnnnnnnnnnnnnnnnnnnnnnnnnnnnnnnnnnnnnnnnnnnnnnnagggtctcgctctgtcacccaggctggagtgcagtggtgcaatcatggctcactgcagcctcgacctcctgggctcttaagcgatccttccacctcaaccttccaaggagctgggnnnnagaaccagcagatagacacccaaatcgtaaagcaagaggacnnnnnnnnnnnnnnnnnnnnnnnnnnnnnnnnnnnnnnnnnnnnnnnnnnnnnnnnnnnnnnnnnnnnnnnnnnnnnnnnnnnnnnnnnnnnnnnnnnnnnnnnnnnnnnnnnnnnnnnnnnnnnnnnctggaacgtggtgggcatccagggatccttgctcagcattttcgtggagcccatttacttctcgagcatcatcctgggaagcctctaccatggggaccacctttccagggccatgtaccagcggatctccaacatagaggacctgccacctctctacaccctcaacaagcctttgctcagnnnnnnnnnnnnnnnnnnnnnnnnnnnnnnnnnnnnnnnnnnnnnnnnnnnnnnnnnnnnnnnnnnnnnnnnnnnnnnnnnnnnnnnnnnnnnnnnnnnnnnnnnnnnnnnnnnnnnnnnnnnnnnnnnnnnnnnnnnnnnnnnnnnnnnnnnnnnnnnnnnnnnnnnnnnnnnnnnnnnnnnctcccacttactacgctccaagattaccaagcccaacatgtaccatgagtccaagctggcggcaaaggagtaccaggccgccaaggcgcgtctgttcacagccttcatcaaggcggggctgggggcctgggtggagaagcccacctgagcaggaccagttctcactcacgccctgacccgggcagacatgatggggggtgcagggggctgtgggcatccagcgtcgtcctccagaacctcacatctgaactgggggtaggtgcaaaccttcggggaaggagttgggggacacaggggaccactaggtgtccacagttgtccccagcatctcacatcagacctggggcaggtgcgcagtgtggggaggggatggggtgtgtcggggcccagcatcgccgcctggcatctctctgccgcagcatttccccttctgaaccgtccagtgactgctttcaatctcggtttacgtttagaaattgagttctactgagtagggcttccttaagtttaggaaaatagaaattactttgtgtgaaattcttgaataaataatttattcagagctaggaatgtggtttataaaataagtaattatgtcaggtcacttttatgccacattattttaattgcaagaaaagcatctatatatggaggagggtgggaaaatagaggtaggaagtagtagtctaaaggaaatcgaagcatgtctgtctaaacttaggtctcttttctcnnnnnnnnnnnnnnnnnnnnnnnnnnnnnnnnnnnnnnnnnnnnnnnnnnnnnnnnnnnnnnnnnnnnnnnnnnnnnnnnnnnnnnnnnnnnnnnnnnnnnnnnnnnnnnnnnnnnnnnnnnnnnnnnnnnnnnnnnnnnnnnnnnnnnnnnnnnnnnnnnnnnnnnnnnnnnnnnnnnnnnnnnnnnnnnnnnnnnnnnnnnnnnnnnnnnnnnnnnnnnnnnnnnnnnnnnnnnnnnnnnnnnnnnnnnnnnnnnnnnnnnnnnnnnnnnnnnnnnnnnnnnnnnnnnnnnnnnnnnnnnnnnnnnnnnnnnnnnnnnnnnnnnnnnnnnnnnnnnnnnnnnnnnnnnnnnnnnnnnnnnnnnnnnnnnnnnnnnnnnnnnnnnnnnnnnnnnnnnnnnnnnnnnnnnnnnnnnnnnnnnnnnnnnnnnnnnnnnnnnnnnnnnnnnnnnnnnnnnnnnnnnnnnnnnnnnnnnnnnnnnnnnnnnnnnnnnnnnnnnnnnnnnnnnnnnnnnnnnnnnnnnnnnnnnnnnnnnnnnnnnnnnnnnnnnnnnnnnnnnnnnnnnnnnnnnnnnnnnnnnnnnnnnnnnnnnnnnnnnnnnnnnnnnnnnnnnnnnnnnnnnnnnnnnnnnnnnnnnnnnnnnnnnnnnnnnnnnnnnnnnnnnnnnnnnnnnnnnnnnnnnnnnnnnnnnnnnnnnnnnnnnnnnnnnnnnnnnnnnnnnnggtgctttgttgcctccgctcaggatgaaagaggagccgagagaagtgctctgctcgccagtgcagtgcccagctccaaggctctggacggtgctcagg

SEQ ID NO: 22822 - DNA, 649 bp, Macaca Mulatta
gtggggcagctgacgaagcgagtggtatcttcagctgtggaatagtgttggccgaggtcctcactggcatccctgcaatggataacaaccgaagcccggtttacctgaaggatttactcctcagtgaaattccaagcagcaccgcctcgctctgctccaggaagacgggcgtggagaacgtgatggcaaaggagatctgccagaagtacctggagaagggtgcagggaggcttccggaggactgtgccaaggccctggccacggccgcctgcctgtgcctgcggaagcgtaacatcagcctgcaggaggtgcgtggctctgtggctgctgtggaagagcggctccgaggctgggagacgttgctcccttggagtgggctttctgagggtacaggctcttcttccaacaccccagaggaaacagacgacgttgacaattccaaccttgatgcctcctcctccgcgagtgtggcaccctgggtggggcctgccacctcacttctccccacagagaatggcgaaggaaggctgcaggtcatcatgggaagggaggccgactcctcctctgaggcctgcgttggcccggagcctcccaaggatgctacagagacttcgtggcaaattgagatcaatgaggccaacaggaaact

SEQ ID NO: 22823 - DNA, 637 bp, Macaca Mulatta
cggtgggctcagtgtggggggctctggcttcagtgcaagcagtggccgaggcctgggggtgggctttggcagtggtgggggtagcagctccaggctcaaatttgtctccaccacctcctcctcccggaagagcttcaagagctaagagtctgctgcaagtcactgccttccaagtgcagcaacccagcccacggagactgcctcttctaggcagttgctcaagccatgttttatccttttctggagagtagtctagaccaagcccattgcagaaccacattctttggttcccaggagaacccaattcccagcccctggtctcccttgccacagttctatattctgcttcaaatcagcctttaggtttcccacagcatggtccctgctgacacaagaacccaaagtattcccaaatctaaattgtcaaaacagaatccccaccccaatcccaaattttgttctggttctaactacctccagagtgtgttcaataaaatgcttttataatataagctggtgtgcagaattgtttttcttctaggtttacaatcagcctagagataccatgagggtcagtctacccagatgcgattcttttgacaattcacagggagaatggaataacatttaagggaaa

SEQ ID NO: 22824 - DNA, 529 bp, Macaca Mulatta
aaggagcaggaagttcatgggggcttctgacgtagcccctcacaaaaggagtctttattctgagaaatttgaaccaaaacctctttcaatcttcacaatgattttattgaagagggcctcaagccccaaatggaaaactgtttttagaaattattatgatttttgattgcttttgtatttaattctgcaagtgttcaagtcttaaaaaataaagatttataacagaacccaaatattctcttccgaccctgactttgtggttgatattcctgcacctcctagcgggggcctcctccgtcatcatcttttccagcctcatcaccccaggtctcccctcccgctgctctgctgttttctgctcgtctgtactccttgggctctgcagcctcctgtgcctttgttccttgctgttcctcctgccctggaatgcctttcccatctcctctgcagacccaccagggacagtttaaagtacccttctttcctccaaccctcctcaccttctcctccccactcatcaaaagttgtt

SEQ ID NO: 22825 - DNA, 415 bp, Macaca Mulatta
ggaacagtataaatttgtatacgaggtggcactggaatacttaagctccttttagctcagtgggatggggaacctgccggagtccagaggctgctgtgaccaaacccccttttgtgtgaatggcagtaactgggctcaggggctccgaggtggtggcaccctgcctgactccaaggagaagactggtggccctgtgttccacggggggctctgcaccttctgaggggtctcctgttgctgtgggagatgctgctccaaaaggcccaggcttccttttcaacctaaccagccacagccacgggcccaagcagaagtacacccacaagcaaggccttggatttctggctcccagacctcctgcttttgttctgagtttgtggatctcgtggcaagccgactgtgcaggtgctgggga

SEQ ID NO: 22826 - DNA, 395 bp, Macaca Mulatta
gggctcttttcgctgcctgactgccgccatcatgggtcgcatgcatgctcccgggaagggcctgtcccagtcggctttgccctatcgacgcagcgtccccacttggttgaagttgacatctgacgacgtgaaggagcagatttacaaactggccaagaagggcctgactccttcacaaatcggtgtgatcctgagagattcacatggtgttgcacaagtacgttttgtgacaggcaataaaatcttaagaattcttaagtctaagggacttgctcctgatcttcctgaaattcacattataaacatcgtcaacctgagcaagagcatccataacactgctaaaccctgaaacccatcatgaagccttcgagtgtacgagtcactccatagactat

SEQ ID NO: 22827 - DNA, 573 bp, Macaca Mulatta
aaataagtcatacttggaaggcccttctgataatcagctgaaagactctgaatctactcctgctttaagatcatatttctttggaacaacctccaaatggaagtgacacccccaatccagaggaatatcaagaatcatctggaatccagatcaagacaagacataaagagggggctagccagagagctaagcagagccggagaaacctacctaggcggtcttcctttagattgcagactgaaacccaggaagatggttggtatgactgtcatagggaaacacatctgagtttttctgatacctatcaggattatgaggagtactggagagcttactacagggcatggcaagaatattatgctgccgcttctcattcatattattggaatgctcagagacatccaagttggatggcagcttatcacatgaataccatttatctacaagaaatgttgcatggtaaccagtgattgtaggatatacctgagaccatcaggaactgtcaacaaatgatacctttggatatccatcctccttgacttatagtacagtggtgtataatggcatttctga

SEQ ID NO: 22828 - DNA, 638 bp, Macaca Mulatta
  misc_feature (1)...(638): n = A,T,C or G
cacagcacatgccacaatcctatgctcttgccttcttttatctgcagtgtgtgaagggactcttttaaataaatgagcaagtgtcctaagctatgtcatccaaagattgtcctttccattatcaaatcctgtgactgggatcactcaacagcactgtgatgtattattttcaatgaggtgcctttcttaactgaccaaatgctgccttgtttggcccctaaatcaataaaatgttaaaannnnnnnnnnnnnnnnnnnnnnnnnnnnnnnnnnnnnnnnnnnnnnnnnnnnnnnnnnnnnnnnnnnnnnnnnnnnnnnnnnnnnnnnnnnnnnnnnnnnnnnnnnnnnnnnnnnnnnnnnnnnnnnnnnnnnnnnnnnnnnnnnnnnnnnnnnnnnnnnnnnnnnnnnnnnnnnnnnnnnnnnnnnnnnnnnnnnnnnnnnnnnnnnnnnnnnnnnnnnnnnnnnnnnnnnnnnnnnnnnnnnnnnnnnnnnnnnnnnnnnnnnnnnnnnnnnnnnnnnnnnnnnnnnnnnnnnnnnnnnnnnnnnnnnnnnnnnnnnnnnnnnnnnnnnnnnnnnnnnnnnnnnnnnnnnnnnnnnnnnnnnnnnnnnnnnnnnnnnnnnnnnnnnnnnnnnnnaaa

SEQ ID NO: 22829 - DNA, 696 bp, Macaca Mulatta
gaaatatgggctagtgtcacgttatgtgctcagcaagtgtgtagttcacgtgtccatggttcctgtgggacttgatgtggtcaaagaatccagaaacctttatttgtcctgtgatcgatctcttggtgtttaaaataatcgttctgggaactggatacaaagatcctcaaacatcatgcaatattttatctgttgaatcgaactggggcatagttttggaactgcagttttctcaggctttgtcctgtgaaccatctttcccttctcatcaattcacagttttctggccatctactgtggtgcctctctccttctttccatagaagactttctggtgtttaaactctgtacacagagcatagtgtaattggtgcatgtgtgcagccgtgtgtgttgtcagggatgtgtgcattctccgacgacctttggagatccctctgagtgctaggtgtccatgatttttatgtggttcatgttctctatagtagcccagcctgttagtctcctctgtatttgttaagagtctgtgggttcagatgtaacttcttttggttgatattggggcctgttgtaattcccctactcacatggggaagtttatatctgtctaagacctaagatttaagaagaaaaaggctttgtgtttgctgaacaatgtgcagactgcctttctgcttttcccagctcctctcaaac

SEQ ID NO: 22830 - DNA, 1947 bp, Macaca Mulatta
  misc_feature (1)...(1947): n = A,T,C or G
ggctggccctcacagaagagcaacagctgatgtttgagaagctgactctgtattgcgacagctacatccagctcatccccatttccttcgtgctgggnnnnnnnnnnnnnnnnnnnnnnnnnnnnnnnnnnnnnnnnnnnnnnnnnnnnnnnnnnnnnnnnnnnnnnnnnnnnnnnnnnnnnnnnnnnnnnnnnnnnnnnnnnnnnnnnnnnnnnnnnnnnnnnnnnnnnnnnnnnnnnnnnnnnnnnnnnnnnnnnnnnnnnnnnnnnnnnnnnnnnnnnnnnnnnnnnnnnnnnnnnnnnnnnnnnnnnnnnnnnnnnnnnnnngcaggctttatgaccccggcagaacacaagcagttggagaagtctgagcttaccacacaacatgttctgggtgccctgggtgtggtttgccaacctgtcaatgaaggcgtggcttggaggtcgaatccgggaccctatcctgctccagagcctgctgaacnnnnnnnnnnnnnnnnnnnnnnnnnnnnnnnnnnnnnnnnnnnnnnnnnnnnnnnnnnnnnnnnnnnnnnnnnncaggtggtgactgtggcggtgtacagcttcttcctgacttgtctagttgggcggcagtttctgaacccagccaaggcctaccctggccatgagctggacctcgttgtgcccgtcttcacattcctgcagttcttcttctatgttggctggttgaaggtnnnnnnnnnnnnnnnnnnnnnnnnnnnnnnnnnnnnnnnnnnnnnnnnnnnnnnnnnnnnnnnnnnnnnnnnnnnnnnnnnnnnnnnnnnnnnnnnnnnnnnnnnnnnnnnnnnnnnnnnnnnnnnnnnnnnnnnnnnnnnnnnnnnnnnnnnnnnnnnnnnnnnnnnnnnnnnnnnnnnnnnnnnnnnnnnnnnnnnnnnnnnnnnnnnnnnnnnnnnnnnnnnnnnnnnnnnnnnnnnnnnnnnnnnnnnnnnnnnnnnnnnnnnnnnnnnnnnnnnnnnnnnnnnnnnnnnnnnnnnnnnnnnnnnnnnnnnnnnnnnnnnnnnnnnnnnnnnnnnnnnnnnnnnnnnnnnnnnnnnnnnnnnnnnnnnnnnnnnnnnnnnnnnnnnnnnnnnnnnnnnnnnnnnnnnnnnnnnnnnnnnnnnnnnnnnnnnnnnnnnnnnnnnnnnnnnnnnnnnnnnnnnnnnnnnnnnnnnnnnnnnnnnnnnnnnnnnnnnnnnnnnnnnnnnnnnnnnnnnnnnnnnnnnnnnnnnnnnnnnnnnnnnnnnnnnnnnnnnnnnnnnnnnnnnnnnnnnnnnnnnnnnnnnnnnnnnnnnnnnnnnnnnnnnnnnnnnnnnnnnnnnnnnnnnnnnnnnnnnnnnnnnnnnnnnnnnnnnnnnnnnnnnnnnnnnnnnnnnnnnnnnnnnnnnnnnnnnnnnnnnnnnnnnnnnnnnnnnnnnnnnnnnnnnnnnnnnnnnnnnnnnnnnnnnnnnnnnnnnnnnnnnnnnnnnnnnnnnnnnnnnnnnnnnnnnnnnnnnnnnnnnnnnnnnnnnnnnnnnnnnnnnnnnnnnnnnnnnnnnnnnnnnnnnnnnnnnnnnnnnnnnnnnagggatgaagcacattcctaacgtgcttcccaacggggatgcttcgccagccaggtcctctccggtgtgtacaccagcaggacaccgatccagtcacagccatacagctgtccacactgaagaacatgtcctatgacagcctgaatcaaatggttagtttaatagataaaatcagcagtccaggactacttcagcctttaatgcctttcattcataaaaattatgaaagctagactgaaccatcggaaacatttagctcagacactggattgagagtcaggaacccttaatcctgtctgaatccaagacagccatacctcagtatactgcccaaactaaggcgtttaataaatacaaatact

SEQ ID NO: 22831 - DNA, 695 bp, Macaca Mulatta
  misc_feature (1)...(695): n = A,T,C or G
tgacttctgactgctcctcgacgcactgctctcctgaatcctgtaccacagcctccggttgtgcacctgcctcaagctgttccatagaaacagcttgtctccccggtgcttgtgctacatcccgatgtcagactccaagcttcctatcccagtctcgcgggctgaccggttgcctcctgccatgctactttactgggaagtgtacagtccctgcttggtggggaactgtgcctgggnnnnnnnnnnnnnnnnnnnnnnnnnnnnnnnnnnnnnnnnnnnnnnnnnnnnnnnnnnnnnnnnnnnnnnnnnnnnnnnnnnnnnnnnnnnnnnnnnnnnnnnnnnnnnnnnnnnnnnnnnnnnnnnnnnnnnnnnnnnnnnnnnnnnnnnnnnnnnnnnnnnnnnnnnnnnnnnnnnnnnnnnnnnnnnnnnnnnnnnnnnnnnnnnnnnnnnnnnnnnnnnnnnnnnnnnnnnnnnnnnnnnnnnnnnnnnnnnnnnnnnnnnnnnnnnnnnnnnnnnnnnnnnnnnnnnnnnnngagagtgaactgtcctttcgccagctattagaggcagacatcagtggcctgcatgggatcctggatgagctgaccctgtgcaaatctgatgtggaggcccatgtggagtctctgaaggaagatctcctttgccttaagaaaaaccatgaagaggtaaggaaa

SEQ ID NO: 22832 - DNA, 367 bp, Macaca Mulatta
tatacccagagacaaaggcagcatctgagactggaacctacacagagagaaactaccttctccccaggtgagtttgtccagggctggtggcaagaatggattgaaggctggactgccagccccctacaccttcagagagccaccaggtaaacttggtaaagatttgctgataactctcagggccgatacagccagcaggcggctggtctcagcccagctgctgaatccttactctgtggctcattcataccacagaaaagccaggggcaagccaatggactcctcctgactcaccctgccccactgcatttgaaggctcccacaacggtttgcaaagccaggtagagtttgcaaaggctacttctgt

SEQ ID NO: 22833 - DNA, 846 bp, Macaca Mulatta
  misc_feature (1)...(846): n = A,T,C or G
ggaagcacnnnnnnnnnnnnnnnnnnnnnnnnnnnnnnnnnnctcttgcgccctggtccaagatggcggatgaggccacgcgacgtgttgtgtctgagatcccggtgctgaagactaacgccggaccccgagatcgggagttgtgggtgcagcgactgaaggaggaatatcagtcccttatccggtatgtggagaacaacaagaatgctgacaacgattggttccgactggagtccaacaaggaagggactcggtggtttggaaaatgctggtatatccatgacttcctgaaatacgagtttgacatcgagtttgacattcctatcacatatcctactactgccccataaattgcagttcctgatctggatagaaagacagcaaatatgtacaggggtggcaaaatatgccctgacggatcattttcaacctttgtgggcccaggaatgtgccccaattttggactagctcctctcaaaggctctgggggcttggggtccatggcttgggccgtaaaaaatccccggatccgaattcagaaagggcgttcaccctacaccaaaatactaaattgcaaccaatgttataaatccaagccaccgcaaggccagggcagaaaggggcccttttagaaaagggctaacaaaactggttttttctggggccatcaacactttaccttaaactggcttttcccctggaacaaaccctaccaactcttttaagttgggttaccaaaaggtaagcatggctgcctacattcctttggactgaggggggaaacaaacctaagttttgatgatctcaattcagatggaatggcccccacttaatagattaccacag

SEQ ID NO: 22834 - DNA, 944 bp, Macaca Mulatta
  misc_feature (1)...(944): n = A,T,C or G
ccgcccgcccccaggccatcgtgaccctaggtgctgcggcagggggagtgctgggcggctggctggtggaccgcgccgggcgcaagctgagcctcctgctgtgcnnnnnnnnnnnnnnnnnnnnnnnnnnnnnnnnnnnnnnnnnnnnnnnnnnnnnnnnnnnnnnnnnnnnnnnnnnnnnnnnnnnnnnnnnnnnnnnnnnnnnnnnnnnnnnnnnnnnnnnnnnnnnnnnnnnnnnnnnnnnnnnnnnnnnnnnnnnnnnnnnnnnnnnnnnnnnnnnnnnnnnnnnnnnnnnnnnnnnnnnnnnnnnnnnnnnnnnnnnnnnnnnnnnnnnnnnnnnnnnnnnnnnnnnnnnnnnnnnnnnnnnnnnnnnnnnnnnnnnnnnnnnnnnnnnnnnnnnnnnnnnnnnnnnnnnnnnnnnnnnnnnnnnnnnnnnnnnnnnnnnnnnnnnnnnnnnnnnnnnnnnnnnnnnnnnnnnnnnnnnnnnnnnnnnnnnnnnnnnnnnnnnnnnnnnnnnnnnnnnnnnnnnnnnnnnnnnnnnnnnnnnnnnnnnnnnnnnnnnnnnnnnnnnnnnnnnnnnnnnnnnnnnnnnnnnnnnnnnnnnnnnnnnnnnnnnnnnnnnnnnnnnnnnnnnnnnnnnnnnnnnnnnnnnnnnnnnnnnnnnnnnnnnnnnnnnnnnnnnnnnnnnnnnnnnnnnnnnnnnnnnnnnnnnnnnnnnnnnnnnnnnnnnnnnnnnnnnnnnnnnnnnnnnnnnnnnnnnnnnnnnnaggtgtggccatggtgttcagcacgagcgccttcggcacctacttcaagctgacgcagggtgggcccggcaactcctcgcacatggccctgtcggcgcctgtctccgcagagcctgttgatgccagcgtggggctggcctggctggccgtgggcagcatgtgcctcttcatcgccgg

SEQ ID NO: 22835 - DNA, 154 bp, Macaca Mulatta
caatggagaagcccacccgggtcgtgggcgggttcggagctgcctccggggaggtgccctggcaggtcagcctgaaggaagggtcccggcacttctgtggagcgactgtggtgggggaccgctggctgctgtctgccgcccactgcttcaacca

SEQ ID NO: 22836 - DNA, 89 bp, Macaca Mulatta
gcagggccatcattgtccggaatggtgaaatcattccaatgtcccgagagtttaccccggagactgagcgccagcgtcttcagctgctt

SEQ ID NO: 22837 - DNA, 2128 bp, Macaca Mulatta
  misc_feature (1)...(2128): n = A,T,C or G
atattggatgaactgaaaaaagaataccaagaaatagaaaacttagagaagaccaaaatcaagaaatagtcaacctaatttcacataacaatgtgtggcatttgttgttctgtaaacttttctgctgagcatttcagtcaagatttaaaagaggacttactatataatcttaaacagcggggacccaatagtagtaaacaattgttcaagtctgatgttaactaccagtgtttattttctggtcacgtcctacacttgaggggtgttttgactacccagcctgtggaagatgaaagaggcaatgtgtttctgtggaatggagaaatttttagtggaataaaggttgaagctgaagagaatgatactcaaattttgtttaattatctttcctcctgtaagaatgaatctgagattttgtcactcttctcagaagtgcaaggtccctggtcatttatatattatcaagcatctagtcattatttatggtttggtagggatttttttggtcgccgtagcttgctttggcattttagtaatttgggcaagagtttctgcctctcttcagttggcacccaaacatctggattggcaaatcagtggcaagaagttccagcatctggacttttccgaattgatcttaagtctactgccatttccagatgcattattttacaactgtatccttggaaatatatttctagggagaatattattgaagaaaatgttaatagcctgagtcaaatttcagcagacttaccagcatttgtatccgtggtagcaaatgaagccaaactgtatcttgaaaaacctgttgttcctttaaatatgatgttgccacaagctgcattggagactcattgcagtaatatttccaatgtgccacctacaagagagacacttcaggtctttcttactgatgtacacataaaggaagtaattcagcagttcattgatgtcttgagtgtagcagtcaagaaacgtgtcttgtgtttacctaggggtgaaaacctgacagcaaatgaagtttcgaaaatgtgtgatagnnnnnnnnnnnnnnnnnnnnnnnnnnnnnnnnnnnnnnnnnnnnnnnnnnnnnnnnnnnnnnnnnnnnnnnnnnnnnnnnnnnnnnnnnnnnnnnnnnnnnnnnnnnnnnnnnnnnnnnnnnnnnnnnnnnnnnnnnnnnnnnnnnnnnnnnnnnnnnnnnnnnnnnnnnnnnnnnnnnnnnnnnnnnnnnnnnnnnnnnnnnnnnnnnnnnnnnnnnnnnnnnnnnnnnnnnnnnnnnnnnnnnnnnnnnnnnnnnnnnnnnnnnnnnnnnnnnnnnnnnnnnnnnnnnnnnnnnnnnnnnnnnnnnnnnnnnnnnnnnnnnnnnnnnnnnnnnnnnnnnnnnnnnnnnnnnnnnnnnnnnnnnnnnnnnnnnnnnnnnnnnnnnnnnnnnnnnnnnnnnnnnnnnnnnnnnnnnnnnnnnnnnnnnnnnnnnnnnnnnnnnnnnnnnnnnnnnnnnnnnnnnnnnnnnnnnnnnnnnnnnnnnnnnnnnnnnnnnnnnnnnnnnnnnnnnnnnnnnnnnnnnnnnnnnnnnnnnnnnnnnnnnnnnnnnnnnnnnnnnnnnnnnnnnnnnnnnnnnnnnnnnnnnnnnnnnnnnnnnnnnnnnnnnnnnnnnnnnnnnnnnnnnnnnnnnnnnnnnnnnnnnnnnnnnnnnnnnnnnnnnnnnnnnnnnnnnnnnnnnnnnnnnnnnngatttcctttcctggatgaaaatgttgtctcctttctaaattctctaccaatttgggaaaaagcaaacttgactttaccccgagggattggtgaaaaactacttttacgccttgcagctgtggaacttggtcttacagtctctgctcttctgcccaaacgggccatgcaatttggatcaagaattgcaaaaatggaaaaaaataatgaaaaggcatctgataaatgtggacggctccaaatcatttccttagaaaatctttctattgaaaaggagactaaattgtaatgtgattcacagtgtaacaatataaaaatacgtttttatataattacttatataaaagtaagatactctgctgctttattattgtataataatagtagttttaaagtt

SEQ ID NO: 22838 - DNA, 765 bp, Macaca Mulatta
  misc_feature (1)...(765): n = A,T,C or G
ggtggcattgcaatgaagtgctttgtatcaggaaagtgtacactattgaccttttttcctgttcacaagctgagccatatgtacataatctagatttttgttttcatagttttgcacttttatagcctatttttgaagattaacacatttgcaagatgattgactcaatctttgcctaatccaatgagtgttacagagagcttgaactagaaccataaatcttaaaagggggtatgtgataatagagggctggaatttaaacctgtatttaaaaaaaagaatcaccaaatctatttgaaaacaagtcaatttgtgttatgctggaattttttgggctttcagatttctctttttaaccacatttctgaatgtatgaaaataccaattattttcctacagccctttgtacttcaaaatatgtttttgtgtccatcagtattaactattggtatactactggttttatnnnnnnnnnnnnnnnnnnngacaacagtacatataatagaggtacaattcgttggattttgtttatgtatttatttcattccagtttgatttattttaattgttgatacttaagttgtcaaacagtagacattacttgttttatttatgatatatttcagcttaaagttatgttattatatgtggaagtgtaaatatagatttggtgttttgcnnnnnnnnnnnnnnnnnnnnnnnnnnnnnnnnncatgtcgggcgccntccggccctcgagaaagctttcctagaaccattccgttt

SEQ ID NO: 22839 - DNA, 2481 bp, Macaca Mulatta
  misc_feature (1)...(2481): n = A,T,C or G
aggttgattccaaagatagttctcataactccacaaactctgaatttgcagctgaagctgagggtcagaatgatacaattgaggaacccaacaaggtccagaaaaggaagagggatagacttcgagaccagggctccacaatgatctacctgaaggctatccagggcatcctggggaaatcgatgccaaaaaggaagggagaggctgccattcgggcaaaaccaagcacagcagagcgtctcagccgtggagaaggaccagccaggagtgaaggaccagccaagactgcagaaggagcagccaggagtgtcacagtcaccactgctcagaaggagaaagactcaaccccagagatcagcgtggaggaggacaagactgtgccagagaagaacagcttctacgacaggagagtagttatagaccctcaggaaaacccagtgaggagccccttgnnnnnnnnnnnnnnnnnnnnnnnnnnnnnnnnnnnnnnnnnnnnnnnnnnnnnnnnnnnnnnnnnnnnnnnnnnnnnnnnnnnnnnnnnnnnnnnnnnnnnnnnnnnnnnnnnnnnnnnnnnnnnnnnnnnnnnnnnnnnnnnnnnnnnnnnnnnnnnnnnnnnnnnnnnnnnnnnnnnnnnnnnnnnnnnnnnnnnnnnnnnnnnnnnnnnnnnnnnnnnnnnnnnnnnnnnnnnnnnnnnnnnnnnnnnnnnnnnnnnnnnnnnnnnnnnnnnnnnnnnnnnnnnnnnnnnnnnnnnnnnnnnnnnnnnnnnnnnnnnnnnnnnnnnnnnnnnnnnnnnnnnnnnnnnnnnnnnnnnnnnnnnnnnnnnnnnnnnnnnnnnnnnnnnnnnnnnnnnnnnnnnnnnnnnnnnnnnnnnnnnnnnnnnnnnnnnnnnnnnnnnnnnnnnnnnnnnnnnnnnnnnnnnnnnnnnnnnnnnnnnnnnnnnnnnnnnnnnnnnnnnnnnnnnnnnnnnnnnnnnnnnnnnnnnnnnnnnnnnnnnnnnnnnnnnnnnnnnnnnnnnnnnnnnnnnnnnnnnnnnnnnnnnnnnnnnnnnnnnnnnnnnnnnnnnnnnnnnnnnnnnnnnnnnnnnnnnnnnnnnnnnnnnnnnnnnnnnnnnnnnnnnnnnnnnnnnnnnnnnnnnnnnnnnnnnnnnnnnnnnnnnnnnnnnnnnnnnnnnnnnnnnnnnnnnnnnnnnnnnnnnnnnnnnnnnnnnnnnnnnnnnnnnnnnnnnnnnnnnnnnnnnnnnnnnnnnnnnnnnnnnnnnnnnnnnnnnnnnnnnnnnnnnnnnnnnnnnnnnnnnnnnnnnnnnnnnnnnnnnnnnnnnnnnnnnnnnnnnnnnnnnnnnnnnnnnnnnnnnnnnnnnnnnnnnnnnnnnnnnnnnnnnnnnnnnnnnnnnnnnnnnnnnnnnnnnnnnnnnnnnnnnnnnnnnnnnnnnnnnnnnnnnnnnnnnnnnnnnnnnnnnnnnnnnnnnnnnnnnnnnnnnnnnnnnnnnnnnnnnnnnnnnnnnnnnnnnnnnnnnnnnnnnnnnnnnnnnnnnnnnnnnnnnnnnnnnnnnnnnnnnnnnnnnnnnnnnnnnnnnnnnnnnnnnnnnnnnnnnnnnnnnnnnnnnnnnnnnnnnnnnnnnnnnnnnnnnnnnnnnnnnnnnnnnnnnnnnnnnnnnnnnnnnnnnnnnnnnnnnnnnnnnnnnnnnnnnnnnnnnnnnnnnnnnnnnnnnnnnnnnnnnnnnnnnnnnnnnnnnnnnnnnnnnnnnnnnnnnnnnnnnnnnnnnnnnnnnnnnnnnnnnnnnnnnnnnnnnnnnnnnnnnnnnnnnnnnnnnnnnnnnnnnnnnnnnnnnnnnnnnnnnnnnnnnnnnnnnnnnnnnnnnnnnnnnnnnnnnnnnnnnnnnagggcgaccagcagcctgacagaacacaggctggcttgaagtctgtttctcaggtcgaggatgtgtttggagagctgattggaacacagaaaaccaggacaggatgtttaactcgaagcgggtcataaggcttcagcttgtgggtggggtggggtgggcgtggaatgaggggtatggggactgcctgtaatagcactggggttttgcctcccagccaaaatgctccagggtaggcagcaaagaagagtgtgatatgagggtacagtgagtttggcagtccaaattctgttctctgcagcctgtgtttttgagcagtttgtgaataaagtcacccgcctactcgtctaagcacatgtgggtgtgtaactcagttcctggttctcggttctaaaaacagactcccaactgggaaaccttttgggggaaattaactggagacctatctcagaggtttattttcttgcaaccagtgaagtcgttctctttccttccctggataactcttcaatttgacggtcactgttctggtgtcaactccagcgtcagcacaggcagaaggacttcaactgctggtctcattggttccactgccatcgatatgg

SEQ ID NO: 22840 - DNA, 366 bp, Macaca Mulatta
ccttggacctgccgagagagcaggcaccttgggcctagcatgagtcctcacaccaacacccgtgacacaaaacagctgttcctcagggcctggctcttcccccaggcaggaggtgacaccagctcacttgtcctggggctcccacagagcactgagggctgagcacgctgttcagctgtgctcccatcacctgccccccagggcacatccgtccacatcagcctccttgccagtgtcctggtcctcctggggcttggtccggaacttctgccaggggtgcagggtttcctctgcgggcatcactgtcaaccactgcttgtaataggctcggaagccgtcaatcttcgccaggtaggtgttcctccc

SEQ ID NO: 22841 - DNA, 155 bp, Macaca Mulatta
taaatggtcagagcgtcctggtcagttcccaggttaaagcaacccggtaaaaacagtatcctcattctagcaaatgtcacaagaaatgacacaagaccctatgaatgtaaaatacgggatcgagttggtagcatccccagtgacccagtcaccct

SEQ ID NO: 22842 - DNA, 138 bp, Macaca Mulatta
caggtgacccacgggctgagcgcgtacgatggcttatctctgcctgaggacacggagaccgtcacagcaagccaaatgcgctggacacattcgtacctttctgatgatgaggacatgctggctgacagcacctccgga

SEQ ID NO: 22843 - DNA, 370 bp, Macaca Mulatta
  misc_feature (1)...(370): n = A,T,C or G
tagttggcaggatcttgtggccagtggggtagtggaatatattgatacactggaagaagaaacagtgatgcttgcaatgactccagatgatttacaggagaaggaagtagcttattgttccacatatacacattgtgagattcatccctcaatgatccttggtgtctgtgcatctattattccctttcctgatcataaccannnnnnnnnnnnnnnnnnnnnnnnnnnnnnnnnnnnnnnnnnnnnnnnnnnnnnnnnnnnnnnnnnnnnnnnnnnnnnnnnnnnnnnnnnnnnnnnnnnnnnnnnnnnnnnnnnnnnnnnnnnactacacggtctatggagtatctacgatttagagagctgccagcag

SEQ ID NO: 22844 - DNA, 192 bp, Macaca Mulatta
catctctggcaaatctagcctaaccttaccacctgtaatcttgaacatataccttggagttgacatattgttttcatactgctttggggtgaatgttccttccaacactcatgttgagacttaatccctaatgtggccatactgaaaagtggagcctttgagatgtcattggatgataaagctctaacttca

SEQ ID NO: 22845 - DNA, 750 bp, Macaca Mulatta
agttcctctgatatcctcacggcaagcacagctctctttcaggttttccagtggaggacaatatatgaactcacaccgtgtctcctctgttgcttctgtttctgacgcagtctgtgctctcaggtggtagtgtggtgatagtccctgagggctgatgtccttatgatggcgtgaccagatcttcaggagagagactgagaggaagaaggcagtgctggaggtgcaggtggcatgtggaggggccagaccaagcatcccaggcaagcatccttctgccgggtattaataggaagccccacgccgggcagctcagccaacgaagcagcagccggctgagctgaacccagcaggtcgtctgctcccgcctgtcctctcgtcagccttcctcttccagaagctgttggagagacattcaggagagagcaagccccttgtcatgtttctgtctctgttcatatcctaaagatagacttctcctgcaccgccagggaagggtagcgcgtgcggctctcaccgcacgatggggcctagaatcaggctcgccttggaggcctgacagtgatctgacgtccactaagcaaagttatttaaattcatgggaaatcacttcctgccctaaacgaagacattgcattttgtgagctcttggtctgatttgaagaaaggactgttaccctttctttcggtgtgtttatggaagtgtatgtagagcgtcctgccctttgagatcagactgggtgtgtgttttcc

SEQ ID NO: 22846 - DNA, 1199 bp, Macaca Mulatta
  misc_feature (1)...(1199): n = A,T,C or G
ttaatttctgaatttgaatttaaagagaacatgaagcttgaggcagtgaacccccttctccctgaggaagtgtgtgttgctaccatcactgcagtgagaggctcctacctgtggctccagctggagggtnnnnnnnnnnnnnnnnnnnnnnnnnnnnnnnnnnnnnnnnnnnnnnnnnnnnnnnnnnnnnnnnnnnnnnnnnnnnnnnnnnnnnnnnnnnnnnnnnnnnnnnnnnnnnnnnnnnnnnnnnnnnnnnnnnnnnnnnnnnnnnnnnnnnnnnnnnnnnnnnnnnnnnnnnnnnnnnnnnnnnnnnnnnnnnnnnnnnnnnnnnnnnnnnnnnnnnnnnnnnnnnnnnnnnnnnnnnnnnnnnnnnnnnnnnnnnnnnnnnnnnnnnnnnnnnnnnnnnnnnnnnnnnnnnnnnnnnnnnnnnnnnnnnnnnnnnnnnnnnnnnnnnnnnnnnnnnnnnnnnnnnnnnnnnnnnnnnnnnnnnnnnnnnnnnnnnnnnnnnnnnnnnnnnnnnnnnnnnnnnnnnnnnnnnnnnnnnnnnnnnnnnnnnnnnnnnnnnnnnnnnnnnnnnnnnnnnnnnnnnnnnnnnnnnnatataaaggaaagagttatcgagctactgttgagatagtgaaaacagcagatcgggtgactgaattctgccggcaaacctgtatcaaactggaatgctgtcctaacctcttcggtccacggatggttctggataagtgttctgagaactgttctgtacttacaaagaccaaataccacattattatggaaagaagaaaaataaaagaattgggaggccacctggtgggcatagtaacttagcttgtgccctgaaaaaagccagtaagaggagaaagaggcggaaaaatgtttttgttcataagaagaaacgctcctctgcatctgttgataataccccagcgggctctccccaggnnnnnnnnnnnnnnnnnnnnnnnnnnnnnnnnnnnnnnnnnnnnnnnnnnnnnnnnnnnnnnnnnnnnnnnnnnnnnnnnnnnnnnnnnnnnnnnnnnnnnnnnnnnnnnnnnnnnnnnnnnnnnnnnnnnnnnnnnnnnnnnnnnnnnnnnnnnnnnnnnnnnnnnnnnnnnnnnnnnnnnnnnnnnnnnnnnnnnnnnnnnnnnnnnnnnnnnnnngatgaaaataaacctccttcaccaaag

SEQ ID NO: 22847 - DNA, 913 bp, Macaca Mulatta
  misc_feature (1)...(913): n = A,T,C or G
cccagatggacacgagggtcctcagctcagctcctggggctcctgctgctctggctcccaggtgccagatgtgacatccagatgacccagtctccatcctccctgtctgcatctgtaggagacagagtcaccatcacttgccgggcaagtcagggcattagcaattatttagattggtatcagcagaaaccagggaaagcccctaagctcctgatctatggtgcatccagtttggaaagtggggtcccatcaaggttcagcggcagtggatctgggacagatttcactctcaccatcagcagcctgcagcctgaagattttgcaacttattactgtcaacagtataatagttacccgctcactttcggccgagggaccaaagtggagatcaaacgggctgtggctccaccatctgtcttcatcttcccgccatctgaagatcaggtgacatctggaactgtctctgttgtgtgcctgctgaataacttctatcccagagaggccagcgtaaagtggaaggtggatggtgccctcaaaacgggtaactcccaggagagtgtcacagagcaggacagcaaggacaacacctacagcctgagcagcaccctgacgctgagcagcacagagtaccagagtcacaaagtctatgcctgcgaagtcacccatcagggcctgagctcgcccgtcaccaagagcttctacagaggagagtgtcagagggagaagtaccccgggccccccacgtgctccttagccccagcctcacccccgtcccatcctttggcctctggccctttttcccagcaggggagctacccctatttcggtcctcgagctcatctttcacctnnnnnnnnnnnnnnnnnnnggctttaattatgctaatattggaggagaattaataaataaagtg

SEQ ID NO: 22848 - DNA, 362 bp, Macaca Mulatta
  misc_feature (1)...(362): n = A,T,C or G
atccggcaggtcatcaccacccgcaagcaggncaggcagtgggacctggtggtgtcaactcaggcccagtccagatcgtcaacaacaagtttctggcatgcagcggcgtcatggagnnnnnnnnnnnnnnnnnnnnnnnnnnnnnnnnnnnnnnnnnnnnnnnnnnnnnnnnnnnnnnnnnnnnnnnnnnnnnnnnnnnnnnnnnnnnnnnnnnnnnnnnnnnnnnnnnnnnnnnnnnnnnnnnnnnnnnnnnnnngaccaccttggtgccgctgtttcggaactcgcgcctggtccagttccacttcaccaaggacctggagacactgaagagcctgtgccggatcatggacaacggcttc

SEQ ID NO: 22849 - DNA, 4851 bp, Macaca Mulatta
  misc_feature (1)...(4851): n = A,T,C or G
tgccccccgcgctctgggtcgtcacggccgcnnnnnnnnnnnnnnnnnnnnnnnnnnnnnnnnnnnnnnnnnnnnnnnnnnnnnnnnnnnnnnnnnnnnnnnnnnnnnnnnnnnnnnnnnnnnnnnnnnnnnnnnnnnnnnnnnnnnnnnnnnnnnnnnnnnnnnnnnnnnnnnnnnnnnnnnnnnnnnnnnnnnnnnnnnnnnnnnnnnnnnnnnnnnnnnnnnnnnnnnnnnnnnnnnnnnnnnnnnnnnnnnnnnnnnnnnnnnnnnnnnnnnnnnnnnnnnnnnnnnnnnnnnnnnnnnnnnnnnnnnnnnnnnnnnnnnnnnnnnnnnnnnnnnnnnnnnnnnnnnnnnnnnnnnnnnnnnnnnnnnnnnnnnnnnnnnnnnnnnnnnnnnnnnnnnnnnnnnnnnnnnnnnnnnnnnnnnnnnnnnnnnnnnnnnnnnnnnnnnnnnnnnnnnnnnnnnnnnnnnnnnnnnnnnnnnnnnnnnnnnnnnnnnnnnnnnnnnnnnnnnnnnnnnnnnnnnnnnnnnnnnnnnnnnnnnnnnnnnnnnnnnnnnnnnnnnnnnnnnnnnnnnnnnnnnnnnnnnnnnnnnnnnnnnnnnnnnnnnnnnnnnnnnnnnnnnnnnnnnnnnnnnnnnnnnnnnnnnnnnnnnnnnnnnnnnnnnnnnnnnnnnnnnnnnnnnnnnnnnnnnnnnnnnnnnnnnnnnnnnnnnnnnnnnnnnnnnnnnnnnnnnnnnnnnnnnnnnnnnnnnnnnnnnnnnnnnnnnnnnnnnnnnnnnnnnnnnnnnnnnnnnnnnnnnnnnnnnnnnnnnnnnnnnnnnnnnnnnnnnnnnnnnnnnnnnnnnnnnnnnnnnnnnnnnnnnnnnnnnnnnnnnnnnnnnnnnnnnnnnnnnnnnnnnnnnnnnnnnnnnnnnnnnnnnnnnnnnnnnnnnnnnnnnnnnnnnnnnnnnnnnnnnnnnnnnnnnnnnnnnnnnnnnnnnnnnnnnnnnnnnnnnnnnnnnnnnnnnnnnnnnnnnnnnnnnnnnnnnnnnnnnnnnnnnnnnnnnnnnnnnnnnnnnnnnnnnnnnnnnnnnnnnnnnnnnnnnnnnnnnnnnnnnnnnnnnnnnnnnnnnnnnnnnnnnnnnnnnnnnnnnnnnnnnnnnnnnnnnnnnnnnnnnnnnnnnnnnnnnnnnnnnnnnnnnnnnnnnnnnnnnnnnnnnnnnnnnnnnnnnnnnnnnnnnnnnnnnnnnnnnnnnnnnnnnnnnnnnnnnnnnnnnnnnnnnnnnnnnnnnnnnnnnnnnnnnnnnnnnnnnnnnnnnnnnnnnnnnnnnnnnnnnnnnnnnnnnnnnnnnnnnnnnnnnnnnnnnnnnnnnnnnnnnnnnnnnnnnnnnnnnnnnnnnnnnnnnnnnnnnnnnnnnnnnnnnnnnnnnnnnnnnnnnnnnnnnnnnnnnnnnnnnnnnnnnnnnnnnnnnnnnnnnnnnnnnnnnnnnnnnnnnnnnnnnnnnnnnnnnnnnnnnnnnnnnnnnnnnnnnnnnnnnnnnnnnnnnnnnnnnnnnnnnnnnnnnnnnnnnnnnnnnnnnnnnnnnnnnnnnnnnnnnnnnnnnnnnnnnnnnnnnnnnnnnnnnnnnnnnnnnnnnnnnnnnnnnnnnnnnnnnnnnnnnnnnnnnnnnnnnnnnnnnnnnnnnnnnnnnnnnnnnnnnnnnnnnnnnnnnnnnnnnnnnnnnnnnnnnnnnnnnnnnnnnnnnnnnnnnnnnnnnnnnnnnnnnnnnnnnnnnnnnnnnnnnnnnnnnnnnnnnnnnnnnnnnnnnnnnnnnnnnnnnnnnnnnnnnnnnnnnnnnnnnnnnnnnnnnnnnnnnnnnnnnnnnnnnnnnnnnnnnnnnnnnnnnnnnnnnnnnnnnnnnnnnnnnnnnnnnnnnnnnnnnnnnnnnnnnnnnnnnnnnnnnnnnnnnnnnnnnnnnnnnnnnnnnnnnnnnnnnnnnnnnnnnnnnnnnnnnnnnnnnnnnnnnnnnnnnnnnnnnnnnnnnnnnnnnnnnnnnnnnnnnnnnnnnnnnnnnnnnnnnnnnnnnnnnnnnnnnnnnnnnnnnnnnnnnnnnnnnnnnnnnnnnnnnnnnnnnnnnnnnnnnnnnnnnnnnnnnnnnnnnnnnnnnnnnnnnnnnnnnnnnnnnnnnnnnnnnnnnnnnnnnnnnnnnnnnnnnnnnnnnnnnnnnnnnnnnnnnnnnnnnnnnnnnnnnnnnnnnnnnnnnnnnnnnnnnnnnnnnnnnnnnnnnnnnnnnnnnnnnnnnnnnnnnnnnnnnnnnnnnnnnnnnnnnnnnnnnnnnnnnnnnnnnnnnnnnnnnnnnnnnnnnnnnnnnnnnnnnnnnnnnnnnnnnnnnnnnnnnnnnnnnnnnnnnnnnnnnnnnnnnnnnnnnnnnnnnnnnnnnnnnnnnnnnnnnnnnnnnnnnnnnnnnnnnnnnnnnnnnnnnnnnnnnnnnnnnnnnnnnnnnnnnnnnnnnnnnnnnnnnnnnnnnnnnnnnnnnnnnnnnnnnnnnnnnnnnnnnnnnnnnnnnnnnnnnnnnnnnnnnnnnnnnnnnnnnnnnnnnnnnnnnnnnnnnnnnnnnnnnnnnnnnnnnnnnnnnnnnnnnnnnnnnnnnnnnnnnnnnnnnnnnnnnnnnnnnnnnnnnnnnnnnnnnnnnnnnnnnnnnnnnnnnnnnnnnnnnnnnnnnnnnnnnnnnnnnnnnnnnnnnnnnnnnnnnnnnnnnnnnnnnnnnnnnnnnnnnnnnnnnnnnnnnnnnnnnnnnnnnnnnnnnnnnnnnnnnnnnnnnnnnnnnnnnnnnnnnnnnnnnnnnnnnnnnnnnnnnnnnnnnnnnnnnnnnnnnnnnnnnnnnnnnnnnnnnnnnnnnnnnnnnnnnnnnnnnnnnnnnnnnnnnnnnnnnnnnnnnnnnnnnnnnnnnnnnnnnnnnnnnnnnnnnnnnnnnnnnnnnnnnnnnnnnnnnnnnnnnnnnnnnnnnnnnnnnnnnnnnnnnnnnnnnnnnnnnnnnnnnnnnnnnnnnnnnnnnnnnnnnnnnnnnnnnnnnnnnnnnnnnnnnnnnnnnnnnnnnnnnnnnnnnnnnnnnnnnnnnnnnnnnnnnnnnnnnnnnnnnnnnnnnnnnnnnnnnnnnnnnnnnnnnnnnnnnnnnnnnnnnnnnnnnnnnnnnnnnnnnnnnnnnnnnnnnnnnnnnnnnnnnnnnnnnnnnnnnnnnnnnnnnnnnnnnnnnnnnnnnnnnnnnnnnnnnnnnnnnnnnnnnnnnnnnnnnnnnnnnnnnnnnnnnnnnnnnnnnnnnnnnnnnnnnnnnnnnnnnnnnnnnnnnnnnnnnnnnnnnnnnnnnnnnnnnnnnnnnnnnnnnnnnnnnnnnnnnnnnnnnnnnnnnnnnnnnnnnnnnnnnnnnnnnnnnnnnnnnnnnnnnnnnnnnnnnnnnnnnnnnnnnnnnnnnnnnnnnnnnnnnnnnnnnnnnnnnnnnnnnnnnnnnnnnnnnnnnnnnnnnnnnnnnnnnnnnnnnnnnnnnnnnnnnnnnnnnnnnnnnnnnnnnnnnnnnnnnnnnnnnnnnnnnnnnnnnnnnnnnnnnnnnnnnnnnnnnnnnnnnnnnnnnnnnnnnnnnnnnnnnnnnnnnnnnnnnnnnnnnnnnnnnnnnnnnnnnnnnnnnnnnnnnnnnnnnnnnnnnnnnnnnnnnnnnnnnnnnnnnnnnnnnnnnnnnnnnnnnnnnnnnnnnnnnnnnnnnnnnnnnnnnnnnnnnnnnnnnnnnnnnnnnnnnnnnnnnnnnnnnnnnnnnnnnnnnnnnnnnnnnnnnnnnnnnnnnnnnnnnnnnnnnnnnnnnnnnnnnnnnnnnnnnnnnnnnnnnnnnnnnnnnnnnnnnnnnnnnnnnnnnnnnnnnnnnnnnnnnnnnnnnnnnnnnnnnnnnnnnnnnnnnnnnnnnnnnnnnnnnnnnnnnnnnnnnnnnnnnnnnnnnnnnnnnnnnnnnnnnnnnnnnnnnnnnnnnnnnnnnnnnnnnnnnnnnnnnnnnnnnnnnnnnnnnnnnnnnnnnnnnnnnnnnnnnnnnnnnnnnnnnnnnnnnnnnnnnnnnnnnnnnnnnnnnnnnnnnnnnnnnnnnnnnnnnnnnnnnnnnnnnnnnnnnnnnnnnnnnnnnnnnnnnnnnnnnnnnnnnnnnnnnnnnnnnnnnnnnnnnnnnnnnnnnnnnnnnnnnnnnnnnnnnnnnnnnnnnnnnnnnnnnnnnnnnnnnnnnnnnnnnnnnnnnnnnnnnnnnnnnnnnnnnnnnnnnnnnnnnnnnnnnnnnnnnnnnnnnnnnnnnnnnnnnnnnnnnnnnnnnnnnnnnnnnnnnnnnnnnnnnnnnnnnnnnnnnnnnnnnnnnnnnnnnnnnnnnnnnnnnnnnnnnnnnnnnnnnnnnnnnnnnnnnnnnnnnnnnnnnnnnnnnnnnnnnnnnnnnnnnnnnnnnnnnnnnnnnnnnnnnnnnnnnnnnnnnnnnnnnnnnnnnnnnnnnnnnnnnnnnnnnnnnnnnnnnnnnnnnnnnnnnnnntctcagccccatccaggtgcccctgacagctctctacacctctatatattatattactatatcttcgagctgttcttccttcctatggaagtcggaaacatggtcagaacacgatctggggcggggggaatcctgtcttcttccccacccccaccccactcttacccggtttctgggctctggatcctcacagtcatggaggcaccatgggcctggcacttgcaaaagtgtggcccctgactctagcgtggggtccctctcagggtcctagggacctgcctctatgtggtctccatcctgactcttgaaattacccacaatgagaataaattctgcctcatcttt

SEQ ID NO: 22850 - DNA, 360 bp, Macaca Mulatta
tcctgcgatggtgctttatgtagcagaaggcaggagcgctcggtaggacgaagcctgtgcctccgtggacactgaatactaagtggtgagcgggtctagagtggagccaggtgctttcagaagacagtagtggggtgggagcacaatcagtcaagagggcaacttggcctgtgtcaccaaatcctaagactgttttccactcctcacctctgtgactggagaaattggatactctgttcactctatggttctacaaacggcattgagatgatgtttggggtgaattcctggacacgaccaagggtgactgccatctcctggcaagatgctcaggtagttcttttgctttaaaaggcagat

SEQ ID NO: 22851 - DNA, 1784 bp, Macaca Mulatta
  misc_feature (1)...(1784): n = A,T,C or G
agaaagaacattggagctatcatgtctggaagtgtgtttacaatctaattttacctattcactctcctccttaaacttttcttttgtgacttttctgcaatcagtaagggaaactcaaattatcatgagaatctttctaaatccctctcattttcataacttcaccaggacttgccaagacatcacaggtgaatttaaaatgtgctccttgtgtttggtttgtgagtctcaaggaaacatggattttatttctcaggaacaaacatcaaaagnagttcttatcaggggagaggatcaatggaagtgaaagcaaatgattttcattcaccttgtcagcactttaacttcactgtagctcctctggttgaccacttggaggaatatagcactacctgtcatctaaaaaaccacactggaagatcagcaatcatggaggatgagccaagcaaggggaaatctataaaccatacttgtagaatcatggaatacccgaacgattgtatacacatttctttgcacctagagatggatgtaaaaannnnnnnnnnnnnnnnnnnnnnnnnnnnnnnnnnnnnnnnnnnnnnnnnnnnnnnnnnnnnnnnnnnnnnnnnnnnnnnnnnnnnnnnnnnnnnnnnnnnnnnnnnnnnnnnnnnnnnnnnnnnnnnnnnnnnnnnnnnnnnnnnnnnnnnnnnnnnnnnnnnnnnnnnnnnnnnnnnnnnnnnnnnnnnnnnnnnnnnnnnnnnnnnnnnnnnnnnnnnnnnnnnnnnnnnnnnnnnnnnnnnnnnnnnnnnnnnnnnnnnnnnnnnnnnnnnnnnnnnnnnnnnnnnnnnnnnnnnnnnnnnnnnnngaatatccctgggcaccttggactgagccctttgaagaatactcataattttattttgtgaatgagtagactggaaaatgtttgggtccagctgaggatgcacagttggaaagcaggaggaatgctgactggttgatgaaaactagcttaagagcattcatttgacccatgagatcaagggaacaagagtatttgcaagaagccattatgagtcatggaaaacaagatgatgaaacccatggaaacagcaagagaattcctactctttctcttcttaaaaaaatctatcacatacagcacagaatggagtcaagattttaattttgaggaaccaaaaaaaaggatcaaatatgaaaacccttttattgggccacattgtaggtgctgattcgataattttttcctatgcagatagattatttctattttgtagattatttaagagggtctggttgtttgtttatacgtttgtttgcatttatgaattttgctgcnnnnnnnnnnnnnnnnnnnnnnnnnnnnnnnnnnnnnnnnnnnnnnnnnnnnnnnnnnnnnnnnnnnnnnnnnnnnnnnnnnnnnnnnnnnnnnnnnnnnnnnnnnnnnnnnnnnnnnnnnnnnnnnnnnnnnnnnnnnnnnnnnnnnnnnnnnnnnnnnnnnnnnnnnnnnnnnnnnnnnnnnnnnnnnnnnnnnnnnnnnnnnnnnnnnnnnnnnnnnnnnnnnnnnnnnnnnnnnnnnnnnnnnnnnnnnnnnnnnnnnnnnnnnnnnnnnnnnnnnnnnnnnnnnnnnnnnnnnnnnnnnnnnnnnnnnnnnnnnnnnnnnnnnnnnnnnnnnnnnnnnnnnnnnnnnnnnnnnnnnaccccgtctctactaaaaatacaaaaaattaaccaggtgtggtggtgcacacctgtagtcccagctactcaggaggctgagg

SEQ ID NO: 22852 - DNA, 985 bp, Macaca Mulatta
  misc_feature (1)...(985): n = A,T,C or G
agggttaatttcagcttcaggtgtccctgggctcccctcccaccctatcccaatgcctcaaagcccaacaaggaaccatgtttccagtcacagcactcaatagttgccatgcagagtaactctccatcccaggnnnnnnnnnnnnnnnnnnnnnnnnnnnnnnnnnnnnnnnnnnnnnnnnnnnnnnnnnttttattcagtaatcagaataccatggctacaatggcgtctccaaagcaaccaccaccaaacatgatattcaacccaaatcaaaatccaatggctaatcaggagcaacagaaccagtcaatttttcaccaacaaagtaatatggccccaatgaatcaagagcaacagcccatgcaatttcagagtcagtccacagtttcctcacttcagaacccaggtcctacccagtcggaatcatcacagacccccttgttccatagctctcctcagattcagttggtacaagggtcacctagttctcaagagcagcaagtaacactcttcttatctccagcatccatgtctgccttgcagaccagtataaatcaacaagatatgcaacagtctcctctttattcccctcagaacaacatgcctggaattcaaggagcctcatcttcgcctcaaccacaggctactttatttcacaacacagcaggaggcacaatgaaccaactacagaattctcctggctcatctcagcagacatcaggaatgttcttatttggcattcaaaatanactgtagtcagcttttaacctctggaccagctacattgcctgatcagttgatggccataagtcagccaggccaaccacaaaatgagggccagccacctgtgacaacacttctttctcagcaaatgccagagaattctccactggcatcctctataaacaccaaccagaacatcgaaaagattgatttgcttgtttcgttgcaaaaccaagggaacaacttgactggctccttttaa

SEQ ID NO: 22853 - DNA, 2253 bp, Macaca Mulatta
  misc_feature (1)...(2253): n = A,T,C or G
acaagcagtcagatccagagaatccagacaacgaccgatttgtcctcgcaaannnnnnnnnnnnnnnnnnnnnnnnnnnnnnnnnnnnnnnnnnnnnnnnnnnnnnnnnnnnnnnnnnnnnnnnnnnnnnnnnnnnnnnnnnnnnnnnnnnnnnnnnnnnnnnnnnnnnnnnnnnnnnnnnnnnnnnnnnnnnnnnnnnnnnnnnnnnnnnnnnnnnnnnnnnnnnnnnnnnnnnnnnnnnnnnnnnnnnnnnnnnnnnnnnnnnnnnnnnnnnnnnnnnnnnnnnnnnnnnnnnnnnnnnnnnnnnnnnnnnnnnnnnnnnnnnnnnnnnnnnnnnnnnnnnnnnnnnnnnnnnnnnnnnnnnnnnnnnnnnnnnnnnnnnnnnnnnnnnnnnnnnnnnnnnnnnnnnnnnnnnnnnnnnnnnnnnnnnnnnnnnnnnnnnnnnnnnnnnnnnnnnnnnnnnnnnnnnnnnnnnnnnnnnnnnnnnnnnnnnnnnnnnnnnnnnnnnnnnnnnnnnnnnnnnnnnnnnnnnnnnnnnnnnnnnnnnnnnnnnnnnnnnnnnnnnnnnnnnnnnnnnnnnnnnnnnnnnnnnnnnnnnnnnnnnnnnnnnnnnnnnnnnnnnnnnnnnnnnnnnnnnnnnnnnnnnnnnnnnnnnnnnnnnnnnnnnnnnnnnnnnnnnnnnnnnnnnnnnnnnnnnnnnnnnnnnnnnnnnnnnnnnnnnnnnnnnnnnnnnnnnnnnnnnnnnnnnnnnnnnnnnnnnnnnnnnnnnnnnnnnnnnnnnnnnnnnnnnnnnnnnnnnnnnnnnnnnnnnnnnnnnnnnnnnnnnnnnnnnnnnnnnnnnnnnnnnnnnnnnnnnnnnnnnnnnnnnnnnnnnnnnnnnnnnnnnnnnnnnnnnnnnnnnnnnnnnnnnnnnnnnnnnnnnnnnnnnnnnnnnnnnnnnnnnnnnnnnnnnnnnnnnnnnnnnnnnnnnnnnnnnnnnnnnnnnnnnnnnnnnnnnnnnnnnnnnnnnnnnnnnnnnnnnnnnnnnnnnnnnnnnnnnnnnnnnnnnnnnnnnnnnnnnnnnnnnnnnnnnnnnnnnnnnnnnnnnnnnnnnnnnnnnnnnnnnnnnnnnnnnnnnnnnnnnnnnnnnnnnnnnnnnnnnnnnnnnnnnnnnnnnnnnnnnnnnnnnnnnnnnnnnnnnnnnnnnnnnnnnnnnnnnnnnnnnnnnnnnnnnnnnnnnnnnnnnnnnnnnnnnnnnnnnnnnnnnnnnnnnnnnnnnnnnnnnnnnnnnnnnnnnnnnnnnnnnnnnnnnnnnnnnnnnnnnnnnnnnnnnnnnnnnnnnnnnnnnnnnnnnnnnnnnnnnnnnnnnnnnnnnnnnnnnnnnnnnnnnnnnnnnnnnnnnnnnnnnnnnnnnnnnnnnnnnnnnnnnnnnnnnnnnnnnnnnnnnnnnnnnnnnnnnnnnnnnnnnnnnnnnnnnnnnnnnnnnnnnnnnnnnnnnnnnnnnnnnnnnnnnnnnnnnnnnnnnnnnnnnnnnnnnnnnnnnnnnnnnnnnnnnnnnnnnnnnnnnnnnnnnnnnnnnnnnnnnnnnnnnnnnnnnnnnnnnnnnnnnnnnnnnnnnnnnnnnnnnnnnnnnnnnnnnnnnnnnnnnnnnnnnnnnnnnnnnnnnnnnnnnnnnnnnnnnnnnnnnnnnnnnnnnnnnnnnnnnnnnnnnnnnnnnnnnnnnnnnnnnnnnnnnnnnnnnnnnnnnnnnnnnnnnnnnnnnnnnnnnnnnnnnnnnnnnnnnnnnnnnnnnnnnnnnnnnnnnnnnnnnnnnnnnnnnnnnnnnnnnnnnnnnnnnnnnnnnnnnnnnnnnnnnnnnnnnnnnnnnnnnnnnnnnnnnnnnnnnnnnnnnnnnnnnnnnnnnnnnnnnnnnnnnnnnnnnnnnnnnnnnnnnnnnnnnnnnnnnnnnnnnnnnnnnnnnnnnnnnnnnnnnnnnnnnnnnnnnnnnnnnnnnnnnnnnnnnnnnnnnnnnnnnnnnnnnnnnnnnnnnnnnnnnnnnnnnnnnnnnnnnnnnnnnnnnnnnnnnnnnnnnnnnnnnnnnnnnnnnnnnnnnnnnnnngccatgccacctgtagccaccctggaattcccttcactgtttgccttaatctcccctccacagttgagaggctgtcaggcagcagcaaaagcttgttaggatgtcctgtactgcttgtgatgaaggtctccacactgtactgttcaagtcaatgttaataaagcatttcaaaacca

SEQ ID NO: 22854 - DNA, 642 bp, Macaca Mulatta
tcagtcctcctggagaatggcgtggactttgctgccgtggatgagaatggaaacaatgctctccatcttgctgtcatgcacggccggctcaacaacatccgggttctcctgacagagtgcacagtggacgccgaagcctttaatctcagaggccagtcaccactgcacattttgggacaatacggcaaggagaacgcggcggccatctttgatctcttcttagaatgcatgccggagtaccctctggacaagccggacgcagatggcagcacggtgctgctcttggcatacatgaaagggaatgccaacttgtgccgcgccatcgtccggtcgggggctcgcctcggggtgaataacaaccagggagtcaacattttcaactaccaggtcgccaccaagcagcttctgtttagacttctagatatgctgtccaaggagcctccatggtgcgacggctcctattgctatgagtgcactgccaagtttggagtcacaactcgcaaacatcactgtcgtcactgcggacgtcttctttgccataaatgctcgaccaaggagattcctattataaagttcgatctgaacaggcctgtacgagtttgcaacatttgttttgatgtactgactctgggtggggtctct

SEQ ID NO: 22855 - DNA, 355 bp, Macaca Mulatta
aatcagatcccgctctgtattttgattttaggatcaaagtacccctcacagtggatgagattgccagcttcggggagggtagcagggagctgtttgtgcggtccagcacctacagcctgatccccatcactgtggccgaagcaggcctcaccatcagctgggtcttctcctctgaccccaagagcatctccttcagcgtggtcttccaggaggctgaggacacaccgctggatcagtgtaaggtaaggctgggctccctgcctgtgggctccttacacacacatctgggtacttgggcaggcctttcccaaagcagggcagtggccatcctaccctctgctgggcaggcttcacc

SEQ ID NO: 22856 - DNA, 534 bp, Macaca Mulatta
atagtggatggaaatggaagtgggtatacctggtcactgctgtgggcctggctttccctcctgtgggtctgaacacctttgccagagacaaggcaaagtcccccaaaggcaatgcccaatggcctctccctgtatctcctacccccctgcagctactgtcaactggagaccgtctttagcatctacgtgtatggagcgttccctgtgcagctggtctctgccggggttgtcatggtactgctcatctccagcatcctggggtccgtgtggctggcctacatgatccccaggctgctacgcacagcacgtggccgcaggatgacgagctttgtggcacagctgtatgggagatgcaagacagtctgccagttcagggcctcggccacagccaggacaggctcaaagcccatgggacgccaccgcagttcttaacggaggcaggtctgaccactgaggccggtccacagggtcccgaccccttgtcttcaaataaagtatagtgtaacatagcaggaagtggtatttattcaccat

SEQ ID NO: 22857 - DNA, 1512 bp, Macaca Mulatta
  misc_feature (1)...(1512): n = A,T,C or G
gcggagctgcccaagccctacatcaccagcaacannnnnnnnnnnnnnnnnnnnnnnnnnnnnnnnnnnnnnnnnnnnnnnnnnnnnnnnnnnnnnnnnnnnnnnnnnnnnnnnnnnnnnnnnnnnnnnnnnnnnnnnnnnnnnnnnnnnnnnnnnnnnnnnnnnnnnnnnnnnnnnnnnnnnnnnnnnnnnnnnnnnnnnnnnnnnnnnnnnnnnnnnnnnnnnnnnnnnnnnnnnnnnnnnnnnnnnnnnnnnnnnnnnnnnnnnnnnnnnnnnnnnnnnnnnnnnnnnnnnnnnnnnnnnnnnnnnnnnnnnnnnnnnnnnnnnnnnnnnnnnnnnnnnnnnnnnnnnnnnnnnnnnnnnnnnnnnnnnnnnnnnnnnnnnnnnnnnnnnnnnnnnnnnnnnnnnnnnnnnnnnnnnnnnnnnnnnnnnnnnnnnnnnnnnnnnnnnnnnnnnnnnnnnnnnnnnnnnnnnnnnnnnnnnnnnnnnnnnnnnnnnnnnnnnnnnnnnnnnnnnnnnnnnnnnnnnnnnnnnnnnnnnnnnnnnnnnnnnnnnnnnnnnnnnnnnnnnnnnnnnnnnnnnnnnnnnnnnnnnnnnnnnnnnnnnnnnnnnnnnnnnnnnnnnnnnnnnnnnnnnnnnnnnnnnnnnnnnnnnnnnnnnnnnnnnnnnnnnnnnnnnnnnnnnnnnnnnnnnnnnnnnnnnnnnnnnnnnnnnnnnnnnnnnnnnnnnnnnnnnnnnnnnnnnnnnnnnnnnnnnnnnnnnnnnnnnnnnnnnnnnnnnnnnnnnnnnnnnnnnnnnnnnnnnnnnnnnnnnnnnnnnnnnnnnnnnnnnnnnnnnnnnnnnnnnnnnnnnnnnnnnnnnnnnnnnnnnnnnnnnnnnnnnnnnnnnnnnnnnnnnnnnnnnnnnnnnnnnnnnnnnnnnnnnnnnnnnnnnnnnnnnnnnnnnnnnnnnnnnnnnnnnnnnnnnnnnnnnnnnnnnnnnnnnnnnnnnnnnnnnnnnnnnnnnnnnnnnnnnnnnnnnnnnnnnnnnnnnnnnnnnnnnnnnnnnnnnnnnnnnnnnnnnnnnnnnnnnnnnnnnnnnnnnnnnnnnnnnnnnnnnnnnnnnnnnnnnnnnnnnnnnnnnnnnnnnnnnnnnnnnnnnnnnnnnnnnnnnnnnnnnnnnnnnnnnnnnnnnnnnnnnnnnnnnnnnnnnnnnnnnnnnnnnnnnnnnnnnnnnnnnnnnnnnnnnnnnnnnnnnnnnnnnnnnnnnnnnnnnnnnnnnnnnnnnnnnnnnnnnnnnnnnnnnnnnnnnnnnnnnnnnnnnnnnnnnnnnnnnnnnnnnnnnnnnnnnnnnnnnnnnnnnnnnnnnnnnnnnnnnnnnnnnnnnnnnnnnnnnnnnnagacttgtcttaccgttcgggagcaaacctcaacctctcctgccactcggactctaacccatccccgcagtattcttggcttatcaatgggacagtgcgacaacacacacaagttctctttatctccaaaatca

SEQ ID NO: 22858 - DNA, 140 bp, Macaca Mulatta
cagcagtggctgggccagctggagcacatgccagcagaagtggccagaatccttgacatctccagggcagtaacacagctcagcagcctggtcattgatctggagaggacggccaaggaattagacaccaacacacagaa

SEQ ID NO: 22859 - DNA, 466 bp, Macaca Mulatta
ctccctggcacagacggagacccgagtgaccccggggtccgggtgggagtggggaatggacccacaggcccgggacgagcggcgcggagcccgcagctggccagcttcagcccccttgggagacgcagtgcagctgccgctgctgacagactagaccaaggctcagcggggccccaccccagatccggccagagcgccttccgcgctgcttggcctcaaggcgtgagtcaccaagggcctcaagtcccgtgacttggttctcagggtctccggcctcgggcccattaatcttcagacctggctttttcgacgccgagctgccgcccagccccaacgggagggccttccagggagaccaagtcggactgctccccaactcccgcagctgctcggcccctgcaaagcccccgggagcgtttctactctcccttgagcccatgccactcccctgtcactcctaggaaac

SEQ ID NO: 22860 - DNA, 959 bp, Macaca Mulatta
gtgaaatgaaaatatgcccttgccatttctgaacaaaagaaaactgaattgtaaagataaatcccttttgaagaatgacttcacacttctactgtaggtagatcctcaaatgaatagagttgaagtcaaaggacctttctgacataatcaagcaatttagacttaagtggtgctttgtggtatctgaacaattcataacatgtaaataatgtgggaaaatagtattgtttagctcccagagaaacgtttgttccatagttaacacactcgtagtattactgtatttatgcactttttcatctaaaacattgtttcaggtattcccagtgtaccttaccataattcctttgggagttcttgtttgttgtcacactactttatataacaatactaagtcaactaagctacttttagatttggaaattgctgtttaaactacagtctaacaacattaaaatgagaggtagattcacaagttaactttctaactgaagcttcaggtgataaccattagcttatacttggactcatcatttgttgccttccaaaatgctgaggataatgtatgtactggtgtcaggacctagttctctggttaatgtatgtttagtttttaatggtggaactttgttatattttgttaattacagtgtttttggttcattgagtgaagattccgccgggtgggatcttgcacctttgaaagactgaataattacactaccaaggaagcctgcaaatcattgatggcatgcagtgatgatgtgctcttacacttgttaacatgtattaagtgttatttgcaaaaggtagattatgtaactaatcaggtacgtaccaggcagtgatgtgctaatacactgatcaggtttagacaatgagctttggttgtgttcttgttagtcctaatattggttttcagtttggaattaataaagccagttgacattcactgttag

SEQ ID NO: 22861 - DNA, 621 bp, Macaca Mulatta
  misc_feature (1)...(621): n = A,T,C or G
gggggctggggtctgagtctgcggttcttgcctgggcagtcttgacctggggcaaaccccggcttcagagggcagacaaagcaggtggcatgaattgatcagcgagaaaggtatgagccgaggcagttcctgcgttctgctacaaaaggaatggaaagggaagagaattttcccccaccgtgggctgtgggagagttgaccgtattgtggacaaaactccgtgaccgctctgattctgcagtgtacagctgtttgagagcttcatcattttacttttgaaacaggaatgatttctccttaattgcttaggccggggagcaaagtgtcttaacttctgtccttgactttcccagcgttgggtcatcaacactttgccattagctgatggtccttggcaacctcggaaacccctgaagttttaaaaactttctcgttccccccacccccagaatgaaaccgcttttaaaaaacccttaagcaaaggatgttatttcttaaatttggtttnnnnnnnnnnnnnnnnnnattgnnnnnnnnnnnnnnnnnnnaattcccaaaccggggaatcatatggcaaaaaaccnnnnnnnnnnnnnnnnnnnnnnnnnncttaaaaataaa

SEQ ID NO: 22862 - DNA, 181 bp, Macaca Mulatta
gggaccaattcattccttgacattttctcccaatgggagattcctggctacaggagcaacagatggcagagtacttctttgggatattggacatggtttgatggttggagaattaaaaggccacactgatacagtctgttcacttaggtttagtagagatggtgaaattttggcatcaggt

SEQ ID NO: 22863 - DNA, 441 bp, Macaca Mulatta
  misc_feature (1)...(441): n = A,T,C or G
agccccaatgtggagtgcaaaagccttaggttcggcatgttgaaggaccatcaagctgtcaccggcaacgtcactgcgtttgatggatctattctctatctgcctgttaagcttcaacaagtnnnnnnntaaaaagtcaaaggaaaacagacactgtttgaaatcagcattaaggttcagatgacaaagatcctgccattcttgctctgacctgtgcattcccttctacaatgttgttttccgtcggnnnnnnnnnnnnnnnnnnnnnnnnnnnnnnnnnnnnnnnnnnnnnnnnnnnnnnnnnnnnnnnnnnnnnnnnnnnnncagattgcagatctggccaggctacgcggctagcatccgaaggacagatggagggctcttcctgctagctgatgtctcccataaggtcattcgaaatgactctgtgctggatgtcat

SEQ ID NO: 22864 - DNA, 120 bp, Macaca Mulatta
agttcctgagtgggtgaacaccccatccacctgctgcctgaagttttatgagaaagtgttgccaaggagactagtggtgggatacagaaaggccctcaactgtaacctgccagcaatcat

SEQ ID NO: 22865 - DNA, 3136 bp, Macaca Mulatta
  misc_feature (1)...(3136): n = A,T,C or G
acaatcatgaaaattactatcgcccacagctctcagaatgtgaaagtattgaggaagccaaacctaactctgaactgtgttgcaagccattgtgccttatgctggcagatgagtctgaccacgagacactgactgccatcctgagccctctcattgctgagagggaggccatgaagagcagtgaattaatgcttgagctgggaggcattctacggactttcaagtttatcttcaggggtaccggatatgatgaaaaacttgtgcgggaagtggaaggccttgaggcttctggctcagtctacatttgtactctttgtgatgccacccgtctggaagcctctcaaaatcttgtcttccactctataaccagaagccatgctgagaacctggaacgttatgaggtctggcgttccaatccttaccatgagtctgtggaagaactgcgggatcgggtgaaaggggtctcagccaaacctttcattgagacagtcccttccatagacgcactccactgtgacattggcaatgcagctgagttctacaagatcttccagctagagataggggaggtgtataagaatcccaatgcttccaaagaggaaaggaaaaggtggcaggccacactggacaagcatctccggaagaagatgaacctcaaaccaatcatgaggatgaatggcaactttgccaggaagctcatgaccaaagagactgtggatgcagtttgtgagttaattccttcggaggagaggcacgaggctctgagggagctgatggatctttacctgaagatgaaaccggtgtggcggtcatcatgccctgctaaagagtgcccagaatccctctgccagtacagtttcaattcacagcgttttgctgagctcctttctaccaagttcaagtataggtatgagggaaaaatcaccaannnnnnnnnnnnnnnnnnnnnnnnnnnnnnnnnnnnnnnnnnnnnnnnnnnnnnnnnnnnnnnnnnnnnnnnnnnnnnnnnnnnnnnnnnnnnnnnnnnnnnnnnnnnnnnnnnnnnnnnnnnnnnnnnnnnnnnnnnnnnnnnnnnnnnnnnnnnnnnnnnnnnnnnnnnnnnnnnnnnnnnnnnnnnnnnnnnnnnnnnnnnnnnnnnnnnnnnnnnnnnnnnnnnnnnnnnnnnnnnnnnnnnnnnnnnnnnnnnnnnnnnnnnnnnnnnnnnnnnnnnnnnnnnnnnnnnnnnnnnnnnnnnnnnnnnnnnnnnnnnnnnnnnnnnnnnnnnnnnnnnnnnnnnnnnnnnnnnnnnnnnnnnnnnnnnnnnnnnnnnnnnnnnnnnnnnnnnnnnnnnnnnnnnnnnnnnnnnnnnnnnnnnnnnnnnnnnnnnnnnnnnnnnnnnnnnnnnnnnnnnnnnnnnnnnnnnnnnnnnnnnnnnnnnnnnnnnnnnnnnnnnnnnnnnnnnnnnnnnnnnnnnnnnnnnnnnnnnnnnnnnnnnnnnnnnnnnnnnnnnnnnnnnnnnnnnnnnnnnnnnnnnnnnnnnnnnnnnnnnnnnnnnnnnnnnnnnnnnnnnnnnnnnnnnnnnnnnnnnnnnnnnnnnnnnnnnnnnnnnnnnnnnnnnnnnnnnnnnnnnnnnnnnnnnnnnnnnnnnnnnnnnnnnnnnnnnnnnnnnnnnnnnnnnnnnnnnnnnnnnnnnnnnnnnnnnnnnnnnnnnnnnnnnnnnnnnnnnnnnnnnnnnnnnnnnnnnnnnnnnnnnnnnnnnnnnnnnnnnnnnnnnnnnnnnnnnnnnnnnnnnnnnnnnnnnnnnnnnnnnnnnnnnnnnnnnnnnnnnnnnnnnnnnnnnnnnnnnnnnnnnnnnnnnnnnnnnnnnnnnnnnnnnnnnnnnnnnnnnnnnnnnnnnnnnnnnnnnnnnnnnnnnnnnnnnnnnnnnnnnnnnnnnnnnnnnnnnnnnnnnnnnnnnnnnnnnnnnnnnnnnnnnnnnnnnnnnnnnnnnnnnnnnnnnnnnnnnnnnnnnnnnnnnnnnnnnnnnnnnnnnnnnnnnnnnnnnnnnnnnnnnnnnnnnnnnnnnnnnnnnnnnnnnnnnnnnnnnnnnnnnnnnnnnnnnnnnnnnnnnnnnnnnnnnnnnnnnnnnnnnnnnnnnnnnnnnnnnnnnnnnnnnnnnnnnnnnnnnnnnnnnnnnnnnnnnnnnnnnnnnnnnnnnnnnnnnnnnnnnnnnnnnnnnnnnnnnnnnnnnnnnnnnnnnnnnnnnnnnnnnnnnnnnnnnnnnnnnnnnnnnnnnnnnnnnnnnnnnnnnnnnnnnnnnnnnnnnnnnnnnnnnnnnnnnnnnnnnnnnnnnnnnnnnnnnnnnnnnnnnnnnnnnnnnnnnnnnnnnnnnnnnnnnnnnnnnnnnnnnnnnnnnnnnnnnnnnnnnnnnnnnnnnnnnnnnnnnnnnnnnnnnnnnnnnnngaatgttttcacactcatttttccttacaacaattctgaggagtaggtgttgttattatctccatttgatggaggtttaaatgatttgctgaaagttatttaggggtaataaatacttggcttggaaattgaacacagcccttttgtctccaaagcccttcttctttccaccacaaattaatcactatgtttataaggtaatatcagaatttgtttaggattcacaacaaatcactatagcacatgaccttgggattacatttttatggggcaggagtaagcaagtttttaagtcatttgtgtgctctggcccttttgctagaagaaagcaacacaaaagctccaaagagcaccctaatcctcttgtggctccagttatttggcaactattatctgcatccttaggaatttgggatttgccggttgctggcaatgtagagcaggcatggaattttatatgctagtgagtcataatgatatgttagtgttaattagtttttttcttcctttgattttattggccataattgctactcttcatacacagtatatcaaagagcttgataatttagttgtcaaaagtgcatcagtgacattatcctaaatggtatgcatttggtgcttctgcaggaattcaactcagtatctttcattaacaaatacagcagttttccttgctttttatatgcagaatatcaaagtcacttctacttta

SEQ ID NO: 22866 - DNA, 201 bp, Macaca Mulatta
  misc_feature (1)...(201): n = A,T,C or G
tgggccccactcttaacagaatcagctactgcaaagacattccaagctttgtcattcaaatggacttctctgcagacagcagatatctccaggtnaggtctctagtggctgctataaacggcatgtctacgaagtgccttcaggaaaacatcttatggatcatgccgctattgacagaattacttgggctacatggactag

SEQ ID NO: 22867 - DNA, 339 bp, Macaca Mulatta
aggccttcccttcgatatagtccaggatttgaaagggatgaagacccctgagctctattctattggggtccatacatattctccgaagatagcaacttgcttcaggtcaaagtgaacccaagaaaagagaagaatcactcactactgctcttgccctggactattcaggaagggcagcccggatgttccatgttaaatcgtgacagaactgcaccaaacctgatgagttggaaacaatcctatacattaaaagaaattacactatgaggctgtgttcttaatggactgctgaatcagtgccacaggtgttcttgggagaagaaagatacctgtagacta

SEQ ID NO: 22868 - DNA, 558 bp, Macaca Mulatta
gatgaccctcattggtggttccactacctccgcagccagcagtccacctactacgatccctatgacccttacccatatgagacctacgagccttacccctatggggtggacgaagggccagcatacacctatggctctccatcccctccagatccccgcgactgcccccaggagtgcgactgcccacccaacttccccacagccatgtactgtgacaatcgcaacctcaagtatctgcccttcgttccctcccgcatgaagtatgtgtaaatccagaacaaccagatcacctccatccaggaaggtgtctttgacaatgccacagggctgctctggattgctctccatggcaaccagatcaccagtgataaggtgggcaagaaggtcttctccaagctgaggcacctggagaggctgtacctggaccacaacaacctgacccggatgcctggtcccctgcctcgatccctgagagagctccatctcgaccataaccagatctcacgggtccctaacaacgctctggaggggctggagaacctcacagccttgtacctc

SEQ ID NO: 22869 - DNA, 587 bp, Macaca Mulatta
ccctggctcccgatggccgcacgtttgtgtcaggcgcctgtgatgcttctatcaagctgtgggacgtacgggattccatgtgccgacagaccttcatcggccacgaatccgacatcaatgcggtggctttcttccccaacggctatgccttcaccaccggctctgatgacgccacgtgccgcctcttcgacctgcgggccgatcaggagctcctcatgtactcccatgacaacatcatctgtggcatcacctctgttgccttctcgcgcagcggccggctgctgctcgctggctacgacgacttcaactgcaacatctgggatgccatgaagggcgaccgtgcaggggtcctcgctggccacgacaaccgtgtgagctgccttggggtcaccgacgatggcatggctgtggccactggctcctgggactccttcctcaagatctggaactaacggccccacccctgctgggcccaggccgggaggggccctgcccaacgcccacactacaggccagggctgaggggctgggcgcactcccagcccccttccctgggccacggggccttgggtccctgccctcccacc

SEQ ID NO: 22870 - DNA, 753 bp, Macaca Mulatta
  misc_feature (1)...(753): n = A,T,C or G
gggaaaaaatggtattttgaaaaacggcctgatctgtgacttcaagtttggaccttggaagaacagcactttcaaacccacaactgagaatgatgacacagagacaagtagcagtgacacatcagatgatgacgatgtgtgaaggatttcctaacagctttagaaatcttagtgtgatacatctctcatacagtttggggtgaattgtaaaaatgaagaactataatttatgtagtgaaataccccatttagaagaggattttttgggggacttcaatacgaagaaaaccaagaatgttttgttgggctgtgttgaacattatttctttgtaaatgaatgttgtaggaatgaagacttgggttggtccaacattgactttcttcatcactgcaacatttctctgactagcaatgtgacgatgtaacaaatgagattttctcatttaataataaaaaattgtgtaatgttttgcaaagcttctgtcttaaaatgtccaggtcttaagaaaaaaaggcagcttacactgttttgcttgcagagtcatatctttttcgtacaatggaaatccttaagtccactttgtgcggtccccctctccnnnnnnnnnnnnnnnnnnnnnnnnnnnnnnnnngggaaaatggtagcatgggttggctaaaaacttgggagccaaaagtgccacctaanaaacaatttttcccctgaaacctcagnncctgttgntaaactaattccacacctttttttaaaac

SEQ ID NO: 22871 - DNA, 820 bp, Macaca Mulatta
ttacctggacaagaggataagacgttgtcttgaggcccagtgatggagtgaaggagacacgatcttcctttaagatagagagatgttgcaatgcttgctaggatagctcacatcttcaaagtcctttcccctaagggtttggcgttgttctccagaccagaatagatcaacagctcagtgatccagcactcacagtgacttgagtaccctcagtgctctttttggggatgcatgagaccttttgtagtcaaaggttcccagtgacgtcactaacacagattatgtttacctcctgtaattccatcaaacgcccttcctgtttgtgcagtgaaagactgaactacttatttggctttgaattaaaaggaaagatcttgtggatcacacatttttcaaagattctgtttgcttgatgtcggtaagatttgatcccttatagataagcataaatgatgaaattttgatattaaatatccttttcaagccctatcaacttctccagaattggggcttattttttgactgacatacctgttaaacctagagaaagtcgtgactgtgattttttggtttacaggtaactgcacaagagaatgcaatggatacaatttccaggctgcgctgtggacttcttccagcaggtttgaagatttggatattgtaaactgtgagatcagtggcatttttaaaatccttaaatgtaattaagatcataaaaacatgcatcattcatacgctagtggggtggttttatttgtgtctgcctaagttatctttttaaaagtcctttatttctgattttcatgtttgtgtgcatttg

SEQ ID NO: 22872 - DNA, 630 bp, Macaca Mulatta
gcttctaggtggcactgtttgccttaataccctgacagttcatcttcctttcttcctgctaaccttctgccctggactggactcacttttctgctccagggattccttttctgggtctgggtcttgcccttcccaagggactgttcttgtggcccttaatgggaagggggcaggggtgaggaactgagcctgctcaaggagtgggaagtggggctataggcagcctctctgatgcactctcttccatctctttccccaaggctccgtgactgtcaaactgggagtaggagaggggacaatttaggactgggttagattttcagaagaacatctacaatatcctatttatagatcttcctctgggaaaaggagtggtttctggctgaatactatcttaggctcaaggagaaacgaaataaaaattagcttccaggcagcctgtttttaaagaaatgggactaatgggagaagctgtttgtcactctaagagcatccaaggcctggccctcttctgtgcactcttggctcctggggagatatatctgccttctaagaaggcaggccaggtcttgggcacagacctgcatttgttgaccttatactccaactacagtgccttgcaagtgctca

SEQ ID NO: 22873 - DNA, 1827 bp, Macaca Mulatta
  misc_feature (1)...(1827): n = A,T,C or G
gaccactgagacgagcgggagcgcggagcagcagcttctgctgccctgactttttaagaaaatctcaatgaactatttgtagagaatcactgatccggcctgcaagcattttgcacggcaaaaatatcgatcagtgttaagtgaagatcacattttatatgcgatcttgacttttttgtcttacattatattcttatagattttgttataaacatggtgctgggaaaggtgaagagtttgacaataagctttgactgtcttaatgacagcaatgtccctgtgtattctagtggggatactgtctcaggaagggtaaatttagaagttactggggaaatcagagtaaaatctcttaaaattcatgcaagagggcatgcgaaagtacgctggactgaatctagaaacgccggctccaatactgcctatacacagaattacactgaagaagtagaatatttcaaccataaagacatcttaattgggcacgaaagagnnnnnnnnnnnnnnnnnnnnnnnnnnnnnnnnnnnnnnnnnnnnnnnnnnnnnnnnnnnnnnnnnnnnnnnnnnnnnnnnnnnnnnnnnnnnnnnnnnnnnnnnnnnnnnnnnnnnnnnnnnnnnnnnnnnnnnnnnnnnnnnnnnnnnnnnnnnnnnnnnnnnnnnnnnnnnnnnnnnnnnnnnnnnnnnnnnnnnnnnnnnnnnnnnnnnnnnnnnnnnnnnnnnnnnnnnnnnnnnnnnnnnnnnnnnnnnnnnnnnnnnnnnnnnnnnnnnnnnnnnnnnnnnnnnnnnnnnnnnnnnnnnnnnnnnnnnnnnnnnnnnnnnnnnnnnnnnnnnnnnnnnnnnnnnnnnnnnnnnnnnnnnnnnnnnnnnnnnnnnnnnnnnnnnnnnnnnnnnnnnnnnnnnnnnnnnnnnnnnnnnnnnnnnnnnnnnnnnnnnnnnnnnnnnnnnnnnnnnnnnnnnnnnnnnnnnnnnnnnnnnnnnnnnnnnnnnnnnnnnnnnnnnnnnnnnnnnnnnnnnnnnnnnnnnnnnnnnnnnnnnnnnnnnnnnnnnnnnnnnnnnnnnnnnnnnnnnnnnnnnnnnnnnnnnnnnnnnnnnnnnnnnnnnnnnnnnnnnnnnnnnnnnnnnnnnnnnnnnnnnnnnnnnnnnnnnnnnnnnnnnnnnnnnnnnnnnnnnnnnnnnnnnnnnnnnnnnnnnnnnnnnnnnnnnnnnnnnnnnnnnnnnnnnnnnnnnnnnnnnnnnnnnnnnnnnnnnnnnnnnnnnnnnnnnnnnnnnnnnnnnnnnnnnnnnnnnnnnnnnnnnnnnnnnnnnnnnnnnnnnnnnnnnnnnnnnnnnnnnnnnnnnnnnnnnnnnnnnnnnnnnnnnnnnnnnnnnnnnnnnnnnnnnnnnnnnnnnnnnnnnnnnnagattgatccaaatcctgatcagtcagcagatgacagaccatcctgtccctctcgttgaaggaacacttggttgaatcaagttgatgtgggttctgaactgtatctcttccggctgaggacagagaagtatcttggagacacgtttcagaggaagtggaattgcttttgcccagaaaaatggcgaatacatgaaacaaccagtgatcatgctttagaagcctacagcaacattctgggactgctccaacatgcttgaagatctaagcttttctcttttaaaactggcacatactcagagcagtcttcttagcctatggtcgtacgtgtcaagacaccacgttttcaagagggatgatctccttcttttgatttgaaaatttgcacatgctcaatgcttacattgtgcggttcgatgtcactacagctt

SEQ ID NO: 22874 - DNA, 607 bp, Macaca Mulatta
  misc_feature (1)...(607): n = A,T,C or G
ggagattccaggctgctgaccgttcagagttgataaagaccacagaaaacatagatgtgtcaatggacatgaagccttcctggaccaccagagatgtggcacttacggtgcaccgggctttcagnnnnnnnnnnnnnnnnnnnnnnnnnnnnnnnnnnnnnnnnnnnnnnnnnnnnnnnnnnnnnnnnnnnnnnnnnnnnnnnnnnnnnnnnnnnnnnnnnnnnnnnnnnnnnnnnnnnnnnnnnnnnnnnnnnnnnnnnnnnnnnnnnnnnnnnnnnnnnnnnnnnnnnnnnnnnnnnnnnnnnnnnnnnnnnnnnnnnnnnnnnnnnnnnnnnnnnnnnnnnnnnnnnnnnnnnnnnnnnnnnnnnnnnnnnnnnnnnnnnnnnnnntgtactttactgctcttatactatctctgagtcagcaaatgacaagtgacagaatccacctttacacaccttcttctgttaatggtagcctctgnggaagcaggaattgaggaacagattctccagccatggattgtggtgaatctcgtggtggctctgctggttggattatcttggctatttttgtcttataggccaggcatggatcttagtgaagn

SEQ ID NO: 22875 - DNA, 605 bp, Macaca Mulatta
aacgtgaaacttacacagaggattattaaaaagcagattgaagagttcaacataggagagagacatttagccaacatgatgggagaagatccagagactttcactcaagaagatattgatagagctattgcttaccttttcccaagtggtttgtttgagaaacgagccaggccaataatgaagcatcctgaacagatttttccaagagacaaagagcaatccagtggggagaagatggccgtccatttcactatctcttctatactggcaaacagtcatactattcattaatgcatgatgtatatggaatgttactcaatttagaaaaacatcaaagtcagttgcaagccaaagatatgcttccagaaaaaactgaaaccagaaacctgattggcagcagatggctgattaaggaggaactagaagaaatgttagtggaaaacctgtcagatcaagattatgtgaaactcattcagctgctagaaaagttattgacatcgcggtgcggcgctgctgaggaagaatttgtgcagaggtttcgaagaaagatagctgttgcatcaaaaacacagctgattgaacctgtacagtatgacgagcaagga

SEQ ID NO: 22876 - DNA, 100 bp, Macaca Mulatta
tccagggcatcctgtacctgaaccaggaggtgcccaaggagttactggaattcctgagacttcggcacttccccacagatcccaaggctagcaactgggg

SEQ ID NO: 22877 - DNA, 766 bp, Macaca Mulatta
  misc_feature (1)...(766): n = A,T,C or G
gtccagctgcatctacggcacctgctgcctccggggcatgacctactccatcgggttcctgcgcttctgcaagcnnnnnnnnnnnnnnnnnnnnnnnnnnnnnnnnnnnnnnnnnnnnnnnnnnnnnnnnnnnnnnnnnnnnnnnnnnnnnnnnnnnnnnnnnnnnnnnnnnnnnnnnnnnnnnnnnnnnnnnnnnnnnnnnnnnnnnnnnnnnnnnnnnnnnnnnnnnnnnngttcctcttctacttcaccaccaccgttaatcctgcggcccttccagcctgtcctcaagttcctcaccatcaaagccgtcatcttcctgtcgttctggcaaggnagggctgctgctggccgtcctggagcggtgcggggtcatcccagaggtggagaccagcggtgggaacaggctgggggccggcacactggccgctggctaccagaactttatcatctgcgtggagatgctgtttgcctccgtggccctgcgctatgccttcccttgccaggtgtatgcagagaagnnnnnnnnnnnnnnnnnnnnnnnnnnnnnnnnnnnnnnnnnnnnnnnnnnnnnnnnnnnnnnnnnnnnnnnnnnnnnnnnnnnnnnnnnnnnnnnnnnnnnnnnnncccccgcctaccagcactacacgcagcaggccacgcaggaggcgcccaggcccggcacccaccccggcggcagctctggcaggggcaggaagagccggagcctggagaagcggatgctcatcccctcggaggacctgta

SEQ ID NO: 22878 - DNA, 509 bp, Macaca Mulatta
gcctggtcccgcctctcctgccccttgtgctgggcgctacctgctgcccagacacatccagagctggccggcgggtgcgcgggcgggcggcggcaccatgcagggaagctgccaggggcagtgggcagcgccgctctgtgccgcccacctggcgctgtgagactggcgctgccaccatgttccccagccctgcgctcacgcccacgcccttctcagtcaaagacatcctgaacctggagcagcagcagcgcagcctggccgccgccggagaactctctgcgcgcctggaggccaccctggcgccctcctcctgcatgctggccaccttcaagccagaggcctacgccgggcccgaggcggctgcgccgggcctcccagagctgcgcgcagagttgggccccgcgccttcacccgccaagtgtgcgtctgcctttcccgccgcccccgccttctatccgcgtgcctacagcgaccccgacccagccaaggaacctcgagccgaaaagaaa

SEQ ID NO: 22879 - DNA, 95 bp, Macaca Mulatta
agtgaaccatcggattgcaatgaagatgacttatttgaagacaaacaagagaatcgttacctggtggttccacctctagaaacaggactgaaagt

SEQ ID NO: 22880 - DNA, 818 bp, Macaca Mulatta
tctatatatttatttcacgacagagttgaatgtatggccttcaacatgatgcacatgcttttgtgtgaatgcagccaatgcattttcttacagtttacagaatgtgaagatgtttaatgttacagtgttgtcattgtttagaaatagttcttttgtattttgagggagagggtgggatggggctaagatgactatttccataatgttgacaaagatgactacctcaatggaaatgaggggtgtggccatccctactttttccacattttctcagcagactcacacatttgtctgtcagagagcaaattgccttttttagccacagaattgccagataaaagggcacactgtaaaggggcaaagtgttattaggagatttactaagcaaggttggtgagacggcaacagggcaggagatgaagattgagccatgtcctttccttggaaagcatgcaaattaagagagtagggcacagtgaccatatttaaggcaggtatccttccacctaacaagtcctaagggcagaaaaatttctgttctcacacattgctgccctgcttacccctgcaccaccatcactgtctaccactgtgaactttccatctaggcaaagtcctggcaatcagttgatccacaggactcgcctcccagctcccttggggcccccagctacctagtttccttacctggatctcctgaggcccaccttcctccttcccgctcccttacacatttgacttcctattggccctatggaaaaaccagctgagcagaatgccatattctgaagccaagtgcccactactgatttattctc

SEQ ID NO: 22881 - DNA, 239 bp, Macaca Mulatta
cagcctgtgactcatactggacatcagtccaccctgaatactggactaagcgtcacgtgtgggagtggctccagttctgctgtgatcagtacaagttggacatcaattgcatctccttctgccacttcaacatcagcggcctgcagctgtgcagcatgacgcaggaggagttcgtcgaggcagctggcctctgcggcgagtacctgtacttcatcctccagaacatccgcacacaaggt

SEQ ID NO: 22882 - DNA, 263 bp, Macaca Mulatta
caggagaccaactttgattttaaatgttctcaatccagattaaagacaaccaagtattcttctgagaaagtgataggagctcctcatgccaaaggttttgtgcaaagattccgagaggctgagtccttcacacaactttctgaagaaatccagatggcagttgtatggtacaggagcaaaaaactcaaggctcaggccatttttctgggtaacaaacttcttaaaagcaaccggcttaaacatctggaagctcaaggtactag

SEQ ID NO: 22883 - DNA, 761 bp, Macaca Mulatta
ggtagctatagaacccaagcaggtagtagcaaacagaaaagccatataaatcagaaagacatttttccagtagaagaaattcctcagattccttctgtaggaattcagaggacaagatttatggttataggagatttgaaaaggatatagagggaagaaaagagcactatagaaggtgggaaccaggttctgtgaggcattctacctcgccagcaagctcagactactcgtggaagtcagttgagaaatacaaaaaatatactcactctggatcacgtgatttcagtagacatgagcaaagataccgattaaatacaaatcaaggagaatatgaaagagaggacaattatggggaggatatcaaaacagaggttccagaagaagatgcactaagtagcaaagatcactcagaaagcagtgttaaaaaaaatttacctcagaatttactgaatatatttaatcagatagctgaatttgaaaaagtaaaaggaaataagtcaaaaaattaatacaccaaggatatcagcaccattacacaaaatgccattaagtttttgggtgttttagtcataacagttcagtgcagaaatctctgctcctaaattatttgtagagacactacaggaaaacaaaagggcttttaagctttttctcaaaatttttgttttcagtatgtagggtcccctttgtcacaagccctggtttttttaagaagtttttttaagggaataagggtttaatgggtacaggtaataatttac

SEQ ID NO: 22884 - DNA, 1430 bp, Macaca Mulatta
acatgaagcactgtcggtcgtacctcctggtggcagctcccagatgggtcctgtcccaggtgcagctgcaggagtcgggcccaggactggtgagcccttcggagaccctgtccctcacctgcgttgtctctggtgactctatcaccactacttcctactactggaactggatccgccaggccccaggaaagggactggagtggattgcctccatctcttctgataacagggccacctacaagccgtccctcaagagtcgcgtcactactggaagagacacgtccaagaaccggttctccctgaggctgaggtctgtgtccgccgcggacacggccgtctattactgtgcgcgatgtcgctcgaggagggttggcctcagtattacacaaagcattcccgttcctgatgcttttgatttctggggccaaggactcagggtcatcgtctcttcagcctccaccaagggcccatcggtcttccccctggcgccctcctccaggagcacctccgagagcacaggggccctgggctgcctggtcaaggactacttccctgaacccgtgaccgtgtcgtggaactcaggctccctgaccagcggcgtgcacaccttccaggctgtcctacagtcctcagggctctactccctcagcagcgtggtgaccgtgccctccagcagcttgggcacccagacctacgtctgcaacgtcgttcatgagcccagcaacaccaaggtggacaagacagttgggctcccatgtcgttccacgtgcccaccgtgcccagctgaactcctggggggaccatcagtcttcctcttccccccaaaacccaaggacaccctcatgatttcccggacccctgaggtcacgtgcgtggtggtagacgtgagccaggaagaacccgatgtcaagttcaactggtacgtggacggcgtggaggtgcacaatgcccagacgaagccacgggaggagcagttcaacagcacgtaccgcgtggtcagcgtcctcaccgtcacacaccaggactggctgaacggcaaggagtacacgtgcaaggtctccaacaaagccctcccggccccaaagcagaaaactgtctccaaaaccaaagggcagccccgagagccacaggtgtacaccctgcccccgccccggaaggagctgaccaagaaccaggtcagcctgacctgcctggtcaaaggcttctaccccagcgacatcgtcgtggagtgggcgagcaacgggcagccggagaacacctacaagaccacgccgcctgtgctggactccgacggctcctacttcctctacagcaagctcaccgtggacaagagcaggtggcagcaggggaacaccttctcatgctccgtgatgcatgaggctctgcacaaccactacacccagaagagcctctccctgtctccgggtaaa

SEQ ID NO: 22885 - DNA, 636 bp, Macaca Mulatta
gagaacgagatacgagacaggagatcaccatgagcgtccctgatatagcagcacacattttcacgtttccacttcaatcgttttgcggagaagtcttgcttcactcagacgaaatgagatatgatttcctagagatgtaaaaataagaatgaatgtggcaccccttcttccagatgtaatagaaagctttgccgtatcccaaggagggtgtttaagtgcgccttgtgttttaactgttttcaactgagcacaagatgcacaggctatgatgggaaaacctcagtttacttttggagtcttccctgcagatcgcagacctgtttccacgctgatgtttctggtgtgtaattgctagtgtttctgaagggttttccgaattgtttcagccttgtgaagtattcttttcttaattataacttgcctttcagcgatggtacatgacttggttcaacgtttggttctgaacttatacactgatgcatttactcatctaacataatctgacaaggcctcagtagggagccatacatttttgtaacgtttcgatatgtcttaatgcacctgacttagatcttactgacataaagcacttttcaaagagatgcgcccgtggatgggtcctgtgtgtgactaccg

SEQ ID NO: 22886 - DNA, 586 bp, Macaca Mulatta
ttctcgcagtgaccatgacgaaattagcgcagtggctttggggactggcgatcctgggctccacctgggcggccctgaccacgggagccatgggcctggagctgcccttgtcctgccaggaagtcctgtggccactgcccgcctacttgctggtgtccgccggctgctatgccctggccactgtgggctatcgtgtggccacttttcatgactgcgaggacgccgcacgcgagctgcagagccagatacaggaggcccgagccgacttagcccgcagggggctgcgcttctgacagcctgaccccattcttgtccggacagcccttcctcccatgccccattaaagagccagtattttctaacttcgtttagtttgagtatggaaaatgggtgttggggattcagtgtactaactgtcgagaagtgaatgtgaaagaaccaccttcctgaggccatctcagcctgtattttgcatcatgctggtattcccatttttgctcccaaggaggcaaagacgccttctcaagatctctcaggatggaaatgacatttcactttcttggtcctttcagccctataggaagta

SEQ ID NO: 22887 - DNA, 1149 bp, Macaca Mulatta
  misc_feature (1)...(1149): n = A,T,C or G
aggtcagtgctgacagttgcttgtgaacaaactgaagttctgctttttgaccctatatcttcaaagcacataaaaacactttctgaagctcatgaagactgtgtnnnnnnnnnngatttcttgataaccggctgtttgctacctgctctgatgacactacaatagcactatgggatctgagaaaattgaacaccaaagtatgcactttacatggtcacactagctgggtgaagaacatcgaatatgatactaatacaagactcttagtaacatcaggatttgatggaaatgtcattatttgggacactaacaggtnnnnnnnnnnnnnnnnnnnnnnnnnnnnnnnnnnnnnnnnnnnnnnnnnnnnnnnnnnnnnnnnnnnnnnnnnnnnnnnnnnnnnnnnnnnnnnnnnnnnnnnnnnnnnnnnnnnnnnnnnnnnnnnnnnnnnnnnnnnnnnnnnnnnnnnnnnnnnnnnnnnnnnnnnnnnnnnnnnnnnnnnnnnnnnnnnnnnnnngatttgaccacttcatcaagttcatctggtcctagagtttctggctcaccttgtcatcatagtgattctaattcttctgagaaacacatgtcacgagcctctcaaagagaaggnnggagtttcaccacgaaatagtcttgaagtcgtaacccctgaagttcttggtgagagtgaccacggaaactgcatcacatccttacagctgcacccaaaaggctgggccactcttcttcggtgctcaagcaacagtgatgatgaggaggnagtgtacttgtgtctatgaattccaagaaggagctccagtgcgacctgtctcacctcgctgttctctacgactgactcattacattgaagaagccaatgtaggcaggggttacatcaaagaactttgcttcagccccggatgggcgaatgatttcttccccacatggctatgggattcgtttgttgggatttgacaaacagtgcagtgaacttgttgactgcttgcccaaagaagccagtcccttgcgggtgatccgttctctgtactctcataatgatgtggtactgacaacaaagttctctccaacacattgtcagattgcctcagggtgccttagtggacgggtttctttgtatcagccaaagtttta

SEQ ID NO: 22888 - DNA, 751 bp, Macaca Mulatta
cttcagttgttggcataaatacctcttatgaagggtatgttgttttctaatgaatgtcagaatctttcaacaaatggttaatattatattttttacaatggcaatgcatgatcagatcatttgcttgttggagttaatggtagtaatccatgctcttcctgtatcttttctccatctgtcaatcaaaagccaatctatccaagctctaggcttattaacaagattgggaacatatcacagggtgagtgaatttatgattgcatgtgcatgtgggtgtgtgtgcatgattgtctttgtgatatccgagtagacattatcctatgaaagaaactacctacagttttagtttgtattaaaatatgttatccatatgtcttatactcccataactgagtaaaactaaggatagactatacagtcaaaatagcctttatatgtttatacaatgggcttaagtttggcataactgaatcataatacatggtaaattaattaatacataattcatatatttcatttgtattgctatatctaaaatattgaatactttcatattttgtattttgaaggttatctgggttttattgaaaggttttccatagtgatgtacattaaaagaattcacctatagggcacattttgataatcaagctatcaattaaaatgaaataaagaacatcctaaaatgttttttcaaaattatcaaggtttattaaattgaaataatttcaaatgtaaaataataatataa

SEQ ID NO: 22889 - DNA, 875 bp, Macaca Mulatta
  misc_feature (1)...(875): n = A,T,C or G
ctgcgcagaccgcctgttatggcggccgcctgagtcccaccgaccgacagcagggtcggatgggaccccaggctgagccccgcggcggctggattctcttccctggccaagcctctgagaccttctcccagggtgatgcaaaactgctagctgccagcttgagcctgtctgcagtatcttctctgggacctgccatgctaaggacccgttctcacctctgaggggctcctgtcctaggactaaggtggagcctgggccatggtgcagctggctcctgctgtagccatggacgaggtcacctttagaagcgacactgtactgtcagacgtccccctctacacccnnnnnnnnnnnnnnnnnnnnnnnnnnnnnnnnnnnnnnnnnnnnnnnnnnnnnnnnnnnnnnnnnnnnnnnnnnnnnnnnnnnnnnnnnnnnnnnnnnnnnnnnnnnnnnnnnnnnnnnnnnnnnnnnnnnnnnnnnnnnnnnnnnnnnnnnnnnnnnnnnnnnnnnnnnnnnnnnnnnnnnnnnnnnnnnnnnnnnnnnnnnnnnnnnnnnnnnnnnnnnnnnnnnnnnnnnnnnnnnnnnnnnnnnnnnnnnnnnnnnnnnnnnnnnnnnnnnnnnnnnnnnnnnnnnnnnnnnnnnnnnnnnnnnnnnnnnnnnnnnnnnnnnnnnnnnnnnnnnnnnnnnnnnnnnnnnnnnnnnnnnnnnnnnnnnnnnnnnnnnnnnnnnnnnnnnnnnnnnnnnnnnnnnnnnnnnnnnnnnnnnnnnnnggtatggcggggcgccctgctcctggcggactacatcctgttccgacaggacctcttccgaggatgcacggcgctggagctcggggccggcacggggcttgctag

SEQ ID NO: 22890 - DNA, 917 bp, Macaca Mulatta
  misc_feature (1)...(917): n = A,T,C or G
gtgcaaccagaggtgacagtgtacccagagaggaccgcactcctgcaccagcataatctgctgcactgctctgtgacgggcttctatccaggggacatcaagatcaggtggttcctgaatgggcaggaggagagagctggggtcatgtccactggccttatcgggaatggagactggacctttcagactgtggtgatgctagaaatgactcctgaacttggagatgtctacacctgccttgtccatcactccagcctactgagccccgtttctgtggagtggagnnnnnnnnnnnnnnnnnnnnnnnnnnnnnnnnnnnnnnnnnnnnnnnnnnnnnnnnnnnnnnnnnnnnnnnnnnnnnnnnnnnnnnnnnnnnnnnnnnnnnnnnnnnnnnnnnnnnnnnnnnnnnnnnnnnnnnnnnnnnnnnnnnnnnnnnnnnnnnnnnnnnnnnnnnnnnnnnnnnnnnnnnnnnnnnnnnnnnnnnnnnnnnnnnnnnnnnnnnnnnnnnnnnnnnnnnnnnnnnnnnnnnnnnnnnnnnnnnnnnnnnnnnnnnnnnnnnnnnnnnnnnnnnnnnnnnnnnnnnnnnnnnnnnnnnnnnnnnnnnnnnnnnnnnnnnnnnnnnnnnnnnnnnnnnnnnnnnnnnnnnnnnnnnnnnnnnnnnnnnnnnnnnnnnnnnnnnnnnnnnnnnnnnnnnnnnnnnnnnnnnnnnnnnagaccttactgcttccagccccaaatcatttacttttgtgtggtccagccgtattcctataagtcatgatctccaaagctttctgtcttccaactgcagtctccacagtgttcagaagacaaatgctcagatagtcactgtttccttttcactgtttttaaaaacctttttgttgtcaaataaaatggagatacaaaaaatgtac

SEQ ID NO: 22891 - DNA, 435 bp, Macaca Mulatta
  misc_feature (1)...(435): n = A,T,C or G
tggtaatcatccgatcatataaaccacccatttcagagtagtgtttaagtactgtgaccaacactccacttgtctcttaacttaccttccaagatatttcttaaccattagagcagaggaggaaagactcactacctcagaaaaatctcaaagaatagtccaatttcctgcttgccaaagcataatctgccttttggtgcattacttggttaattcagggttgaggagattgttggggggcatttatagtgtatgaaagttaaggaagggggtgaggatatgggttgggacaggtagtanctaaagaggagcaaagggatttatacaatatttttatcatgttacaaaacagtatcatgaatggcctttttagttcaactgtttctttaaaatgcatttactgattaaaaataagaactgacgaatagctccaag

SEQ ID NO: 22892 - DNA, 1574 bp, Macaca Mulatta
atgaaacacctgtggttcttcctcctcctggtggcagctcccagatgtgagtgtctcggggatgcagatatgacgatatgggaggctgtctctgatcccagggctcactgtgggtctctctgttcacaggggtcctgtcccaggtgcagctgcaggagtcgggcccaggactggtgaagccttcggagaccctgtccctcacctgcgctgtctctggtggctccatcagcagttactggtggagctggatccgccagcccccagggaagggactggagtggattgggtatatctatggtagtagtgggagcacctactacaacccctccctcaagagtcgagtcaccatttcaaaagacacgtccaagaaccagttctccctgaagctgagctctgtgaccgccgcggacacggccgtgtattactgtgcgagagatgcagtgagggacggtcagtggcttcggcagctggaccattgtaccggttcgatgtctggggcgcgggaatccgggtcgccgtctcctcagcctccaccaagggcccatcggtcttccccctggcgccctcctccaggagcacctccgagagcacagcggccctgggctgcctggtcaaggactacttccctgaacccgtgaccgtgtcgtggaactcaggctccctgaccagcggcgtgcacaccttcccggctgtcctacagtcctcagggctctactccctcagcagcgtggtgaccgtgccctccagcagcttgggcacccagacctacgtctgcaacgtaaaccacaagcccagcaacaccaaggtggacaagagagttgagataaaaacatgtggtggtggcagcaaacctcccacgtgcccaccgtgcccagcacctgaactcctggggggaccgtcagtcttcctcttccccccaaaacccaaggacaccctcatgatctcccggacccctgaggtcacatgcgtggtggtagacgtgagccaggaagaccccgatgtcaagttcaactggtacgtaaacggcgcggaggtgcatcatgcccagacgaagccacgggagacgcagtacaacagcacatatcgtgtggtcagcgtcctcaccgtcacgcaccaggactggctgaacggcaaggagtacacgtgcaaggtctccaacaaagccctcccggcccccatccagaaaaccatctccaaagacaaagggcagccccgagagcctcaggtgtacaccctgcccccgtcccgggaggagctgaccaagaaccaggtcagcctgacctgcctggtcaaaggcttctaccccagcgacatcgtcgtggagtgggagagcagcgggcagccggagaacacctacaagaccaccccgcccgtgctggactccgacggctcctacttcctctacagcaagctcaccgtggacaagagcaggtggcagcaggggaacgtcttctcatgctccgtgatgcatgaggctctgcacaaccactacacccagaagagcctctccgtgtctccggagctgaaactggaggagagctgtgtggaggcgcaggacgggagctggacgggct

SEQ ID NO: 22893 - DNA, 369 bp, Macaca Mulatta
tggccaagggccgccccagctgatgactccttgcattccctcccctcacaacaaagaaactccactgcggggatgaagcgcttcttctagccactgctatcactatttaagaaccctaaatctgtcacccataataaagctgatttgaagtgttacctttttttggaggagttggggagacgaatgggaaaaaagatgggagtgactgcatagtgtcagcattttgtgctttcagctcagcatttgcattgaatggaggatgtaagtatagtttaaaagcaagaataagtatatttaggggccctatgataatttagggtattatctgaaagcaagagtctagtagccaagggagaacccacacacaca

SEQ ID NO: 22894 - DNA, 349 bp, Macaca Mulatta
  misc_feature (1)...(349): n = A,T,C or G
gggccagggccgcaaggagagtttgtccgactcccgagacctggacggatcctacgaccagctcacgggnnnaccctccagggcccactaaaaaagcgctgaagcagcgattcctcaagctgctgccttgctgcgggccccaagccctgccctcagtcagtgaaagcaannnnnnnnnnnnnnnnnnnnnnnnnnnnnnnnnnnnnnnnnnnnnnnnnnnnnnnnnnnnnnnnnnnatgaatttgaattgtccaccgtgtgtcaccggcctgagggtctggagcagctgcaggagcaaaccaaattcacgcgcaaggagttgcaggtcctgtaccggggcttcaagaac

SEQ ID NO: 22895 - DNA, 899 bp, Macaca Mulatta
  misc_feature (1)...(899): n = A,T,C or G
ggtggaagcaaaatggcacagacattgattttactatgagttatcactacaggttggatggaggcagtcttgcaatcagtagcccccacacagatcaagatattggcatgtaccagtgcctggccaccaatcttctggggacaattctgagtcggaaggcaaagctccaatttgcatnnnnnnnnnnnnnnnnnnnnnnnnnnnnnnnnnnnnnnnnnnnnnnnnnnnnnnnnnnnnnnnnnnnnnnnnnnnnnnnnnnnnnnnnnnnnnnnnnnnnnnnnnnnnnnnnnnnnnnnnnnnnnnnnnnnnnnnnnnnnnnnnnnnnnnnnnnnnnnnnnnnnnnnnnnnnnnnnnnnnnnnnnnnnnnnnnnnnnnnnnnnnnnnnnnnnnnnnnnnnnnnnnnnnnnnnnnnnnnnnnnnnnnnnnnnnnnnnnnnnnnnnnnnnnnnnnnnnnnnnnnnnnnnnnnnnnnnnnnnnnnnnnnnnnnnnnnnnnnnnnnnnnnnnnnnnnnnnnnnnnnnnnnnnnnnnnnnnnnnnnnnnnnnnnnnnnnnnnnnnnnnnnnnnnnnnnnnnnnnnnnnccagtccctgatattagttggagaaggttggacgggagcccgttgccagggaaagtcaagtacagcaaatcccaagctatccttgaatcccgaactttcaacagaagatgaaagcttttatgagtgtattgcaagtaaccttcgaggaagaaaccttgcaaagggtcaactcannnnnnnnctcctccagaatgggaacagaaaatccaaaatacatacctctctatctatgacaacttgctctggaaatgtaaagctagtggaaagccaaacccttggtacacgtggttaaaaaatggcgaacgactcaacccagagg

SEQ ID NO: 22896 - DNA, 3922 bp, Macaca Mulatta
  misc_feature (1)...(3922): n = A,T,C or G
gtgaagaagtggcaagacccaggcgctccacaccaactccagaacttataagnagcaaaaagcctcctgatgacactacggcccttgctcctctctttggcccaccactagaatcagcttttgatgaacagaagacagaagnagttcttttagaccagcctgagatatggggttcaggccaaccaattaatccaagcatggagtcgccaaagttaacaaggccttttcccactggaannnnnnnnnnnnnnnnnnnnnnnnnnnnnnnnnnnnnnnnnnnnnnnnnnnnnnnnnnnnnnnnnnnnnnnncaggaaatgaccagtcagccacagagatcaaaattgaaaaactaccatccatcaatgacttggacagcatttttgggccagtattgtcccccaagtctgttgctgttaatgctgaagaaaagtgggtccatttttctgatacgtccccggaacatgttactccggagttgactccaagggaaaaagtggtgtccccaccagctacaccagacaacccagctgnnnnnnnnnnnnnnnnnnnnnnnnnnnnnnnnnnnnnnnnnnnnnnnnnnnnnnnnnnnnnagaaacaatctcatctcctaaagattttgggttgggacaaagagcaactccacctcccccaccaccacccacctacaggactgtggtttcgtcccccggacctggctcgggccctggtacggggaccaccagtgngatgggaaaactgaggctcagagatgtcaagtaatttgcccaagtttacaagctggaggcaatgaactggattcatactcaggtnnnnnnnnnnnnnnnnnnnnnnnnnnnnnnnnnnnnnnnnnnnnnnnnnnnnnnnnnnnnnnnnnnnnnnnnnnnnnnnnnnnnnnnnnnnnnnnnnnnnnnnnnnnnnnnnnnnnnnnnnnnnngtccagaccttttagccctcccattcattcttccagccctcctccaatagcacccttagcgcgggctgaaagcacttcttcaatatcgtcaaccaattccttgagcgcagccaccactcccacagttgnnnnnnnnnnnnnnnnnnnnnnnnnnnnnnnnnnnnnnnnnnnnnnnnnnnnnnnnnnnnnnnnnnnnnnnnnnnnnnnnnnnnnnnnnnnnnnnnnnnnnnnnnnnnnnnnnnnnnnnnnnnnnnnnnnnnnnnnnnnnnnnnnnnnnnnnnnnnnnnnnnnnnnnnnnnnnnnnnnnnnnnnnnnnnnnnnnnnnnnnnnnnnnnnnnnnnnnnnnnnnnnnnnnnnnnnnnnnnnnnnnnnnnnnnnnnnnnnnnnnnnnnnnnnnnnnnnnnnnnnnnnnnnnnnnnnnnnnnnnnnnnnnnnnnnnnnnnnnnnnnnnnnnnnnnnnnnnnnnnnnnnnnnnnnnnnnnnnnnnnnnnnnnnnnnnnnnnnnnnnnnnnnnnnnnnnnnnnnnnnnnnnnnnnnnnnnnnnnnnnnnnnnnnnnnnnnnnnnnnnnnnnnnnnnnnnnnnnnnnnnnnnnnnnnnnnnnnnnnngcatagattacaatacaatacagatgcaatgacgaccgctgtggccctcaacaatgtgcagttcctggtccccatcgatggaggagtcaccaagctccaggcggtgctcccaccagcagtctggnnnnnnnnnnnnnnnnnnnnnnnnnnnnnnnnnnnnnnnnnnnnnnnnnnnnnnnnnnnnnnaggggtgggttctttgttggcaagatttcagttatctgaaggcccaagcaaaccttctccattggttgtgcagttcacaagtgaaggaagcaccctttctggctgtgacattgaacttgttggagcagggtatcgattttcgctcatcaagaaaaggtttgctgcaggtaaatntgcaggaaaatacttggcagataactaataatatcttatgcaaggatttggaggattcatataatggagaactgatgtatgagaaacaggttttaattttggtttgatgaaaacaaaccaatatctgcacttgggatatatcaggtggaaagtcaatgactttcagctgtgatttccctcacacaataccatgatgaccagtcctacagtatttacttctaggtgtaatattgttaatggttttaaaatgtaattattgtatttgtaaattgtactctcattccagtaaagcagttagacacttgagttttagcattttaccattcctgaaatggatgtaattcaaactgtggtatgtaaatttaatagtagtattgttgaatggcacaatgcttacagaggtagattgcattttgtcaatatataaaatttaaatataatattgatagctgtcataaagggggtgccacacattaaagaaacttaagggaaccagaagaaaaagaaacnnnnnnnnnnnnnnnnnnnnnnnnnnnnnnnnnnnnnnnnnnnnnnnnnnnnnnnnnnnnnnnnnnnnnnnnnnnnnnnnnnnnnnnnnnnnnnnnnnnnnnnnnnnnnnnnnnnnnnnnnnnnnnnnnnnnnnnnnnnnnnnnnnnnnnnnnnnnnnnnnnnnnnnnnnnnnnnnnnnnnnnnnnnnnnnnnnnnnnnnnnnnnnnnnnnnnnnnnnnnnnnnnnnnnnnnnnnnnnnnnnnnnnnnnnnnnnnnnnnnnnnnnnnnnnnnnnnnnnnnnnnnnnnnnnnnnnnnnnnnnnnnnnnnnnnnnnnnnnnnnnnnnnnnnnnnnnnnnnnnnnnnnnnnnnnnnnnnnnnnnnnnnnnnnnnnnnnnnnnnnnnnnnnnnnnnnnnnnnnnnnnnnnnnnnnnnnnnnnnnnnnnnnnnnnnnnnnnnnnnnnnnnnnnnnnnnnnnnnnnnnnnnnnnnnnnnnnnnnnnnnnnnnnnnnnnnnnnnnnnnnnnnnnnnnnnnnnnnnnnnnnnnnnnnnnnnnnnnnnnnnnnnnnnnnnnngtcccctgtttagatccagaaggattttaatcattgtttatatcatttgagaatgaaaaaataagctttataaatgaaattctattcacattactgtgtaataaatttcctttcagatgattaagattcattgtataaaactgtaaatctttgccattcttggagaagtaagaggagagttaccaaaaatgtatgtcatttcatcgttgcaaggtataataaaaactgtaattattcaatctggccccaccatatgaacatttagaaagacgaacttcttcaggagtctcaattgtaaaaccttccctcattcagatctgaaaatgttagttttcctttaagtcctagaacttattgaaacataaaccaatttatattataggttatgttattaaataactataattattaagttattatttttataattagtcgttaaattttcattttatatccactcaaatttaacaaagaatctttagcccctttaaattttagaatcaaattaaatttttaaagtcttacttctaaaatgagattgtgactggcaattgtttacagtgcaactttttaaattaatctttgtactcctctattagtgcttgctaccaaaagaatgttccagatgatttgttttaccctgggaaaattcttactattcaacaaactctcagtcggctccctaaagcagtctggtgttgaagtttctttgaacaaactaattagtatactcattttatgtaaaggtatccaatttggttttgaaaccaaaatagaaaatgcaaaattctaaattccatgaaacatggaatttatgacaccaaaatcaatggagagtaagtagcagaaaactgagaattgtccagcatatggatataacaatgtgtttttaagtaatcaattcatttaaaaatttgaatattaatacaaagcatattaaaaaacgtgtaaatatta

SEQ ID NO: 22897 - DNA, 287 bp, Macaca Mulatta
aatacaacttctcagaatgtaagcaagcgacccatgcagcaaatgcagcccactgcgccaaggaacagcaacttgcgtgaattacccatcgcgccatcacacgtgatcgaaatgagcagcagccgctgctctgccacaccctcagcgcaagtgaaacctatcatcagctcgtcaccaccctcgcgggccgtggcggcttccaggagctcacagggaaagacggaagtgaaagtcaagcccgctagccctgtggctcaacctaaagaagaagcaaaaacagaaccaga

SEQ ID NO: 22898 - DNA, 284 bp, Macaca Mulatta
gttatttgggagattagagttcattaattaattcctgtgcttagatcgaactgtaacattattccaatcacatttatcttgcaggcggcggcagagatggcagcctcgctggaaacgcgcgggggagcctgagccggctgccggggacgcacggcgctgcgcgctccttcgccacgccgccgcgcagcccctccatcttcctgctcggcgccgggccccacgcgcccctgcctagggggtcccgctgctctctagggctcctgccggctccaacccccggcccc

SEQ ID NO: 22899 - DNA, 178 bp, Macaca Mulatta
  misc_feature (1)...(178): n = A,T,C or G
gtacgttgtatgttaaacatttggggtgtgatgctcttcattagattgtcatggattgtgggtcaagctggaataggtnaggtctatcagtccttgtaataatgatggccactgttgtgacaactatcacaggattgtctacttcagcaatagcaactaatggatttgtaagaggagg

SEQ ID NO: 22900 - DNA, 179 bp, Macaca Mulatta
gggagacctttcagccactggttcccgagtgctcctgggccaggtgctgcgacagccaacaggtgtcctactccccagccagcgcctgtgctctgaagaggtagggctgggcatccagcagggtgggtagggctggctgctagtttagacagcattggaggggctgtctgagcaaggac

SEQ ID NO: 22901 - DNA, 5968 bp, Macaca Mulatta
  misc_feature (1)...(5968): n = A,T,C or G
atgatcttactcacattcagcactggaagacggttggatttcgtgcatcattcgggggtgtttttcttgcaaaccttgctttggattttatgtgctacagtctgcggaacggagcagtatttcaatgtggaggnnnnnnnnnnnnnnnnnnnnnnnnnnnnnnnnnnnnnnnnnnnnnnnnnnnnnnnnnnnnnnnnnnnnnnnnnnnnnnnnnnnnnnnnnnnnnnnnnnnnnnnnnnnnnnnnnnnnnnnnnnnnnnnnnnnnnnnnnnnnnnnnnnnnnnnnnnnnnnnnnnnnnnnnnnnnnnnnnnnnnnnnnnnnnnnnnnnnnnnnnnnnnnnnnnnnnnnnnnnnnnnnnnnnnnnnnnnnnnnnnnnnnnnnnnnnnnnnnnnnnnnnnnnnnnnnnnnnnnnnnnnnnnnnnnnnnnnnnnnccctgagactcgtaaagctattcgccgtgccttcgatgtgtggcagaatgtaactcctctgacatttgaagaagctctctacagtgaattagaaaatggcaaacgtgatgtggatataaccattatttttgcatctggtttccatggggacagttctccctttgatggagagggaggatttttagcacatgcctacttccctggaccaggaattggaggagatactcattttgactcagatgagccatggacactaggaaatcctaatcatgatggnnnnnnnnnnnnnnnnnnnnnnnnnnnnnnnnnnnnnnnnnnnnnnnnnnnnnnnnnnnnnnnnnnnnnnnnnnnnnnnnnnnnnnnnnnnnnnnnnnnnnnnnnnnnnnnnnnnnnnnnnnnnnnnnnnnnnnnnnnnnnnnnnnnnnnnnnnnnnnnnnnnnnnnnnnnnnnnnnnnnnnnnnnnnnnnnnnnnnnnnnnnnnnnnnnnnnnnnnnnnnnnnnnnnnnnnnnnnnnnnnnnnnnnnnnnnnnnnnnnnnnnnnnnnnnnnnnnnnnnnnnnnnnnnnnnnnnnnnnnnnnnnnnnnnnnnnnnnnnnnnnnnnnnnnnnnnnnnnnnnnnnnnnnnnnnnnnnnnnnnnnnnnnnnnnnnnnnnnnnnnnnnnnnnnnnnnnnnnnnnnnnnnnnnnnnnnnnnnnnnnnnnnnnnnnnnnnnnnnnnnnnnnnnnnnnnnnnnnnnnnnnnnnnnnnnnnnnnnnnnnnnnnnnnnnnnnnnnnnnnnnnnnnnnnnnnnnnnnnnnnnnnnnnnnnnnnnnnnnnnnnnnnnnnnnnnnnnnnnnnnnnnnnnnnnnnnnnnnnnnnnnnnnnnnnnnnnnnnnnnnnnnnnnnnnnnnnnnnnnnnnnnnnnnnnnnnnnnnnnnnnnnnnnnnnnnnnnnnnnnnnnnnnnnnnnnnnnnnnnnnnnnnnnnnnnnnnnnnnnnnnnnnnnnnnnnnnnnnnnnnnnnnnnnnnnnnnnnnnnnnnnnnnnnnnnnnnnnnnnnnnnnnnnnnnnnnnnnnnnnnnnnnnnnnnnnnnnnnnnnnnnnnnnnnnnnnnnnnnnnnnnnnnnnnnnnnnnnnnnnnnnnnnnnnnnnnnnnnnnnnnnnnnnnnnnnnnnnnnnnnnnnnnnnnnnnnnnnnnnnnnnnnnnnnnnnnnnnnnnnnnnnnnnnnnnnnnnnnnnnnnnnnnnnnnnnnnnnnnnnnnnnnnnnnnnnnnnnnnnnnnnnnnnnnnnnnnnnnnnnnnnnnnnnnnnnnnnnnnnnnnnnnnnnnnnnnnnnnnnnnnnnnnnnnnnnnnnnnnnnnnnnnnnnnnnnnnnnnnnnnnnnnnnnnnnnnnnnnnnnnnnnnnnnnnnnnnnnnnnnnnnnnnnnnnnnnnnnnnnnnnnnnnnnnnnnnnnnnnnnnnnnnnnnnnnnnnnnnnnnnnnnnnnnnnnnnnnnnnnnnnnnnnnnnnnnnnnnnnnnnnnnnnnnnnnnnnnnnnnnnnnnnnnnnnnnnnnnnnnnnnnnnnnnnnnnnnnnnnnnnnnnnnnnnnnnnnnnnnnnnnnnnnnnnnnnnnnnnnnnnnnnnnnnnnnnnnnnnnnnnnnnnnnnnnnnnnnnnnnnnnnnnnnnnnnnnnnnnnnnnnnnnnnnnnnnnnnnnnnnnnnnnnnnnnnnnnnnnnnnnnnnnnnnnnnnnnnnnnnnnnnnnnnnnnnnnnnnnnnnnnnnnnnnnnnnnnnnnnnnnnnnnnnnnnnnnnnnnnnnnnnnnnnnnnnnnnnnnnnnnnnnnnnnnnnnnnnnnnnnnnnnnnnnnnnnnnnnnnnnnnnnnnnnnnnnnnnnnnnnnnnnnnnnnnnnnnnnnnnnnnnnnnnnnnnnnnnnnnnnnnnnnnnnnnnnnnnnnnnnnnnnnnnnnnnnnnnnnnnnnnnnnnnnnnnnnnnnnnnnnnnnnnnnnnnnnnnnnnnnnnnnnnnnnnnnnnnnnnnnnnnnnnnnnnnnnnnnnnnnnnnnnnnnnnnnnnnnnnnnnnnnnnnnnnnnnnnnnnnnnnnnnnnnnnnnnnnnnnnnnnnnnnnnnnnnnnnnnnnnnnnnnnnnnnnnnnnnnnnnnnnnnnnnnnnnnnnnnnnnnnnnnnnnnnnnnnnnnnnnnnnnnnnnnnnnnnnnnnnnnnnnnnnnnnnnnnnnnnnnnnnnnnnnnnnnnnnnnnnnnnnnnnnnnnnnnnnnnnnnnnnnnnnnnnnnnnnnnnnnnnnnnnnnnnnnnnnnnnnnnnnnnnnnnnnnnnnnnnnnnnnnnnnnnnnnnnnnnnnnnnnnnnnnnnnnnnnnnnnnnnnnnnnnnnnnnnnnnnnnnnnnnnnnnnnnnnnnnnnnnnnnnnnnnnnnnnnnnnnnnnnnnnnnnnnnnnnnnnnnnnnnnnnnnnnnnnnnnnnnnnnnnnnnnnnnnnnnnnnnnnnnnnnnnnnnnnnnnnnnnnnnnnnnnnnnnnnnnnnnnnnnnnnnnnnnnnnnnnnnnnnnnnnnnnnnnnnnnnnnnnnnnnnnnnnnnnnnnnnnnnnnnnnnnnnnnnnnnnnnnnnnnnnnnnnnnnnnnnnnnnnnnnnnnnnnnnnnnnnnnnnnnnnnnnnnnnnnnnnnnnnnnnnnnnnnnnnnnnnnnnnnnnnnnnnnnnnnnnnnnnnnnnnnnnnnnnnnnnnnnnnnnnnnnnnnnnnnnnnnnnnnnnnnnnnnnnnnnnnnnnnnnnnnnnnnnnnnnnnnnnnnnnnnnnnnnnnnnnnnnnnnnnnnnnnnnnnnnnnnnnnnnnnnnnnnnnnnnnnnnnnnnnnnnnnnnnnnnnnnnnnnnnnnnnnnnnnnnnnnnnnnnnnnnnnnnnnnnnnnnnnnnnnnnnnnnnnnnnnnnnnnnnnnnnnnnnnnnnnnnnnnnnnnnnnnnnnnnnnnnnnnnnnnnnnnnnnnnnnnnnnnnnnnnnnnnnnnnnnnnnnnnnnnnnnnnnnnnnnnnnnnnnnnnnnnnnnnnnnnnnnnnnnnnnnnnnnnnnnnnnnnnnnnnnnnnnnnnnnnnnnnnnnnnnnnnnnnnnnnnnnnnnnnnnnnnnnnnnnnnnnnnnnnnnnnnnnnnnnnnnnnnnnnnnnnnnnnnnnnnnnnnnnnnnnnnnnnnnnnnnnnnnnnnnnnnnnnnnnnnnnnnnnnnnnnnnnnnnnnnnnnnnnnnnnnnnnnnnnnnnnnnnnnnnnnnnnnnnnnnnnnnnnnnnnnnnnnnnnnnnnnnnnnnnnnnnnnnnnnnnnnnnnnnnnnnnnnnnnnnnnnnnnnnnnnnnnnnnnnnnnnnnnnnnnnnnnnnnnnnnnnnnnnnnnnnnnnnnnnnnnnnnnnnnnnnnnnnnnnnnnnnnnnnnnnnnnnnnnnnnnnnnnnnnnnnnnnnnnnnnnnnnnnnnnnnnnnnnnnnnnnnnnnnnnnnnnnnnnnnnnnnnnnnnnnnnnnnnnnnnnnnnnnnnnnnnnnnnnnnnnnnnnnnnnnnnnnnnnnnnnnnnnnnnnnnnnnnnnnnnnnnnnnnnnnnnnnnnnnnnnnnnnnnnnnnnnnnnnnnnnnnnnnnnnnnnnnnnnnnnnnnnnnnnnnnnnnnnnnnnnnnnnnnnnnnnnnnnnnnnnnnnnnnnnnnnnnnnnnnnnnnnnnnnnnnnnnnnnnnnnnnnnnnnnnnnnnnnnnnnnnnnnnnnnnnnnnnnnnnnnnnnnnnnnnnnnnnnnnnnnnnnnnnnnnnnnnnnnnnnnnnnnnnnnnnnnnnnnnnnnnnnnnnnnnnnnnnnnnnnnnnnnnnnnnnnnnnnnnnnnnnnnnnnnnnnnnnnnnnnnnnnnnnnnnnnnnnnnnnnnnnnnnnnnnnnnnnnnnnnnnnnnnnnnnnnnnnnnnnnnnnnnnnnnnnnnnnnnnnnnnnnnnnnnnnnnnnnnnnnnnnnnnnnnnnnnnnnnnnnnnnnnnnnnnnnnnnnnnnnnnnnnnnnnnnnnnnnnnnnnnnnnnnnnnnnnnnnnnnnnnnnnnnnnnnnnnnnnnnnnnnnnnnnnnnnnnnnnnnnnnnnnnnnnnnnntcagtgcttccattctatatcatgctgatattataaagagttagtcactgctgctaagcatggaggactatatacataagctcgtttttacagtgtttagcttgtacgagggtttaatccttttagggccttgatatcaagaaaaaaataactggaaactatattttgctaaagatagaaatgaggaactgtgtcattttgggacatgtgcaaatcattgaggaactccatcaccctgcattgaaaattgatttttttcctctaaaatgagaaatattttgaataaccaatctgttgcctctttactcattcatcacaatatcctgattcgtcataagactataagtataaagggctagaaaataatcatagcattaagaaggaaggagtctatcattatgcttgaattctggcaaatgtcatgaataagggttgggtcatatttactttaatatgacacaagagttatgtgataagcagaggcatataaggctactcttttgactagaacatttcaattatcacgctgtactattacaagagataagaacataaggacaatgtaatcacaaacactgggataccatttgtttattgtacaccagctactttgtgggtatggttcctgactcctcttctacnnnnnnnnnnnnnnnnnnnnnnnnnnnnnnnnnnnnnnnnnnnnnnnnnnnnnnnnnnnnnnnnnnnnnnnnnnnnnnnnnnnnnnnnnnnnnnnnnnnnnnnnnnnnnnnnnnnnnnnnnnnnnnnnnnnnnnnnnnnnnnnnnnnnnnnnnnnnnnnnnnnnnnnnnnnnnnnnnnnnnnnnnnnnnnnnnnnnnnnnnnnnnnnnnnnnnnnnnnnnnnnnnnnnnnnnnnnnnnnnnnnnnnnnnnnnnnnnnnnnnnnnnnnnnnnnnnnnnnnnnnnnnnnnnnnnnnnnnnnnnnnnnnnnnnnnnnnnnnnnnnnnnnnnnnnnnnnnnnnnnnnnnnnnnnnnnnnnnnnnnnnnnnnnnnnnnnnnnnnnnnnnnnnnnnnnnnnnnnnnnnnnnnnnnnnnnnnnnnnnnnnnnnnnnnnnnnnnnnnnnnnnnnnnnnnnnnnnnnnnnnnnnnnnnnnnnnnnnnnnnnnnnnnnnnnnnnnnnnnnnnnnnnnnnnnnnnnnnnnnnnnnnnnnnnnnnnnnnnnnnnnnnnnnnnnnnnnnnnnnnnnnnnnnnnnnnnnnnnnnnnnnnnnnnnnnnnnnnnnnnnnnnnnnnnnnnnnnnnnnnnnnnnnnnnnnnnnnnnnnnnnnnnnnnnnnnnnnnnnnnnnnnnnnnnnnnnnnnnnnnnnnnnnnnnaagcaagtgttacatttaataattactcataatcattttttattaacacataatttggccatttcatatactatgtacctattttcattccctctctgtgggtcattaaaaaacacaatgtggtggataagaac

SEQ ID NO: 22902 - DNA, 648 bp, Macaca Mulatta
aggttgagccggaccctgaggctgggagtgagcaagaggtatttgctgctgtggaagggcccagtgccgaggagatgccctcagacacagaatctgcagaagtcctggagacaccgcttgacgcccaccaggggcttctggggatggatcccccgggtgacatggtgggcttcgtggcggctgagagcactgaggaccttaaggccctgagcagtgaggaggaagaagaaatggggagagccgcccaggagcctgaaagccttccgttaccctccgtgctggaccaggccagtgtcattgcggagcggtttgttagcagcttctctcggcggagcagcgtggcacaggaggacagcaagtccagtggctttgggagcccacggctggtcagccggagcagcagcgtgctcagcctggagggcagtgagaagggcctggcgcggcgtggcagtgccacagactccctcagctgtcagctctccccagaagtggacatcagtgtggggggggccacagaggacagcccttctgtcaatgggatggagtccccaagcccaggctgcccagtggagcccgactggtcttcctgcaagaagaaggaatcagcgctctccacccgagaccggctgttgctagacaagattaaga

SEQ ID NO: 22903 - DNA, 4124 bp, Macaca Mulatta
  misc_feature (1)...(4124): n = A,T,C or G
aggcttcctgcccacactgggtccagcctgggtgaacatgtacggctccacacgtaactacacgctgctggacgagcaccaggacctgaacgagggcctgggggagggtgtgtcctttcgggcccggctcctgctgggcctggcggtggagatcctggacacctccaaccctgagctcaccagctccacagaggtgcaggtggagcaggccacgcccatctcggannnnnnnnnnnnnnnnnnnnnnnnnnnnnnnnnnnnnnnnnnnnnnnnnnnnnnnnnnnnnnnaccggagaaatggagacaagcccatcacctttgaggtcaccataggnnnnnnnnnnnnnnnnnnnnnnnnnnnnnnnnnnnnnnnnnnnnnnnnnnnnnnnnnnnnnnnnnnnnnnnnnnnnnnnnnnnnnnnnnnnnnnnnnnnnnnnnnnnnnnnnnnnnnnnnnnnnnnnnnnnnnnnnnnnnnnnnnnnnnnnnnnnnnnnnnnnnnnnnnnnnnnnnnnnnnnnnnnnnnnnnnnnnnnnnnnnnnnnnnnnnnnnnnnnnnnnnnnnnnnnnnnnnnnnnnnnnnnnnnnnnnnnnnnnnnnnnnnnnnnnnnnnnnnnnnnnnnnnnnnnnnnnnnnnnnnnnnnnnnnnnnnnnnnnnnnnnnnnnnnnnnnnnnnnnnnnnnnnnnnnnnnnnnnnnnnnnnnnnnnnnnnnnnnnnnnnnnnnnnnnnnnnnnnnnnnnnnnnnnnnnnnnnnnnnnnnnnnnnnnnnnnnnnnnnnnnnnnnnnnnnnnnnnnnnnnnnnnnnnnnnnnnnnnnnnnnnnnnnnnnnnnnnnnnnnnnnnnnnnnnnnnnnnnnnnnnnnnnnnnnnnnnnnnnnnnnnnnnnnnnnnnnnnnnnnnnnnnnnnnnnnnnnnnnnnnnnnnnnnnnnnnnnnnnnnnnnnnnngccccagcacagcattccggacatcttcatctggatgatgagcaacaacaagcgtatcgcctatgcccgtgtgccctccaaggacctgctcttctccatcgtggaggaggagaccggcaaggactgcgccaaggtcaagacgctcttcctnnnnnnnnnnnnnnnnnnnnnnnnnnnnnnnnnnnnnnnnnnnnnnnnnnnnnnnnnnnnnnnnnnnnnnnnnnnnnnnnnnnnnnnnnnnnnnnnnnnnnnnnnnnnnnnnnnnnnnnnnnnnnnnnnnnnnnnnnnnnnnnnnnnnnnnnnnnnnnnnnnnnnnnnnnnnnnnnnnnnnnnnnnnnnnnnnnnnnnnnnnnnnnnnnnnnnnnnnnnnnnnnnnnnnnnnnnnnnnnnnnnnnnnnnnnnnnnnnnnnnnnnnnnnnnnnnnnnnnnnnnnnnnnnnnnnnnnnnnnnnnnnnnnnnnnnnnnnnnnnnnnnnnnnnnnnnnnnnnnnnnnnnnnnnnnnnnnnnnnnnnnnnnnnnnnnnnnnnnnnnnnnnnnnnnnnnnnnnnnnnnnnnnnnnnnnnnnnnnnnnnnnnnnnnnnnnnnnnnnnnnnnnnnnnnnnnnnnnnnnnnnnnnnnnnnnnnnnnnnnnnnnnnnnnnnnnnnnnnnnnnnnnnnnnnnnnnnnnnnnnnnnnnnnnnnnnnnnnnnnnnnnnnnnnnnnnnnnnnnnnnnnnnnnnnnnnnnnnnnnnnnnnnnnnnnnnnnnnnnnnnnnnnnnnnnnnnnnnnnnnnnnnnnnnnnnnnnnnnnnnnnnnnnnnnnnnnnnnnnnnnnnnnnnnnnnnnnnnnnnnnnnnnnnnnnnnnnnnnnnnnnnnnnnnnnnnnnnnnnnnnnnnnnnnnnnnnnnnnnnnnnnnnnnnnnnnnnnnnnnnnnnnnnnnnnnnnnnnnnnnnnnnnnnnnnnnnnnnnnnnnnnnnnnnnnnnnnnnnnnnnnnnnnnnnnnnnnnnnnnnnnnnnnnnnnnnnnnnnnnnnnnnnnnnnnnnnnnnnnnnnnnnnnnnnnnnnnnnggacctcccagagaacgagctgctgcacccgcccttgaacatccgcgtggtggactgccgggccttcggtcgctacacactggtgggctcccatgccgtcagctccctgcgacgcttcatctaccggcccccagaccgctcggcccccagctggaacaccacgnnnnnnnnnnnnnnnnnnnnnnnnnnnnnnnnnnnnnnnnnnnnnnnnnnnnnnnnnnnnnnnnnnnnnnnnnnnnnnnnnnnnnnnnnnnnnnnnnnnnnnnnnnnnnnnnnnnnnnnnnnnnnnnnnnnnnnnnnnnnnnnnnnnnnnnnnnnnnnnnnnnnnnnnnnnnnnnnnnnnnnnnnnnnnnnnnnnnnnnnnnnnnnnnnnnnnnnnnnnnnnnnnnnnnnnnnnnnnnnnnnnnnnnnnnnnnnnnnnnnnnnnnnnnnnnnnnnnnnnnnnnnnnnnnnnnnnnnnnnnnnnnnnnnnnnnnnnnnnnnnnnnnnnnnnnnnnnnnnnnnnnnnnnnnnnnnnnngcctgaaggggtcaatgaagggcaaggagaaggcaagggctgccaaagaggagaagaggaagaaaacccagagctctggctctggnnnnnnnnnnnnnnnnnnnnnnnnnnnnnnnnnnnnnnnnnnnnnnnnnnnnnnnnnnnnnnnnnnnnnnnnnnnnnnnnnnnnnnnnnnnnnnnnnnnnnnnnnnnnnnnnnnnnnnnnnnnnnnnnnnnnnnnnnnnnnnnnnnnnnnnnnnnnnnnnnnnnnnnnnnnnnnnnnnnnnnnnngggctccctctgcgtgtacaaagtgccactcccagaggacgtgtcccgggaagctggctacgaccccacctacggcatgttccagggcatccccagcaatgaccccatcaatgtgctggtccgagtctatgtggtccgggnnnnnnnnnnnnnnnnnnnnnnnnnnnnnnnnnnnnnnnnnnnnnnnnnnnnnnnnnnnnnnnnnnnnnnnnnnnnnnnnnnnnnnnnnnnnnnnnnnnnnnnnnnnnnnnnnnnnnnnnnnnnnnnnnnnnnnnnnnnnnnnnnnnnnnnnnnnnnnnnnnnnnnnnnnnnnnnnnnnnnnnnnnnnnnnnnnnnnnnnnnnnnnnnnnnnnnnnnnnnnnnnnnnnnnnnnnnnnnnnnnnnnnnnnnnnnnnnnnnnnnnnnnnnnnnnnnnnnnnnnnnnnnnnnnnnnnnnnnnnnnnnnnnnnnnnnnnnnnnnnnnnnnnnnnnnnnnnnnnnnnnnnnnnnnnnnnnnnnnnnnnnnnnnnnnnnnnnnnnnnnnnnnnnnnnnnnnnnnnnnnnnnnnnnnnnnnnnnnnnnnnnnnnnnnnnnnnnnnnnnnnnnnnnnnnnnnnnnnnnnnnnnnnnnnnnnnnnnnnnnnnnnnnnnnnnnnnnnnnnnnnnnnnnnnnnnnnnnnnnnnnnnnnnnnnnnnnnnnnnnnnnnnnnnnnnnnnnnnnnnnnnnnnnnnnnnnnnnnnnnnnnnnnnnnnnnnnnnnncagggccgcctggagctgtgggtggacatgttccccatggacatgccagcccctgggacgcctctggacatctcccctcggaagcccaagaagnnnnnnnnnnnnnnnnnnnnnnnnnnnnnnnnnnnnnnnnnnnnnnnnnnnnnnnnnnnnnnnnnnnnnnnnnnnnnnnnnnnnnnnnnnnnnnnngtggctgaagggccagcaggaggacnagcangacacagacgtccactaccactccctcactggcgagggcaacttcaactggcgctacctgttccccttcgactacctggcagcggaggagaggatcgtcatctccaagaagagtccatgttctcctgggatgagacgagtaccagatcccgcgcggctcaccctgcagatctgggatgggaacacttctctnnnnnnnnnnnnnnnnggggccattgagctggacctgaaccggttcncgcggggcgcaaagacagccaagcagtgcaccatggagatggccaccggtgaggtggacgtgcccctggtgtccatcttcaagcaaaagcgcgtcaaaggctggtggcccctcctggcccgcaatgagaacgatgagtttgagctcacg

SEQ ID NO: 22904 - DNA, 1859 bp, Macaca Mulatta
  misc_feature (1)...(1859): n = A,T,C or G
gaggaaatgattatgacanctcgaagtgaggccagtgactctggttctgaatctgtttccttcacagatgggtccgtcagatctggttcaggcacagatggatcagatgagaaaaagaaggaaaggaagagagctagaggcatatctccaattgtttttgatagaagtggaagctctgcatcagagtcatatgcaggttcagaaaagaagcatgagaaattatcatcttccgttcgtgctgtccgaaaagatcaaaccagtaaactcaaatatgtgcttcaggatgcaagatttttcctcataaagagtaacaaccatgagaatgtgtctcttgccaaagctaagggtgtatggtccacgctccctgtaaatgagaagaaattaaatcttgcatttagatctgcaaggagtgttatcttaatattttctgtcagagagagtggaaaatttcaagggtttgcaagactttcttcagaatcacatcacggaggatctcctatacactgggtgcttccagcaggaatgagtgctaaaatgctgggaggtgtctttaaaattgactggatttgcaggcgtgaattacccttcactaagtcggctcatctcaccaatccttggaatgaacataaaccagtaaagatcggacgtgatggacaggaaattgaacttgaatgtggaacccagctttgtcttctgtttccccccgatgaaagtattgacttgtatcaggtcattcataaaatgcgtcacaagagaagaatgcattctcagcccagatcacgaggacgtccatcccgtcgagaaccagtccgggatgtgggaaggcgtcgaccagaagattatgatattcataacagcagaaagaaaccaaggattgactatccccctgagtttcaccagagaccagggtatttaaaggatccacgataccaggaagtagacagacgattttcaggagttcgccgagatgtgtttttaaatgggtcctacaatgattatgtgagggaatttcataacatgggaccaccaccaccttggcaaggaatgcccccttacccaggaatggaacaacctccacaccatccttactatcagcaccatgctccacctcctcaagctcatcccccttactcaggacatcatccagtaccacatgaagcaagatacagagataaacgagtacatgattatgatatgagggtggatgatttccttcgtcgcacacaagctgttgtcagtggccggagaagtagaccccgtgaaagagatcgggaacgagagcgagaccgccctagagataacagacgagacagagagcgagatagaggacgtgatagagaaagagaaagagagcgattatgtgatcgagacagagaccgaggggagagaggtcgatatagaagataatgggcttttggaagcactgattgtttaaagatacaaaaaatcttgtatttttttttgtgtgtgtttacaagtagtaaatttattttcagctgtctacctataaagttcattgtgtagaaggatttattatgaccccctttgttccaagcatgcagtatcataagaactggaaaaactcaaatccggcaaaaatccacgttgacagttgaattgacacttccatcggggcgcaaggaacggcccagaatggtcacgtggatcctcctccaaaagttcgtatacgggtcacccagaactaagtcggacgagggaccccaggcacggagagaacgccgaaacgggcgaaggctcacacggacgccgctcccaaaagcgccccagcaacggcaacgcggcagcgcgacaaacacattccggcctgaaacagaaatcccgtcagaaaaatgagcaga

SEQ ID NO: 22905 - DNA, 581 bp, Macaca Mulatta
  misc_feature (1)...(581): n = A,T,C or G
ctgattatctgtactgtgggtttaagtgtgccactttctctacagcatccaagtaagtgaatggcgctctcaagtttatttggtggtcagcccaagggtttcaggagcaagaagtcttgctctatacaaatgtatccataaaatatcagagcttgtagggcatgaacatcaaacttttgttccaataatatggttctgtttggaaaaaaactgtaaatcagaaagaatgatttgcagaaagaaagaaaaactatggtgtaattcaaactctgggcagcctctgaatgaaatgctactttctttagaaaatataatagctgccttagacgattatgaaggcatacanagctagtatttaagcatactatttaatatgccccataaatgtcttcagtgttcttcagggtaattgggatctcagaagatttggttcagatccaaacaaatacacattctgtgttttagctcagtgtttctttaaaaaagaaactgccacacagcaaaaaatggtttactttgttggacaaaccaaatcagttctcaaaaaatgaccggtgcttataaaaagttataaatatcca

SEQ ID NO: 22906 - DNA, 3919 bp, Macaca Mulatta
  misc_feature (1)...(3919): n = A,T,C or G
tatgtggccagttggatagacagaaggcggcatcaatcagaaaaggccaatttgactattctttttgataaatatgtccccgcatgcttggataagctgagaacaagctttaaaaccatcacttcaattcctgagagtagcctggtgcagnnnnnnnnnnnnnnnnnnnnnnnnnnnnnnnnnnnnnnnnnnnnnnnnnnnnnnnnnnnnnnnnnnnnnnnnnnnnnnnnnnnnnnnnnnnnnnnnnnnnnnnnnnnnnnnnnnnnnnnnnnnnnnnnnnnnnnnnnnnnnnnnnnnnnnnnnnnnnnnnnnnnnnnnnnnnnnnnnnnnnnnnnnnnnnnnnnnnnnnnnnnnnnnnnnnnnnnnnnnnnnnnnnnnnnnnnnnnnnnnnnnnnnnnnnnnnnnnnnnnnnnnnnnnnnnnnnnnnnnnnnnnnnnnnnnnnnnnnnnnnnnnnnnnnnnnnnnnnnnnnnnnnnnnnnnnnnnnnnnnnnnnnnnnnnnnnnnnnnnnnnnnnnnnnnnnnnnnnnnnnnnnnnnnnnnnnnnnnnnnnnnnnnnnnnnnnnnnnnnnnnnnnnnnnnnnnnnnnnnnnnnnnnnnnnnnnnnnnnnnnnnnnnnnnnnnnnnnnnnnnnnnnnnnnnnnnnnnnnnnnnnnnnnnnnnnnnnnnnnnnnnnnnnnnnnnnnnnnnnnnnnnnnnnnnnnnnnnnnnnnnnnnnnnnnnnnnnnnnnnnnnnnnnnnnnnnnnnnnnnnnnnnnnnnnnnnnnnnnnnnnnnnnnnnnnnnnnnnnnnnnnnnnnnnnnnnnnnnnnnnnnnnnnnnnnnnnnnnnnnnnnnnnnnnnnnnnnnnnnnnnnnnnnnnnnnnnnnnnnnnnnnnnnnnnnnnnnnnnnnnnnnnnnnnnnnnnnnnnnnnnnnnnnnnnnnnnnnnnnnnnnnnnnnnnnnnnnnnnnnnnnnnnnnnnnnnnnnnnnnnnnnnnnnnnnnnnnnnnnnnnnnnnnnnnnnnnnnnnnnnnnnnnnnnnnnnnnnnnnnnnnnnnnnnnnnnnnnnnnnnnnnnnnnnnnnnnnnnnnnnnnnnnnnnnnnnnnnnnnnnnnnnnnnnnnnnnnnnnnnnnnnnnnnnnnnnnnnnnnnnnnnnnnnnnnnnnnnnnnnnnnnnnnnnnnnnnnnnnnnnnnnnnnnnnnnnnnnnnnnnnnnnnnnnnnnnnnnnnnnnnnnnnnnnnnnnnnnnnnnnnnnnnnnnnnnnnnnnnnnnnnnnnnnnnnnnnnnnnnnnnnnnnnnnnnnnnnnnnnnnnnnnnnnnnnnnnnnnnnnnnnnnnnnnnnnnnnnnnnnnngtatagatagtcacatgctacttcaacagcccctcatctattgccactttgctaacagagggaaggacccacattacatgccagtgaaggactgggaagtgctgaagatgattcttacggaaaccttagacaactacaacgaactaaatgctgccatgcacctagttttatttgaagatgccatgcaacatgtgtgngtgtcgcatcagccggatcttacgaacccctcagggctgtgctctcttggttggagtggggggcagtggcaagcagagcttgtccaggctggcagcttacctttgtggccttgaggtctttcagatcactctgaccgagggctatggaatccaggaacttcgggtnnnnnnnnnnnnnnnnnnnnnnnnnnnnnnnnnnnnnnnnnnnnnnnnnnnnnnnnnnnnnnnnnnnnnnnnnnnnnnnnnnnnnnnnnnnnnnnnnnnnnnnnnnnnnnnnnnnnnnncaggagaaatcccagatctgttcagcgatgaagatgtggacaagataatttctggaattcataatgaagttcatgctctgggcatggtggactccagagaaaactgttggaaattctttttggccagggtgcgactacagctcaannnnnnnnnnnnnnnnnnnnnnnnnnnnnnnnnnnnnnnnnnnnnnnnnnnnnnnnnnnnnnnnnnnnnnnnnnnnnnnnnnnnnnnnnnnnnnnnnnnnnnnnnnnnnnnnnnnnnnnnnnnnnnnnnnnnnnnnnnnnnnnnnnnnnnnnnnnnnnnnnnnnnnnnnnnnnnnnnnnnnnnnnnnnnnnnnnnnnnnnnnnnnnnnnnnnnnnnnnnnnnnnnnnnnnnnnnnnnnnnnnnnnnnnnnnnnnnnnnnnnnnnnnnnnnnnnnnnnnnnnnnnnnnnnnnnnnnnnnnnnnnnnnnnnnnnnnnnnnnnnnnnnnnnnnnnnnnnnnnnnnnnnnnnnnnnnnnnnnnnnnnnnnnnnnnnnnnnnnnnnnnnnnnnnnnnnnnnnnnnnnnnnnnnnnnnnnnnnnnnnnnnnnnnnnnnnnnnnnnnnnnnnnnnnnnnnnnnnnnnnnnnnnnnnnnnnnnnnnnnnnnnnnnnnnnnnnnnnnnnnnnnnnnnnnnnnnnnnnnnnnnnnnnnnnnnnnnnnnnnnnnnnnnnnnnnnnnnnnnnnnnnnnnnnnnnnnnnnnnnnnnnnnnnnnnnnnnnnnnnnnnnnnnnnnnnnnnnnnnnnnnnnnnnnnnnnnnnnnnnnnnnnnnnnnnnnnnnnnnnnnnnnnnnnnnnnnnnnnnnnnnnnnnnnnnnnnnnnnnnnnnnnnnnnnnnnnnnnnnnnnnnnnnnnnnnnnnnnnnnnnnnnnnnnnnnnnnnnnnnnnnnnnnnnnnnnnnnnnnnnnnnnnnnnnnnnnnnnnnnnnnnnnnnnnnnnnnnnnnnnnnnnnnnnnnnnnnnnnnnnnnnnnnnnnnnnnnnnnnnnnnnnnnnnnnnnnnnnnnnnnnnnnnnnnnnnnnnnnnnnnnnnnnnnnnnnnnnnnnnnnnnnnnnnnnnnnnnnnnnnnnnnnnnnnnnnnnnnnnnnnnnnnnnnnnnnnnnnnnnnnnnnnnnnnnnnnnnnnnnnnnnnnnnnnnnnnnnnnnnnnnnnnnnnnnnnnnnnnnnnnnnnnnnnnnnnnnnnnnnnnnnnnnnnnnnnnnnnnnnnnnnnnnnnnnnnnnnnnnnnnnnnnnnnnnnnnnnnnnnnnnnnnnnnnnnnnnnnnnnnnnnnnnnnnnnnnnnnnnnnnnnnnnnnnnnnnnnnnnnnnnnnnnnnnnnnnnnnnnnnnnnnnnnnnnnnnnnnnnnnnnnnnnnnnnnnnnnnnnnnnnnnnnnnnnnnnnnnnnnnnnnnnnnnnnnnnnnnnnnnnnnnnnnnnnnnnnnnnnnnnnnnnnnnnnnnnnnnnnnnnnnnnnnnnnnnnnnnnnnnnnnnnnnnnnnnnnnnnnnnnnnnnnnnnnnnnnnnnnnnnnnnnnnnnnnnnnnnnnnnnnnnnnnnnnnnnnnnnnnnnnnnnnnnnnnnnnnnnnnnnnnnnnnnnnnnnnnnnnnnnnnnnnnnnnnnnnnnnnnnnnnnnnnnnnnnnnnnnnnnnnnnnnnnnnnnnnnnnnnnnnnnnnnnnnnnnnnnnnnnnnnnnnnnnnnnnnnnnnnnnnnnnnnnnnnnnnnnnnnnnnnnnnnnnnnnnnnnnnnnnnnnnnnnnnnnnnnnnnnnnnnnnnnnnnnnnnnnnnnnnnnnnnnnnnnnnnnnnnnnnnnnnnnnnnnnnnnnnnnnnnnnnnnnnnnnnnnnnnnnnnnnnnnnnnnnnnnnnnnnnnnnnnnnnnnnnnnnnnnnnnnnnnnnnnnnnnnnnnnnnnnnnnnnnnnnnnnnnnnnnnnngaatttcacaagaactttcgccttgtcnctcactcaaaattggcaaatcctcactacaagccggaattacaagctcagacaactctcctcaatttcacagtcacagaagatggtctagaagcccagctgctggcagaggttgtcagtattgagaggccagatttggagaaacttaa

SEQ ID NO: 22907 - DNA, 641 bp, Macaca Mulatta
  misc_feature (1)...(641): n = A,T,C or G
nagcctatctgtcatcgcntgaggtgcncaactcagccagacaaacccaccacgccagcatctccttctacatcaagaccctcactctacaccagttcccatctgctatggacaaatagattttcagtccctgattctgagagttcaaagactaccacaaatactacaactgcaaaggaaatggacaaaaatnnnnnnnnnnnnnnnnnnnnnnnnnnnnnnnnnnnnnnnnnnnnnnnnnnnnnnnnnnnnnnnnnnnnnnnnnnnnnnnnnnnnnnnnnnnnnnnnnnnnnnnnnnnnnnnnnnnnnnnnnnnnnnnnnnnnnnnnnnnnnnnnnnnnnnnnnnnnnnnnnnnnnnnnnnttggaatcaggaggtagtaatcctacaaccagtgattcttacggtgaccgggcttcagcaagagcccgtcgggaggcccgggaggcccgtctagccactctgaccagtcgtgtagaagaagacagcaacagagattataaaaaagnnnnnnnnnnnnnnnnnnnnnnnnnnnnnnnnnnnnnnnnnnnnnnnnnnnnnnnnnnnnnnnnnnnnnnnnnnnnnnnnnnnnnnnnnnnnnnnnnnnnnnnnnngcagaaacaagaaaagacctctgaccga

SEQ ID NO: 22908 - DNA, 457 bp, Macaca Mulatta
ctttatctccagggactctcaggataacccttgagatcactcagctcccctctccttccagaaaaattcaaggtcctcctctagaagtttcaaatctctcccaactctgttctgcatcttccagattggtttaaccaatcactcctccccgccattccagggattgattctcaccagcgtttctgaggaaaaatggcggtttcaagtccccccttcctcgcccacttcacatctcccctaccagcagattctgcgaaagcaccaaatttcccaagaccctcttctccctagcttagcataatgtctggggaaacagccaaaatcgcaattttaacaatatgcctctccacccccatgcactttttctgacatggttttcaggtctaaatagtggctgctcaagtccatgaactcaaaggtttgaagccaccacccactgaactcccgcgtggtggtt

SEQ ID NO: 22909 - DNA, 1985 bp, Macaca Mulatta
  misc_feature (1)...(1985): n = A,T,C or G
aggtgggcagtctcttctgttatgacgaggcaaaaccaaattcccacagaggatggttcccgggtgaccctggctctgattcctttatgggacatgtgtaaccacaccaacggcctnnnnnnnnnnnnnnnnnnnnnnnnnnnnnnnnnnnnnnnnnnnnnnnnnnnnnnnnnnnnnnnnnnnnnnnnnnnnnnnnnnnnnnnnnnnnnnnnnnnnnnnnnnnnnnnnnnnnnnnnnnnnnnnnnnnnnnnnnnnnnnnnnnnnnnnnnnnnnnnnnnnnnnnnnnnnnnnnnnnnnnnnnnnnnnnnnnnnnnnnnnnnnnnnnnnnnnnnnnnnnnnnnnnnnnnnnnnnnnnnnnnnnnnnnnnnnnnnnnnnnnnnnnnnnnnnnnnnnnnnnnnnnnnnnnnnnnnnnnnnnnnnnnnnnnnnnnnnnnnnnnnnnnnnnnnnnnnnnnnnnnnnnnnnnnnnnnnnnnnnnnnnnnnnnnnnnnnnnnnnnnnnnnnnnnnnnnnnnnnnnnnnnnnnnnnnnnnnnnnnnnnnnnnnnnnnnnnnnnnnnnnnnnnnnnnnnnnnnnnnnnnnnnnnnnnnnnnnnnnnnnnnnnnnnnnnnnnnnnnnnnnnnnnnnnnnnnnnnnnnnnnnnnnnnnnnnnnnnnnnnnnnnnnnnnnnnnnnnnnnnnnnnnnnnnnnnnnnnnnnnnnnnnnnnnnnnnnnnnnnnnnnnnnnnnnnnnnnnnnnnnnnnnnnnnnnnnnnnnnnnnnnnnnnnnnnnnnnnnnnnnnnnnnnnnnnnnnnnnnnnnnnnnnnnnnnnnnnnnnnnnnnnnnnnnnnnnnnnnnnnnnnnnnnnnnnnnnnnnnnnnnnnnnnnnnnnnnnnnnnnnnnnnnnnnnnnnnnnnnnnnnnnnnnnnnnnnnnnnnnnnnnnnnnnnnnnnnnnnnnnnnnnnnnnnnnnnnnnnnnnnnnnnnnnnnnnnnnnnnnnnnnnnnnnnnnnnnnnnnnnnnnnnnnnnnnnnnnnnnnnnnnnnnnnnnnnnnnnnnnnnnnnnnnnnnnnnnnnnnnnnnnnnnnnnnnnnnnnnnnnnnnnnnnnnnnnnnnnnnnnnnnnnnnnnnnnnnnnnnnnnnnnnnnnnnnnnnnnnnnnnnnnnnnnnnnnnnnnnnnnnnnnnnnnnnnnnnnnnnnnnnnnnnnnnnnnnnnnnnnnnnnnnnnnnnnnnnnnnnnnnnnnnnnnnnnnnnnnnnnnnnnnnnnnnnnnnnnnnnnnnnnnnnnnnnnnnnnnnnnnnnnnnnnnnnnnnnnnnnnnnnnnnnnnnnnnnnnnnnnnnnnnnnnnnnnnnnnnnnnnnnnnnnnnnnnnnnnnnnnnnnnnnnnnnnnnnnnnnnnnnnnnnnnnnnnnnnnnnnnnnnnnnnnnnnnnnnnnnnnnnnnnnnnnnnnnnnnnnnnnnnnnnnnnnnnnnnnnnnnnnnnnnnnnnnnnnnnnnnnnnnnnnnnnnnnnnnnnnnnnnnnnnnnnnnnnnnnnnnnnnnnnnnnnnnnnnnnnnnnnnnnnnnnnnnnnnnnnnnnnnnnnnnnnnnnnnnnnnnnnnnnnnnnnnnnnnnnnnnnnnnnnnnnnnnnnnnnnnnnnnnnnnnnnnnnnnnnnnnnnnnnnnnnnnnnnnnnnnnnnnnnnnnnnnnnnnnnntagtgatttctaaagatttgtttacttttgtgttttgttttactgtactaagaacttgtcctttctccttgaatcaaagtaggacatgcatcatcctcctaattttaaatgttggctctgattttaaagtggtgcatttgattccagccttggtaatggagagtttgcaaacacacagcggcccacagcttcacgtggtggtgtgcagtgtgaggcagctctctggctttcctggttttcacaacaagctagagattttcaaagctacacttttgagtaaaaacccttattaaaagaaaaaacatgattaat

SEQ ID NO: 22910 - DNA, 140 bp, Macaca Mulatta
gttgtgtggtacctaccctccctcctacaacctgaccttcctctcctcccagaacgtcctgctcatcacgctgataaccaacactgagcggcggcatcccggctttgaggccaccttcttccagctgcctaagatgagca

SEQ ID NO: 22911 - DNA, 829 bp, Macaca Mulatta
  misc_feature (1)...(829): n = A,T,C or G
ncttatttgggttgttggcaatttgagccacgcctctaggcttaagttttttggtcctcttcgaaggaggagagccgaggggtttttttccattgttgtctacagggtgtgttgttgaaaattcccttaaccctgtgggaattcacaccttgcctttaagccctccacaaaaggttttggtggtttacacggtatggaggcccaccacctggtggggttagaagcaaaaggtttttccaggggcatttatattcagggcaggaagattttttgtatggagcggatgggaaataaaccaaggtgaacccaatcaatttgtggccttgagcattaccaggccacggagcagggatgaggaacagaggcagttgtgaggagaaagagttgcaaggatgggaaaaggggcaggaattggcaacccttaagggaggaaaagattcagtccatcaaaactggcccagaattgacacagagtttacaactggcacagagcactgagagagttcatcattgtattccaaatgttcaaaaaaattgagacaggcaagatgtaaaaaagaccccatgtgaaccttctacagatagaaactagaatatctgagatgaaaattaaactggacaagattaacagcatcgtggaaaaaagacattagtgaatataaagatagcaacagaagttacataaaatgaaacagaacaaacaattaaaagcaaataaagagcaacagtctgttgtgggaaaatttcaagtggcctaatatacaggcaacaagaatcaatggaggggaggtggtggatatttgaagaaaaaatgataaaaatgttcccc

SEQ ID NO: 22912 - DNA, 2108 bp, Macaca Mulatta
  misc_feature (1)...(2108): n = A,T,C or G
aggtgcgccgtgtgctgaagagccaggaggtgtacgaaaacttcctccgctgcatcgcactcttcaaccaggagctggtgtctggctccgagctcctgcagctcgtcagcccatttctgggnnnnnnnnnnnnnnnnnnnnnnnnnnnnnnnnnnnnnnnnnnnnnnnnnnnnnnnnnnnnnnnnnnnnnnnnnnnnnnnnnnnnnnnnnnnnnnnnnnnnnnnnnnnnnnnnnnnnnnnnnnnnnnnnnnnnnnnnnnnnnnnnnnnnnnnnnnnnnnnnnnnnnnnnnnnnnnnnnnnnnnnnnnnnnnnnnnnnnnnnnnnnnggtactgaatgacacctgggtctccttcccctcctggtctgaggactccaccttcgtcagctctaagaagacaccgtatgaggagcaacttcactgctgtgaggacgagcgcttcgagnnnnnnnnnnnnnnnnnnnnnnnnnnnnnnnnnnnnnnnnnnnnnnnnnnnnnnnnnnnnnnnnnnnnnnnnnnnnnnnnnnnnnnnnnnnnnnnnnnnnnnnnnnnnnnnnnnnnnnnnnnnnnnnnnnnnnnnnnnnnnnnnnnnnnnnnnnnnnnnnnnnnnnnnnnnnnnnnnnnnnnnnnnnnnnnnnnnnnnnnnnnnnnnnnnnnnnnnnnnnnnnnnnnnnnnnnnnnnnnnctgaaggccaaggaagaggagtggcgggaggcccagcagggcttcaacaagatctggcgggagcagtatgagaaggcgtacctcaagtccctcgaccaccaggctgtgaacttcaagcagaatgacaccaaggccctgcgctccaagagcttgctcaacgagatcgagagcgtctacgacgannnnnnnnnnnnnnnnnnnnnnnnnnnnnnnnnnnnnnnnnnnnnnnnnnnnnnnnnnnnnnnnnnnnnnnnnnnnnnnnnnnnnnnnnnnnnnnnnnnnnnnnnnnnnnnnnnnnnnnnnnnnnnnnnnnnnnnnnnnnnnnnnnnnnnnnnnnnnnnnnnnnnnnnnnnnnnnnnnnnnnnnnnnnnnnnnnnnnnnnnnnnnnnnnnnnnnnnnnnnnnnnnnnnnnnnnnnnnnnnnnnnnnnnnnnnnnnnnnnnnnnnnnnnnnnnnnnnnnnnnnnnnnnnnnnnnnnnnnnnnnnnnnnnnnnnnnnnnnnnnnnnnnnnnnnnnnnnnnnnnnnnnnnnnnnnnnnnnnnnnnnnnnnnnnnnnnnnnnnnnnnnnnnnnnnnnnnnnnnnnnnnnnnnnnnnnnnnnnnnnnnnnnnnnnnnnnnnnnnnnnnnnnnnnnnnnnnnnnnnnnnnnnnnnnnnnnnnnnnnnnnnnnnnnnnnnnnnnnnnnnnnnnnnnnnnnnnnnnnnnnnnnnnnnnnnnnnnnnnnnnnnnnnnnnnnnnnnnnnnnnnnnnnnnnnnnnnnnnnnnnnnnnnnnnnnnnnnnnnnnnnnnnnnnnnnnnnnnnnnnnnnnnnnnnnnnnnnnnnnnnnnnnnnnnnnnnnnnnnnnnnnnnnnnnnnnnnnnnnnnnnnnnnnnnnnnnnnnnnnnnnnnnnnnnnnnnnnnnnnnnnnnnnnnnnnnnnnnnnnnnnnnnnnnnnnnnnnnnnnnnnnnnnnnnnnnnnnnnnnnnnnnnnnnnnnnnnnnnnnnnnnnnnnnnnnnnnnnnnnnnnnnnnnnnnnnnnnnnnnnnnnnnnnnnnnnnnnnnnnnnnnnnnnnnnnnnnnnnnnnnnnnnnnnnnnnnnnnnnnnnnnnnnnnnnnnnnnnnnnnnnnnnnnnnnnnnnnnnnnnnnnnnnnnnnnnnnnnnnnnnnnnnnnnnnnnnnnnnnnnnnnnnnnnnnnnnnnnnnnnnnnnnnnnnnnnnnnnnnnnnnnnnnnnnnnnnnnnnnnnnnnnnnnccagcacctggctcggtacgtggagcagtatgtggggaccgagggcgcatccagctcacccaccgagggcttcctcctgaaacccgtgttcctgcagaggnaggaacctcaagaagttccgccgccggtggcagagcgagcaggcgcgggccctgcgcggcgaggccaggagctcctggaagcggctggtgggc

SEQ ID NO: 22913 - DNA, 493 bp, Macaca Mulatta
ttcattattaagacaattgggcagctctagtccagctcaactgatttcttgtccaatgatccttgtgtggccgagatccagcttcaacgaaccagctagaagctgcgcgttgtgaaacttagtgttagttaatacctcaccatactcagttattccactataaactgtctaaatttgatgaaatttgctttttcagctgttctacaaaattatttaggtagatgtggcatgttggttttttatgtgctaatctaactgtaatgaccttttctacaacatgttttatccattccataaataataaccacattgggaatagtgaggtgtcttttattttctctgctttgtgttattttttcttaacaaactattagatgttatgtttcatattatttgatatttattttcatatttaggataagaatcatttttaattataatacttttaatactttcatatattttacaacagtatactatttaatcttaatga

SEQ ID NO: 22914 - DNA, 851 bp, Macaca Mulatta
ggccttggagcccgagaaggagctttcctggaggccggaggaggtcctgagggagtacaagctgcccgatgggaacatcatcagcctcggggacccgctgtaccaggcgcccgaggccctgttcgcgccccagcagctgggctgccagagccccgggctttcgcatatggtctccagcagcatcaccaagtgtgatgccgacatccagaagatcctctttggggagatcgtgctgtcggggggcactaccctgttccacgggctggatgaccggcttctcaaggagctggagcagctggcctccaaggacactcccatcaagatcacggctccccccgaccggtggttctccacctggattggagcctccatcgtcacctctctgagtagcttcaagcagatgtgggtcaccgccgcagacttcaaggagtttgggagctccgtggtgcagagaagatgcttctgaaggccgcttctcgaggggcacagtggggggtgaacccgagccccagctttgggaggatgttcaataaaggacaaataccggagcacctgtggccgcctccactcagttcctttttgggggcagcagagtcatttctggccctggtggtgaatctgtgaagtggcttggtccacacccactcccctttgcttcctcccaagacagcccgggctgagtccagctattccatctccagtttgtaggaaagtagggccctggacctcaggcgagtagggcactgaagtctgcattctaaacaagggtcttaggtgggccgagagagtcggcagggagggtggggactagtgggtgcgcctggttctgagggctgagcaagaaaccccta

SEQ ID NO: 22915 - DNA, 301 bp, Macaca Mulatta
aggattcttttcacagacgctctctgagacggtcctcaccctcaagcagctccacccaaccccaagaagagagccggaaggtccctgagctctttgtccgtacccaacaggacattctggcctcgagcagcagctccccctccaggacctctctgggtcagcttagtgaactgaccgtagaaaagcggaagagcactgccagcagccctccccatctgcccagcaaagggctgcccccgcgggacagggccaggccgagagatctttctgaggacagcccagcggggatggcagcacagac

SEQ ID NO: 22916 - DNA, 2070 bp, Macaca Mulatta
  misc_feature (1)...(2070): n = A,T,C or G
gatatgagcaagacagtgggcatgacagtggaagtgaggatgcctgttttgattcttcacaaccgtttaccttagttactataggcatgaagaaattttttatacccaagtcacctacttcttctaatnnnnnnnnnnnnnnnnnnnnnnnnnnnnnnnnnnnnnnnnnnnnnnnnnnnnnnnnnnnnnnnnnnnnnnnnnnnnnnnnnnnnnnnnnnnnnnnnnnnnnnnnnnnnnnnnnnnnnnnnnnnnnnnnnnnnnnnnnnnnnnnnnnnnnnnnnnnnnnnnnnnnnnnnnnnnnnnnnnnnnnnnnnnnnnnnnnnnnnnnnnnnnnnnnnnnnnnnnnnnnnnnnnnnnnnnnnnnnnnnnnnnnnnnnnnnnnnnnnnnnnnnnnnnnnnnnnnnnnnnnnnnnnnnnnnnnnnnnnnnnnnnnnnnnnnnnnnnnnnnnnnnnnnnnnnnnnnnnnnnnnnnnnnnnnnnnnnnnnnnnnnnnnnnnnnnnnnnnnnnnnnnnnnnnnnnnnnnnnnnnnnnnnnnnnnnnnnnnnnnnnnnnnnnnnnnnnnnnnnnnnnnnnnnnnnnnnnnnnnnnnnnnnnnnnnnnnnnnnnnnnnnnnnnnnnnnnnnnnnnnnnnnnnnnnnnnnnnnnnnnnnnnnnnnnnnnnnnnnnnnnnnnnnnnnnnnnnnnnnnnnnnnnnnnnnnnnnnnnnnnnnnnnnnnnnnnnnnnnnnnnnnnnnnnnnnnnnnnnnnnnnnnnnnnnnnnnnnnnnnnnnnnnnnnnnnnnnnnnnnnnnnnnnnnnnnnnnnnnnnnnnnnnnnnnnnnnnnnnnnnnnnnnnnnnnnnnnnnnnnnnnnnnnnnnnnnnnnnnnnnnnnnnnnnnnnnnnnnnnnnnnnnnnnnnnnnnnnnnnnnnnnnnnnnnnnnnnnnnnnnnnnnnnnnnnnnnnnnnnnnnnnnnnnnnnnnnnnnnnnnnnnnnnnnnnnnnnnnnnnnnnnnnnnnnnnnnnnnnnnnnnnnnnnnnnnnnnnnnnnnnnnnnnnnnnnnnnnnnnnnnnnnnnnnnnnnnnnnnnnnnnnnnnnnnnnnnnnnnnnnnnnnnnnnnnnnnnnnnnnnnnnnnnnnnnnnnnnnnnnnnnnnnnnnnnnnnnnnnnnnnnnnnnnnnnnnnnnnntcaaagaattatttttcagatatattggtaaagatggactgatattaaagtcatatttattcttttacccccttactgtgttttgtgattttcatttttggcccaattattacatatcaggttttcctggtttatatttacatgtttgaaaagttcattatatattttagtagcgttacatatattataaattttcataacattgttcacttatgtggcattttctgtttctcattggtaataagcatttctaatataagccagtaaaaatacaaatttaattacttagaaatgataactaagatcacaatgactgtgtaccctttgaaatatcttttaatttgaggaattacattctatctaaattgtgtgtttttgaaaggcgttcttacaagtaggtggtttttatttaaactacttatttttttgaagttaaaatgttcagaaactactgttatgcattgtagcagtaatcatttatggaatgcttttgacatgttttagcagagtaaccaaaacttttgggcctgttttttttggttgtccttgttgttatgtttttaatgaaaatctgttactcaggctggtagcattaaattagctttttaccctcaactcaagtagaaaatatcatggagaatttcagtgtttagcaggctgttaatttcccatctatgaatagcactttatgacgtaggctaaactaagcaaataatgcagtgttatgtggatcattgtgcaataaagctgctaaagtcacatttgtggttaagtttgatactcaagccttgtacaagcacatatcatgtagacatttttaaatatgaagctttaacaggaataggatagccgtttcaaacattgtacaattgtaaataaattgttgtgtttctttcatttttaa

SEQ ID NO: 22917 - DNA, 2841 bp, Macaca Mulatta
  misc_feature (1)...(2841): n = A,T,C or G
cactcctgctgaggctgggaagattgaaagcggccatggagaggctgcagtcacagtgaggcctccagattcatgacaacaaagtgcttcatgatgactgggttttcacaccgtttatccacgggccctaatcaatgacagcagcaaaaaggaaagtagacacattggaagccagagagtnnnnnnnnnnnnnnnnnnnnnnnnnnnnnnnnnnnnnnnnnnnnnnnnnnnnnnnnnnnnnnnnnnnnnnnnnnnnnnnnnnnnnnnnnnnnnnnnnnnnnnnnnnnnnnnnnnnnnnnnnnnnnnnnnnnnnnnnnnnnnnnnnnnnnnnnnnnnnnnnnnnnnnnnnnnnnnnnnnnnnnnnnnnnnnnnnnnnnnnnnnnnnnnnnnnnnnnnnnnnnnnnnnnnnnnnnnnnnnnnnnnnnnnnnnnnnnnnnnnnnnnnnnnnnnnnnnnnnnnnnnnnnnnnnnnnnnnnnnnnnnnnnnnnnnnnnnnnnnnnnnnnnnnnnnnnnnnnnnnnnnnttccatcttgctgctgcaaaaggacatgtggaatgcctcagggtcatggttacacatggtgtggatgtgacagcccaagatactaccggnnnnnnnnnnnnnnnnnnnnnnnnnnnnnnnnnnnnnnnnnnnnnnnnnnnnnnnnnnnnnnnnnnnnnnnnnnnnnnnnnnnnnnnnnnnnnnnnnnnnnnnnnnnnnnnnnnnnnnnagcggcacagggctgccttcaagctgtgcagattctctgcgaacataagagccccataaacctcanagatttggnnnnnnnnnnnnnnnnnnnnnnnnnnnnnnnnnnnnnnnnnnnnnnnnnnnnnnnnnnnnnnnnnnnnnnnnnnnnnnnnnnnnnnnnnnnnnnnnnnnnnnnnnnnnnnnnnnnnnnnnnnnnnnnnnnnnnnnnnnnnnnnnnnnnnnnnnnnnnnnnnnnnnnnnnnnnnnnnnnnnnnnnnnnnnnnnnnnnnnnnnnnnnnnnnnnnnnnnnnnnnnnnnnnnnnnnnnnnnnnnnnnnnnnnnnnnnnnnnnnnnnnnnnnnnnnnnnnnnnnnnnnnnnnnnnnnnnnnnnnnnnnnnnnnnnnnnnnnnnnnnnnnnnnnnnnnnnnnnnnnnnnnnnnnnnnnnnnnnnnnnnnnnnnnnnnnnnnnnnnnnnnnnnnnnnnnnnnnnnnnnnnnnnnnnnnnnnnnnnnnnnnnnnnnnnnnnnnnnnnnnnnnnnnnnnnnnnnnnnnnnnnnnnnnnnnnnnnnnnnnnnnnnnnnnnnnnnnnnnnnnnnnnnnnnnnnnnnnnnnnnnnnnnnnnnnnnnnnnnnnnnnnnnnnnnnnnnnnnnnnnnnnnnnnnnnnnnnnnnnnnnnnnnnnnnnnnnnnnnnnnnnnnnnnnnnnnnnnnnnnnnnnnnnnnnnnnnnnnnnnnnnnnnnnnnnnnnnnnnnnnnnnnnnnnnnnnnnnnnnnnnnnnnnnnnnnnnnnnnnnnnnnnnnnnnnnnnnnnnnnnnnnnnnnnnnnnnnnnnnnnnnnnnnnnnnnnnnnnnnnnnnnnnnnnnnnnnnnnnnnnnnnnnnnnnnnnnnnnnnnnnnnnnnnnnnnnnnnnnnnnnnnnnnnnnnnnnnnnnnnnnnnnnnnnnnnnnnnnnnnnnnnnnnnnnnnnnnnnnnnnnnnnnnnnnnnnnnnnnnnnnnnnnnnnnnnnnnnnnnnnnnnnnnnnnnnnnnnnnnnnnnnnnnnnnnnnnnnnnnnnnnnnnnnnnnnnnnnnnnnnnnnnnnnnnnnnnnnnnnnnnnnnnnnnnnnnnnnnnnnnnnnnnnnnnnnnnnnnnnnnnnnnnnnnnnnnnnnnnnnnnnnnnnnnnnnnnnnnnnnnnnnnnnnnnnnnnnnnnnnnnnnnnnnnnnnnnnnnnnnnnnnnnnnnnnnnnnnnnnnnnnnnnnnnnnnnnnnnnnnnnnnnnnnnnnnnnnnnnnnnnnnnnnnnnnnnnnnnnnnngaaagtaagagagttagaggaaaagctggtagagagggagaaaggtacagtgattaagccacctgtggaagagtacgaggaaatgaaaagttcatattgctctgttattgagaacatgaataaggagaaagcatttttgtntgagaaataccaagaggcccaagaagaaatcatgaaattaaaagatacactaaaaagtcagatgacacaggaagccagtgatgaagctgaggacatgaaagaagccatgaataggatgatagatgtactcaacaaacaggtgagcgagctgtcacagctgtacaaagaagcccaggctgaactggaggattacaggaagaggaaatctctagaggatatcacagctgaatatatccataaagcagagcatgagaaactgatgcaattgacaaacgtgtccagggctaaagcagaagatgcactgtccgaaatgaagtctcagtattcaaaagtgttgaacgagttgacccagctcaaacaactggtcgatgcacagaaagagaactctgtctctatcacagaacatttgcaagtgataaccacgctgcggactgcagcaaaagagatggaagaaaaaataagcaatcttaaggaacaccttgcaagcaaggaagtggaagtagcaaagctggagaaacaactcttagaagagaaagctgctatgactgatgcaatgggaccccggtcttcctatgaaaagctccagtcatccttagagagtgaagtgagtgtgttggcatcgaaattaaaggaatcagtgaaagagaaagagaaggtccattcagaggtagcgcagattagaagtgaggtctca

SEQ ID NO: 22918 - DNA, 826 bp, Macaca Mulatta
ccctgcctctgggaggtctcagcttccacctagaccactctcctcagaggccttgggccccaggagctgattgtctctgactgcccatctctccctgttcagagttccatgggctggatgaggccactctactgcgggctctgcaggcactacagcaggaacacaaggccgagatcatcaccgtcagcgatggccgaggcgtcaagttcttctagcagggacctgtctccctttacttcttacctcccacctttccagggctttcaaaaggagacagacccagtgtcccccaaagactggatctgtgactccaccagactcaaaagggctccagtcctcaaggctgggacctggggatgggtttctcataccccatatgtctgtccttggatagggtgaggctgaagcaccagggaggaaagatgtgcttcttgttgccctacctcctttccatcctagactgtccttgagccagggtctataaacctgatactttatatgtgttcacacatgtaagtacatacacacatgcacctgcagcacatgcttctgtctcctcctcctcccacccctttagctgctgttgcctcccttctcaggctggtgctggatccttcccaggggatgggggaagccctggctgcaggcagccttccaggcaatatgaagataggaggcccacgggcctggcagtgagaggtgtggctcgacaccgatttatgatattaaaatctcaactcccactgcctgcctcttaaattactgcagtactggaatggggatggggagggctgtgaagtgttgccacctgagtaaatcccagcct

SEQ ID NO: 22919 - DNA, 780 bp, Macaca Mulatta
tttgaggtgctggccttcaaaaaccggaccctcgggctgatcgatgcttcctggagtgccattcgaatagggatctatgctctgcacctggaaaactggctccagtatttccccctctcccagatcctctttgtcagtggtgagcggcttattgtggaccccgccggggaaatggccaaagtacaggattttctaggcctcaaacgtgttgtgactgagaagcatttctatttcaacaaaaccaaggggttcccttgcctaaagaagccggaagacagcagtgccccgaggtgcttaggcaagagcaaaggtcggactcatcctcgcatcgacccagatgtcatccacagactgaggaaattctacaaacccttcaacatgatgttttaccaaatgactggccaagattttcagtgggaacaggaagagggtgataaatgaggctagagaggcagaagaaggctagtcaatagctaaggaggctccttgcctgagtccttgaataccccagcttctgcagcttcacttgctggagtgccaagtagatctcctcctccttcatgcagccaggattgcctccagtgctgttagcttaggcaaacaggtggatcccacggcatccccatggaggaaccaggcccatctgggcagcagcatctggttgaccagatggccaccagaacccactgttcattcttatcttctgctagttaatatagcgtgaagacagaggataaatagctgtcaatgtcagagacagggctattaatgtatatgtga

SEQ ID NO: 22920 - DNA, 153 bp, Macaca Mulatta
aggcagggaagcccacgaggagataaacatcaccttcaccctgcctacagcgtggagctcagacgactgcgccctccacggtcactgtgagcaggtggtgttcacagcctgcatgaccctcacggccagccctggggtgttccccgtcactgt

SEQ ID NO: 22921 - DNA, 878 bp, Macaca Mulatta
acagaaagagttcccatagcgacagggcactttcctgcactagagtttcccctgccttgtctgtgtgagtgtagctgattatcagagccaacatggcttcctctgagtgccctgcctctgccctgccccaggaggtcaaagacaaagtacttgaagttggagtcacagcagtcacccatgcgtgtgcaatcagcgctaatctccctgtggttctttatcaacagcagccagccgggagagccaagtggttcggagagaaattgctagagccctcagcaaaagctttacggtgtactcactcaccattcagatggagtctccagtcgaccaggatccagactgccttttctgtgaagacccccgtgactagctcagtcacatgtcagcttcccaaatttgacaggcggccttcaaacatgctgctatgcagtttctgcatcatagaaaataaggaaccaaaggaagcaattcatgtcatggtgcaatgcacattttatctatttagttagctccattcaccatgaaggaagaggcactgagatccatcagtcagttggattatatactgatcagtagctgtgttcaattacaggaatgtgtatatagattattcctgagtggagccgaaataatagctgtttgtaactatcggcagtacaaaattcatctcccttccaatgatgcatcttgaggacacataggtaaatttgaactcaggaaagtcttactagaaatcagtggaagggaaaaatagtcacaaaattttcccaaaacatgagaaacaaaaaataaggagagccaagtcaggaataaaatgactctgtatgctaacaccccattagaacttcgttctctcactaagctgtaatgtgattttt

SEQ ID NO: 22922 - DNA, 3230 bp, Macaca Mulatta
  misc_feature (1)...(3230): n = A,T,C or G
ggttatagcatatatcttggaaagaaatgcctgcttattaccagcctattttgcagtcactgagatcaggaaactgtatcctgaaggcaaacttccacactggnnnnnnnnnnnnnnnnnnnnnnnnnnnnnnnnnnnnnnnnnnnnnnnnnnnnnnnnnnnnnnnnnnnnnnnnnnnnnnnnnnnnnnnnnnnnnnnnnnnnnnnnnnnnnnnnnnnnnnnnnnnnnnnnnnnnnnnnnnnnnnnnnnnnnnnnnnnnnnnnnnnnnnnnnnnnnnnnnnnnnnnnnnnnnnnnnnnnnnnnnnnnnnnnnnnnnnnnnnnnnnnnnnnnnnnnnnnnnnnnnnnnnnnnnnnnnnnnnnnnnnnnnnnnnnnnnnnnnnnnnnnnnnnnnnnnnnnnnnnnnnnnnnnnnnnnnnnnnnnnnnnnnnnnnnnnnnnnnnnnnnnnnnnnnnnnnnnnnnnnnnnnnntatgccatggagcgatctgagaccgaggagaagtttgacgatgggggaacaagccaactcctgtggctacatctctcaagtcagctcattttctttgtgcttttccagtttgcaagttttccacatatggtgctttctcttcatcagaagnnnnnnnnnnnnnnnnnnnnnnnnnnnnnnnnnnnnnnnnnnnnnnnnnnnnnnnnnnnnnnnnnnnnnnnnnnnnnnnnnnnnnnnnnnnnnnnnnnnnnnnnnnnnnnnnnnnnnnnnnnnnnnnnnnnnnnnnnnnnnnnnnnnnnnnnnnnnnnnnnnnnnnnnnnnnnnnnnnnnnnnnnnnnnnnnnnnnnnnnnnnnnnnnnnnnnnnnnnnnnnnnnnnnnnnnnnnnnnnnnnnnnnnnnnnnnnnnnnnnnnnnnnnnnnnnnnnnnnnnnnnnnnnnnnngttcctgcagcagagtctgagaaataaaagtttacagatgaatgactataagattgctctattgtgtaatgcatactctacaaattcagaatgttttacattacccatgggagctctggtagaaactatttatggaaatggaattatgaggatacctctccctggaacaaactgtatggcttcaggatctattacccccttacccatgaacctcctggattcactgacagttcatgccaaaatgannnnnnnnnnnnnnnnnnnnnnnnnnnnnnnnnnnnnnnnnnnnnnnnnnnnnnnnnnnnnnnnnnnnnnnnnnnnnnnnnnnnnnnnnnnnnnnnnnnnnnnnnnnnnnnnnnnnnnnnnnnnnnnnnnnnnnnnnnnnnnnnnnnnnnnnnnnnnnnnnnnnnnnnnnnnnnnnnnnnnnnnnnnnnnnnnnnnnnnnnnnnnnnnnnnnnnnnnnnnnnnnnnnnnnnnnnnnnnnnnnnnnnnnnnnnnnnnnnnnnnnnnnnnnnnnnnnnnnnnnnnnnnnnnnnnnnnnnnnnnnnnnnnnnnnnnnnnnnnnnnnnnnnnnnnnnnnnnnnnnnnnnnnnnnnnnnnnnnnnnnnnnnnnnnnnnnnnnnnnnnnnnnnnnnnnnnnnnnnnnnnnnnnnnnnnnnnnnnnnnnnnnnnnnnnnnnnnnnnnnnnnnnnnnnnnnnnnnnnnnnnnnnnnnnnnnnnnnnnnnnnnnnnnnnnnnnnnnnnnnnnnnnnnnnnnnnnnnnnnnnnnnnnnnnnnnnnnnnnnnnnnnnnnnnnnnnnnnnnnnnnnnnnnnnnnnnnnnnnnnnnnnnnnnnnnnnnnnnnnnnnnnnnnnnnnnnnnnnnnnnnnnnnnnnnnnnnnnnnnnnnnnnnnnnnnnnnnnnnnnnnnnnnnnnnnnnnnnnnnnnnnnnnnnnnnnnnnnnnnnnnnnnnnnnnnnnnnnnnnnnnnnnnnnnnnnnnnnnnnnnnnnnnnnnnnnnnnnnnnnnnnnnnnnnnnnnnnnnnnnnnnnnnnnnnnnnnnnnnnnnnnnnnnnnnnnnnnnnnnnnnnnnnnnnnnnnnnnnnnnnnnnnnnnnnnnnnnnnnnnnnnnnnnnnnnnnnnnnnnnnnnnnnnnnnnnnnnnnnnnnnnnnnnnnnnnnnnnnnnnnnnnnnnnnnnnnnnnnnnnnnnnnnnnnnnnnnnnnnnnnnnnnnnnnnnnnnnnnnnnnnnnnnnnnnnngccatgcgtagtcatgaaggaaatgaagcccaggtttgttatttcataattcagttgctgttactcaaaccaaacgattttcgaaatcgagtaagtgactttgtgaaggaaaattccccagagcactggttacagaatgactggcacaccaagcacatgagttatcacaagnnnnnnnnnnnnnnnnnnnnnnnnnnnnnnnnnnnnnnnnnnnnnnnnnnnnnnnnnnnnnnnnnnnnnnnnnnnnnnnnnnnnnnnnnnnnnnnnnnnnnnnnnnnnnnnnnnnnnnnnnnnnnnnnnnnnnnnnnnnnnnnnnnnnnnnnnnnnnnnnnnnnnnnnnnnnnnnnnnnnnnnnnnnnnnnnnnnnnnnnnnnnnnnnnnnnnnnngatcgtccagtgacttatctgtataatactctgcactattatgaaatgcacctgagagaccgcgcatttctcaagcgaaaactcgtccatgcgatcattggctctctcaaggataatcgaccgcagggctggtgtctaagtgacacttacctgaagtgcgctatgaatgcacgagaggaaaatccttgggttccagatgacacctactattgcagattgattggcagactnnnnnnnnnnnnnnnnnnnnnnnnnnnnnnnnnnnnnnnnnnnnnnnnnnnnnnnnnnnnnnnnnnnnnnnnnnnnnnnnnnnnnnnnnnnnnnnnnnnnnnnnnnnnnnnnnnnnnnnnnnnnnnnnnnnnnnnnnnnnnnnnnnnnnnnnnnnnnnnnnnnnnnnnnnnnnnnnnnnnnnnnnnnnnnnnnnnnnnnnnnnnnnnnnnnnnnnnnnnnnnnnnnnnnnnnnnnnnnnnnnnnnnnnngagccgtattggattgttcttcatgatcgaattgtgagtgtcatcagcagccccagcttgacgtctgaaacagagtgggttggctatccattccgcctctttgatttcactgcctgtcatcagtcctactctgagatgagttgtagctatacattagctctcgcacatgctgtgtggcaccattctagcatcggacaactttctctcattccaaag

SEQ ID NO: 22923 - DNA, 712 bp, Macaca Mulatta
  misc_feature (1)...(712): n = A,T,C or G
aggtctctggggtctgatcaataatgctggtattcccggtgtgctggctcccactgactggctgacactagaggactacagagaacctattgaagtgaatctgtttggactcatcagtgtgacactaaatatgcttcccttggtcaagaaagctcaagggagagttattaatgtctccagtgttggaggtcgccttgcaatcgttggagggggctatactccatccaaatatgcagtggaaggtttcaatgacagcttaannnnnnnnnnnnnnnnnnnnnnnnnnnnnnnnnnnnnnnnnnnnnnnnnnnnnnnnnnnnnnnnnnnnnnnnnnnnnnnnnnnnnnnnnnnnnnnnnnnnnnnnnnnnnnnnnnnnnnnnnnnnnnnnnnnnnnnnnnnnnnnnnnnnnnnnnnnnnnnnnnnntctagacaaactgaaaggcaataaatcctatgcgaacatggacctctctccggtggtagagtgcatggaccacgctctaacaagtctcttccctaagactcattatgctgctggaaaagatgccaaaattttctggatacctctgtctcacatgccagcagttttgcaagactttttgttgttgaaacagaaaacagagctggctaatcccaaggcagtgtgactcagccaaccacgggtgcctgctccaggctatgagattggccgatttcaagagcacatctcctt

SEQ ID NO: 22924 - DNA, 217 bp, Macaca Mulatta
taagttctacaggctttctaattggccttgctgatctgtatcttgtctttacttgagatcaagcaagagacaggctccttagcaaatatatgctgtcatatcaggaggtgagacctggacacacagaagaaccaagattctcacagatctgagcccttcatttttcagatgaagattttttttcagtgtgtctgagacagccacagagttacagggc

SEQ ID NO: 22925 - DNA, 865 bp, Macaca Mulatta
  misc_feature (1)...(865): n = A,T,C or G
gctgacacaggagctgaaggaccacaacgccaccagcatcctgcagcagctgccgctgctcggtaccatacgggaacagccagccggaggcatccctgtgctgggcagcgtggtgaacaccatcctgaagtacgtcatctnnnnnnnnnnnnnnnnnnnnnnnnnnnnnnnnnnnnnnnnnnnnnnnnnnnnnnnnnnnnnnnnnnnnnnnnnnnnnnnnnnnnnnnnnnnnnnnnnnnnnnnnnnnnnnnnnnnnnnnnnnnnnnnnnnnnnnnnnnnnnnnnnnnnnnnnnnnnnnnnnnnnnnnnnnnnnnnnnnnnnnnnnnnnnnnnnnnnnnnnnnnnnnnnnnnnnnnnnnnnnnnnnnnnnnnnnnnnnnnnnnnnnnnnnnnnnnnnnnnnnnnnnnnnnnnnnnnnnnnnnnnnnnnnnnnnnnnnnnnnnnnnnnnnnnnnnnnnnnnnnnnnnnnnnnnnnnnnnnnagctgtgtcctgtgatcaaggcttccttcaatagcatgtatgcagacctcctgcagctggtgaannngcccatttccctcagcactgaccgtctggagtttgaccttctgtctcctgccatcaagggcgacaccatcgagcactacctgggggnnnnnnnnnnnnnnnnnnnnnnnnnnnnnnnnnnnnnnnnnnnnnnnnnnnnnnnnnnnnnnnnnnnnnnnnnnnnnnnnnnnnnnnnnnnnnnnnnnnnnnnnnnnnnnnnnnnnnnnnnnnnnnnnnnnnnnnnnnnnnnnnnnnnnnnnnnnnnnnnnnnnnnnnnnnnnnnnnngcttcctgagatagcccgtcggctgaagtcaagcatcagactgatcaatgaaaag

SEQ ID NO: 22926 - DNA, 902 bp, Macaca Mulatta
  misc_feature (1)...(902): n = A,T,C or G
aggcatacactagcgtggctaaggccccactgcacctgcatgagaaccctgacttagccaaggtgatgaacctcattgtcttccactcccgaatgctggactcagtagaaaaactactggtggaaacttctgatctgtctactttctgngctttcatctccgtatctttgagaagatgtttgccatgaccttggaggaacctaccatgttgcgttatgccattgctttccccctgatttgtgctcactttgtccactgcactcatgagatgtgcccagaggagnnnnnnnnnnnnnnnnnnnnnnnnnnnnnnnnnnnnnnnnnnnnnnnnnnnnnnnnnnnnnnnnnnnnnnnnnnnnnnnnnnnnnnnnnnnnnnnnnnnnnnnnnnnnnnnnnnnnnnnnnnnnnnnnnnnnnnnnnnnnnnnnnnnnnnnnnnnnnnnnnnnnnnnnnnnnnnnnnnnnnnnnnnnnnnnnnnnnnnnnnnnnnnnnnnnnnnnnnnnnnnnnnnnnnnnnnnnnnnnnnnnnnnnnnnnnnnnnnnnnnnnnnnnnnnnnnnnnnnnnnnnnnnnnnnnnnnnnnnnnnnnnnnnnnnnnnnnnnnnnnnnnnnnnnnnnnnnnnnnnnnnnnnnnnnnnnnnnnnnnnnnnnnnnnnnnnnnnnnnnnnnnnnnnnnnnnnnnnagagccattgtgtggctggctggctacaacgccacgacccaggagattgtacggccttctgagctgttggcaggagtcaaagcatacattggtttcatacagtcactggcccagtttttgggtgcagatgcttccagagtcatccgcaacgccctcctgcagcagacacaaccactggattcctgcggggagcagacaatcaccactctctacacaaactgg

SEQ ID NO: 22927 - DNA, 379 bp, Macaca Mulatta
attctcaacctggtatacagaggctttgcaagatgaggaagagagagccagagccagagttgcagccaaggctcgcattagtgccacggccggtgcacgttccaaggttaagtccagcaactcctcccaactgcagtaaagtctgaggcagattcttcactttgtgtttgaaaagaaatccacattctgagctgtgggaggtcagggtgggactggagacaacaaggtgaataacatgtttgtgttaatgttctatgtgatgacttggaattttttaaagatgatgttcctttaatagatggttaaagtagcttcattatctaagtttgtgaatgacattgctcaaattttgctgtatgtgagattaagagtaagcgac

SEQ ID NO: 22928 - DNA, 174 bp, Macaca Mulatta
accttctccatgactctctgccctttgttttctaacaccctttgtcactggttaacctttaacttgttatggctctgaccccttctccagcagcttgtgcatttcatctctgtccccaggtctgagtcgacccacctgtcagctctatggtatgcccagcacatggctggaaac

SEQ ID NO: 22929 - DNA, 1176 bp, Macaca Mulatta
  misc_feature (1)...(1176): n = A,T,C or G
gcacacactgacagagtgaacctgcggacactgcgcagttactacaaccagagccaggccnnntctcacaccctccagtggatgattggttgcgacctggggcccgacgggcgcctcctctgcaggtgtgaacagttcgcctacgatggcaaggattacctcgccctgaacgaggacctgtgctcctgaaccgcagcggacactgtggctcagatctccaagcgcaagtgtgaggcggccaaagcgactgaacgaaggagagcctacctggagggcacgtgagtggagtggctccacagatacctggagaatgggaaggagatgctgcagcgtgcggnnnnnnnnnnnnnacacgtgacccaccatcctgtctttgactatgaggccaccctgaggtgctgagccctgggcttctaccctgcggagatcagactgacctggcagcgggagagtgaggaccagacccacgacgtggagctcgtggggaccaggcctgcaggggatggaaccttccagaagtgggcatctgtggtggtgccttctggagaggagcagagattcacgtgctatgtgcagcaccaggggctgcctgagcccctcatgctcagatggnnnnngtctttccagcccactatcctcatcatgggcatcattgctggactggttgtctttgcagctgttgtcactgaagctgtggtcacttttgtgctgtggaggaagaagagctcagatagaaaaggagggagctactctcaggctggaagtaagtatgaaggaggctgatccctgagatccttgggatcttgtggttgggagcccatgggggagctcactcaggccatatttcctcctctggccatatctcctgtgggctctgaccaggtcctgtttttgttgtaccccaggcagtgacagtgtccagggctctgatgtctctcacggcttgtaaatgtgagaccctggggaccagatgtctgtgggttgttggggggaacagtggacacagctgtgccatgaggtttctttgacttggatgtattgagcatgtgctgggctgtttcaagtgtcacccctcactgtgacagatatgaatttgttcatgaatgtttttctgcagtctgagacagctgccctgtgtgggactgaatggcaatccctttgtgacttcaagaaccc

SEQ ID NO: 22930 - DNA, 2542 bp, Macaca Mulatta
  misc_feature (1)...(2542): n = A,T,C or G
aaacatatatccaagctgatcaatttaggacacttccacttaaaagacgtgaaatgtccattcaactaaagtgtcattgtaattgtgtaagttctcagttannnnnnnnnnnnnnnnnnnnnnnnnnnnnnnnnnnnnnnnnnnnnnnnnnnnnnnnnnnnnnnnnnnnnnnnnnnnnnnnnnnnnnnnnnnnnnnnnnnnnnnnnnnnnnnnnnnnnnnnnnnnnnnnnnnnnnnnnnnnnnnnnnnnnnnnnnnnnnnnnnnnnnnnnnnnnnnnnnnnnnnnnnnnnnnnnnnnnnnnnnnnnnnnnnnnnnnnnnnnnnnnnnnnnnnnnnnnnnnnnnnnnnnnnnnnnnnnnnnnnnnnnnnnnnnnnnnnnnnnnnnnnnnnnnnnnnnnnnnnnnnnnnnnnnnnnnnnnnnnnnnnnnnnnnnnnnnnnnnnnnnnnnnnnnnnnnnnnnnnnnnnnnnnnnnnnnnnnnnnnnnnnnnnnnnnnnnnnnnnnnnnnnnnnnnnnnnnnnnnnnnnnnnnnnnnnnnnnnnnnnnnnnnnnnnnnnnnnnnnnnnnnnnnnnnnnnnnnnnnnnnnnnnnnnnnnnnnnnnnnnnnnnnnnnnnnnnnnnnnnnnnnnnnnnnnnnnnnnnnnnnnnnnnnnnnnnnnnnnnnnnnnnnnnnnnnnnnnnnnnnnnnnnnnnnnnnnnnnnnnnnnnnnnnnnnnnnnnnnnnnnnnnnnnnnnnnnnnnnnnnnnnnnnnnnnnnnnnnnnnnnnnnnnnnnnnnnnnnnnnnnnnnnnnnnnnnnnnnnnnnnnnnnnnnnnnnnnnnnnnnnnnnnnnnnnnnnnnnnnnnnnnnnnnnnnnnnnnnnnnnnnnnnnnnnnnnnnnnnnnnnnnnnnnnnnnnnnnnnnnnnnnnnnnnnnnnnnnnnnnnnnnnnnnnnnnnnnnnnnnnnnnnnnnnnnnnnnnnnnnnnnnnnnnnnnnnnnnnnnnnnnnnnnnnnnnnnnnnnnnnnnnnnnnnnnnnnnnnnnnnnnnnnnnnnnnnnnnnnnnnnnnnnnnnnnnnnnnnnnnnnnnnnnnnnnnnnnnnnnnnnnnnnnnnnnnnnnnnnnnnnnnnnnnnnnnnnnnnnnnnnnnnnnnnnnnnnnnnnnnnnnnnnnnnnnnnnnnnnnnnnnnnnnnnnnnnnnnnnnnnnnnnnnnnnnnnnnnnnnnnnnnnnnnnnnnnnnnnnnnnnnnnnnnnnnnnnnnnnnnnnnnnnnnnnnnnnnnnnnnnnnnnnnnnnnnnnnnnnnnnnnnnnnnnnnnnnnnnnnnnnnnnnnnnnnnnnnnnnnnnnnnnnnnnnnnnnnnnnnnnnnnnnnnnnnnnnnnnnnnnnnnnnnnnnnnnnnnnnnnnnnnnnnnnnnnnnnnnnnnnnnnnnnnnnnnnnnnnnnnnnnnnnnnnnnnnnnnnnnnnnnnnnnnnnnnnnnnnnnnnnnnnnnnnnnnnnnnnnnnnnnnnnnnnnnnnnnnnnnnnnnnnnnnnnnnnnnnnnnnnnnnnnnnnnnnnnnnnnnnnnnnnnnnnnnnnnnnnnnnnnnnnnnnnnnnnnnnnnnnnnnnnnnnnnnnnnnnnnnnnnnnnnnnnnnnnnnnnnnnnnnnnnnnnnnnnnnnnnnnnnnnnnnnnnnnnnnnnnnnnnnnnnnnnnnnnnnnnnnnnnnnnnnnnnnnnnnnnnnnnnnnnnnnnnnnnnnnnnnnnnnnnnnnnnnnnnnnnnnnnnnnnnnnnnnnnnnnnnnnnnnnnnnnnnnnnnnnnnnnnnnnnnnnnnnnnnnnnnnnnnnnnnnnnnnnnnnnnnnnnnnnnnnnnnnnnnnnnnnnnnnnnnnnnnnnnnnnnnnnnnnnnnnnnnnnnnnnnnnnnnnnnnnnnnnnnnnnnnnnnnnnnnnnnnnnnnnnnnnnnnnnnnnnnnnnnnnnnnnnnnnnnnnnnnnnnnnnnnnnnnnnnnnnnnnnnnnnnnnnnnnnnnnnnnnnnnnnnnnnnnnnnnnnnnnnnnnnnnnnnnnnnnnnnnnnnnnnnnnnnnnnnnnnnnnnnnnnnnnnnnnnnnnnnnnnnnnnnnnnnnnnnnnnnnnnnnnnnnnnnnnnnnnnnnnnnnnnnnnnnnnnnnnnnnnnnnnnnnnnnnnnnnnnnnnnnnnnnnnnnnnnnnnnnnnnnnnnnnnnnnnnnnnnnnnnnnnnnnnnnnnnnnnnnnnnnnnnnnnnnnnnnnnnnnnnnnnnnnnnnnnnnnnnnnnnnnnnnnnnnnnnnnnnnnnnnnnnnnnnnnnnnnnnnnnnnnnnnnnnnnnnnnnnnnnnnnnnnnnnnnnnnnagattgtgttcgcctatcaaaaattaaaaatgcatttcgtttttgtaaaagatcaataaaacttaaagataatcactgtgagcgacttnnnnnnnnnnnnnnnnnnnnnnnnnnaaggttagtgtactacggaagagactatctgaaaaagaagaaataaaatcgtgcttagagcatgaaaaacttgaatgcgaacaagaactctgtagtgtga

SEQ ID NO: 22931 - DNA, 710 bp, Macaca Mulatta
  misc_feature (1)...(710): n = A,T,C or G
atcttggttctgatatggactggaagagactgggtcaagcaagttatctccctgaggctgttcctcgtctgttaagtgggaatattacctgcctttcctaatcaccagggaataaagtggaataatgttgataagagtacttggcacctggaagtaggtggcagatgttaatgcccttcctcccttgcactgcgacccctgtgtctacctctagtattgtaacgaccacatagtattgaaatagccactttacttgtctggcttcctttccaagaccgttggtgcctaaaggactagaatcgtgttctatttaactttgtattcccaggtcctagctcaggagttggcaaataagaattaaatatctgctacnnnnnnnnnnnnnnnnnnnnnnnnnnnnnnnnnnnnnnnnnnnnnnnnnnnnnnnnnnnnnnnnnnnnnnnnnnnnnnnnnnnnnnnnnnnnnnnnnnnnnnnnnnnnnnnnnnnnnnnnnnnnnnnnnnnnnnnnnnnnnnnnnnnnnnnnnnnnnnnnnnnnnnnnnnnnnnnnnnnnnnnnnnnnnnnnnnnnnnnnnnnnnnnnnnnnnnnnnnnnnnnnnnnnnnnnnnnnnnnnnnnnnnnnnnnnnnnnnnnnnnnnnnnnnnnnnnnnnnnnnnnnnnnnnnnnnnnnnnnnnnnnnnnnnnnnnnnnnnnnnnnnnnnnnnnnnnnnnn

SEQ ID NO: 22932 - DNA, 270 bp, Macaca Mulatta
agactcccaagccctccatctccagcagtaatttaaaccccaaggaggccacggagactgtggtcttatcctgtgatcctgacactccgaacgcaagctacctgtggtggataaatggtcagattctccctatcagtcccaggttgcagctgtctgaaaacaacaggaccctcattctatttggtgtcacaaagcgtactgcaggaccctatgaatgtgaaatgaagagcccagtgagttccagccgcagtgacccagtcaccctgaatc

SEQ ID NO: 22933 - DNA, 740 bp, Macaca Mulatta
  misc_feature (1)...(740): n = A,T,C or G
gaagtagccaaaacaaagccacgtcacgccatgaaacggaagcggacagcagataaatccaccagtacaagtgatcctgtgatcgaggatgaccatgtgcaggtnaggttcttgtattaaaatccaagaatctcgttggagtcactatgaccaattgtggaatcacagatctagtgctaaaagactgtcccaagatgatgttcatccatgnnnnnnnnnnnnnnnnnnnnnnnnnnnnnnnnnnnnnnnnnnnnnnnnnnnnnnnnnnnnnnnnnnnnnnnnnnnnnnnnnnnnnnnnnnnnnnnnnnnnnnnnnnnnnnnnnnnnnnnnnnnnnnnnnnnnnnnnnnnnnnnnnnnnnnnnnnnnnnnnnnncaggtggacacgctaactttggagcagaagctgtttagtggtccctacccctatcacatctgtattatccatgaattcagcaaccctcccaatgtccggaataaggtgcgcattcgcagctggatggacactatagcaaacatcaatcannnnnnnnnnnnnnnnnnnnnnnnnnnnnnnnnnnnnnnnnnnnnnnnnnnnnnnnnnnnnnnnnnnnnnnnnnnnnnnnnnnnnnnnnnnnnnnnnnnnnnggtgttgtggatggagctccatattccatgatttctgacttcccttggctgaggtcattacgagcagcagagcccaacagcttcgctcgatacgactttgaagatgatgaagaaag

SEQ ID NO: 22934 - DNA, 1286 bp, Macaca Mulatta
  misc_feature (1)...(1286): n = A,T,C or G
tgctgtgcaagcatctgcagaacatcagaaaagacttcaacagttcttggagttcaaagaatagttaagtaatataaactgtgttcattacactgctgatacaactacagatgggacagtaaatgttcagcattcttggatcagaagaaaacggactaattagatgcttcctttgtcgtggtggttgctttgaaaactatactttaatgggagaaatcatggaaagaaattctcaacagaataactgaaaacggccttttctgtaccaattgctttttgtgtgtgtggtataataaaatctttattcaattttacagaagcattgaaggcagtcgaaatgtctctagttcatataacttaataataataactaaaaaacttttagaatttacttttgaaaagagggaagccagttctgaaatgagtataggttgacttcatagtcttcttaattaagagtttagctctttgtaaactcaaaatacataaactttttaagtgtagtttcatttactgaaggataaaaatggtaacagtgcagcaaaattcacagaaaaaatattgtctaaaggacatatttttgtaatctgttaggttgtgtttttgtttccagggacaaattaaatttgtatgattacccaaaaaagggtctcagtttacagatgctaactctatataaaggaatgtggaaaaactcagttcttaagttacaagattaaaaattcacatttgatctttaagaaacaattgactgacatctatgaatttattttgtatcatgctagtaaacaccgagtattaatgtatgggtattttcccagctagttttgctttctttttccagaacaaaacattaagtgattgcagagtttttcaagcaagagaaaaaggtttgcaaaaaaacccaggaaatgttcccttttttccccacctttcatcttcattagatcaaattctgtgaaacttgtctggtctctcaaagggagcagcctctgtagtgttaaatggctaattaaaataggaagatctttatagtcagaaacaacttagtcatcaaatagcaagtgaaaccaaaacgtcagagggattactgtacttggaagtatgctgtgtgtcccaaatgtgaacaaagtattgttagaatttattagatcagcttctttggagatcaaagattggaaatcctagtcatagatattcactggactagctttggactgaaatgctcctttgtaattcttttcctnnnntcttttccttctagtgtcccaaaatattttatttaa

SEQ ID NO: 22935 - DNA, 2397 bp, Macaca Mulatta
  misc_feature (1)...(2397): n = A,T,C or G
tggagcggctttggggtctactccagagagcgnnnnnnnnnnnnnnnnnnnnnntctcagaccgtctaccagcgtgtggaaggcccccagaaagggcacctggaggaggaagaggaagacggggaggagacactggcccacttctgccccatggagctgaagggccctgagcccctgggctctagacccaggcagccaaacctcattccctgggcagcagcaggacggagggctgccccctacctggtcctgacggctctactgatcttcactgggnnnnnnnnnnnnnnnnnnnnnnnnnnnnnnnnnnnnnnnnnnnnnnnnnnnnnnnnnnnnnnnnnnnnnnnnnnnnnnnnnnnnnnnnnnnnnnnnnnnnnnnnnnnnnnnnnnnnnnnnnnnnnnnnnnnnnnnnnnnnnnnnnnnnnnnnnnnnnnnnnnnnnnnnnnnnnnnnnnnnnnnnnnnnnnnnnnnnnnnnnnnnnnnnnnnnnnnnnnnnnnnnnnnnnnnnnnnnnnnnnnnnnnnnnnnnnnnnnnnnnnnnnnnnnnnnnnnnnnnnnnnnnnnnnnnnnnnnnnnnnnnnnnnnnnnnnnnnnnnnnnnnnnnnnnnnnnnnnnnnnnnnnnnnnnnnnnnnnnnnnnnnnnnnnnnnnnnnnnnnnnnnnnnnnnnnnnnnnnnnnnnnnnnnnnnnnnnnnnnnnnnnnnnnnnnnnnnnnnnnnnnnnnnnnnnnnnnnnnnnnnnnnnnnnnnnnnnnnnnnnnnnnnnnnnnnnnnnnnnnnnnnnnnnnnnnnnnnnnnnnnnnnnnnnnnnnnnnnnnnnnnnnnnnnnnnnnnnnnnnnggtgaccaatgctcacgactttggggctcatggagtgctcatatacccagagccagcggacttctcccaggacccacacaagtcaagcctgtccagccagtatgctgtgtatgnnnnnnnnnnnnnnnnnnnnnnnnnnnnnnnnnnnnnnnnnnnnnnnnnnnnnnnnnnnnnnnnnnnnnnnnnnnnnnnnnnnnnnnnnnnnnnnnnnnnnnnnnnnnnnnnnnnnnnnnnnnnnnnnnnnnnnnnnnnnnnnggaagctcaaaggccctgtggccccccaggaatgnnnnnnnnnnnnnnnnnnnnnnnnnnnnnnnnnnnnnnnnnnnnnnnnnnnnnnnnnnnnnnnnnnnnnnnnnnnnnnnnnnnnnnnnnnnnnnnnnnnnnnnnnnnnnnnnnnnnnnnnnnnnnnnnnnnnnnnnnnnnnnnnnnnnnnnnnnnnnnnnnnnnnnnnnnnnnnnnnnnnnnnnnnnnnnnnnnnnnnnnnnnnnnnnnnnnnnnnnnnnnnnnnnnnnnnnnnnnnnnnnnnnnnnnnngcttccggccccgcagaagtctcctcttcatcagctgggatggcggtgactttgggagcgtgggctccacagagtggctagaggnnnnnnnnnnnnnnnnnnnnnnnnnnnnnnnnnnnnnnnnnnnnnnnnnnnnnnnnnnnnnnnnnnnnnnnnnnnnnnnnnnnnnnnnnnnnnnnnnnnnnnnnnnnnnnnnnnnnnnnnnnnnnnnnnnnccccaggtggattctcccaaccacagcgggcagactctctatgaacaggtggtgttcaccaatcccagctgggatgctgaggtnnnnnnnnnnnnnnnnnnnnnnnnnnnnnnnnnnnnnnnnnnnnnnnnnnnnnnnnnnnnnnnnnnnnnnnnnnnnnnnnnnnnnnnnnnnnnnnnnnnnnnnnnnnnnnnnnnnnnnnnnnnnnnnnnnnnnnnnnnnnnnnnnnnnnnnnnnnnnnnnnnnnnnnnnnnnnnnnnnnnnnnnnnnnnnnnnnnnnnnnnnnnnnnnnnnnnnnnnnnnnnnnnnnnnnnnnnnnnnnnnnnnnnnnnnnnnnnnnnnnnnnnnnnnnnnnnnnnnnnnnnnnnnnnnnnnnnnnnnnnnnnnnnnnnnaggcccgagggctgaccctgcagtgggtgaactccgcgcggggggactacatccgggcggcggagaagctgcggcaggagatctacatgctcggacgagagagacgagcgactgacacgcatgtacaacgtgcgcataatgcgggtnnnnnnnnnnnnnnnnnnnnnnnnnnnnnnnnnnnnnnnnnnnnnnnnnnnnnnnnnnnnatgggccgcggagaccacacgctgggcgccctgctggaccacctgcggctgctgcgctccaacagctccgggacccccggggccacctcctccgccgtcttccaggagagtcgcttccggcgtcagctagccctgctcacctggacgctgcaaggggcagccaatgcgcttagcggggacgtctggaacattgataacaacttctg

SEQ ID NO: 22936 - DNA, 708 bp, Macaca Mulatta
  misc_feature (1)...(708): n = A,T,C or G
cagggaaggccgtgctgctttaataacttccttctgtgtgtttaaatttatggcattgtacagcattatccagtacttcagtgtgactctcctgtattcnnnnnnnnnnnnnnnnnnnnnnnnnnnnnnnnnnnnnnnnnnnnnnnnnnnnnnnnnnnnnnnnnnnnnnnnnnnnnnnnnnnnnnnnnnnnnnnnnnnnnnnnnnnnnnnnnnnnnnnnnnnnnnnnnnnnnnnnnnnnnnnnnnnnnnnnnnnnnnnnnnnnnnnnnnnnnnnnnnnnnnnnnnnnnnnnnnnnnnnnnnnnnnnnnnnnnnnnnnnnnnnnnnnnnnnnnnnnnnnnnnnnnnnnnnnnnnnnnnnnnnnnnnnnnnnnnnnnnnnnnnnnnnnnnnnnnnnnnnnnnnnnnnnnnnnnnnnnnnnnnnnnnnnnnnnnnnnnnnnnnnnnnnnnnnnnnnnnnnnnnnnnnnnnnnnnnnnnnnnnnnnnnnnnnnnnnnnnnnnnnnnnnnnnnnnnnnnnnnnnnnnnnnnnnnnnnnnnnnnnnnnnnnnnnnnnnnnnnnnnnnnnnnnnnnnnnnnnnnnnnnnnnnnnnnnnnnnnnnnnnnnnnnnnnnnnnnnnnnnnnnnnnagatagtgtgtgtaccatatcagtggcgtgtaactatgctcatcattgttcttgtcaatgcctttgtatctatcacagtggagg

SEQ ID NO: 22937 - DNA, 125 bp, Macaca Mulatta
ggtgaaggagtacctcctggcagctatgggaactatggctatgctaatagtgggtatagtgcctgtgaagaagaaaatgagaggctcactgaaagtctgagaagcaaagtaactgctataaaatc

SEQ ID NO: 22938 - DNA, 2686 bp, Macaca Mulatta
  misc_feature (1)...(2686): n = A,T,C or G
tagatctaaatcaaactcctcagaccacattgccacaattatttcttaaagtgggggaacccttatggataaggtgcaaagctgttcatgtgaaccatggattcgggctcacctgggaattagaaaacaaagcacttgaggagnngggcagctactttgagatgagtacctattcaacaaacagaactatgatacggattctgtttgcattttgtatcatcaagtggcaagaaacaacacgggatactacacttgttcctcttcaaagcatcccaggcatccgctttggttaccatcgtagnnnnnnnnnnnnnnnnnnnnnnnnnnnnnnnnnnnnnnnnnnnnnnnnnnnnnnnnnnnnnnnnnnnnnnnnnnnnnnnnnnnnnnnnnnnnnnnnnnnnnnnnnnnnnnnnnnnnnnnnnnnnnnnnnnnnnnnnnnnnnnnnnnnnnnnnnnnnnnnnnnnnnnnnnnnnnnnnnnnnnnnnnnnnnnnnnnnnnnnnnnnnnnnnnnnnnnnnnnnnnnnnnnnnnnnnnnnnnnnnnnnnnnnnnnnnnnnnnnnnnnnnnnnnnnnnnnnnnnnnnnnnnnnnnnnnnnnnnnnnnnnnnnnnnnnnnnnnnnnnnnnnnnnnnnnnnnnnnnnnnnnnnnnnnnnnnnnnnnnnnnnnnnnnnnnnnnnnnnnnnnctgcacagaagacatcccagaaggagtctggaatagaaaggctaacagaaaagtgtttggacagtgggtgtccagcagtactctaaacatgagtgaagccatgaaagggttcctggtcaagtgctgtgcatacaattcccttggcacatcttgtgagacgatccttttaaactctccagnnnnnnnnnnnnnnnnnnnnnnnnnnnnnnnnnnnnnnnnnnnnnnnnnnnnnnnnnnnnnnnnnnnnnnnnnnnnnnnnnnnnnnnnnnnnnnnnnnnnnnnnnnnnnnnnnnnnnnnnnnnnnnnnnnnnnnnnnnnnnnnnnnnnnnnnnnnnnnnnnnnnnnnnnnnnnnnnnnnnnnnnnnnnnnnnnnnnnnnnnnnnnnnnnnnnnnnnnnnnnnnnnnnnnnnnnnnnnnnnnnnnnnnnnnnnnnnnnnnnnnnnnnnnnnnnnnnnnnnnnnnnnnnnnnnnnnnnnnnnnnnnnnnnnnnnnnnnnnnnnnnnnnnnnnnnnnnnnnnnnnnnnnnnnnnnnnnnnnnnnnnnnnnnnnnnnnnnnnnnnnnnnnnnnnnnnnnnnnnnnnnnnnnnnnnnnnnnnnnnnnnnnnnnnnnnnnnnnnnnnnnnnnnnnnncaggaccaatttacttgatttttgaatattgttgctatggtgatcttctcaactatctaagaagtaaaagagaaaaatttcacaggacttggacagagattttcaaggaacacaatttcagtttttaccccactttccaatcacatccaaattccagnnnnnnnnnnnnnnnnnnnnnnnnnnnnnnnnnnnnnnnnnnnnnnnnnnnnnnnnnnnnnnnnnnnnnnnnnnnnnnnnnnnnnnnnnnnnnnnnnnnnnnnnnnnnnnnnnnnnnnnnnnnnnnnnnnnnnnnnnnnnnnnnnnnnnnnnnnnnnnnnnnnnnnnnnnnnnnnnnnnnnnnnnnnnnnnnnnnnnnnnnnnnnnnnnnntgtgttcacagagacctggccgccaggaacgtgcttgtcacccacgggaaagtggtgaagatatgtgactttggattggctcgagatatcatgagtgattccaactatgttgtcaggggcaatgnnnnnnnnnnnnnnnnnnnnnnnnnnnnnnnnnnnnnnnnnnnnnnnnnnnnnnnnnnnnnnnnnnnnnnnnnnnnnnnnnnnnnnnnnnnnnnnnnnnnnnnnnnnnnnnnnnnnnnnnnnnnnnnnnnnnnnnnnnnnnnnnnnnnnnnnnnnnnnnnnnnnnnnnnnnnnnnnnnnnnnnnnnnnnnnnnnnnnnnnnnnnnnnnnnnnnnnnnnnnnnnnnnnnnnnnnnnnnnnnnnnnnnnnnnnnnnnnnnnnnnnnnnnnnnnnnnnnnnnnnnnnnnnnnnnnnnnnnnnnnnnnnnnnnnnnnnnnnnnnnnnnnnnnnnnnnnnnnnnnnnnnnnnnnnnnnnnnnnnnnnnnnnnnnnnnnnnnnnnnnnnnnnnnnnnnnnnnnnnnnnnnnnnnnnnnnnnnnnnnnnnnnnnnnnnnnnnnnnnnnnnnnnnnnnnnnnnnnnnnnnnnnnnnnnnnnnnnnnnnnnnnnnnnnnnnnnnnnnnnnnnnnnnnnnnnnnnnnnnnnnnnnnnnnnnnnnnnnnnnnnnnnnnnnnnnnnnnnnnnnnnnnnnnnnnnnnnnnnnnnnnnnnnnnnnnnnnnnnnnnnnnnnnnnnnnnnnnnnnnnnnnnnnnnnnnnnnnnnnnnnnnnnnnnntaatgaactttattgcagcatcaacctgcatccaaggccttctcaggctggcttgagtganattgtgtacctngaagtacagtatattcttgtaaatatacataaaacaaaagcattttgctaaggagaagctaatatgattttttaaatctgtgttttaaaataatatgtaactttttcagctatttagtgatatattttatggatgggaataaaatttctactacagaa

SEQ ID NO: 22939 - DNA, 1152 bp, Macaca Mulatta
  misc_feature (1)...(1152): n = A,T,C or G
ggggaacatcacctaccactgcgggaacagcattgcatacatggatgaggagactggcaacctgaaaaaggctgtcattctacagggctctaatgatgttgaacttgttgctgagggcaacagcaggttcacttacactgttctcgtagatggctgctctaaaaagacaaatgaatggggaaagacaatcattgaatacaaaacaaataagccatctcgcctgcccttccttgatattgcacctttggacatcggtggtgccaaccaggaattctttgtggacattggcccagtctgtttcaaataaatgaactcaacctaaattnnnnnnnnnnnnnnnnnnnnnnnnnnnnnnntttctctttgccatttcttcttcttctttttttaactgaaagctgaatccttccatttcttctgcacatctacttgcttaaattgtgggnnnnnnnnnnnnagaaggattgatcagagcattgtgcaatacaatttcattaactccctcccccgctccccccaagatttgaaattttttttcaacactcttacacctgttatggaaaatgtcaacctttgtaagaaaaccaaaataagaattgaaaaataaaaaccatgaacatttgcaccacttgtggcttttgaatatcttccacagagggaagtttaaaacccaaacttccaaaggtttaaactacctcaaaacactttcccgtgagtgtgatccacattgttaggtgctgacctaggcagagatgaactgaggtccttgttttgttttgttcatgatacaaaggtgctaattaatagtatttcagatacttgaagaatgttgatggtgctagaagaatttcagaagaaatactcctgtattgagttgtattgtgtgggggtatttttttaaaaatttgatttagcattcatattttccatcttactcccaattaaaagtatgcagattatttgcccaaagttgtcctctttcttcaaattcagcgtttggtctttgccagtctcattttcatcttccatggtttcatggaagctttgtttcttgggcaagcagaaaaattaaattgtacctattttgtatatgtgagatgtttaaataaattgtgaaaaaaatgaaataaagcatgtttggttttccaaaga

SEQ ID NO: 22940 - DNA, 699 bp, Macaca Mulatta
  misc_feature (1)...(699): n = A,T,C or G
aaaagaggtatggggacagagacgatggattggatcctaatgactttgaccccaagacatttttcaaattacatgatgttaatagtgatggattcctggatgagcaagaattagaagccctatttactaaagagttggagaaagtatatgaccctaaaaatgaagaggatgatatggtagaaatggaagaagaaaggcttagaatgagggaacatgtaatgaatgaggttgatactaacaaagacagattggtgactctggaggagtttttgaaagccacagaaaaaaaagaattcttggagccagatagctgggagacattagatcagcaacagttcttcacagaggaagaactaaaagaatatgaaaatattattgctttacaagaaaatgaacttaagaagaaggcagatgagcttcagaaacaaaaagaagagctacaacgtcagcatgatcaactggaggctcagaagctggaatatcatcaggtcatacagcagatggaacaaaaaaaattacaacaaggaattcctccatcagggccagctggagaattgaagtttgagccacacatctaaagtctgaagtccaccagagctcggaagaaagctgttaactcaacatctatttcatctttttagctcccttcctttttctctgctcaatacatatcttaaaagcnnnnnnnnnnnnnnnnnn

SEQ ID NO: 22941 - DNA, 422 bp, Macaca Mulatta
  misc_feature (1)...(422): n = A,T,C or G
agatacccctgatcaagaaggccaccggtgtgcaggtgtgaggctcctgcaggcccactctcttcagcagccacccagccctccctccagcacccgttttaatcccacagaacaacgggaatgttactgactctggtgccttatcttgaagggaccagaagtgctgcgtgttcaggccnnnnnnnnnnnnnnnnnnnnnnnnnnnnnnnnnnnnnnnnnnnnnnnnnnnnnntttaccccactttcactgccactttcatcaggtttgtgtctcatctccctgtgtgtcttttcctttatctctttttctttccccctatgcacatcatgtagtttaagctgaagatgtttattacaatcactctctgtctgtggggggtggccctgctgctcctcagaaacctggtgccttgaagttctct

SEQ ID NO: 22942 - DNA, 540 bp, Macaca Mulatta
tgtgcagaggagatggaggagaaggcagcccccctgctaaaggcggaaatggcccaccatgccctgcttcgggaatcctgggaggcagcccaggaggcctgggaggacaggcatcgagggctcaccttaccccctggcttcaaagcccagaatggaatagccattatggtctacaccaactcatctaacaccttgtactggaagttgaatcaggccgtgcggacaggcggagtctcccgggagctctacatgaggcactttcccttcaaggccctgcatttctacctgatccgggccctgcagctgcttcgaggcggtgggggctgcagcacagggcctggggaggtggtgttccgaggtgtgggcagccttcgctttgaacccaaaaggctgggggactctgtccgcttaggccagtttgcctccagctccctggataaggcagtggcctgcagatttggtaatgccaccctcttttctctaacgacttgctttggggcccctatccaggccttctctgtctttcccaaggagcgcgag

SEQ ID NO: 22943 - DNA, 1698 bp, Macaca Mulatta
  misc_feature (1)...(1698): n = A,T,C or G
aaatgcttgaggagagagagaaaggagccagccatgaatcctttccagaaaaatgagtccaaggaaactcttttttcacctgtctccattgaagacgtaccacctcgacctcccagccctccaaagaagccatctccnnnnnnnnnnnnnnnnnnnnnnnnnnnnnnnnnnnnnnnnnnnnnnnnnnnnnnnnnnnnnnnnnnnnnnnnnnnnnnnnnnnnnnnnnnnnnnnnnnnnnnnnnnnnnnnnnnnnnnnnnnnnnnnnnnnnnnnnnnnnnnnnnnnnnnnnnnnnnnnnnnnnnnnnnnnnnnnnnnnnnnnnnnnnnnnnnnnnnnnnnnnnnnnnnnnnnnnnnnnnnnnnnnnnnnnnnnnnnnnnnnnnnnnnnnnnnnnnnnnnnnnnnnnnnnnnnnnnnnnnnnnnnnnnnnnnnnnnnnnnnnnnnnnnnnnnnnnnnnnnnnnagtcctatcattagtcggcctgagtctaatagctttggggacaggaggcatcaaaccctgtgtggcagcttttggtggagaccagtttgaagaaaaacatnnnnnnnnnnnnnnnnnnnnnnnnnnnnnnnnnnnnnnnnnnnnnnnnnnnnnnnnnnnnnnnnnnnnnnnnnnnnnnnnnnnnnnnnnnnnnnnnnnnnnnnnnnnnnnnnnnnnnnnnnnnnnnnnnnnnnnnnnnnnnnnnnnnnnnnnnnnnnnnnnnnnnnnnnnnnnnnnnnnnnnnnnnnnnnnnnnnnnnnnnnnnnnnnnnnnnnnnnnnnnnnnnnnnnnnnnnnnnnnnnnnnnnnnnnnnnnnnnnnnnnnnnnnnnnnnnnnnnnnnnnnnnnnnnnnnnnnnnnnnnnnnnnnnnnnnnnnnnnnnnnnnnnnnnnnnnnnnnnnnnnnnnnnnnnnnnnnnnnnnnnnnnnnnnnnnnnnnnnnnnnnnnnnnnnnnnnnnnnnnnnnnnnnnnnnnnnnnnnnnnnnnnnnnnnnnnnnnnnnnnnnnnnnnnnnnnnnnnnnnnnnnnnnnnnnnnnnnnnnnnnnnnnnnnnnnnnnnnnnnnnncaggttctaaatccccttctggttcttatcttcatcccattgtttgactttgtcatttatcgtctggtctccaagtgtggaattaacttctnnnnnnnnnnnnnnnnnnnnnnnnnnnnnnnnnnnnnnnnnnnnnnnnnnnnnnnnnnnnnnnnnnnnnnnnnnnnnnnnnnnnnnnnnnnnnnnnnnnnnnnnnnnnnnnnnnnnnnnnnnnnnnnnnnnnnnnnnnnnnnnnnnnnnnnnnnnnnnnnnnnnnnnnnnnnnnnnnnnnnnnnnnnnnnnnnnnnnnnnnnnnnnnnnnnnnnagaaaacaccacagtattccaaactgcacctgaaaacaaaaagccagaattttcacttccacctgaaatatcacaatttgtctctctacactgagcattctgtgcaggagatgaactggtacagtcttgtcattcgtgaagatgggaacagtatctccagcatgatggtaanggtaaaggatacagaaagccaaacaaccaatgggatgacaacnnnnaggtttgttaacactttgcataaaggtgtcaacatctccctgagtaaagatacctctctcaatgttggtgaagactatggtgtgtctgcgtatagaacagtgcaaagaggag

SEQ ID NO: 22944 - DNA, 208 bp, Macaca Mulatta
gatcatatctatcatgcctctattatctgggatctgggtctctctccatctttcacacatacagtacctttggtaacagaaatatccctggctctggtgcatatttgggtcctggatacgtcaacaggtggttctgtccagagtctccatcacaccttaagggctaccaaagtcctggcttagcggattagaaatttggggcacttct

SEQ ID NO: 22945 - DNA, 252 bp, Macaca Mulatta
tgaccttagcaccggaaattgtgctcgtgatgtatcagggagcttggtggtatagaacctgccatgtgtcaaacctgaatggtcgctacctcaggggggctcacgacagctttgcaaatggcatcaactggaagtcggggaaaggatacaattacagctacaaggtgtcagagatgaaggtgcgacctgcctagcccaggccggcctcagggtcaggacgcctccacacacagttggtggggggtagggttg

SEQ ID NO: 22946 - DNA, 805 bp, Macaca Mulatta
tggaacgcgttcggcacaggggaggaggtgataaagtttcggacggttgtttgttcggcccaagttctgcttccccgaggggcgggttgttcctgaaaacccctcccgtgcaatttttggggggcccaaaaaggttttggcagtatttcgggaagccctttttcctttgttttttctgaggcacgggggtttcttcaggagcaatacgccccccgtttgtactgccaggacccggggattaacaaggcgctgattcttgggggctttggtcctaggtttgttcccttctttgtttaagggctttcttacaacatactggcggacgtcatcttctttagagagattgaaaagtttgcggattctgctagctcttttggggcccaggcggcgaggaactgtagtatcagtcagtccaggaatatccttctctcctttttttacaataaccaagttgagaacgctcagattggcatccacaatgcaaccacgaactgattttctctttctttctcccgttctccttggtctgtaacaggaatgccccttactcagtagcaggcggacacggccatgggtcaagacaccctgcttcatggggaaaccttgtttgtcgttcccaccactgattcggaccacataacccttccattcttcacccagagcgtcagcagcaacttctgtggccatacgcttctcataaaaagtacgaagtttgcgttcatcgtccacttcaatgagtttctggcagccagtggcttcatcttgaagcagctgaacgcctccgaggcgccacggaaaagagccc

SEQ ID NO: 22947 - DNA, 523 bp, Macaca Mulatta
tcgggggcccaccatgctggtgactgcctaccttgcttttgtaggcctcctggcctcctgcctggggctggaactgtcaaggtgccgggctaagccccctggaagggcctgcagcaatccctccttccttcggtttcagctggacttctatcaagtctacttcctggccctggcagctgactggctccaggccccctacctctataaactctaccagcattactacttcctggaaggtcaaattgccatcctgtatgtctgtggccttgcctctacagtcctctttggcctggtggcctcctcccttgtggattggctgggtcgcaagaattcttgtgtgctcttctctctcacttactcactatgctgcttaaccaaactctctcaagactactttgtgctgctagtgggccgagcacttggtgggctgtctacagccctgctcttctcagccttcgaggcctggtacatccatgagcacgtggaacggcatgacttccctgccgagtggatcccagctacc

SEQ ID NO: 22948 - DNA, 228 bp, Macaca Mulatta
agctgtttcatgaggctgcctaccaggcagacgaccggcaagacctcctgagcgccatcagcgagttcttggatggcagcattgtgatccccccgtccgaggtggagggccgcgacctgctacgctccgtggctgccttccagcgagagctgcttaggaagcggcgggagcgtgaacagaccaaagttgagatgaccacacggggtggctacacggcccctgggaaag

SEQ ID NO: 22949 - DNA, 833 bp, Macaca Mulatta
  misc_feature (1)...(833): n = A,T,C or G
agggtctgcatttgcaaaggcaaagcctgaaagtccttggacttccctgaccagaaagggaatcgttcgagttgtatttttcccctttttcttccggtggtggttacaagtaacatcaaaggtcatttttttctggcttcttgtcctttatcttcttcaannnnnnnnnnnnnnnnnnnnnnnnnnnnnnnnnnnnnnnnnnnnnnnnnnnnnnnnnnnnnnnnnnnnnnnnnnnnnnnnnnnnnnnnnnnnnnnnnnnnnnnnnnnnnnnnnnnnnnnnnnnnnnnnnnnnnnnnnnnnnnnnnnnnnnnnnnnnnnnnnnnnnnnnnnnnnnnnnnnnnnnnnnnnnnnnnnnnnnnnnnnnnnnnnnnnnnnnnnnnnnnnnnnnnnnnnnnnnnnnnnnnnnnnnnnnnnnnnnnnnnnnnnnnnnnnnnnnnnnnnnnnnnnnnnnnnnnnnnnnnnnnnnnnnnnnnnnnnnnnnnnnnnnnnnnnnnnnnnnnnnnnnnnnnnnnnnnnnnnnnnnnnnnnnnnnnnnnnnnnnnnnnnnnnnnnnnnnnnnnnnnnnnnnnnnnnnnnnnnnnnnnnnnnnnnnnnnnnnnnnnnnnnnnnnnnnnnnnnactattcaaccagaagagacagcctggaacgcaggaacactnnnnnnnnnnnnnnnnnngatacccaaaggaaagtaacaaatgtctctgatgaagtctccagtgaggaaggtcctgaaacaggatactcattacgtcgtcacgtggacaggacttctgaaagcgttcttcggaatagaaagtcacaccattataagaaacattaccctaatgag

SEQ ID NO: 22950 - DNA, 2602 bp, Macaca Mulatta
  misc_feature (1)...(2602): n = A,T,C or G
ggacccagctcagagaagcctgtataaagatgtcatgatggagaattatggaaacctggtctcactgnnnnnnnnnnnnnnnnnnnnnnnnnnnnnnnnnnnnnnnnnnnnnnnnnnnnnnnnnnnnnnnnnnnnnnnnnnnnnnnnnnnnnnnnnnnnnnnnnnnnnnnnnnnnnnnnnnnnnnnnnnnnnnnnnnnnnnnnnnnnnnnnnnnnnnnnnnnnnnnnnnnnnnnnnnnnnnnnnnnnnnnnnnnnnnnnnnnnnnnnnnnnnnnnnnnnnnnnnnnnnnnnnnnnnnnnnnnnnnnnnnnnnnnnnnnnnnnnnnnnnnnnnnnnnnnnnnnnnnnnnnnnnnnnnnnnnnnnnnnnnnnnnnnnnnnnnnnnnnnnnnnnnnnnnnnnnnnnnnnnnnnnnnnnnnnnnnnnnnnnnnnnnnnnnnnnnnnnnnnnnnnnnnnnnnnnnnnnnnnnnnnnnnnnnnnnnnnnnnnnnnnnnnnnnnnnnnnnnnnnnnnnnnnnnnnnnnnnnnnnnnnnnnnnnnnnnnnnnnnnnnnnnnnnnnnnnnnnnnnnnnnnnnnnnnnnnnnnnnnnnnnnnnnnnnnnnnnnnnnnnnnnnnnnnnnnnnnnnnnnnnnnnnnnnnnnnnnnnnnnnnnnnnnnnnnnnnnnnnnnnnnnnnnnnnnnnnnnnnnnnnnnnnnnnnnnnnnnnnnnnnnnnnnnnnnnnnnnnnnnnnnnnnnnnnnnnnnnnnnnnnnnnnnnnnnnnnnnnnnnnnnnnnnnnnnnnnnnnnnnnnnnnnnnnnnnnnnnnnnnnnnnnnnnnnnnnnnnnnnnnnnnnnnnnnnnnnnnnnnnnnnnnnnnnnnnnnnnnnnnnnnnnnnnnnnnnnnnnnnnnnnnnnnnnnnnnnnnnnnnnnnnnnnnnnnnnnnnnnnnnnnnnnnnnnnnnnnnnnnnnnnnnnnnnnnnnnnnnnnnnnnnnnnnnnnnnnnnnnnnnnnnnnnnnnnnnnnnnnnnnnnnnnnnnnnnnnnnnnnnnnnnnnnnnnnnnnnnnnnnnnnnnnnnnnnnnnnnnnnnnnnnnnnnnnnnnnnnnnnnnnnnnnnnnnnnnnnnnnnnnnnnnnnnnnnnnnnnnnnnnnnnnnnnnnnnnnnnnnnnnnnnnnnnnnnnnnnnnnnnnnnnnnnnnnnnnnnnnnnnnnnnnnnnnnnnnnnnnnnnnnnnnnnnnnnnnnnnnnnnnnnnnnnnnnnnnnnnnnnnnnnnnnnnnnnnnnnnnnnnnnnnnnnnnnnnnnnnnnnnnnnnnnnnnnnnnnnnnnnnnnnnnnnnnnnnnnnnnnnnnnnnnnnnnnnnnnnnnnnnnnnnnnnnnnnnnnnnnnnnnnnnnnnnnnnnnnnnnnnnnnnnnnnnnnnnnnnnnnnnnnnnnnnnnnnnnnnnnnnnnnnnnnnnnnnnnnnnnnnnnnnnnnnnnnnnnnnnnnnnnnnnnnnnnnnnnnnnnnnnnnnnnnnnnnnnnnnnnnnnnnnnnnnnnnnnnnnnnnnnnnnnnnnnnnnnnnnnnnnnnnnnnnnnnnnnnnnnnnnnnnnnnnnnnnnnnnnnnnnnnnnnnnnnnnnnnnnnnnnnnnnnnnnnnnnnnnnnnnnnnnnnnnnnnnnnnnnnnnnnnnnnnnnnnnnnnnnnnnnnnnnnnnnnnnnnnnnnnnnnnnnnnnnnnnnnnnnnnnnnnnnnnnnnnnnnnnnnnnnnnnnnnnnnnnnnnnnnnnnnnnnnnnnnnnnnnnnnnnnnnnnnnnnnnngatgcaataaatgtagaccgttacataagctcaatttgatttgagactagttacccaagcgctgttttagtatggctcaacgtgggtcaaatttggtgataaagcaaattctccttggcctcagacaaatggtttctaaagattctgtgaatagtggacaactgcccatgagcatctgacttcccttactctttgtttgatgatcataaagacttagtaatttatataagtatctttaataaatctttcagcagagagattaaacctaggttcagagcatgggtgctctgagggacaaagtaggattgctataagggagctggagcagctgatattggaaaactgagaataatgattcaaagagtcttctgtcaccatctcatattgtggttctttcagttccatgatatgtttggctctgcatgccaaagtccagtgattaagcacatataagttgtcaaggaaacaaagcccaaatgtttttgaaatcaatatacagtttttgtccttgtttaagtaagccagatgtttggcatgtgagttaaaggcagttccaatgcctgatggttcccagatctatgaaatgagtggaccattaaccttacatgtaaagattatgttagtaattaagaaacctaacaaaggtgttaccaaggaacctttgggagtgccttttttgtttctcaagatggacccaaaaaagtggaggaaaatactgttcttttgtgccctcctacctgtgaaagatatttgtagtcctatgtgaatgagcttattcctccacaaccaggtgcatataaaagtgtacatattttgattgccaag

SEQ ID NO: 22951 - DNA, 932 bp, Macaca Mulatta
  misc_feature (1)...(932): n = A,T,C or G
ggcatgaaatgcttattaaaaccttactatactatttcttcaaggcaagcaaattgaccatgagaaaagaacagagttatttaacactgttgatgggaaaattctccttgataacatacgacaattnnnnnnnnnnnnnnnnnnnattatttgcaaagaatgaacaagttaatgaacaaacaagctatgtttggtatgttttcagcttttgtatcatgtttaattgtttaatttggttgaaaaactgcagttgagaaatcggatagcaatatagatattcacagcggctctgtggataccatgtaattgtcaggtaatttcagaatattgaaaattattcagtgcagccctcatagtataatacttgaagaaattgattacagttccaccaaattgttgaagataaattatttttaaaggttacgaaaactgagttatattaattcatatgtttgatttttaaatcccacctacctcctcaagctctatcctattttctgattttgaaaataaccatgagagatgccacatttctctctgggaaactaccactcaaagtataattgttaaaaattaagcttttaggtattagaagctgttataaagtataaaatttagacataagcagatcacatgtaaatcattcctaaagcacaagaaaaggatgtggctttgatgtacatatattattaagatgcctcagtactccagtttactttaaaaatggttttagggataaagaataaatgtgatagctatgcatgcattatatatttgcatttgcaaatttccccattgtttaccagctgtgtggctgactttcaatttttaagaatgaattgacatacagcccctaaactttataatggctgctcatttatcctaatctttcagttagtgaaaaaagcattttcacctgactaaaatttgga

SEQ ID NO: 22952 - DNA, 429 bp, Macaca Mulatta
gctgtggctgcctgcagcccatcttgcccccagcaactagagtcatctttagagatgcaagcctgatcgtggactccaccttcctaacacccttcagcgctctcctcttccttacacccttgctatgcaaaggatagtccatggaccagcagcgtcaacataatcagggagcttgttagaaatgtagaatctagtccaccccaaacctgctgaagcagaagctgcattttaccaagatcccagggaatttgtgtgcccattatagtttgagaagtgcttcccaagaggacacagggcaagcagcaggagggatctttgcagatcttgctcctttcattctccagcctcatcctgtcactctcctccatctgtgcccacattcccattgtactggaccgcttgcagcttcttgaatgcgccatagtcttg

SEQ ID NO: 22953 - DNA, 3963 bp, Macaca Mulatta
  misc_feature (1)...(3963): n = A,T,C or G
gctttgttccaaagagggagaggtggtgacagtctcttgcccactgatatgtgccagacagagtgccaggcatgggggcagaggtgaatcagacgacaaccacctctcaccatgaggnnnnnnnnnnnnnnnnnnnnnnnnnnnnnnnnnnnnnnnnnnnnnnnnnnnnnnnnnnnnnnnnnnnnnnnnnnnnnnnnnnnnnnnnnnnnnnnnnnnnnnnnnnnnnnnnnnnnnnnnnnnnnnnnnnnnnnnnnnnnnnnnnnnnnnnnnnnnnnnnnnnnnnnnnnnnnnnnnnnnnnnnnnnnnnnnnnnnnnnnnnnnnnnnnnnnnnnnnnnnnnnnnnnnnnggcatcgaattcctgaaaggatttcgggtaatactggaggagctgaagtcagagggaagacagtgccaacaactgattctaaaggatccgaagcagctcaacagtagcttcaaaagaactgnnnnnnnnnnnnnnnnnnnnnnnnnnnnnnnnnnnnnnnnnnnnnnnnnnnnnnnnnnnnnnnnnnnnnnnnnnnnnnnnnnnnnnnnnnnnnnnnnnnnnnnnnnnnnnnnnnnnnnnnnnnnnnnnnnnnnnnnnnnnnnnnnnnnnnnnnnnnnnnnnnnnnnnnnnnnnnnnnnnnnnnnnnnnnnnnnnnnnnnnnnnnnnnnnnnnnnnnnnnnnnnnnnnnnnnnnnnnnnnnnnnnnnnnnnnnnnnnnnnnnnnnnnnnnnnnnnnnnnnnnnnnnnnnnnnnnnnnnnnnnnnnnnnnnnnnnnnnnnnnnnnnnnnnnnnnnnnnnnnnnnnnnnnnnnnnnnnnnnnnnnnnnnnnnnnnnnnnnnnnnnnnnnnnnnnnnnnnnnnnnnnnnnnnnnnnnnnnnnnnnnnnnnnnnnnnnnnnnnnnnnnnnnnnnnnnnnnnnnnnnnnnnnnnnnnnnnnnnnnnnnnnnnnnnnnnnnnnnnnnnnnnnnnnnnnnnnnnnnnnnnnnnnnnnnnnnnnnnnnnnnnnnnnnnnnnnnnnnnnnnnnnnnnnnnnnnnnnnnnnnnnnnnnnnnnnnnnnnnnnnnnnnnnnnnnnnnnnnnnnnnnnnnnnnnnnnnnnnnnnnnnnnnnnnnnnnnnnnnnnnnnnnnnnnnnnnnnnnnnnnnnnnnnnnnnnnnnnnnnnnnnnnnnnnnnnnnnnnnnnnnnnnnnnnnnnnnnnnnnnnnnnnnnnnnnnnnnnnnnnnnnnnnnnnnnnnnnnnnnnnnnnnnnnnnnnnnnnnnnnnnnnnnnnnnnnnnnnnnnnnnnnnnnnnnnnnnnnnnnnnnnnnnnnnnnnnnnnnnnnnnnnnnnnnnnnnnnnnnnnnnnnnnnnnnnnnnnnnnnnnnnnnnnnnnnnnnnnnnnnnnnnnnnnnnnnnnnnnnnnnnnnnnnnnnnnnnnnnnnnnnnnnnnnnnnnnnnnnnnnnnnnnnnnnnnnnnnnnnnnnnnnnnnnnnnnnnnnnnnnnnnnnnnnnnnnnnnnnnnnnnnnnnnnnnnnnnnnnnnnnnnnnnnnnnnnnnnnnnnnnnnnnnnnnnnnnnnnnnnnnnnnnnnnnnnnnnnnnnnnnnnnnnnnnnnnnnnnnnnnnnnnnnnnnnnnnnnnnnnnnnnnnnnnnnnnnnnnnnnnnnnnnnnnnnnnnnnnnnnnnnnnnnnnnnnnnnnnnnnnnnnnnnnnnnnnnnnnnnnnnnnnnnnnnnnnnnnnnnnnnnnnnnnnnnnnnnnnnnnnnnnnnnnnnnnnnnnnnnnnnnnnnnnnnnnnnnnnnnnnnnnnnnnnnnnnnnnnnnnnnnnnnnnnnnnnnnnnnnnnnnnnnnnnnnnnnnnnnnnnnnnnnnnnnnnnnnnnnnnnnnnnnnnnnnnnnnnnnnnnnnnnnnnnnnnnnnnnnnnnnnnnnnnnnnnnnnnnnnnnnnnnnnnnnnnnnnnnnnnnnnnnnnnnnnnnnnnnnnnnnnnnnnnnnnnnnnnnnnnnnngccggcagcccctcggacatgccgcgggactcacgtatctatgactcgtctgtgccctcatctgagctgtctctgtcactgatggaaggactctcaacagaccagacggaaacatcttccctgacggagagcgtgtcctcctcttcaggcctgggtnnnnnnnnnnnnnnnnnnnnnnnnnnnnnnnnnnnnnnnnnnnnnnnnnnnnnnnnnnnnnnnnnnnnnnnnnnnnnnnnnnnnnnnnnnnnnnnnnnnnnnnnnnnnnnnnnnnnnnnnnnnnnnnnnnnnnnnnnnnnnnnnnnnnnnnnnnnnnnnnnnnnnnnnnnnnnnnnnnnnnnnnnnnnnnnnnnnnnnnnnnnnnnnnnnnnnnnnnnnnnnnnnnnnnnnnnnnnnnnnnnnnnnnnnnnnnnnnnnnnnnccaacccttcaccagatatcttggcaaactctccaattttctaaaatgatacggagctctgaaaggcatgtccataaggtctgacaacagcttgccatatttggttagtccttggatcagagcctgttgtgggaggtagggaagaaatatgtaaagaaaaaaaaggaagataccttcactggtcatttagacttcactgagctctgcaaactttgcctgtttgctattggctaccttgatttgaaatgttttgtgaaaaaaggcacttttagcatcatagccacagaaatcaagtgccagtctatctggaatccatgttgtattgcagataatgttctcatttatttttgatgtagaatttacattgccatgggtgttaaatataagctttgagtcaaaagtcaagaaagtgactgaatatacggtcaccttttatgaaatgagtctctgtgttactgggaagcatgactgattgaggtgaagctcacagggccaggctgaccttcttgaccattccatctgagataggttggtcaatgtgcagaaggccccaggacctcagcacacacagcctcctcttggtctgagtagacatcatgtggaggccagatctgcctgctgtttccatgggttacatttactgtgctgtatctcagatgttagtatctggaagtttattcttaagagactgctacccagctagtgctgtattattggaagttgcagttcgtgctttggttnnnnnnnnnnnnnnnnnnnnnnnnnnnnnnnnnnnnnnnnnnnnnnnnnnnnnnnnnnnnnnnnnnnnnntgatggccagtcaatctgctgaactggttttgactaatgacaaacnctctttttaagaaggtagaatggaggggatagtcacaaaagtaaatgttccatttttatgaatgactttgttctacagagttctgtttctaaagaaaaaacaattgttcacattccatctgatgattagcacgtgtgtaatgaatgctgtcttggtcttccctgtggaaacccttctccccgtgcctttgagcaggtgtggacatctctcactgcctttcacacgggtgctgttagattttggcaccccgttttctcagcattcagcccagggactgtggttttaagtccatcatcagataagaccagcatgaaggggtatgttgagaaatatcctgaggcagagtgggaggtgggatggggcaggactttcccttctaagcacatgcatggcaggtggggaaagggggactttcacccctgctggaaagaaaaggtttgtgtatatttctgatgcaaatgtcatactcactgctctgtaaaggcagctggcagctttttgggagaagaacgtgctagtctgttctctggcatcaagtttcctgcagctgctccaagggagagacagggagctgcaagactgtctccccataanaacaggcaactcagagaagagtcatttcatgttgttcctatggaatctggaatgagtgcagagctcctaccacacatgactgccccgccatttcatcctaggcat

SEQ ID NO: 22954 - DNA, 411 bp, Macaca Mulatta
gcttgattcaatagaaaaataaagcaaacttaataacagtctctctacatgacttgaggaacttagctatagatattggtaacatttttctaccatttgtccataataagccatacttgctcatatataccccctgcctccttctgttccagtcagccaacatgtgtacataaaagaacacacaaattcaagaagttggaagattaaattatctgcttatttagtgtaggatggtcaggtagctagctataagtgaaaggaaattttgctgaagaaactgagaaatgggtagtggaatgaccatcaaggtgacctcaaactgtttaaaaacattttaacttgccatgaagattcttgatgatttttgtataaatgttttataaaatacttttacagctacagatttttaaa

SEQ ID NO: 22955 - DNA, 291 bp, Macaca Mulatta
tctcccctcccctttgctggaaattctttactacatataatgtttctttttctcgaagtacagctttcttgaataatcagcagtctcttatcaaaaagatggtcactagcaagtactgccacgtcactgttttcctcagcatttagctctgatgaagtgtgccgggagatgctctttggataagttggctgcagaggtgaccagcagcaagtgggatgctaaggtcagggatggaataaatttcaatcatgtaacacagctgaggagaatatgtgtgggtggctagtatgg

SEQ ID NO: 22956 - DNA, 138 bp, Macaca Mulatta
gcaccatcggcttgtcctggaccttcctgctctacggactgaccgctgtcctcggcctgggcttcatctatttatttgttcctgaaacaaaaggccagtcattggcagagatagaccagcagttccagaagagacggt

SEQ ID NO: 22957 - DNA, 114 bp, Macaca Mulatta
ggtgtattctgcctcttactgagtatcttttggtaagctgccatacctctctggctcacagcctcctgccaccgttccactctgatgagttcagttcgtaaaggtgcttagttg

SEQ ID NO: 22958 - DNA, 466 bp, Macaca Mulatta
  misc_feature (1)...(466): n = A,T,C or G
gtttgagaaatttctatggttcattagctcagagaactatctaattataggtggacgagatcagcaacagaatgaaataattgtgaaaagatacttgacaccaggnccaggagaacccatccccccacggaccttgactgaagctggcacaatggcactttgctacagtgctgcttgggatgcacgagttatcactagtgcttggtgggtgtaccatcatcaggtannnnnnnnnnnnnnnnnnnnnnnnnnnnnnnnnnnnnnnnnnnnnnnnnnnnnggaaaaaagaattttcttcctccctcatatctaatgatggggtttagcttcctttttaaggtanaggtagatgagtcttgtgtttggagacatcggggtgaacgaaaagtcagagtacaggatgaagacatggagacactggcaagttgcacaagcgaactcatatcagaagaaatggaacaattag

SEQ ID NO: 22959 - DNA, 798 bp, Macaca Mulatta
ggggtagtggcttcgtcctccgcttttctgttcctccgctgacgtctcctagctctcgtcagcctcccgccggcagtctccttaacaccgaacaccatgccttcaattaagttgcagagttctgatggagagatatttgaagttgatgtggaaattgcctaacaatctgtgactattaagaccatgttggaagatttgggaatggatgatgaaggagatgatgacccagttcctctaccaaatgtgaatgcagcaatattaaaaaaggtcattcagtggtgcacccaccacaaggatgaccctcctcctcctgaagatgatgagaacaaagaaaagcgaacagacgatatccctgtttgggaccaagaattcctgaaagttgaccaaggaacactttttgaactcattctggctgcaaactacttagacatcaaaggtttgcttgatgttacatgcaagactgttgccaatatgatcaagggggaagactcctgaggagattcgcaagaccttcaatatcaaaaatgactttccctctttttttgtaaagcaatttctgcctagtttattgtccagttaactttagtgaccttttgaaagttgggcattgtaaataaaacaagttggcaaaaaaagttttttggaaatagaattaacaaaatattcctctttattcaggagtttggaaactgggaaaaaggcttctttgaagtaaatgttccggagtggaatttctaggaatgtctttccagccctccttgccagtcaaggaattacccctggtattggatttacccg

SEQ ID NO: 22960 - DNA, 2961 bp, Macaca Mulatta
  misc_feature (1)...(2961): n = A,T,C or G
ggcacaggctgaatctgttgcggcagcgaaggctagaacaggcctgcgccggcggcggagaggatcccttggacgggggatgtgagcgctgagcccttggcagnnagaagtcaatgcgattttaatttgaagcaaaactgaaatgggttcttcttcctcattctattcatattgctttttgatggccatggcataagaaactttatcccaggaatacagctttgcattagnnnnnnnnnnnnnnnnnnnnnnnnnnnnnnnnnnnnnnnnnnnnnnnnnnnnnnnnnnnnnnnnnnnnnnnnnnnnnnnnnnnnnnnnnnnnnnnnnnnnnnnnnnnnnnnnnnnnnnnnnnnnnnnnnnnnnnnnnnnnnnnnnnnnnnnnnnnnnnnnnnnnnnnnnnnnnnnnnnnnnnnnnnnnnnnnnnnnnnnnnnnnnnnnnnnnnnnnnnnnnnnnnnnnnnnnnnnnnnnnnnnnnnnnnnnnnnnnnnnnnnnnnnnnnnnnnnnnnnnnnnnnnnnnnnnnnnnnnnnnnnnnnnnnnnnnnnnnnnnnnnnnnnnnnnnnnnnnnnnnnnnnnnnnnnnnnnnnnnnnnnnnnnnnnnnnnnnnnnnnnnnnnnnnnnnnnnnnnnnnnnnnnnnnnnnnnnnnnnnnnnnnnnnnnnnnnnnnnnnnnnnnnnnnnnnnnnnnnnnnnnnnnnnnnnnnnnnnnnnnnnnnnnnnnnnnnnnnnnnnnnnnnnnnnnnnnnnnnnnnnnnnnnnnnnnnnnnnnnnnnnnnnnnnnnnnnnnnnnnnnnnnnnnnnnnnnnnnnnnnnnnnnnnnnnnnnnnnnnnnnnnnnnnnnnnnnnnnnnnnnnnnnnnnnnnnnnnnnnnnnnnnnnnnnnnnnnnnnnnnnnnnnnnnnnnnnnnnnnnnnnnnnnnnnnnnnnnnnnnnnnnnnnnnnnnnnnnnnnnnnnnnnnnnnnnnnnnnnnnnnnnnnnnnnnnnnnnnnnnnnnnnnnnnnnnnnnnnnnnnnnnnnnnnnnnnnnnnnnnnnnnnnnnnnnnnnnnnnnnnnnnnnnnnnnnnnnnnnnnnnnnnnnnnnnnnnnnnnnnnnnnnnnnnnnnnnnnnnnnnnnnnnnnnnnnnnnnnnnnatcggggagaagaaagtggaagccgagtttgatgaacaggctgatgaaagcaattatgatgagcaggtggatttctatggctcttccatggaagagttttccggagagaggtcggacgggaacctcattgggcacagacaggaggctgccctcgcagcaggctacagtgagaatattgaaatggtaacagggattaaagaagaagcttcccacttaggattctcagccaccgacaagctgtatccttgtcagtgtgggaagagtttcactcacaagagtcagagagatcggcacatgagcatgcacctcggtctgcggccttacggctgtggcgtctgcggtaagaaattcaaaatgaagcaccacctcgtgggccacatgaaaattcacacgggcataaagccgtatgagtgtaatatctgtgcaaagaggtttatgtggagggacagtttccaccggcatgtgacttcttgtaccaagtcctacgaagctgcaaaggctgagcagaatacaactgaggctaactaaaaataggatctggcccttgagtggcatgcacaaaaataaactatggtaattaatgcaaatctgggcacagatgatgcgtgctacttgctattatgagagaagctnnnnnnnnnnnggaagatatttctgaaagaccagctctaagtaggccaattaaaaaaatctaattcctcaaatttgtgtgttccagtcctggcctggaatgggtaatggggtgagttaacccaccgcccagatggcaagggaaaccttctgnnnnnnnnnnnnnnnnnnnnnnnnnnnnnnnnnnnnnnnnnnnnnnnnnnnnnnnnnnnnnnnnnnnnnnnnnnnnnnnnnnnnnnnnnnnnnnnnnnnnnnnnnnnnnnnnnnnnnnnnnnnnnnnnnnnnnnnnnnnnnnnnnnnnnnnnnnnnnnnnnnnnnnnnnnnnnnnnnnnnnnnnnnnnnnnnnnnnnnnnnnnnnnnnnnnnnnnnnnnnnnnnnnnnnnnnnnnnnnnnnnnnnnnnnnnnnnnnnnnnnnnnnnnnnnnnnnnnnnnnnnnnnnnnnnnnnnnnnnnnnnnnnnnnnnnnnnnnnnnnnnnttctaaatatgaaacagataacttacggtacaaggctgacatagtgcccttgtcagtttctgtaagatgccactactgtcacaaggtgtttcagactcttgataaggcagtgttttgtattttagttctaacagttgagtttggacatttgtatctaattgtaattctctagggtgccagagataggtatttctcattggtttgctttcccaaatcctgtttggttaattgtagcctccatgcagtggggtctgctctgtggctggtagacaccaagctgctgtgactgactacggtaccacgggccgctgcagcccctgctctgtcttagattatggtgctttacaaagagggtggtccatgaccacacttagtgggaaggagccccaagttgtggctgagagttccctgtgaacttcggcagttcatggagtgctaaggtgacactccaccaaccagagtgagagggcagataggccggattctatgagtgattatacttaaggggaaaaaacgtgcccaaggagaatcttgaaaatacactctttcaaggtgggggagatactctttagggggtacactgagctaatactgccagttctttatgagcgccagaatgtgcttttaaaaggagtcctaagtttagcaaagtagtctacagaatcatgctcccaaattatagataaagctgcttaaacttacaagtccacaaagctatgccgacca

SEQ ID NO: 22961 - DNA, 1015 bp, Macaca Mulatta
aggtcactgtgcatggcatcctggccccctctacagctccagtcctccaaccagagccagctgttccctcaaaatgctacagcctgtgacaatgctccggaagcctgggacctgctgcacagagtgctgccgacatttatcatctccatctgttccttcggcctcctagggaaccttttcgtcctgttggtcttcctcctgcccaggcggcgactgaacgtggcagaaatctacctggccaacctggcggcctctgatctggtgtttgtcttgggtttgcctttctgggcagagaacatttggaaccagtttaactggcctttcggagccctcctctgccgtgtcatcaacggcatcatcaaggctaatttgttcatcagcatcttcctggtggtggccatcagccaggaccgctactgcgtgctggtgcaccctatggccagccggaggcggcagcggcggaggcaggcccgggtcacctgcgtgctcatctgggttgtggggggcctcttgagcatccccacattcctgctgcgatccatccaagccgtcccagatctgaacatcaccgcctgcatcctgctcctcccgcatgaggcctggcactttgcgaggattgtggagttaaatattctggctttcctcctaccactggctgcgatcatcttcttcaactaccacatcttggcctccctgcgagggcgggaggaggtcagcaggacaaggtgcgggggcagcaaggatagcaagaccacagcgctgatcctcacgctcgtggtggccttcctggtctgctgggccccttaccacttctttgccttcctggaattcttattccaggtgcaagcagtccgaggctgcttttgggaggacttcattgacctgggcctgcaactggccaacttcttggccttcaccaacagctccctgaatccagtcatttatatgttgcgggccggctcttcaggaccaaggtctgggaactatagaaacaatgcacccctaaaagtcttgc

SEQ ID NO: 22962 - DNA, 198 bp, Macaca Mulatta
caggaaagggagccagtgacaacccttgctccgaagtgtaccatggaccccatgccaattcagaagtggaggtgaaatcggtggtagatttcatccaaaaacacgggaatttcaagtgcttcattgacctgcacagctactcgcagctgctgatgtatccatatggatactcagccaaaaaggccccagatgccaagg

SEQ ID NO: 22963 - DNA, 1886 bp, Macaca Mulatta
  misc_feature (1)...(1886): n = A,T,C or G
gtggtcaccaagagtggcaagataaagaaaaccctgagttgggcgggaccaggatgcctgaccgggacagctatgccaacggtaccgggagcagcggtggaggccctggaggtggtggcagcgaggaggccagtggggcagggacaggcagtggcggggccagctcagatgccatctgtagagacttcttgaggaatgtgtgcaagcgaggcaagcgttgccgatatcgccacccagacatgagtgaggtgtccaacttgggggtgagcaaaaacgagttcatcttctgccatgacttccagaacaaggagtgtagccgcccaaattgccgtttcatccatggctccaaggaggatgaggatggctataagaagacaggagagcttcccccacggctgaggcagaaagtagcagctggccttggcctttcaccggcagacctaccaaatggcaaggaggaggtccctatctgccgtgactttctcaagggtgactgtcagagaggagccaagtgcaagttccgtcacctgcagcgggattttgagtttgatgctcggggtggaggaggcactggtgggggctcaacaggctcagtcctcccnnnnnnnnnnnnnnnnnnnnnnnnnnnnnnnnnnnnnnnnnnnnnnnnnnnnnnnnnnnnnnnnnnnnnnnnnnnnnnnnnnnnnnnnnnnnnnnnnnnnnnnnnnnnnnnnnnnnnnnnnnnnnnnnnnnnnnnnnnnnnnnnnnnnnnnnnnnnnnnnnnnnnnnnnnnnnnnnnnnnnnnnnnnnnnnnnnnnnnnnnnnnnnnnnnnnnnnnnnnnnnnnnnnnnnnnnnnnnnnnnnnnnnnnnnnnnnnnnnnnnnnnnnnnnnnnnnnnnnnnnnnnnnnnnnnnnnnnnnnnnnnnnnnnnnnnnnnnnnnnnnnnnnnnnnnnnnnnnnnnnnnnnnnnnnnnnnnnnnnnnnnnnnnnnnnnnnnnnnnnnnnnnnnnnnnnnnnnnnnnnnnnnnnnnnnnnnnnnnnnnnnnnnnnnnnnnnnnnnnnnnnnnnnnnnnnnnnnnnnnnnnnnnnnnnnnnnnnnnnnnnnnnnnnnnnnnnnnnnnnnnnnnnnnnnnnnnnnnnnnnnnnnnnnnnnnnnnnnnnnnnnnnnnnnnnnnnnnnnnnnnnnnnnnnnnnnnnnnnnnnnnnnnnnnnnnnnnnnnnnnnnnnnnnnnnnnnnnnnnnnnnnnnnnnnnnnnnnnnntgtggctgtatcgatggcccaacccttggcaggaatcacaatgagccacaccaccactcccatggtgacttaccctatcgcttcccagagcatgcgcatcacggccatgccacactgatggggctaatggacactcccctggtatagcctcccagggctggggtcaaggggcccttgcccacttgcctagccctccccagccctgtctgaagggctcccttgagaactaggacaagagactacaagcagtatgtcctgaggaggggttgggttggtgtgttttctctcacctcccttttatgagggtcctcttgtccatcttcaagcctcacagtgggggcttgcaaaggaatgcagactgaagccagcagagaggaaggactgactgaagggctgtgtcctcttacgggaatttgggaacatccctcgtcttgtcctctcttctgcacagcacaggttccagcactggttttggaagaaaaaaataccctgcccagagggaaagccaggaaagattgggaagtgggtgattaggagagaaggcctgacaggagccttcaaacaatttgggtcctagttggttgggttggacaataaaggaatagcttctgggccctgggaaggctgggaccgtagtgctccagcc

SEQ ID NO: 22964 - DNA, 640 bp, Macaca Mulatta
ggcccaccctggcagaggactcagtgtaagactgttctttctcaattttcccccccagacacaccatcctgagaagccactttttcctaccacaggaagcccaagagaacactatagctagcagtctgacagccaaactgaaccctggccttttgtatcctgccaggtttgaaaagctggacatcacccctaaaagtgcccagaagatcaagccggtgcttgagcggtggatggctgaggctgaggcccgccatcgagcaggtatgcagaacctgaccgagtttatcgggagtgaaccatccaaaaagcgcaagcggcgcacctccttcacaccccaggcccttgagatcctcaatgcccactttgagaagaacacacacccctctgggcaggaaatgaccgaaattgctgagaagctgaactatgaccgagaagtagttagagtttggttctgcaataagaggcaagccctgaagaacacaattaaacgcttaaaacagcacgagccggccacggcagtccctttggagcccttaacagactctctggaagaaaactcctaaagagatgcccacccataatcagaagcaaaattcacagaaactaaactccacgcttgggactccacgacaataacaat

SEQ ID NO: 22965 - DNA, 557 bp, Macaca Mulatta
atttatttttaaaacttgcctgaatcagttctaaaggaatatttaagagacgtaattttcttctctttaccataacattacacaaaactttttcctaaaacacggttgtgaggtactggtgagctgtaagtggagctgttaaaaacagcagtgctgtattgtagttatgtatattcgtgtacagtatgtttagatcccaggtaaacatattcttttctgagaggataaatacctgcattcagatattccaggtaaatataattgagtcagggagtagtaaatctaatggagaattcattttggggagggggaaaaagaatagtatgcaagacccttattggcttttaattatacctgaaaccaaaatggatatttttagtctctctgcatgtgagatttgatgtaacaagatagaactataatatatacagtatatggaaggatagacatagtgctttgttcattttaattgcgagcaaacaaaatagctgaagcttaattacttgacttgccttgatttgtaggactggggctagagaaaatgagcagatgttcct

SEQ ID NO: 22966 - DNA, 131 bp, Macaca Mulatta
gaacctgaacatgaccgtggctcaagactggtgcctggccctgcagaggctgatgcgggtgaaggaggaagagatccactcggccaacaaatgccgtctcaggctcctgcttcctgggaaacctgacaagt

SEQ ID NO: 22967 - DNA, 123 bp, Macaca Mulatta
agcatcacttttaatcttctggaacccacccaccactgctcaagtcacaattgaagcccagccagccaaagtttctgaggggaaggatgttcttctacttgtccagaatatgccccagaatct

SEQ ID NO: 22968 - DNA, 219 bp, Macaca Mulatta
ggttcagagatgatcgagacgcaggaagacatctacgtgggctccattgagacagaccgaggggtgcgagagcaggtgcgtttctacgacacccgggggctccgagatggggccgaactgccccgacactgcttctcttgcactgatggctacgtcctggtctacagcacagatagcagagagtcttttcagccgtgtggagctgctcaagaaggagat

SEQ ID NO: 22969 - DNA, 2604 bp, Macaca Mulatta
  misc_feature (1)...(2604): n = A,T,C or G
cattttgggttcttcgccctccatctttgacatttattttacatctcctttgggttcatggaatgactcctcagtttacaccattgccccctccagcgagaagattagtgttgtttgttgctgatggccttcgagcagacacactttacgaattagatgaaaatgggacctctagagcaccgtttattaggnttaggaatatcataatgcatgaaggcagctggggcatatctcatacacgtgtgccgacagaatctcggccaggtcatgtagctctgatagctgggttttatgaagatgtcagcgcagttgccaaaggnaaggatggaaggaaaatcctgtagaatttgattctctttttaatgaaagtaaatacacatggagctggggaagcccagatatcctgcctatgtttgccaaaggtnnnnnnnnnnnnnnnnnnnnnnnnnnnnnnnnnnnnnnnnnnnnnnnnnnnnnnnnnnnnnnnnnnnnnnnnnnnnnnnnnnnnnnnnnnnnnnnnnnnnnnnaggacttctttcatcatgccaggaacaaccagtctttgttttctaaaataaatgaagagaaaatagtttttttcttacatttattaggaatagatacaaatggacatgctcatcgaccatcctcgagnagagactacaaggataatattaaaaaagttgatgatggagttaaagaaatcgtgtctatgtttaaccatttctatggaaatgatgggaaaacaacatttatctttacctctgaccatggaatgacagactggggttnggttcccatggggctggtcatccttcagagactttaactcctttagtcacttggggagctggaatcaattatccccaaagagtatcagctcagcaatttgatgattcatttttgaaagnnnnnnnnnnnnnnnnnnnnnnnnnnnnnnnnnnnnnnnaggctgatattgcaccattgatgacttctcttattggagttccctttcctcttaactcagtggnnnnnnnnnnnnnnnnnnnnnnnnnnnnnnnnnnnnnnnnnnnnnnnnnnnnnnnnnnnnnnnnnnnnnnnnnnnnnnnnnnnnnnnnnnnnnnnnnnnnnnnnnnnnnnnnnnnnnnnnnnnnnnnnnnnnnnnnnnnnnnnnnnnnnnnnnnnnnnnnnnnnnnnnnnntccctttgcaaggagctaaatcatctagcatgaaaaggattgtcctattatcacacatatgacagattctttttgggcatcaatgttgttattggttttgtgggatggatatcttatgcttctttgttgatcatcaagtctcattccaaccttataaaaggtgttagtaaagaagtnnagaaaccaagccatctcctgccatgcagttttgtagctattggcattttagtagcattttttctgctgattcaagcctgtccctggacatattacgtatatggtttgttgccagtgccaatatggtatgcggttctaagagannnnnnnnnnnnnnnnnnnnnnnnnnnnnnnnnnnnnnnnnnnnnnnnnnnnnnnnnnnnnnnnnnnnnnnnnnnnnnnnnnnnnnnnnnnnnnnnnnnnnnnnnnnnnnnnnnnnnnnnnnnnnnnnnnnnnnnnnnnnnnnnnnnnnnnnnnnnnnnnnnnnnnnnnnnnnnnnnnnnnnnnnnnnnnnnnnnnnnnnnnnnnnnnnnnnnnnnnnnnnnnnnnnnnnnnnnnnnnnnnnnnnnnnnnnnnnnnnnnnnnnnnnnnnnnnnnnnnnnnnnnnnnnnnnnnnnnnnnnnnnnnnnnnnnnnnnnnnnnnnnnnnnnnnnnnnnnnnnnnnnnnnnnnnnnnnnnnnnnnnnnnnnnnnnnnnnnnnnnnnnnnnnnnnnnnnnnnnnnnnnnnnnnnnnnnnnnnnnnnnnnnnnnnnnnnnnnnnnnnnnnnnnnnnnnnnnnnnnnnnnnnnnnnnnnnnnnnnnnnnnnnnnnnnnnnnnnnnnnnnagcctcttccttgtttgtgccactactgagttctccagctgtctttcagcgattgttcagcatacttctttcattgatgtcaacctannnnnnnnnnnnnnnnnnnnnnnnnnnnnnnnnnnnnnnnnnnnnnnnnnnnnnnnnnnnnnnnnnnnnnnnnnnnnnnnnnnnnnnnnnnnnnnnnnnnnnnnnnnnnnnnnnnnnnnagcttaccagtatccagttctcttataatactgatataactcagtttcgacagctgtatctggatgacatccgtagggcctttttccttgtngttttcttcttagtgacagcattttttggaactggaaatatagcttctattaacagnnnnnnnnnnnnnnnnnnnnnnnnnnnnnnnnnnnnnnnnnnnnnnnnnnnnnnnnnnnnnnnnnnnnnnnnnnagattttaatcccctttgttcttgttatgtgtgctttcgaagcggttcagttgactactcagttatcgtcaaaaagnnnnnnnnnnnnnnnnnnnnnnnnnnnnnnnnnnnnnnnnnngcattttttcttcttggtcaaggattatggcagctggcttgatattgggacaag

SEQ ID NO: 22970 - DNA, 895 bp, Macaca Mulatta
  misc_feature (1)...(895): n = A,T,C or G
cttggaggagtcccccccactttttctctcaaacagaaatatccccggcggggggggggctcaatttttagtaatttagggcttcccactttggaaatccccccggggtaagagaccccccaataaaaagcctcccacaaaacctccccttcggggattgtttccaaaaaagctttggggttgccgccccgggggggtttttttcttggggggggattttccagcccctttttttcacccccaggttctcctttgggaaaaaagcttttggcccaatttcccttcccccactggggccgcgccggcccaaaacaatnnnnnnnnnnnnnnnnnnnnnngggccaaaggggccccacacagggtttcccctcttttttttatgtttgttccaatttttnnnnnnnnnnnnnnnnnnnnnnnnnnnnnnnnnngnnnnnnnnnnnnnnnnnnnnnnnnnntnntnnaccagtcatcttttatttggaggttaattcccattaggacatgaaaggattcagcaacaatcgagattgtgttcctcacggaggggctcaggccaaggtcatggggtcgggggtggtgcacagtgtgtcctcttcagtggtatttgcggagccgctcgtgcttgagatgcttgtaggaaatgctgtagttgaagagcacatagcatgccagcaccatggtaatccccgagatgctccccttcttcacgttaatgtacttgttgtagtaccggtagtaacctctttgaaatgctccgagaatgccactagggctgaagtcccgcatcaagatccagcttggcagctcccccagtttgacctccagaagtttcttgtccttcactggtacgactgacgccatcttggagtccccgtgtccgctgtgcctcccc

SEQ ID NO: 22971 - DNA, 160 bp, Macaca Mulatta
ttcctcattggcgccgggcagagaggcggaatgttcaactcctgactccggcggaagcgtgggagccgcgcgggccgctgtcgttccaacccccgccgccctcgtcgcgcgcggggcctccgcgcccccggctgctgctcgcgcccggcctgggagccag

SEQ ID NO: 22972 - DNA, 166 bp, Macaca Mulatta
agattcccagcctgtagttcatgtaattgcttcccggcgtcaggattggtcagaacatgagattgcaatggagactagccctaccataatttatcaggatgtatccagtgaatcacaatcagctacttcaacaatcaaagctctgttagaactccaacagacaaca

SEQ ID NO: 22973 - DNA, 410 bp, Macaca Mulatta
atttttcttttctgtgtgatttgctaattaaaaatggggacggggaaagaagtccctacttcctcctccctgcttcctctcctcccctgtacgtgccccagcattctggggttatttaacaatagcaatagttctagtgaatgtgtgaaaccaagaaacactctgtaccgtgtgcggacccgcagtgacggccagtaaagtggacttaactcccaagtgtgtcgcgccggacaccgggccctggacatggtgcttccatgttcagtcccttccctgcttttcgcggtctgtttttcttttcccacctcccaccccccagttttcagattttgtgttatccaataatgtaaaactatcgtgtacgggttcctccctccttttctcttctcccaaatcttttcccttcaaag

SEQ ID NO: 22974 - DNA, 174 bp, Macaca Mulatta
caggtatcatcaagacagctttgctcaacatggatcgagaaaacagggagcagtaccaagtggtgattcaagccaaggatatgggcggccagatgggaggattatctgggaccaccaccgtgaacatcacactgactgatgtcaacgacaaccctccccgattcccccagagta

SEQ ID NO: 22975 - DNA, 521 bp, Macaca Mulatta
tcttccctccagcccaggcagccggccactgtcctgccaccaccacaggcagcccctgtctggcccaagcactgacccaggaggactctgggaagcaggcatcctgggctgctggcctcacatttccaccggcagtggagcccttccctgccccacaagtggccaggtccccctaggggaagacttctagctattattggctgccccaggggtgagtaccttggagggccggcttcatggagggtgcccactggagggcacacaccagcgtagtgcttaccttggctcctgcccgtaccagctccatgaccctctgctcgcgtgaacagccttggctctcagacaaccattctaacactgccagtgttgaggggcctcagatgccggagtgtggcagctggctgcacctgcacagggattagctgccagcagccaccctgctggcatcccagcacacacctcctcactccccgcattggagggagtgtcattttgagggacatttttatgacttttatgtg

SEQ ID NO: 22976 - DNA, 2024 bp, Macaca Mulatta
  misc_feature (1)...(2024): n = A,T,C or G
aagatggcggcggagcgacaggaggcgctgagggagttcgtggcggtgacgggcgccgaggaggagcgggcccgcttctttctggagtcggccggctgggacttgcagnnnnnnnnnnnnnnnnnnnnnnnnnnnnnnnnnnnnnnnnnnnnnnnnnnnnnnnnnnnnnnnnnnnnnnnnnnnnnnnnnnnnnnnnnnnnnnnnnnnnnnnnnnnnnnnnnnnnnnnnnnnnnnnnnnnnnnnnnnnnnnnnnnnnnnnnnnnnnnnnnnnnnnnnnnnnnnnnnnnnnnnnnnnnnnnnnnnnnnnnnnnnnnnnnnnnnnnnnnnnnnnnnnnnnnnnnnnnnnnnnnnnnnnnnnnnnnnnnnnnnnnnnnnnnnnnnnnnnnnnnnnnnnnnnnnnnnnnnnnnnnnnnnnnnnnnnnnnnnnnnnnnnnnnnnnnnnnnnnnttcatgtagtattgaaactctggaagagtggattcagcctggataatggagaactcagaagctaccaagatccatccaatgcccagtttctggagtctatccgcagagggnnnnnnnnnnnnnnnnnnnnnnnnnnnnnnnnnnnnnnnnnnnnnnnnnnnnnnnnnnnnnnnnnnnnnnnnnnnnnnnnnnnnnnnnnnnnnnnnnnnnnnnnnnnnnnnnnnnnnnnnnnnnnnnnnnnnnnnnnnnnnnnnnnnnnnnnnnnnnnnnnnnnnnnnnnnnnnnnnnnnnnnnnnnnnnnnnnnnnnnnnnnnnnnnnnnnnnnnnnnnnnnnnnnnnnnnnnnnnnnnnnnnnnnnnnnnnnnnnnnnnnnnnnnnnnnnnnnnnnnnnnnnnnnnnnnnnnnnnnnnnnnnnnnnnnnnnnnnnnnnnnnnnnnnnnnnnnnnnnnnnnnnnnnnnnnnnnnnnnnnnnnnnnnnnnnnnnnnnnnnnnnnnnnnnnnnnnnnnnnnnnnnnnnnnnnnnnnnnnnnnnnnnnnnnnnnnnnnnnnnnnnnnnnnnnnnnnnnnnnnnnnnnnnnnnnnnnnnnnnnnnnnnnnnnnnnnnnnnnnnnnnnnnnnnnnnnnnnnnnnnnnnnnnnnnnnnnnnnnnnnnnnnnnnnnnnnnnnnnnnnnnnnnnnnnnnnnnnnnnnnnnnnnnnnnnnnnnnnnnnnnnnnnnnnnnnnnnnnnnnnnnnnnnnnnnnnnnnnnnnnnnnnnnnnnnnnnnnnnnnnnnnnnnnnnnnnnnnnnnnnnnnnnnnnnnnnnnnnnnnnnnnnnnnnnnnnnnnnnnnnnnnnnnnnnnnnnnnnnnnnnnnnnnnnnnnnnnnnnnnnnnnnnnnnnnnnnnnnnnnnntggggcctgtgggaggaaactcccttccatcttctctacataaaaacttgtggcacacaaggcctttatactagtgtgtcccacctgccagccccaacgatcactggaggaaggaggggaaatgtgttgaaagaggttttgccaccacttgttcccacgagaatatatcacttgcccagataaaactgggcagcagccagagtcccctaaaagtgggaagtcagagctacatgcacacagtgtcttcagaaggtgaaaataaatacttccctgtgctccttttactcaacccctgggaaatccaatcttgccaggccttggccagttgagattctgttccacctgcctgcctggccctttcctccgtcaccatccagactgctcacctcctgggtattcttatgggctcctttatggtttgatttcctccacgtgcagaagtcttgagtggacctaggaggtaggtggggtatttttttcactaggatacagctcatgccaacccaacccaagtgagttcagaatcagggtatcttgccctaaaagataaacagtcaaaatgccacccagctgttcactagtgatgtgtggcaaatcaaatcaactgttgaagaaggggtgagtttcctgtgctacaagcatctgtcactgttggtacgtgcaggaggcttctgctgggtatgtt

SEQ ID NO: 22977 - DNA, 824 bp, Macaca Mulatta
acgaggagatgttgtgtcgccatgggccgccgccccgcccgttgttaccggtattgtaagaacaagccgtacccaaagtctcgcttctgccgaggtgtccctgatgccaagattcgcatctttgacctggggcggaagaaggcaaaagtggatgagtttccgctctgtggccacatggtgtcagatgaatatgagcagctgtcctctgaagccctggaggctgcccgaatttgtgccaataagtacatggtaaaaagttgtggcaaggatggcttccatatccgggtgcggctccaccccttccacgtcatccgcatcaacaagatgttgtcctgtgctggggccgacaggctccaaacgggcatgcgaggtgcttttggaaagccccagggcactgtggccagggttcacattggccaagttatcatgtccatccgcaccaagctgcagaacaaggagcatgtgattgaggccctgcgcagggccaagttcaagtttcctggccgccagaagatccacatctcaaagaagtggggcttcaccaaattcaatgctgatgaatttgaagacatggtggctgaaaagcggctcatcccagatggctgtggggtcaagtacatccccaatcgtggtcctctggacaaatggcgggccctgcactcatgagggcttccaatatgctgcccccacttaatactcaccaataaattctacttcctgtccacctaagaaagaggaagacaacttcgggggggcccggtcccaaatcgccctatggaggtgtttcacgtccgggccgcgttaaaggcggctgtgaaccgggt

SEQ ID NO: 22978 - DNA, 2639 bp, Macaca Mulatta
  misc_feature (1)...(2639): n = A,T,C or G
agtcggttgccaaggaaacagggttctatcttatactgtacaacaggaatcatccttcagtggctccagtcagacccgtntttgtccagcgttagtcatatcgtacttgatgaaatccatgaaagaaacctgcagtcagatgttttaatgactgttgttaaagatcttctcaattttcgatctgacttgaaagtaatactgatgagtgcaacattgaatgcagaaaagttttcagaattttttggtnggtaactgtccaatgatacatatacctggttttacctttccggttgtggaatatcttttggaagatataattgaaaaaataaggtannnnnnnnnnnnnnnnnnnnnnnnnnnnnnnnnnnnnnnnnnnnnnnnnnnnnnnnnnnnnnnnnnnnnnnnnnnnnnnnnnnnnnnnnnnnnnnnnnnnnnnnnnnnnnnnnnnnnnnnnnnnnnnnnnnnnnnnnnnnnnnnnnnnnnnnnnnnnnnnnnnnnnnnnnnnnnnnnnnnnnnnnnnnnnnnnnnnnnnnnnnnnnnnnnnnnnnnnnnnnnnnnnnnnnnnnnnnnnnaggatggtgcgatactggtctttctaccaggctgggacaatatcagcactttacatgatctcttgatgtcacaagtaatgtttaaatcagnnnnnnnnnnnnnnnnnnnnnnnnnnnnnnnnnnnnnnnnnnnnnnnnnnnnnnnnnnnnnnnnnnnnnnnnnnnnnnnnnnnnnnnnnnnnnnnnnnnnnnnnnnnnnnnnnnnnnnnnnnnnnnnnnnnnnnnnnnnnnnnnnnnnnnnnnnnnnnnnnnnnnnnnnnnnnnnnnnnnnnnnnnnnnnnnnnnnnnnnnnnnnnnnnnnnnnnnnnnnnnnnnnnnnnnnnnnnnnnnnnnnnnnnnnnnnnnnnnnnnnaagagttcaacctggtcattgctatcatctgtataatggtcttagagcaagtcttctagatgactatcaactgccagaaattttgagaactcctttggaagaactttgtttacaaataaagnnnnnnnnnnnnnnnnnnnnnnnnnnnnnnnnnnnnnnnnnnnnnnnnnnnnnnnnnnnnnnnnnnnnnnnnnnnnnnnnnnnnnnnnnnnnnnnnnnnnnnnnnnnnnnnnnnnnnnnnnnnnnnnnnnnnnnnnnnnnnnnnnnnnnnnnnnnnnnnnnnnnnnnnnnnnnnnnnnnnnnnnnnnnnnnnnnnnnnnnnnnnnnnnnnnnnnnnnnnnnnnnnnnnnnnnnnnnnnnnnnnnnnnnnnnnnnnnnnnnnnnnnnnnnnnnnnnnnnnnnnnnnnnnnnnnnnnnnnnnnnnnnnnnnnnnnnnnnnnnnnnnnnnnnnnnnnnnnnnnnnnnnnnnnnnnnnnnnnnnnnnnnnnnnnnnnnnnnnnnnnnnnnnnnnnnnnnnnnnnnnnnnnnnnnnnnnnnnnnnnnnnnnnnnnnnnnnnnnnnnnnnnnnnnnnnnnnnnnnnnnnnnnnnnnnnnnnnnnnnnnnnnnnnnnnnnnnnnnnnnnnnnnnnnnnnnnnnnnnnnnnnnnnnnnnnnnnnnnnnnnnnnnnnnnnnnnnnnnnnnnnnnnnnnnnnnnnnnnnnnnnnnnnnnnnnnnnnnnnnnnnnnnnnnnnnnnnnnnnnnnnnnnnnnnnnnnnnnnnnnnnnnnnnnnnnnnnnnnnnnnnnnnnnnnnnnnnnnnnnnnnnnnnnnnnnnnnnnnnnnnnnnnnnnnnnnnnnnnnnnnnnnnnnnnnnnnnnnnnnnnnnnnnnnnnnnnnnatatatttgtatgactgcacagaggtttccccatactgtctcttgttttttggaggtgatatttccatccagaaggataacgatcaggaaactattgctgtagatgagtggattgtatttcagtctccagcaagaattgcccatcttgttaaggnnnnnngaaaggagctagatatcttctgcaagagaagattgaaagtcctcatcctgtagactggaatgacactaaatccagagactgtgcagtgctgtcagctattatagacttgatcaaaacacaggaaaaggcaactcccaggaactttccgccacgattccaggatggatattacagctgacagctttgcaggggtggtctgaaaagtctgtttgacagccattcttcatcattgtttaaattttggctggatgccaaatcctgggacgtgaccaattttcatgtgtaaggtagaaactttcagtaggtagtaaagacttaatgtgcatgacatgatgttatatgnnnnnnnnnnnnnnnnnnnnnnnnnnnnnnntaaaaacaatatgttctctgatcatatactctgctatggtcatgcccactctttgggagtatattccctttatttatattgagtattgtccacttgagaaattcctttgtcctattatacaaaattaatctttcttataatgattgatgataccaccagtaaaaataggatgtttacccaaaaaaacagtgtcaattaagaatttgaacacaaccacatttttgaaaatgaaacttctatcggaagtaaattaatttgttgtaataaagtccagtatttaataaaatgtacaatgttaaatctca

SEQ ID NO: 22979 - DNA, 1011 bp, Macaca Mulatta
  misc_feature (1)...(1011): n = A,T,C or G
cgcctgccgcggcgtcaccaccctgccccccgaggccttctaccccatcccctggcaggactggaagaagtacttttgaggacatcaaccccgaggagctgccacagctgttcaatgccacctatgctgtccacgtgtggaacaagaagagccagggcacgcggttcaaggccacgtccagggcactgctggcccagctccatgcccgctactgccccacgacacacaaggccatgaagatgtacttgtgagaggcctgagaggccaccttcccgacccgctcctgatggagggggcacttggccacccttcctggggaggcaagattggggcccaggagagggaggcctgagctgccactgggcttaggctggctgttgaggagctgagggagcaggtccagtgggaggctatggacacccccaggacagtgtcctgtcttgaggcagggctgacccgtggtgccagagcctgcggagtgagctcagtgagcgccccaggccttctagacaacaggcaggaaggatgaacctcagggcacccctcgggtggcacaggaagccagacagttggggcagaggtgcccacaagggcagaggccggtgctaaggggatggggaaggaaggacgaggttcccagagaggagaggaggctgttggtaggaaagcggcagcgatgggggagacccagccctaaggaccaggtgttgagtagcttttctcttttctggttttggttcctctttcnnnnnnnnnnnnnnnnnnnnncagggactgagtgggcagaggcctggcagtgccagcctggggagccccttaggggcagcccctcctgcccaccccatccttcctcctctccagagatgccaggggggcgcgtatgctctgccccttccctctgacgggggctgggtggggaggctctttaggctcaggagaagcattttaaagaaaccccctccccattataaacaggagaataatcaatagaataaaagtgacccactgtca

SEQ ID NO: 22980 - DNA, 559 bp, Macaca Mulatta
caggctccagccatgccagtctcctgctccacaacctcccctggtgctcatcgcccacaggagaggtgcaagcttgtatcccccagcacttcagccctgcccctcctctctcacctatactaaaccctgctctgctggacactgcccttggtctccttccttcctctgctcctttccctgcctagaaagctctttctgttcctctgctttccatgctttgagacctggctcagattcttctctctccaggaggcctttcctcctgtctctgggccctggagtatatgggctgtttcttcccagtctgccttgtgtggtgggtattggggggtgtgtctgcctgccttaccacactggctttccttgacggcagggaccccattgctacatatctgttttctgtggctagcacagggcagcaggggaagcactgagttgggttgcagagagtccaacgtgttggccctgagctggtgctgtttgcaagaggagcccatgggcctggggaggccggcatgagacaaggtgacctggtagagtgtgctctcagggctggcca

SEQ ID NO: 22981 - DNA, 517 bp, Macaca Mulatta
  misc_feature (1)...(517): n = A,T,C or G
ggatcatccatgcatcatgtggactggaggctgtaggagaattccagttttggtattccatgccgacgctattcttacaaaggacaacaatattagagtaattggagnagaacgttatcatttgtcttataagattgtacgaacggacagtcgcctagtacgcagcattctgacagcccatggatttcatgaagtngttcacccaagcagcactgactataacctaatgtggacaggatcccacctgaaacccttcttactgcgcaccctctctgaagcacaaaaagttaatcactttcccaggtnnnnnnnnnnnnnnnnnnnnnnnnnnnnnnnnnnnnnnnnnnnnnnnnnnnnnnnnnnnnnnnnnnnnnnnnnnnnnnnnnnnnnnnnnnnnnnnnnnnnnnnnnnnnnnnnnnnnnnnnnnnnnnnnnattcatattcaaaggaccggggaccttggatagtaaaaccagtggcatcttctagggggcggggcgtctacctgatcaacaat

SEQ ID NO: 22982 - DNA, 1094 bp, Macaca Mulatta
  misc_feature (1)...(1094): n = A,T,C or G
gggcgcccccagcggaggcagcggctgcaagagcccgggaggcgcgggggctggggcgactgggggcagcacggcccgcaagttccccacgtgtcccgagcatgaaatggagaactacagcatgtactgcgtgagctgtcgaaccccggtgtgctatttgtgcctggaggagggccggcatgccaagcacgaggtgaagccgctgggggccatgtggaagcagcacaagnnnnnnnnnnnnnnnnnnnnnnnnnnnnnnnnnnnnnnnnnnnnnnnnnnnnnnnnnnnnnnnnnnnnnnnnnnnnnnnnnnnnnnnnnnnnnnnnnnnnnnnnnnnnnnnnnnnnnnnnnnnnnnnnnnnnnnnnnnnnnnnnnnnnnnnnnnnnnnnnnnnnnnnnnnnnnnnnnnnnnnnnnnnnnnnnnnnnnnnnnnnnnnnnnnnnnnnnnnnnnnnnnnnnnnnnnnnnnnnnnnnnnnnnnnnnnnnnnnnnnnnnnnnnnnnnnnnnnnnnnnnnnnnnnnnnnnnnnnnnnnnnnnnnnnnnnnnnnnnnnnnnnnnnnnnnnnnnnnnnnnnnnnnnnnnnnnnnnnnnnnnnnnnnnnnnnnnnnnnnnnnnnnnnnnnnnnnnnnnnnnnnnnnnnnnnnnnnnnnnnnnnnnnnnnnnnnnnnnnnnnnnnnnnnnnnnnnnnnnnnnnnnnnnnnnnnnnnnnnnnnnnnnnnnnnnnnnnnnnnnnnnnnnnnnnnnnnnnnnnnnnnnnnnnnnnnnnnnnnnnnnnnnnnnnnnnnnnnnnnnnnnnnnnnnnnnnnnnnnnnnnnnnggaagtgtacgtcggtaaggagactttgtgtaccatcgacggtcttcacttcaacagcacctacaacgcccgagtcaaagctttcaactcgtctggtgtcgggccttacagtaaaactgtcgtcctgcagacgtccgatnnnnnnnnnnnnnnnnnnnnnnnnnnnnnnnnnnnnnnnncatcattttgtccaatgacaagcagacagccacttgcagcagcnnnnnnnnngggtggtgctaggcacatctgggttctccaagggcgcgcccttctggg

SEQ ID NO: 22983 - DNA, 333 bp, Macaca Mulatta
tttggtctgctctaaaacttacccaattctccctccatcactggaacaattccataaagtccttattccttaaagcaccactgataccattaaagccactaacagagactgaactcagaataaaggaaatcatagaaaaactagatcagcagatcccacccagacctttcacccacatgaacaccactaccagcgccacacacagcacagccaccatcctcaaccctcgagatacgtactgcaggggagaccagctggacatcctgctggggtcaaatgtgggtgtagagattatggaaaaattcaatacgattagtgtctccaaatgcaaca

SEQ ID NO: 22984 - DNA, 419 bp, Macaca Mulatta
caatgtgtgtcctcacttacattaaacaaccttacgactctgtcccatgcagtctatgctgcaacgggatgtgcatgtcttgctttagtatatttattacaacattttagtctttgtttccatatatttcgaagttttgtctgggcattttcaaccacggacgtgagaggtcaaggagaatgggcatgacttttaggaaacaatatccgaatttctaggatgaagaaagagacttcttaaaagtatattaaatgtgattagactgtgtttaaaaaataaaaagcaacgtgtatcatttttgtaatgcaatctacggaaaataaaactacaaaatcatctcagcaaggtaaggataggcaataatgatggattcccctgaaagaaaatagtatcagaattgtcagggaaaagtgaaatga

SEQ ID NO: 22985 - DNA, 714 bp, Macaca Mulatta
  misc_feature (1)...(714): n = A,T,C or G
gggcaggaaatcagttgatgtggaatgcgatttcactgaattttgcaatggaagctatccatactgtttgcttgacacttatgtacgtgatggagaatattgtgattcaggtggagccttctgttttcagggaaggtgtcgaacttttgacaaacaatgtgatgatttaatcggaagaggttcaagaggtgctccaattttctgttatgatgaaattaataccagaggagacaagtttggaaactgtggcactgaatattgtttgtttcaacatattctatgtggaaaattagtctgtacatgggaacacaaagacttaatatcacgtccaaatttatctgtgatttatgcacatgtacgagaccaaacatgtgtgtctacgtatctacccagtaggaagccacctccagtagcttcaactgtttcaaaaacatcatattattcagttgatgacagagatgaaacatttgtacaagatggttccgtgtgtggtcctgatatgtattgtttcaaaatgcgttgtaagcatgttagattcctgatggattttgnaacgtgcgaggctttctatgagtgcagtggacatggaaattgcaacatttttaccattgcattgtgaaaggggtatatcctcctcctgcnaccaagaagagcatttgagtctgtgatgacactatacagtgaaaagttctggagaggagactgccttcaaaa

SEQ ID NO: 22986 - DNA, 376 bp, Macaca Mulatta
  misc_feature (1)...(376): n = A,T,C or G
ggcctggacagggagaaccactggccccaaaccccaaacagccatttccagcttccacgatcaaataagcacatcatctcacatggggcgtcccaagtctatttggnnnnnnnnnnnnnnnnnnnnnnnnnnnnnnnnncagttggagtcttgctccgtcgcccagtcaggagtgcagtgatgggatctcaannnnnnnnnnnnnnnannnnnnnnnnnnnnnnnnnnnnnnnnnnnnnnnnnntnnnnnnnnnnnnnnnnnnnnnnnccaccaccatgatcagctaatttttgtaattttagtagaannnnnnnnnnnnnnnnnnnnnnnnnnnnnnnnnnnnnnnnnnnnnnnnnannnnnnnnnnnnnncagt

SEQ ID NO: 22987 - DNA, 898 bp, Macaca Mulatta
  misc_feature (1)...(898): n = A,T,C or G
gcgctctttccttgcctaacgcagccatggctcgtggtcccaagaagcatctgaagcgggtagcagctccaaagcattggatgctggataaattgaccggtgtgtttgctcctcgtccatccaccggtccccacaagttgagagagtgtctccccctcatcatcttcctaaggaacagacttaagtatgccctgacaggagatgaagtaaagaagatttgcatgcagcggttcattaagatcgatggcaaggtccgaactgatataacctaccctgctggattcatggatgtcatcagcattgacaagacgggagagaatttccgtctgatctatgacaccaacgggtcgctttgctgtacatcggattacacctgatgaggcctcgtacaagctatgctaagtgagaaagacctttgtggggattaaaggaatcccctcctcctggtgactcatgaaggcccggcaccatccagcttgcccccaattcctctcatgcaggggggaattggaagactattccagaaattgagttcgggacaactgggcctgggaatacccggctttcgccttcnnggcttcgggaccactggatccacccgtggcgatttggggaaactggggagggagggtttaaccgcggggcaagacacttgcggtgctgacgcgttcattaccggaagaattgggtgcctccctctggagatcttctttagcgcgtggtcttcccttcgataagccttgcgccgcgtcgggcgctcgcgggngcgtgngccgccccctntgacgtgctcccgnngccgttgttcatgtgttgtccgccgtccgccggtgccctgtaaagcccgcggggaatttgttatgtctcccgacatgagccgaagcgtgggtgtgcttcg

SEQ ID NO: 22988 - DNA, 615 bp, Macaca Mulatta
  misc_feature (1)...(615): n = A,T,C or G
gggtgttgcatcaaaaggatcaaatgattttagagaaagagaagaagattacagagttgaaggctgattttcagtaccaggaatcgcagatgagagccaaaatgaaccagatggagaaaacccacaaagaagtcacagaacaattgcaggccaaaaaccgagagctcctgaagcaggcagctgccttgtccaagagcaagaagtcagagaagtcaggagctataacctctccatgacacacctcaaggaggctccatagcaacagcaaatggagttgtccagggttagggttggagacctggctgttctgtgggaattgcagctttcttaaaaaatctctattttattacaggtatccttctttgtgccattgcattgggctgaatgaaacacctggtttgggctgtgttaaactgcctgctgaaggttgggaattccaactccctctgttttccccccaataggaatttccttttccccccccccctcccccccaattgggggccannnnnnnnnnnnnnnnnnnnnnnnnattttatnnnnnnnnnnnnnnnnnnnnnncccgccccataaaatgggcaaannnnnnnnnnnnnnnnnnnnnncccactcccc

SEQ ID NO: 22989 - DNA, 117 bp, Macaca Mulatta
gtctacacggacgtgcagcaggtggccagcagcctcacccacccgcgcttcaccctcacccagagcgaggcagacgctgacatcctgttcaacttctcacacttcaaggactacagg

SEQ ID NO: 22990 - DNA, 800 bp, Macaca Mulatta
ggggcgtgggcgtgggcctcctgtcgtacctgatggtgggaggcagtagttccccgcttcccttccgcgggcgggaaagttagctagccacccgagaaaacaccatgaaagacaccgatatcaaaagactactgtatacccatcttttatgcatattttcgattatcctaagtgtcttcattccatcactctttttggagaacttctcaatattggaaacacacttgacatggttgtgcatctgttctggttttgtaactgctgtcaatctagtactatatttagcggtgaaaccaaatacatcctctaaaagaagttcattatcacacaaggtaaccagatttttgaaatgctgtatctactttcttatgtcttgtttctcctttcatgtaatttttgttctatatggagcaccactaatagagttggcattggaaacatttttatttgcagttattttgtctacttttactactgtgccttgcttgtgtttgttaggaccaaacctcaaagcatggctaagggttttcagtagaaacggagtttcatccatatgggagaatagtctccagatgactacaatttctagttttgtaggagcatggctttggagcacttcctattccggctggatttgggaaagaccatggcaggttatgggcccaatcctccttggtaacgccttggagccgaacctttttgggcttacgttggccttgggccccttggtttattttccacccaccttcttgggattaattacttggggaaattagtgaaaaagcccaccttttttccgt

SEQ ID NO: 22991 - DNA, 492 bp, Macaca Mulatta
tcattgtgctctttgccactggtgccttctcttaagtaatagggaacctctcccacctgcccttctcttcagggacaaccctctgtaaatgggtgccaagagggtctcctttcctgtcctcctctacagagaatgctgctcggtcctcctacccctcttcccgaggccctcctgccgtgttgtatgccccagagggtaacttggtcccccagaaggagagaaaaaagagagctggactgcggatgcatttcatgggtccttagagtgggctggagagacctagagggcccagcatgtggctgggaaactgctggtggccagtggacaataaagacctttcagtatccctatatgtgtgagtcactttctctcttcccattttgcctttgacttttctatttcttttcttcccaaggataccttctggctgaaattctctcgtttgaggtccaagtggtttgaagggcaaagagtgtatgtttggagaagaaa

SEQ ID NO: 22992 - DNA, 635 bp, Macaca Mulatta
agtgtggaaaggctctcactcactccacaggctgtgccacgcctgtgaaaatgcatgctgtcaggaacccccacgtatgtagggaatgtgggaaggcctttagacacactgcttaccttactagtcacatgcgagtccacactggggagaagccctgtgagttggaagaatgtggaaaagcctcccctgttgcttccggcctaactgcacttgtaagaactgatgctgcagagaagccctgtgaatgtaacgaatgtggaaaaaccttcactggatgctcaggtctttctaaacacgtccaaacatgccctggaaagcagctctctgaatggagggactgtgggaaagcctgcagtgggttttatctactgaatgaacatgtgaaaactcgcatgagggagaagccctttgcatgtatggtttgcggaaaatattttagaaattcctcctgccttaataatcatgttcgaattcacactggaataaaaccctatacatgtagctactgtgggaaggccttcaccgtgcgctgtggccttactagacacgtacgaacacacacgggcgagaagccatacacgtgtaaggactgtgggaaagccttctgtacgtcctcaggccttaccgagcacgta

SEQ ID NO: 22993 - DNA, 2069 bp, Macaca Mulatta
  misc_feature (1)...(2069): n = A,T,C or G
gatcaacaaacagtaataatgactgaatgtacaagtcttcagtttgtcagcccttttgcttttgaggcaatgcagaaggtggatgttgttcgcctggcatctttaagcgatccagaattaagacttctcctgccctgcttggtacggatggcactttgtgcacctgctgaccagagccaaagctgggctcaggataagaaactcatccttcgccttctctctggagtggaagctgtcaactccattgttgcattgatgtccgtggactttcatgcttnnnnnnnnnnnnnnnnnnnnnnnnnnnnnnnnnnnnnnnnnnnnnnnnnnnnnnnnnnnnnnnnnnnnnnnnnnnnnnnnnnnnnnnnnnnnnnnnnnnnnnnnnnnnnnnnnnnnnnnnnnnnnnnnnnnnnnnnnnnnnnnnnnnnnnnnnnnnnnnnnnnnnnnnnnnnnnnnnnnnnnnnnnnnnnnnnnnnnnnnnnnnnnnnnnnnnnnnnnnnnnnnnnnnnnnnnnnnnnnnnnnnnnnnnnnnnnnnnnnnnnnnnnnnnnnnnnnnnnnnnnnnnnnnnnnnnnnnnnnnnnnnnnnnnnnnnnnnnnnnnnnnnnnnnnnnnnnnnnnnnnnnnnnnnnnnnnnnnnnnnnnnnnnnnnnnnnnnnnnnnnnnnnngtttgtaggggcctgataaaaaatggagaacgacaagatgaagaaagtcttggaggaaggcgcaggacagatgccttacgcttcttgtgtaaaatgaatccttctcaggccctcaaggtccgaggcatggtggtnnnnnnnnnnnnnnnnnnnnnnnnnnnnnnnnnnnnnnnnnnnnnnnnnnnnnnnnnnnnnnnnnnnnnnnnnnnnnnnnnnnnnnnnnnnnnnnnnnnnnnnnnnnnnnnnnnnnnnnnnnnnnnnnnnnnnnnnnnnnnnnnnnnnnnnnnnnnnnnnnnnnnnnnnnnnnnnnnnnnnnnnnnnnnnnnnnnnnnnnnnnnnnnnnnnnnnnnnnnnnnnnnnnnnnnnnnnnnnnnnnnnnnnnnnnnnnnnnnnnnnnnnnnnnnnnnnnnnnnnnnnnnnnnnnnnnnnnnnnnnnnnnnnnnnnnnnnnnnnnnnnnnnnnnnnnnnnnnnnnnnnnnnnnnnnnnnnnnnnnnnnnnnnnnnnnnnnnnnnnnnnnnnnnnnnnnnnnnnnnnnnctgaagaataagctgagcaattattgcagttgatgacgagccgtcctcctgctacgccagctggggttcgctttgtttcactttccttttgtatgctactggtcttttctacgcttgtcagnnnnnnnnnnnnnnnnnnnnnnnnnnnnnnnnnnnnnnnnnnnnnnnnnnnnnnnnnnnnnnnnnnnnnnnnnnnnnnnnnnnnnnnnnnnnnnnnnnnnnnnnnnnnnnnnnnnnnnnnnnnnnnnnnnnnnnnnnnnnnnnnnnnnnnnnnnnnnnnnnnnnnnnnnnnnnnnnnnnnnnnnnnnnnnnnnnnnnnnnnnnnnnnnnnnnnnnnnnnnnnnnnnnnnnnnnnnnnnnnnnnnnnnnnnnnnnnnnnnnnnnnnnnnnnnnnnnnnnnnnnnnnnnnnnnnnnnnnnnnnnnnnnnnnnnnnnnnnnnnnnnnnnnnnnnnnnnnnnnnnnnnnnnnnnnnnnnnnnnnnnnnnnnnnnnnnnnnnnnnnnnnnnnnnnnnnnnnnnnnnnnnnnnnnnnnnnnnnnnnnnnnnnnnnnnnnnnnnnnnnnnnnnnnnnnnnnnnnnnnnnnnnnnnnnnnnnnnnnnnnnnnnnnnnnnnnnnnnnnnnnnnnnnnnnnnnnnnnnnnnnnnnnnnnnnnnnnnnnnnnnnnnnnnnnnnnnnnnnnnnnnnnnnnnnnnnnnnnnnnnnnnnnnnnnnnnnnnnnnnnnnnnnnnnnnnnnnnnnnnnnnnnnnnnnnnnnnnnnnnnnnnnnnnnnnnnnnnnnnnnnnnnnnnnnnnnntagctgccatgcaaagaaagcccaaatcatctcttcttctttaatggaccagattcctatcgagatccttatt

SEQ ID NO: 22994 - DNA, 879 bp, Macaca Mulatta
cctatggtccagggagaattcaaccactctctcttcctttcccttatggcccaggttatccacagccaccttcccaaccaagaccctatccacctggacctccattttcccctgtaatttctccacctgatcctgacctccctaatcctgcaccctaaatacagacaactgcaacaggtgccaccaccactgcaaaagacaacactaccctcataaccactgcttctactctccaaaaataagaatttcaacactacttccaagagacttttagataaaatggctttcatttttgaatgagaataaacatttccaaagcattgcattttgggagaaatatcttagaaattgtgaaacaatccccatgaacctttatatcagtagagaaaaataaagaattgagcaacaatatgaagtatccactgttatcagagccactagtttatcccccatttatgtcacctaaatgaatattagtgctaccagagcctggacatgtcccatgaggccaaaaaagtaaattaaggaaaaatacaataagacacttggacttgaagcttagagttacgaagttagaagagtaggcaacaggatgccctcttcagtatggcaacccatcatacaattacaaagcccaaaataagatgttaatagatactaaaatgaaagaatcttagccgtcaccatagctcgccctataaaaattcctgagtaccatctgatcactgcttataaatagttgcagagaagaaacgccattctagcaaatctaaatatctgagatgtgaatcacaagtcttggaatttgatatgaaaaaattattttctaagctaagatagagataggagatggtttcagatagcaataagaagcagcta

SEQ ID NO: 22995 - DNA, 641 bp, Macaca Mulatta
  misc_feature (1)...(641): n = A,T,C or G
agtgaactaatacacagcttgagtgtttccatgtgctaatgttgcacacnttactaaaaacaaaaactttggaaatggaaaataatgtagtagtgcaacagttgacatgcttctttgggcaaagatacattgttttgttccacaatttgtatttaaaggccaaataacatttaaaacgtagatttactggccttagcaatgctggcctgttaactgataactagaacttaggttcacatttatgtaaagtgtgtaaaagctagtagagcgtgcatagtaggcactcaggaaatgtttggttccttttgcccctcagtaagtttattttaccatcttcccgcctgccgttctgactttattaagtcagcctgtggaccagagtgttaatgagagttattgcagaagagactgagaaaattgatatatcatgcagataacatacaaaatctttttgtaacgtaaaaaaatgcagttttattattgcttgtgcctcaactgtttaagtgaatattacagggctnnnnnnnnnnnnnnnnnnnnnnnnnnnnnnnnnnnnnnnnnnnnnnnnnnnnnnnnnnnnnnnnnnnnnnnnnnnnnnnnnnnnnnnnnnnnnnnnnnnnnnnnnnnnnnnnnnnnnnccc

SEQ ID NO: 22996 - DNA, 930 bp, Macaca Mulatta
  misc_feature (1)...(930): n = A,T,C or G
tgccagcattgggagccgcctcctagcaggcagcaccacaggtgccctggctgtggctgtggcccagcccacggatgtggtaaaggtccggttccaagctcaggcccgggctggaggtcggagataccaaagcaccgtcgatgcctacaagaccattgcccgagaggaagggtttgggggcctctggaaaggnagggacctctcccaatgttgctcgtaatgccattgtcaactgtgctgagctggtgacctatgacctcatcaaggatgcccttctgaaagccaacctcatgacagnnnnnnnnnnnnnnnnnnnnnnnnnnnnnnnnnnnnnnnnnnnnnnnnnnnnnnnnnnnnnnnnnnnnnnnnnnnnnnnnnnnnnnnnnnnnnnnnnnnnnnnnnnnnnnnnnnnnnnnnnnnnnnnnnnnnnnnnnnnnnnnnnnnnnnnnnnnnnnnnnnnnnnnnnnnnnnnnnnnnnnnnnnnnnnnnnnnnnnnnnnnnnnnnnnnnnnnnnnnnnnnnnnnnnnnnnnnnnnnnnnnnnnnnnnnnnnnnnnnnnnnnnnnnnnnnnnnnnnnnnnnnnnnnnnnnnnnnnnnnnnnnnnnnnnnnnnnnnnnnnnnnnnnnnnnnnnnnnnnnnnnnnnnnnnnnnnnnnnnnnnnnnnnnnnnnnnnnnnnnnnnnnnnnnnnnnnnnnnnnnnnnnnnnnnnnnnnnnnnnnnnnncctttacccaccaccttccctctctccacattgtcatctcctcattgtctctcagtgctggtggagctgacatttgacagtgtgggaggcctggtaccagccaggatcccaagcctcccatcccttggaacattcagccagaatcttcgtcctgccccccgcagcccaccctagcccacttgtcacccataaagcaagctcaaccttg

SEQ ID NO: 22997 - DNA, 322 bp, Macaca Mulatta
  misc_feature (1)...(322): n = A,T,C or G
cacttcgtctgcgccaagtgtgagaagccatttctggggcaccggcactatgagaagaagggcctggcctactgtgagactcactacaaccagnngtggtgtcggccctcaacaaggcctggtgtgtgagttgcttctcctgctccacctgcaacagcaagctcaccctgaagngaacaagtttgtggagtttgacatgaagcccgtgtgtaaaaggtgctatgagaagttcccactggagctgaagaagcggctgaagaagctgtcggagctgacctcccgcaaggcccagcccaaggccgcggacctcaactctgcctga

SEQ ID NO: 22998 - DNA, 1016 bp, Macaca Mulatta
aggcaacccgtgacgtactgcacccccaaccagagctcccctttcccggtctgcagaatggggccagtggcactgcctccctggcttgctggcggaatcacgtgaacacaagcgtgacaggagcccaggatcagtgggtttagggagcgtggcctggcttgtaagtggccccgtgggggtcagagctgctctgggctcagcctcacagtggacactgctccattcagattctttaaacactggcaagggggcggtgaccacactcctattgtatagataaggaagtcgaggccacttggagacagctgccctccagcctccactcagggtgcctaagtggtgagctggacctagggcagtgcccgagcctccccacagggtcctggagagccactggttcgtgtggatcacacagatgaaccacatccccaaggagatcggccatgagaagcaccgggactgggccagctctcagctggcagccacctgcaacgtggagccctcacttttcaccaactggttcagcgggcacctcaacttccagatcgagcaacacctcttccccaggatgccgagacacaactacagccgggtggccccactggtcaagtcactgtgtgccaagcacggcctcagctacgaagtgaagcccttcctcactgcgctggtggacatcgtcagatccctgaagaagtctggtgacatctggctggatgcctacctccatcagtgaaggcaacacccaggcgggcagagaagggctcagggcaccagcaaccaagccagcccctggtgggaccgacacccccacccctccactggccagcctggcagtgccctgcctgccctcctggtactgtgatcttcccctcagccccctcacatgtgtattcagcagccctacggccttggctctgagcctgatgggacaggggtagagggaaggtgagcgtagcacattttcctagagcaagaattgggggaaagctgttatttttatattaaaatgcattcag

SEQ ID NO: 22999 - DNA, 1439 bp, Macaca Mulatta
  misc_feature (1)...(1439): n = A,T,C or G
aggtgtagggtgggtcagcaaagtcaaccggccgctctggatcatctgggaattcaagagagcggttggagagagatctggtgtatccacactgtcttgtcttggggaaggccccagaagttccaggctccattccaggacctgtgtggggctcagttgcccctcttaaggggtcagtgggacagtccctctggggctgcctcccatagggagttatccatgccatcttggccttgggcctagtgtcctggcctggcctgggctgcctgctgttccggcccaaccatagcctggagggaaggtcttctaattgagctggaggctccaggtcccttaaaacatgcctcaaccccgggcttctgtcctctgcctcttaccactctggtgccatctgaattaccctgctggggggacagcagtgacatactcatgcctaagtgactggctttcaccccagtagtgattgccctccatcaacactgcccaccccagggtggggctaccccagcccatctttacaaaacagggcaaggtgaactaatggagtgggtggaggagttggaagaaatcctagcgtcagtcacctggatagaattcccgaggaaccctctttttggagggtggtttacatttctggaggctatctgccggcagggtgaaagccttctnnnnnnnnnnnnnnnnnnnnnnnnnnnnnnnnnnnnnnnnnnnnnnnnnnnnnnnnnnnnnnnnnnnnnnnnnnnnnnnnnnnnnnnnnnnnnnnnnnnnnnnnnnnnnnnnnnnnnnnnnnnnnnnnnnnnnnnnnnnnnnnnnnnnnnnnnnnnnnnnnnnnnnnnnnnnnnnnnnnnnnnnnnnnnnnnnnnnnnnnnnnnnnnnnnnnnnnnnnnnnnnnnnnnnnnnnnnnnnnnnnnnnnnnnnnnnnnnnnnnnnnnnnnnnnnnnnnnnnnnnnnnnnnnnnnnnnnnnnnnnnnnnnnnnnnnnnnnnnnnnnnnnnnnnnnnnnnnnnnnnnnnnnnnnnnnnnnnnnnnnnnnnnnnnnnnnnnnnnnnnnnnnnnnnnnnnnnnnnnnnnnnnnnnnnnnnnnnnnnnnnnnnnnnnnnnnnnnnnnnnnnnnnnnnnnnnnnnnnnnnnnnnnnnnnnnnnnnnnnnnnnnnnnnnnnnnnnnnnnnnnnnnnnnnnnnnnnnnnnnnnnnnnnnnnnnnnnnnnnnnnnnnnnnnnnnnnnnnnnnnnnnnnnnnnnnnnnnnnnnnnnnnnnnnnnnnnnnnnnnnnnnnnnnnnnnnnnnnnnnnnnnnnnnnnnnnnnnnnnnnnnnnnnncaggtggagctggctctgtgggacacagcagggcaggaagactatgatcgactgcggcctctctcctacccggacactgacgtcatcctcatgtgcttctccatcgacagccccgacagcctg

SEQ ID NO: 23000 - DNA, 1614 bp, Macaca Mulatta
  misc_feature (1)...(1614): n = A,T,C or G
acgcagggagcatgggtacctggaccttaggcactgatatcttcctaagtctttgggagacttacttgtctccaagaagccctggatggatggactttatccagcatttgggagtttgctgtttggttgctcttatttcagtgggcctcctgtctgtggccttctgctggtttctatcatcaatcatggcggctgctggctcctggattatcacatgtgttctgctgtgttgctccaagcatgcacgatgttttattcttctcgtctttctctcttgtggcctgcgtgaaggcaggaacgctttgattgcagctggcacagggatcgtcatcttgggacacgtagaaaatatttttcacaactttaaaggtctcctagatggtatgacttgcaacctaagggcaaagagcttttccatacattttccactttttgaaaaatatattgaggcaattcagtggatttatgggcttgccactccactaagtgtatttgatgaccttgtttcttggaaccagaccctggcagtctctcnnnnnnnnnnnnnnnnnnnnnnnnnnnnnnnnnnnnnnnnnnnnnnnnnnnnnnnnnnnnnnnnnnnnnnnnnnnnnnnnnnnnnnnnnnnnnnnnnnnnnnnnnnnnnnnnnnnnnnnnnnnnnnnnnnnnnnnnnnnnnnnnnnnnnnnnnnnnnnnnnnnnnnnnnnnnnnnnnnnnnnnnnnnnnnnnnnnnnnnnnnnnnnnnnnnnnnnnnnnnnnnnnnnnnnnnnnnnnnnnnnnnnnnnnnnnnnnnnnnnnnnnnnnnnnnnnnnnnnnnnnnnnnnnnnnnnnnnnnnnnnnnnnnnnnnnnnnnnnnnnnnnnnnnnnnnnnnnnnnnnnnnnnnnnnnnnnnnnnnnnnnnnnnnnnnnnnnnnnnnnnnnnnnnnnnnnnnnnnnnnnnnnnnnnnnnnnnnnnnnnnnnnnnnnnnnnnntcattttctcagtgagcaaacagtttcaaagcttgccagggtttgaggttcgcttgaagctgcatggagangaaacaaggaactcaagatattttccatgattcttcctttaatatatctgtgtttgaacccaactgtatcccgaaaccaaaattccttctatctgagacctgggttcctctcagtgtcattcttgtgatattagtgatgctgggactgttgtcctctatccttatgcaacttaaaatcctggtgtcagcatccttctaccccagcatggagaggaagcgcatccaatacctgcatgcaaannnnnnnnnnnnnnnnnnnnnnnnnnnnnnnnnnnnnnnnnnnnnnnnnnnnnnnnnnnnnnnnnnnnagatttatatctggcttccagtcctgaaaatgattaggaagaagcaaatggacatggcaagtgcagacaagccatgagagaccctgggtactcctcagccacatcgcaccagcggttctcctcaggtctatgatggcagtcactattcatgctggataatacagaactatatgatgcagtcctctcaggagtctgagtttacagagccaccttgcagcatgtggttatgcctcaaagccaaagagctgacaggtaaatggttatgt

SEQ ID NO: 23001 - DNA, 132 bp, Macaca Mulatta
cctttcagcttggaggacgttttcgccgcttaccgcgagttttcctaatggtgagtggtattatcttaagtgtgggactctgtaagtctaagcctcataacagctgtgctgcctccggactccagccccgtt

SEQ ID NO: 23002 - DNA, 433 bp, Macaca Mulatta
  misc_feature (1)...(433): n = A,T,C or G
agggcaacagcaattttaggatatctgcctcaggaacttttgggaacttcttgttatgaatattttcatcaagatgaccatagtaatttgactgacaagcacaaagcagnagttctacagagtaaggagaaaatacttacagattcctacaaattcagagcaaaagatggctctttcgtaactttaaaaagccaatggtttagtttcacaaatccttggacgaaagaactggaatatattgtatctgtcaacactttagttttgnnnnnnnnnnnnnnnnnnnnnnnnnnnnnnnnnnnnnnnnnnnnnnnnnnnnnnnnagaatcctctcgacagtcttgtatgagtgtacctggaatgtctgctggaacagtacttggtgctggtagtattggaacagatattgcaaatgaaattctggatttacagaggt

SEQ ID NO: 23003 - DNA, 2469 bp, Macaca Mulatta
  misc_feature (1)...(2469): n = A,T,C or G
ccccaccccgcctcggttcagcaagtgggccagcttgttggggctcgcttggcaaggggacgcggggactaggggcgcggacgcagttacgggaggatgcggctgcggggacctgggggctcagggctagggcagcaggcccggcccgcacggctttcctggaaagcgctgcccagcgccgcggcgatgccctcgctgtggagagaaatcttcttggagtcgctgctggnnnnnnnnnnnnnnnnnnnnnnnnnnnnnnnnnnnnnnnnnnnnnnnnnnnnnnnnnnnnnnnnnnnnnnnnnnnnnnnnnnnnnnnnnnnnnnnnnnnnnnnnnnnnnnnnnnnnnnnnnnnnnnnnnnnnnnnnnnnnnnnnnnnnnnnnnnnnnnnnnnnnnnnnnnnnnnnnnnnnnnnnnnnnnnnnnnnnnnnnnnnnnnnnnnnnnnnnnnnnnnnnnnnnnnnnnnnnnnnnnnnnnnnnnnnnnnnnnnnnnnnnnnnnnnnnnnnnnnnnnnnnnnnnnnnnnnnnnnnnnnnnnnnnnnnnnnnnnnnnnnnnnnnnnnnnnnnnnnnnnnnnnnnnnnnnnnnnnnnnnnnnnnnnnnnnnnnnnnnnnnnnnnnnnnnnnnnnnnnnnnnnnnnnnnnnnnnnnnnnnnnnnnnnnnnnnnnnnnnnnnnnnnnnnnnnnnnnnnnnnnnnnnnnnnnnnnnnnnnnnnnnnnnnnnnnnnnnnnnnnnnnnnnnnnnnnnnnnnnnnnnnnnnnnnncccaactcgctcctggcaggggctgcctttggtatccttgtgttcctcacccactgggtttttggagaagtctctcttgtttccagatgggcagtgagtgggcatccgcatccagggccagatcctaacccatttggnnnnnnnnnnnnnnnnnnnnnnnnnnnnnnnnnnnnnnnnnnnnnnnnnnnnnnnnnnnnnnnnnnnnnnnnnnnnnnnnnnnnncaggaacagcttcagctgcggggctcctttacctgcacacgtgggcagctgctatgtccggctgtgtcttcgccgtctttactgcgtccatgtggcctcaagcacttggacaccttattaactcagggacaaaccctgggaaaaccatgaccattgccatgatattttatcttctagaaatatttttctgtgcctggtgcacagcttttaagtttgtcccaggaggtgtctatgctagagaaagatcagatgtgcttttgggnnggacaatcttgttaattattgggctgaatatgctatttggtcctaagaaaaaccttggcttgcttcttcaaacaaaaaacagttctaaagtgcttttcagaaagagtgaaaaatacatgaaactttnnnnnnnnnnnnnnnnnnnnnnnnnnnnnnnnnnnnnnnnnnnnnnnnnnnnnnnnnnnnnnnnnnnnnnnnnnnnnnnnnnnnnnnnnnnnnnnnnnnnnnnnnnnnnnnnnnnnnnnnnnnnnnnnnnnnnnnnnnnnnnnnnnnnnnnnnnnnnnnnnnnnnnnnnnnnnnnnnnnnnnnnnnnnnnnnnnnnnnnnnnnnnnnnnnnnnnnnnnnnnnnnnnnnnnnnnnnnnnnnnnnnnnnnnnnnnnnnnnnnnnnnnnnnnnnnnnnnnnnnnnnnnnnnnnnnnnnnnnnnnnnnnnnnnnnnnnnnnnnnngattatggctttgtcaagatacccaattgtgaaatcggagcatcaccttcttccgtcaccagagggcgagatcgcaccagccatcacattgaccgttaacatttcgggcaagccagtggattttgtcgtgacacactttgggaaccacgagatgacctcgacaggaaactgcaggctattgctgtttcaaaactactgaaaagtagctcaaatcaagtgatatttctgggatatatcacttcagcacctggctccagagattacctacagctcactgaacatggcaatgtgaaggnnnnnnnnnnnnnnnnnnnnnnnnnnnnnnnnnnnnnnnnnnnnnnnnnnnnnnnnnnnnnnnnnnnnnnnnnnnnnnnnnnnnnnnnnnnnnnnnnnnnnnnnnnnnnnnnnnnnnnnnnnnnnnnnnnnnnnnnnnnnnnnnnnnnnnnnnnnnnnnnnnnnnnnnnnnnnnnnnnnnnnnnnnnnnnnnnnnnnnnnnnnnnnnnnnnnnnnagatttggatcctacaaagaaggacacaattatgaaaacaaccatcattttcatatgaatactcctaaatactttttatgaaacatttaaaacaagaagctattggctgggcaaatctaagaaaaaaagtatgtaagatgaaaagaagagattaatgaaagtgggaaagtacatatgaacaacctcaacttaaaaacaaacatggtatctatacagtgggaaattacctcaatttataaaccatgttgcttaataaaaacatttct

SEQ ID NO: 23004 - DNA, 1208 bp, Macaca Mulatta
  misc_feature (1)...(1208): n = A,T,C or G
gttacaggatgcgttagggtttagcacgacaaaaaggattcaggccgccttcatgtgactttgcccaggccagggatgacttctatgagtgggaatgcaagcagaggatgcgtgcccgggaggagcggcaccggcgcaagctggaggaggaccggctccggcccccatccccgcccgccataatgcactactcagagcacgaagccgctctgctagctgaaaagctgaaanagatgatagcaagttttcagaggcgatcacagtgttgctttcctggattgaacgaggggaggtgaatcggcgttccgcaaaccagttctattccatggtgcagtcggccaacagccacgtccgccggctcatgaatgaaaaagccacacatgagcaggagatggaggaagccaaggagaatttcaaaaatgccttaactgggattctcactcaannnnnnnnnnnnnnnnnnnnnnnnnnnnnnnnnnnnnnnnnnnnnnnnnnnnnnnnnnnnnnnnnnnnnnnnnnnnnnnnnnnnnnnnnnnnnnnnnnnnnnnnnnnnnnnnnnnnnnnnnnnnnnnnnnnnnnnnnnnnnnnnnnnnnnnnnnnnnnnnnnnnnnnnnnnnnnnnnnnnnnnnnnnnnnnnnnnnnnnnnnnnnnnnnnnnnnnnnnnnnnnnnnnnnnnnnnnnnnnnnnnnnnnnnnnnnnnnnnnnnnnnnnnnnnnnnnnnnnnnnnnnnnnnnnnnnnnnnnnnnnnnnnnnnnnnnnnnnnnnnnnnnnnnnnnnnnnnnnnnnnnnnnnnnnnnnnnnnnnnnnnnnnnnnnnnnnnnnnnnnnnnnnnnnnnnnnnnnnnnnnnnnnnnnnnnnnnnnnnnnnnnnnnnnnnnnnnnnnnnnnnnnnnnnnnnnnnnnnnnnnnnnnnnnnnnnnnnnnnnnnnnnnnnnnnnnnnnnnnnnnnnnnnnnnnnnnnnnnnnnnnnnnnnnnnnnnnnnnnnnnnnnnnnnnnnnnnnnnnnnnnnnnnnnnnnnnnnnnnnnnnnnnnnnnnnnnnnnnnnnnnnnnnnnnnnnnnnnnnnnnnnnnnnnnnnnnnnnnnnnnnnnnnnnnnnnnnnnnnnnnnnnnnnnnnnnnnnggtatcatatcaacgtttcttcacgtccatccttttggagccaacatagaatatctttggtcatacatgcagcagctggactccaag

SEQ ID NO: 23005 - DNA, 337 bp, Macaca Mulatta
aggcaatgcagtgtgcagagggcactcagttgttctctcctgatggccccgccgggtctggagcctccatctggccagcagagggcgcagaaggactgactgcctgggctgcttggacgtgaccgcctggaagtggtgtacagagttcctgacaacgttcccggccaaaacgagtcccgcggcccacttgtgtgcaagatagcaggaaaatgtctgtgtgctccgaggagaatgcaaaggctggtggatgtactgcctttcctctgctgctctctccgctgggggcaagaatgacaggacgtgaacatgcacacaagggcccggaactcacgacccc

SEQ ID NO: 23006 - DNA, 698 bp, Macaca Mulatta
  misc_feature (1)...(698): n = A,T,C or G
ttattacggcagcaggnnnnnnnnnnnnnnnnnnnnnnnnnnnnnnnnnnnnnnnnnnnnnnnnnnnnntggcgagagagatggccctgcagaggcaggccaagcttgaggagggccggccgcagcaccaagagcagctccggcagcaagctcattatgatgctatggataatgatatcgttcagggagcagaggaccagggaatccaagaagaggaaggaggtgcctatgaaagagacaaccagcaccaagatgaagcagaaggagacccaggtaatagacatgagcctcgtgaacaaggaccccgagaagtcgacccagaatctgaggcagatagggcagctgtagaggatataaacccagcagatgaccctaataatcaaggtgaggatgaatttgaagaagctgaacaagtgagagaagaaaatttgccagatgaaaatgaagagcaaaaacaaagtaatcaaaagcaagagaatacagaagtggaggaacatttggtgatggcaggaaatccagaccagcaggaggataatgttgatgaacagtaccaggaagaggcagaagaggaggttcaggaagatttgactnnnnnnnnnnnnnnnnnnctggagcataatgctgaagagacttatggtgaaaatgatgaaaatgctgatgatcaaaatgatggagaagagcgagaagttcgagatgac

SEQ ID NO: 23007 - DNA, 1799 bp, Macaca Mulatta
  misc_feature (1)...(1799): n = A,T,C or G
agcttactgtggcctttctgcaggctgctgaactgcctgccctggacatgggcgtcacctcagacccttatgtcaaagtcttcctccttcctgacaagaagaagaaatatgagaccaaagtccatcggaagacactgaaccctgccttcaatgaaaccttcaccttcaaggtgcnaggtgccataccaggagctcgggggcaaaactctggtgatggccatctatgactttgaccgcttctccaaacatgacatcattggagaggtaaaggtgcctatgaacacagtggacctcggccagcccattgaggagtggagagacctgcaaggcggggaaaaggaggagnnnnnnnnnnnnnnnnnnnnnnnnnnnnnnnnnnnnnnnnnnnnnnnnnnnnnnnnnnnnnnnnnnnnnnnnnnnnnnnnnnnnnnnnnnnnnnnnnnnnnnnnnnnnnnnnnnnagacccctatgtgaagatccacctgatgcagaatggcaagcggctcaagaagaagaagacaaccgtgaagaagaagaccctgaacccatacttcaacgagtccttcagctttgagatccccttcgagcagattcagnnnnnnnnnnnnnnnnnnnnnnnnnnnnnnnnnnnnnnnnnnnnnnnnnnnnnnnnnnnnnnnnnnnnnnnnnnnnnnnnnnnnnnnnnnnnnnnnnnnnnnnnnnnnnnnnnnnnnnnnnnnnnnnnnnnnnnnnnnnnnnnnnnnnnnnnnnnnnnnnnnnnnnnnnnnnnnnnnnnnnnnnnnnnnnnnnnnnnnnnnnnnnnnnnnnnnnnnnnnnnnnnnnnnnnnnnnnnnnnnnnnnnnnnnnnnnnnnnnnnnnnnnnnnnnnnnnnnnnnnnnnnnnnnnnnnnnnnnnnnnnnnnnnnnnnnnnnnnnnnnnnnnnnnnnnnnnnnnnnnnnnnnnnnnnnnnnnnnnnnnnnnnnnnnnnnnnnnnnnnnnnnnnnnnnnnnnnnnnnnnnnnnnnnnnnnnnnnnnnnnnnnnnnnnnnnnnnnnnnnnnnnnnnnnnnnnnnnnnnnnnnnnnnnnnnnnnnnnnnnnnnnnnnnnnnnnnnnnnnnnnnnnnnnnnnnnnnnnnnnnnnnnnnnnnnnnnnnagcacttcctgttttttcagtcttttggaccaacaaaatggcagcacatcctgcttccttcaaggaaggcatcacagtggctaatgatcnnnnnnnnnnnnnnnnnnnnnnnnnnnnnnnnnnnnnnnnnnnnnnnnnnnnnnnnnnnnnnnnnnnnnnnnnnnnnnnnnnnnnnnnnnnnnnnnnnnnnnnnnnnnnnnnnnntttgagcatctctcttcattcctggaatgagccatggacagtaaagttgtgtgggaaaagaaggctctttggggaccctgacatgaagaagtctactaagtgggagatcttctctcatctatggcaaagtctcaggatcctgttcagatgctggggctttcatactcttcttggtggctatttgggaggcagcaagatgtgaagactggatgtgttcagaactaggaccaaacgatgccatcaaagacttcctcctgccagtcatggtttccccagaagtgtggttccggggacattcatggatatgagctattcactagttgggtcagactctaacagggactctcagtcccaaaatctcactcttattgacaataaatatcaaactatgaagaaacagaagtcctattaccagaaagaccaaaattaaactcctggatcgtcaccccatccagtgggaaac

SEQ ID NO: 23008 - DNA, 660 bp, Macaca Mulatta
  misc_feature (1)...(660): n = A,T,C or G
gatatcaggaaaaaaagcagatctgcccacgcagtgaaaatcagcattgagggcaacaaaatgccattgtgaccttgcctggaatgtgtccccgtctctactctgagaaatgcgcaatggactctttggagaaagaagatattttaaaacatttttagtgtgtctgtcaatggttccgtgtgtatcaaatgttgtcataggactcgcatttctctcagttatatttaaaactgtttgttgtgtacttcgtacagaggaatactagtcatacttctataaactttacacaataaaatttcatnnnnnnnnnnnnnnnnnnnnnnnnnnnnnnnnnnnnnnnnnnnnnnnnnnnnnnnnnnnnnnnnnnnnnnnnnnnnnnnnnnnnnnnnnnnnnnnnnnnnnnnnnnnnnnnnnnnnnnnnnnnnnnnnnnnnnnnnnnnnnnnnnnnnnnnnnnnnnnnnnnnnnnnnnnnnnnnnnnnnnnnnnnnnnnnnnnnnnnnnnnnnnnnnnnnnnnnnnnnnnnnnnnnnnnnnnnnnnnnnnnnnnnnnnnnnnnnnnnnnnnnnnnnnnnnnnnnnnnnnnnnnnnnnnnnnnnnnnnnnnnnnnnnnnnnnnnnnnnnnnnnnnnnnnnnnnnnnnnnnnnnnnnnnnnnnnnnnnnn

SEQ ID NO: 23009 - DNA, 404 bp, Macaca Mulatta
ggcaaagtactgttttatctgtgcatggtcatatccacaaagacttttagcaggtgaactgttccaagactgacacaaggatgtttcaaacttgctctatctgtagcaaatgttaaaaataccaactcacttggaaggaaaaataaaaatcacaaaggtatattgagcacagtaatggtgtttgttgcaacatttatttccacaaatgaatttttgaacaacagtgatatttgacttatagtatgaatttcagaatcaaaataatttcattttaatatgttcgttaattgtgaatctcttcaatggtaattagcaacacttcccaggatgcaatgttgggaaacacttatttccaacttatttttttccaagtaaaatattgtctctcttcaacatgctttaat

SEQ ID NO: 23010 - DNA, 246 bp, Macaca Mulatta
  misc_feature (1)...(246): n = A,T,C or G
gccagactggcggccttgaaacggccagacgatgtcccactcaacctctctcccagcaagcgggcgtgtgcctccccgtcggcccaggtggagggcggccctgtggcaggctccgatggcagccagncagcctgccctgaagctggagcccctgcacttcctgcagtgccacagcaagaacaacagccctcaggacctcgagacccagctgtgggcctgtgccttcgagccagcctgggaggaggg

SEQ ID NO: 23011 - DNA, 1319 bp, Macaca Mulatta
  misc_feature (1)...(1319): n = A,T,C or G
ggaaaaacaaacaatacattgaatttgacaaccagctgaagttgcagataatgaggacttaccattgtataccattactcatctggacctatatgttccatacagttgataccatcctattacaagaaaaacctaacagttatttatcaagcaaaaagatagtgggtctgacaaaagatgatggcaaaatgctacgtcgcaccaagcgtggctggatgtggaatcagttcttcttattggaagagtacacaggtactgacacacaatatgtaggcaagnnaagcttcacactgaccaagataaaggagatggaaatttaaagtacatactaacaggagatggggctggcagtctatttgttatagatgaaaatacaggagacattcatgctgcaaagaaactagacagagaagaaaaatctctgtacattcttcgtgccaaggctatagacagaaaaactgggcggcaggtggaaccggaatcagaatttatcattaaaattcatgatatcaatgacaatgagccaaaatttacaaaagacttatacactgccagtgttcctgaaatgtctggagtcggtnnngtacatctgttatacaagtaactgcaacagatgcagatgacgccaactatggaaatagtgccaaagtggtctatagcatattgcaaggacagccatatttttcagtggacccagaatcaggnaggcataataaaaactgcattaccagacatgagcagagaaaatagagagcagtaccaggttgttatacaggccaaagacatgggtggccagatgggaggcctttctggaaccaccacagtgaacatcacactgacagatgtcaacaacaaccctcctcgatttcctcagagtannnnnnnnnnnnnnnnnnnnnnnnnnnnnnnnnnnnnnnnnnnnnnnnnnnnnnnnnnnnnnnnnnnnnnnnnnnnnnnnnnnnnnnnnnnnnnnnnnnnnnnnnnnnnnnnnnnnnnnnnnnnnnnnnnnnnnnnnnnnnnnnnnnnnnnnnnnnnnnnnnnnnnnnnnnnnnnnnnnnnncagaatttagattttgaaaatcaaatgctctacactttaagagtggatgcaagtaacactcaccctgatccacgattcttgcacctgggacctttcaaagacacagctgtggtcaaaatatctgtggaagatatagatgaacctcctgtgttcagtaaagtctcttacttgatagaagtagatgaagatgtaaaggagggcagtatcattggacaggttacagcgtacgacccagatgccaggaacaatttaataaagt

SEQ ID NO: 23012 - DNA, 106 bp, Macaca Mulatta
gtaatatttgagatacttgtggagtcaagcaaaaatcttcatcacaaagggtaacagtcattttatttgtctcaaggaattcaaagaaaagactagtgtaatctat

SEQ ID NO: 23013 - DNA, 160 bp, Macaca Mulatta
gcttgcttgccttttgttttagcagctgcagtatctcggaagaaaaaacgaagaatgggaacctatagcctggttcctaagaaaaagaccaaagtattaaaacagaggacagtgattgagatgtttaagagcataactcattccactgtgggttctaagg

SEQ ID NO: 23014 - DNA, 3190 bp, Macaca Mulatta
  misc_feature (1)...(3190): n = A,T,C or G
ggtccctccgtacccagaagtgttccgggacagcctccatacctacaagttaaacgagcaagacacagatnnnnnnnnnnnnnnnnnnnnnnnnnnnnnnnnnnnnnnnnnnnnnnnnnnnnnnnnnnnnnnnnnnnnnnnnnnnnnnnnnnnnnnnnnnnnnnnnnnnnnnnnnnnnnnnnnnnnnnnnnnnnnnnnnnnnnnnnnnnnnnnnnnnnnnnnnnnnnnnnnnnnnnnnnnnnnnnnnnnnnnnnnnnnnnnnnnnnnnnnnnnnnnnnnnnnnnnnnnnnnnnnnnnnnnnnnnnnnnnnnnnnnnnnnnnnnnnnnnnnnnnnnnnnnnnnnnnnnnnnnnnnnnnnnnnnnnnnnnnnnnnnnnnnnnnnnnnnnnnnnnnnnnnnnnnnnnnnnnnnnnnnnnnnnnnnnnnnnnnnnnnnnnnnnnnnnnnnnnnnnnnnnnnnnnnnnnnnnnnnnnnnnnnnnnnnnnnnnnnnnnnnnnnnnnnnnnnnnnnnnnnnnnnnnnnnnnnnnnnnnnnnnnnnnnnnnnnnnnnnnnnnnnnnnnnnnnnnnnnnnnnnnnnnnnnnnnnnnnnnnnnnnnnnnnnnnnnnnnnnnnnnnnnnnnnnnnnnnnnnnnnnnnnnnnnnnnnnnnnnnnnnnnnnnnnnnnnnnnnnnnnnnnnnnnnnnnnnnnnnnnnnnnnnnnnnnnnnnnnnnnnnnnnnnnnnnnnnnnnnnnnnnnnnnnnnnnnnnnnnnnnnnnnnnnnnnnnnnnnnnnnnnnnnnnnnnnnnnnnnnnnnnnnnnnnnnnnnnnnnnnnnnnnnnnnnnnnnnnnnnnnnnnnnnnnnnnnnnnnnnnnnnnnnnnnnnnnnnnnnnnnnnnnnnnnnnnnnnnnnnnnnnnnnnnnnnnnnnnnnnnnnnnnnnnnnnnnnnnnnnnnnnnnnnnnnnnnnnnnnnnnnnnnnnnnnnnnnnnnnnnnnnnnnnnnnnnnnnnnnnnnnnnnnnnnnnnnnnnnnnnnnnnnnnnnnnnnnnnnnnnnnnnnnnnnnnnnnnnnnnnnnnnnnnnnnnnnnnnnnnnnnnnnnnnnnnnnnnnnnnnnnnnnnnnnnnnnnnnnnnnnnnnnnnnnnnnnnnnnnnnnnnnnnnnnnnnnnnnnnnnnnnnnnnnnnnnnnnnnnnnnnnnnnnnnnnnnnnnnnnnnnnnnnnnnnnnnnnnnnnnnnnnnnnnnnnnnnnnnnnnnnnnnnnnnnnnnnnnnnnnnnnnnnnnnnnnnnnnnnnnnnnnnnnnnnnnnnnnnnnnnnnnnnnnnnnnnnnnnnnnnnnnnnnnnnnnnnnnnnnnnnnnnnnnnnnnnnnnnnnnnnnnnnnnnnnnnnnnnnnnnnnnnnnnnnnnnnnnnnnnnnnnnnnnnnnnnnnnnnnnnnnnnnnnnnnnnnnnnnnnnnnnnnnnnnnnnnnnnnnnnnnnnnnnnnnnnnnnnnnnnnnnnnnnnnnnnnnnnnnnnnnnnnnnnnnnnnnnnnnnnnnnnnnnnnnnnnnnnnnnnnnnnnnnnnnnnnnnnnnnnnnnnnnnnnnnnnnnnnnnnnnnnnnnnnnnnnnnnnnnnnnnnnnnnnnnnnnnnnnnnnnnnnnnnnnnnnnnnnnnnnnnnnnnnnnnnnnnnnnnnnnnnnnnnnnnnnnnnnnnnnnnnnnnnnnnnnnnnnnnnnnnnnnncctgaggtcctggctccccaccctggccccctgcccctgcactcccatgtgaatgccgcagggagccaggctggggccacgggctgctgccgagaggagcgtggatacctcagtgtccacacacccactatgcctaaccctggagctctcactgctcacaccgtggtcctgggccagggcctgagacggcagtggggagcaccatcctcgttaatgcccaagtcacagggagcctcggccttgccctggctgggattgtggtgactccagtggaacaatccctgatgggggacatgccgtggtggagaacatacctgtggctatcttatgtgaggactagaggtgaagaggagatggacactgcctcttggagccagcctgacactgaggacagcacttgtcgtcatccccatcctcatcaaccccacccggctgcctcagctggacccagggctttgataaacccagtgctttgcttatgggtgctcgctggggtccaatggagactgaccaccctgcttgagccaaagacaaggtgatgagagatggggagaggctattggctcccagagggaacagtgctggttgtggctagagaacagcaggtctgtgcagtgtctgaaggcaggttgggaagggtagcnnnnnnnnnnnnnnnnnnnnnnnnnnnnnnnnnnnnnnnnnnnnnnnnnnnnnnnnnnnnnnnnnnnnnnnnnnnnnnnnnnnnnnnnnnnnnnnnnnnnnnnnnnnnnnnnnnnnnnnnnnnnnnnnnnnnnnnnnnnnnnnnnnnnnnnnnnnnnnnnnnnnnnnnnnnnnnnnnnnnnnnnnnnnnnnnnnnnnnnnnnnnnnnnnnnnnnnnnnnnnnnnnnnnnnnnnnnnnnnnnnnnnnnnnnnnnnnnnnnnnnnnnnnnnnnnnnnnnnnnnnnnnnnnnnnnnnnnnnnnnnnnnnnnnnnnnnnnnnnnnnnnnnnnnnnnnnnnnnnnnnnnnnnnnnnnnnnnnnnnnnnnnnnnnnnnnnnnnnnnnnnnnnnnnnnnnnnnnnnnnnnnnnnnnnnnnnnnnnnnnnnnnnnnnnnnnnnnnnnnnnnnnnnnnnnnnnnnnnnnnnnnnnnnnnnnnnnnnnnnnnnnnnnnnnnnnnnnnnnnnnnnnnnnnnnnnnnnnnncccccatcccaggcatcccagacgaggactggctgaggctaggcgctctcacgatccacctgcncagggagggcagtgggggagagacagaagagcaaagcgcattcttcctcagctccacccacctggagatgaatgtagccagagaggaggaaggagggaagctgaagacgccgtggcccctaggccttcactctgctagagttgccacccagaggcttcagcctgacctccagcggtcccaagaacacctactaattcctctccactccttcatggctgggacagttactggttcatatgcaagtaaagatgataatttactcaa

SEQ ID NO: 23015 - DNA, 804 bp, Macaca Mulatta
  misc_feature (1)...(804): n = A,T,C or G
gggccgagaagatttagcagaagtttaagccggactccaagtccacctcccttcagaggcagaaacacagcaatggatgcacaagaagctttagctagaaggttggaaagggcaaagaaattacaagagcagcgagaaaaggaaatggttgaaaaacaaaaacaacaagaaatagctgcagctgcagctactggaggttctgttctcaatgttgctgccctgttggcatcaggaacacaagtaacacctcagatagccatggcagctcagatggcagccctgcaagctaaagctttggcagagacaggaatagctgttcctagctactataacccagcagctgtgaatccaatgaaatttgctgaacaagagaaaaaaaggaaaatgctttggcagggcaagaaagaaggggacaaatcccaatctgctgaaatatgggaaaaattgaattttgggaaacaaggaccaaaatggtcaaatttagggaaggttgatggggtattaaggagtggaaagattgaagctggggtgtagccccagtttgatgaaaaaaaggttacaagcttctgaaagcaaccagggaagaaagaattttccaaaattttagaatgcttcaagtaaggaaaattgggctaagaatcaacagaacccccgcacccccaaaggagagaaatgggggtcttggggggtttcacaccaatctttttaatgggccaaggggaattgggaattgcccgttcttggtaacactcaatcggacaacttgtgtaaaaaggttttgggtggaacactaataagaaaccn

SEQ ID NO: 23016 - DNA, 741 bp, Macaca Mulatta
  misc_feature (1)...(741): n = A,T,C or G
agtacccttagaaagaggccctcagaagagtcttctcttaagaagataaagaagatagtggaaacgaacctactgaacttttcaggctctaatggctgaagaatcaagaaagccgtcagccccatccccaccagaccagactcctgaagaggatcttgtaatcgtcaaggtagaggaggatcatggttgggaccaggaatctagtctgcatgagaataatcctcctggccaagaactgttccgcctgcgcttcaggcagttatgctaccaggagacactaggaccccgagaagctctgatccaactacgggcactttgccatcagtggctgaggccagatttgaacaccaaggannnnnnnnnnnnnnnnnnnnnnnnnnnnnnnnnnnnnnnnnnnnnnnnnnnnnnnnnnnnnnnnnnnnnnnnnnnnnnnnnnnnnnnnnnnnnnnnnnnnnnnnnnnnnnnnnnnnnnnnnnnnnnnnnnnnnnnnnnnnnnnnnnnnnnnnnnnnnnnnnnnnnnnnnnnnnnnnnnnnnnnnnnnnnnnnnnnnnnnnnnnnnnnnnnnnnnnnnnnnnnnnnnnnnnnnnnnnnnnnnnnnnnnnnnnnnnnnnnnnnnnnnnnnnnnnnnnnnnnnnnnnnnnnnnnnnnagccatgtctacttcccagagtcctactccttcccagaaaggaagttctggagaccaggaaatgacagctacacttctcacagcagggttcca

SEQ ID NO: 23017 - DNA, 834 bp, Macaca Mulatta
  misc_feature (1)...(834): n = A,T,C or G
gaagccaattatccctaatttcgttgctcagggtgcagagagggttagcgaggcaaatcccagtttcaggaagagctntgaattcagttaagtgttaataaggatctactgagcttctcagttaatctgtggaaagtccttttttactgctttgcctattggagaattctcttttggtatggttcaaggcaagtagcaagagtagagcaaaatttcaaatccagggatggcttaggtttcattaacagaactggaaaatagttgtttggctctgaatgttttgtatttcaatcaagaatccttagtcgatagaacattttgtttatatattgattctactttttccgtagttaatccatgcatactctcctttcatcctagcttgccaacgcagtcttaattnnnnnnnnnnnnnnctaatggggagcaaaaaggaattcattatcttttaatagtgatttcaaatagcttattgaaataactcctttcaatttttatattataaagcaatgtagagagttccaaaccaccaattttataatttcccttgttgaatatattcacataatgtattgtataatatgcccaaagcagctttgtctatggttaacgaagttttgagaatagacaagaatgtgttttctttaatttatagtaatatatcatctttttagggatgtagtactcaaatgaaagtaatttagttcattttctgtgttgacatttgcaattaatatttcaatattttatgtgcttatattggccaaaagtatggacacaaatatagactaatagggataattaccctatggagtttgtctaaagtgtgttcat

SEQ ID NO: 23018 - DNA, 191 bp, Macaca Mulatta
ggccatccttcttgcctggatatgacagtggagcttgtttctatgattaagacctacccatggcagtgtatggaatgtaaaacatgcattatatgtggacaaccccaccatgaagaagaaatgatgttctgtgatgtgtgtgacagaggttatcatactttttgtgtgggccttggtgttattccatcagg

SEQ ID NO: 23019 - DNA, 94 bp, Macaca Mulatta
tcttatcatggttttggctggagcttctgaatttgatcctcagtataataaagatgccacaagcagaccaacggataatattctaataccacag

SEQ ID NO: 23020 - DNA, 1306 bp, Macaca Mulatta
  misc_feature (1)...(1306): n = A,T,C or G
gggttagtcaccgggcgcgggatttggccgccgcggggctccgggcgccgctcgctcccgacagggctcacgatgcgcggcgggcagggcgcggcgnnnnnnnnnnnnnnnnnnnnnnnnnnnnnnnnnnnnnnnnnnnnnnnnnnnnnnnnnnnnnnnnnnnnnnnnnnnnnnnnnnnnnnnnnnnnnnnnnnnnnnnnnnnnnnnnnnnnnnnnnnnnnnnnnnnnnnnnnnnnnnnnnnnnnnnnnnnnnnnnnnnnnnnnnnnnnnnnnnnnnnnnnnnnnnnnnnnnnnnnnnnnnnnnnnnnnnnnnnnnnnnnnnnnnnnnnnnnnnnnnnnnnnnnnnnnnnnnnnnnnnnnnnnnnnnnnnnnnnnnnnnnnnnnnnnnnnnnnnnnnnnnnnnnnnnnnnnnnnnnnnnnnnnnnnnnnnnnnnnnnnnnnnnnnnnnnnnnnnnnnnnnnnnnnnnnnnnnnnnnnnnnnnnnnnnnnnnnnnnnnnnnnnnnnnnnnnnnnnnnnnnnnnnnnnnnnnnnnnnnnnnnnnnnnnnnnnnnnnnnnnnnnnnnnnnnnnnnnnnnnnnnnnnnnnnnnnnnnnnnnnnnnnnnnnnnnnnnnnnnnnnnnnnnnnnnnnnnnnnnnnnnnnnnnnnnnnnnnnnnnnnnnnnnnnnnnnnnnnnnnnnnnnnnnnnnnnnnnnnnnnnnnnnnnnnnnnnnnnnnnnnnnnnnnnnnnnnnnnnnnnnnnnnnnnnnnnnnnnnnnnnnnnnnnnnnnnnnnnnnnnnnnnnnnnnnnnnnnnnnnnnnnnnnnnnnnnnnnnnnnnnnnnnnnnnnnnnnnnnnnnnnnnnnnnnnnnnnnnnnnnnnnnnnnnnnnnnnnnnnnnnnnnnnnnnnnnnnnnnnnnnnnnnnnnnnnnnnnnnnnnnnnnnnnnnnnnnnnggctggtgctggtcactgatgccttccctgccttgggcctgggcaacggccggcacacgctgtgacagcaggaagtggaagtggacggtctgacggcctatgtggcaggtgagcgccctgacctactgggtcccaggtcccagcccgcatgccaggtggcccacgaccccccagagcctgccctctctgctctcaaggcaccaagacgctgagcggcagcatagccccaatggacgtctgtgtccggcacttcctgcaggccacaggncaggctgcagcgtggagtcggccctggaggctgcatccctgcaccccgcccagttgctggggctggagaagagtaaggggaccctggactttggtgctgacgcag

SEQ ID NO: 23021 - DNA, 541 bp, Macaca Mulatta
  misc_feature (1)...(541): n = A,T,C or G
gtctaaatggaggctatcaagatgagttggtagatcatcgtttgacagaaagggaatgggctgatgaatggaaacatcttgaccatgcgctgaattgcattatggaaatggtagagaaaacaaggcgctccatggcagttctgcggcgctgtcaggaatcagatcgtgaagaactcaactattggaaaannnnnnnnnnnnnnnnnnnnnnnnnnnnnnnnnnnnnnnnnnnnnnnnnnnnnnnnnnnnnnnnnnnnnnnnnnnnnnnnnnnnnnnnnnnnnnnnnnnnnnnnnnnnnnnnnnnnnnnnnnnnnnnnnnnnnnnnnnnnnnnnnnnnnnnnnnnnnnnnagaagaagctgtgaataaggtgaaaattcaggccatgtcagaagtacagaaggctgtcgctgaggcagagcagaaagcctttgaagtaattgcaacagagagagcacgaatggagcaaaccatagcggacgtcaagcggcaggccgcggaggacgctttcctcgtcatcaacgagcaagaggagtccacgga

SEQ ID NO: 23022 - DNA, 188 bp, Macaca Mulatta
gtgtgttgttggtggctgcaatgccagctttgcttctcagggagggctagctcgtcatgtacccacacacttcagtcagcagaactcctcaaaagtttcgagccagccaaaggccaaagaagaatctccttctaaagctggaatgaacaaaaggaggaaattaaagaacaaaagacgacgctcattac

SEQ ID NO: 23023 - DNA, 532 bp, Macaca Mulatta
attgacttcttccccaatgctgtttacacccactgctacgactcgtctggaacgaaactctttgtggcaggaggtcccctcccttcagggctccatggaaactatgctgggctctggagttaatgacaactccccaaatgcagagatttacactaacttccatcctcagtttccttgtttcttctgattttttttttcctaattgtgtgaggctcttgtgttttagtgggaacaccaaagtttgcctatagtttaggcacttaataggaagaagctctgtacagaaatctgaaggttgtttggttttttattttcccctttggtaatcaaaattttactgtcttttattctggcttttcaaccaaacattgttgctaatccctatttttctttaagtgacacacattctcccctctctggcttctttaggctgaaatgacatagtcattctcacccttacttcactcttgaggggtagggctcctttataattatatggttgctgtcagactttctgtgaaagtttgggagc

SEQ ID NO: 23024 - DNA, 1009 bp, Macaca Mulatta
  misc_feature (1)...(1009): n = A,T,C or G
gggagttccgtcgcagccgggagtgggatcgcagttcttgtttgtgtgtcggtgtcatcgccacttgacaatgcagatcttcgtgaagaccctgactggcaagaccatcactcttgaggttgagcccagtgacaccnnnnnnnnnnnnnnnnnnnnnnnnnnnnnnnnnnnnnnnnnnnnnnnnnnnnnnnnnnnnnnnnnnnnnnnnnnnnnnnnnnnnnnnnnnnngcgcaccctgtctgactacaacatccagaaagagtccaccctgcacctcgtgctccgcctcagaggtgggatgcagatcttcgtgaagaccctgactggcaagaccatcaccctcgaggtcgagcccagtgacaccatcgagaacgtcaaagcaaagatccaagacaaggaaggcatccctcctgaccagcagaggttgatctttgccgggaaacagctggaagatggacgcaccctgtctgactacaacatccagaaagagtctaccctgcacctggtgctccgcctcagaggtgggatgcagatcttcgtgaagaccctcactggcaagaccatcaccctcgaggtggagcccagtgacaccatcgagaatgtcaaggcaaagatccaggacaaggaaggcattcctcctgaccagcagaggttgatctttgccggaaagcagctggaagatgggcgcaccctgtctgactacaacatccagaaagagtccaccctgcacctggtgctccgcctcagaggtgggatgcagatcttcgtgaagacgctgactggcaagaccatcacccttggagggggagcccagggagactattggaaaatggccagggcaaagatcccaggaaaagggaggggcatcccctccctgacccagcaagaggggtggatccttttgcctgggaaaaaacaagcttgggaaaaaattggggcggccgcccttggtcctggaattacaagaaaatcccacagaaaagaaagttggcaaccccctgtggcaccc

SEQ ID NO: 23025 - DNA, 1260 bp, Macaca Mulatta
  misc_feature (1)...(1260): n = A,T,C or G
gatgtatggccggtacactcaggaccttggggcctttgccaaagaggaagctgctcggattcgcctgggagggcctgaaccctggaaaggtcccccttcccctcgggctgccccagagctcttggaatatggacggagccgttgtgcccaatgccntctgttctgtccgctgccacaagttcctagtatccagggttggtgaagattggatcttcctggtcctgtttttgttcctcatggcattggtcacctgggtcatggactatgccattgctgcctgtctgcaannnnnnnnnnnnnnnnnnnnnnnnnnnnnnnnnnnnnnnnnnnnnnnnnnnnnnnnnnnnnnnnnnnnnnnnnnnnnnnnnnnnnnnnnnnnnnnnnnnnnnnnnnnnnnnnnnnnnnnnnnnnnnnnnnnnnnnnnnnnnnnnnnnnnnnnnnnnnnnnnnnnnnnnnnnnnnnnnnnnnnnnnnnnnnnnnnnnnnnnnnnnnnnnnnnnnnnnnnnnnnnnnnnnnnnnnnnnnnnnnnnnnnnnnnnnnnnnnnnnnnnnnnnnnnnnnnnnnnnnnnnnnnnnnnnnnnnnnnnnnnnnnnnnnnnnnnnnnnnnnnnnnnnnnnnnnnnnnnnnnnnnnnnnnnnnnnnnnnnnnnnnnnnnnnnnnnnnnnnnnnnnnnnnnnnnnnnnnnnnnnnnnnnnnnnnnnnnnnnnnnntcctcttcagcatcgaggtcacctccaccttcttcgcggtacggaactactggcggggcttcttcgctgccaccttcagtgccttcatcttccgggtcttggcagtctggaaccgggatgaagnnnnnnnnnnnnnnnnnnnnnnnnnnnnnnnnnnnnnnnnnnnnnnnnnnnnnnnnnnnnnnnnnnnnnnnnnnnnnnnnnnnnnnnnnnnnnnnnnnnnnnnnnnnnnnnnnnnnnnnnnnnnnnnnnnnnnnnnnnnnnnnnnnnnnnnnnnnnnnnnnnnnnnnnnnnnnnnnnnnnnnnnnnnnnnnnnnnnnnnnnnnnnnnnnnnnnnnnnnnnnnnnnnnnnnnnnnnnnnnnnnnnnnnnnnnnnnnnnnnnnnnnnnnnnnnagctctcacagaaagagacgctggtcaccctgtttgacaatcggacgtgggtccaccagggcctggtggaggagctagaaccacccagcacctcacaggcctggaacccaccacgaacgaacgtcttcctcaccctggtcatcttcattctcatga

SEQ ID NO: 23026 - DNA, 3258 bp, Macaca Mulatta
  misc_feature (1)...(3258): n = A,T,C or G
gatgcttattatagacctacgcgacaccagtgcccggtgccaggttctccgctgaggcttttcggagcgagctcctcaaatcgcatccacagtaagtgtccccgccccccagcagccccagtctagattccaaggacagacgcttctcaactccgctgtgacccagaatgctccgatacagggggtctggatcccttctctgcgagccatttctccagagcgactttgctgttctgtcctccccccactcaccgctgcatgcccctcgccaaaagcgagaagtcggagcgacaacagctctttctgcccaagcccaagtcagctggtgagctccccgtagtctccagacgcagcacatggactctgggccccgcgccggcgctgggtgcttgtgcgtgtgcgtgtgtttgctgcgtggtgtcgatggagataaggtggacccgtctggggaacaaaatcattagttctctatttagatctccaccgtccccaaagaaaggccctcacttcccactcgtttattccagcccgagagactcagctttcccactcctaactgaaaacacgaagcctctagaatgccacccgcaccccgagggtcaccaacgctccctgnnnnnnnnnnnnnnnnnnnnnnnnnnnnnnnnnnnnnnnnnnnnnnnnnnnnnnnnnnnnnnnnnnnnnnnnnnnnnnnnnnnnnnnnnnnnnnnnnnnnnnnnnnnnnnnnnnnnnnnnnnnnnnnnnnnnnnnnnnnnnnnnnnnnnnnnnnnnnnnnnnnnnnnnnnnnnnnnnnnnnnnnnnnnnnnnnnnnnnnnnnnnnnnnnnnnnnnnnnnnnnnnnnnnnnnnnnnnnnnnnnnnnnnnnnnnnnnnnnnnnnnnnnnnnnnnnnnnnnnnnnnnnnnnnnnnnnnnnnnnnnnnnnnnnnnnnnnnnnnnnnnnnnnnnnnnnnnnnnnnnnnnnnnnnnnnnnnnnnnnnnnnnnnnnnnnnnnnnnnnnnnnnnnnnnnnnnnnnnnnnnnnnnnnnnnnnnnnnnnnnnnnnnnnnnnnnnnnnnnnnnnnnnnnnnnnnnnnnnnnnnnnnnnnnnnnnnnnnnnnnnnnnnnnnnnnnnnnnnnnnnnnnnnnnnnnnnnnnnnnnnnnnnnnnnnnnnnnnnnnnnnnnnnnnnnnnnnnnnnnnnnnnnnnnnnnnnnnnnnnnnnnnnnnnnnnnnnnnnnnnnnnnnnnnnnnnnnnnnnnnnnnnnnnnnnnnnnnnnnnnnnnnnnnnnnnnnnnnnnnnnnnnnnnnnnnnnnnnnnnnnnnnnnnnnnnnnnnnnnnnnnnnnnnnnnnnnnnnnnnnnnnnnnnnnnnnnnnnnnnnnnnnnnnnnnnnnnnnnnnnnnnnnnnnnnnnnnnnnnnnnnnnnnnnnnnnnnnnnnnnnnnnnnnnnnnnnnnnnnnnnnnnnnnnnnnnnnnnnnnnnnnnnnnnnnnnnnnnnnnnnnnnnnnnnnnnnnnnnnnnnnnnnnnnnnnnnnnnnnnnnnnnnnnnnnnnnnnnnnnnnnnnnnnnnnnnnnnnnnnnnnnnnnnnnnnnnnnnnnnnnnnnnnnnnnnnnnnnnnnnnnnnnnnnnnnnnnnnnnnnnnnnnnnnnnnnnnnnnnnnnnnnnnnnnnnnnnnnnnnnnnnnnnnnnnnnnnnnnnnnnnnnnnnnnnnnnnnnnnnnnnnnnnnnnnnnnnnnnnnnnnnnnnnnnnnnnnnnnnnnnnnnnnnnnnnnnnnnnnnnnnnnnnnnnnnnnnnnnnnnnnnnnnnnnnnnnnnnnnnnnnnnnnnnnnnnnnnnnnnnnnnnnnnnnnnnnnnnnnnnnnnnnnnnnnnnnnnnnnnnnnnnnnnnnnnnnnnnnnnnnnnnnnnnnnnnnnnnnnnnnnnnnnnnnnnnnnnnnnnnnnnnnnnnnnnnnnnnnnnnnnnnnnnnnnnnnnnnnnnnnnnnnnnnnnnnnnnnnnnnnnnnnnnnnnnnnnnnnnnnnnnnnnnnnnnnnnnnnnnnnnnnnnnnnnnnnnnnnnnnnnnnnnnnnnnnnnnnnnnnnnnnnnnnnnnnnnnnnnnnnnnnnnnnnnnnnnnnnnnnnnnnnnnnnnnnnnnnnnnnnnnnnnnnnnnnnnnnnnnnnnnnnnnnnnnnnnnnnnnnnnnnnnnnnnnnnnnnnnnnnnnnnnnnnnnnnnnnnnnnnnnnnnnnnnnnnnnnnnnnnnnnnnnnnnnnnnnnnnnnnnnnnnnnnnnnnnnnnnnnnnnnnnnnnnnnnnnnnnnnnnnnnnnnnnnnnnnnnnnnnnnnnnnnnnnnnnnnnnnnnnnnnnnnnnnnnnnnnnnnnnnnnnnnnnnnnnnnnnnnnnnnnnnnnnnnnnnnnnnnnnnnnnnnnnnnnnnnnnnnnnnnnnnnnnnnnnnnnnnnnnnnnnnnnnnnnnnnnnnnnnnnnnnnnnnnnnnnnnnnnnnnnnnnnnnnnnnnnnnnnnnnnnnnnnnnnnnnnnnnnnnnnnnnnnnnnnnnnnnnnnnnnnnnnnnnnnnnnnnnnnnnnnnnnnnnnnnnnnnnnnnnnnnnnnnnnnnnnnnnnnnnnnnnnnnnnnnnnnnnnnnnnnnnnnnnnnnnnnnnnnnnnnnnnnnnnnnnnnnnnnnnnnnnnnnnnnnnnnnnnnnnnnnnnnnnnnnnnnnnnnnnnnnnnnnnnnnnnnnnnnnnnnnnnnnnnnnnnnnnnnnnnnnnnnnnnnnnnnnnnnnnnnnnnnnnnnnnnnnnnnnnnnnnnnnnnnnnnnnnnnnnnnnnnnnnnnnnnnnnnnnnnnnnnnnnnnnnnnnnnnnnnnnnnnnnnnnnnnnnnnnnnnnnnnnnnnnnnnnnnnnnnnnnnnnnnnnnnnnnnnnnnnnnnnnnnnnnnnnnnnnnnnnnnnnnnnnnnnnnnnnnnnnnnnnnnnnnnnnnnnnnnnnnnntgccagccccaccggagtataagccggctttcctctattttggtttatttttgccacgtttaacacaaatggtaaactcctccacgtgcttcctgcgtccgtgcaagccgcctcggcgctgcctgcgtggcaaactgggctttgtagcgtctgccgtgtaacacccttcctctgatcgcaccgaccttcgcagagtgtatcatctgttttatttttgtaaaaacaaagtgctaaataatatttattacttgtttggttgcaaaaacgaaataaatgactgagtgttgagattttaaataaaatttaaagtaa

SEQ ID NO: 23027 - DNA, 2597 bp, Macaca Mulatta
  misc_feature (1)...(2597): n = A,T,C or G
ggttcatggttcaaaatcagacaaaatgaacatatttggtggctttcgacagatggtaaaagagggagggatccgctccctttggaggggaaatggtacaaacgtcatcaaaattgctcctgagacagctgttaagttctgggcatatgaacagnnnnnnnnnnnnnnnnnnnnnnnnnnnnnnnnnnnnnnnnnnnnnnnnnnnnnnnnnnnnnnnnnnnnnnnnnnnnnnnnnnnnnnnnnnnnnnnnnnnnnnnnnnggttatgaaaaccaggctggctgtaggcaaaactgggcaatactccggaatatatgattgtgccaagaagattttgaaacatgaaggcttgggagctttttacaaaggttatgttcccaatttattaggtatcataccttatgcaggcatagatcttgctgtgtatgagnagctcttgaagtcctattggctggataattttgcaaaagactctgtgaaccctggagtcatggtgttgctgggatgcggtgccttatccagcacctgtggtcagctggccagctacccattggctttggtgagaactcgcatgcaggctcaagnnnnnnnnnnnnnnnnnnnnnnnnnnnnnnnnnnnnnnnnnnnnnnnnnnnnnnnnnnnnnnnnnnnnnnnnnnnnnnnnnnnnnnnnnnnnnnnnnnnnnnnnnnnnnnnnnnnnnnnnnnnnnnnnnnnnnnnnnnnnnnnnnnnnnnnnnnnnnnnnnnnnnnnnnnnnnnnnnnnnnnnnnnnnnnnnnnnnnnnnnnnnnnnnnnnnnnnnnnnnnnnnnnnnnnnnnnnnnnnnnnnnnnnnnnnnnnnnnnnnnnnnnnnnnnnnnnnnnnnnnnnnnnnnnnnnnnnnnnnnnnnnnnnnnnnnnnnnnnnnnnnnnnnnnnnnnnnnnnnnnnnnnnnnnnnnnnnnnnnnnnnnnnnnnnnnnnnnnnnnnnnnnnnnnnnnnnnnnnnnnnnnnnnnnnnnnnnnnnnnnnnnnnnnnnnnnnnnnnnnnnnnnnnnnnnnnnnnnnnnnnnnnnnnnnnnnnnnnnnnnnnnnnnnnnnnnnnnnnnnnnnnnnnnnnnnnnnnnnnnnnnnnnnnnnnnnnnnnnnnnnnnnnnnnnnnnnnnnnnnnnnnnnnnnnnnnnnnnnnnnnnnnnnnnnnnnnnnnnnnnnnnnnnnnnnnnnnnnnnnnnnnnnnnnnnnnnnnnnnnnnnnnnnnnnnnnnnnnnnnnnnnnnnnnnnnnnnnnnnnnnnnnnnnnnnnnnnnnnnnnnnnnnnnnnnnnnnnnnnnnnnnnnnnnnnnnnnnnnnnnnnnnnnnnnnnnnnnnnnnnnnnnnnnnnnnnnnnnnnnnnnnnnnnnnnnnnnnnnnnnnnnnnnnnnnnnnnnnnnnnnnnnnnnnnnnnnnnnnnnnnnnnnnnnnnnnnnnnnnnnnnnnnnnnnnnnnnnnnnnnnnnnnnnnnnnnnnnnnnnnnnnnnnnnnnnnnnnnnnnnnnnnnnnnnnnnnnnnnnnnnnnnnnnnnnnnnnnnnnnnnnnnnnnnnnnnnnnnnnnnnnnnnnnnnnnnnnnnnnnnnnnnnnnnnnnnnnnnnnnnnnnnnnnnnnnnnnnnnnnnnnnnnnnnnnnnnnnnnnnnnnnnnnnnnnnnnnnnnnnnnnnnnnnnnnnnnnnnnnnnnnnnnnnnnnnnnnnnnnnnnnnnnnnnnnnnnnnnnnnnnnnnnnnnnnnnnnnnnnnnnnnnnnnnnnnnnnnnnnnnnnnnnnnnnnnnnnnnnnnnnnnnnnnnnnnnnnnnnnnnnnnnnnnnnnnnnnnnnnnnnnnnnnnnnnnnnnnnnnnnnnnnnnnnnnnnnnnnnnnnnnnnnnnnnnnnnnnnnnnnnnnnnnnnnnnnnnnnnnnnnnnnnnnnnnnnnnnnnnnnnnnnnnnnnnnnnnnnnnnnnnnnnnnnnnnnnnnnnnnnnnnnnnnnnnnnnnnnnnnnnnnnnnnnnnnnnnnnnnnnnnnnnnnnnnnnnnnnnnnnnnnnnnnnnnnnnnnnnnnnnnnnnnnnnnnnnnnnnnnnnnnnnnnnnnnnnnnnnnnnnnnnnnnnnnnnnnnnnnnnnnnnnnnnnnnnnnnnnnnnnnnnnnnnnnnnnnnnnnnnnnnnnnnnnnnnnnnnnnnnnnnnnnnnnnnnnnnnnnnnnnnnnnnnnnnnnnnnnnnnnnnnnnnnnnnnnnnnnnnnnnnnnnnnnnnnnnnnnnnnnnnnnnnnnnnnnnnnnnnnnnnnnnnnnnnnnnnnnnnnnnnnnnnnnnnnnnnnnnnnnnnnnnnnnnnnnnnnnnnnnnnnnnnnnnnnnnnnnnnnnnnnnnnnnnnnnnnnnnnnnnnnnnnnnnnnnnnnnnnnnnnnnnnnnnnnnnnnnnnnnnnnnnnnnnnnnnnnnnnnnnnnnnnnnnnnnnttgtaaggtatgaatgtgatttgtctgtacatcttgtatcttttccaaaaaataattctgtatcttttggataaaagccaagagttgaagatagtatatttctggcagtactgaatatttacttacagtttctatcaaaaatatatatttgtttctaaa

SEQ ID NO: 23028 - DNA, 785 bp, Macaca Mulatta
gggaattttcctgtaaacctccacagtatggacagctggaaacaaagcacattgcaaatgcaaaatataatcaggcggaatgggtagccttgaattatgtgccgtttgctgaaaggtctttagaagtagttgtggatttataccaaaaaacagcgtgtcacaaagcagtggtgaatgagaaagtgctccagtatattattaagactcttagggttcctctcagtttgaagtattcctgcccttctgaaagcacatggaaactagcagtatcctctctcctcaaagttctttctattgggctacctgtcgcccggcagcatgcttcttctggaaaatttgacagtatgtggccagaactagccaatacttttgaagattttctctttactaaaagcatacctccagataatctctccattcaagagtttcaaagaaatgaaaatattgatgtcgaggtagttcagcttatcagcaatgagatactaccttatgccaattttattcctaaggaatttgttggtcaaataatgacaatgcttaacaagggctcaatacattctcagtcatcttcatttacagaagcagagattgatattcgtttgagagaggaattttctaaaatgtgttttgaaacattgcttcagtttttccttcagtaataaagtcacaacacctccaagaaggctacatcttcccgaatggcactcctcagtggctttttaaaagaaggtccccaaagatgtacctaccatcgccttatattgaagggattgaaaagaaattac

SEQ ID NO: 23029 - DNA, 252 bp, Macaca Mulatta
aggtactgaaggacctgccgagggtggaggggcggcccggagcctccctgcctcctctggatctgcaggcactggagaaggagctggtagaccggcatggggaggaggtgaccccggaagatgtgctctcagcagctatgtaccccgatgtgtttgcccacttcaaggacttcactgccacctttggccccctggatagcctgaatactcgcctcttccttcagggacccaggatcgcagaagagtttgagg

SEQ ID NO: 23030 - DNA, 1146 bp, Macaca Mulatta
  misc_feature (1)...(1146): n = A,T,C or G
ggttacggttttgtcgactttgacagccctgcagcagctcaaaaagctgtgtctgccctgaaggccagtggggttcaagctcaaatggcaaagnnnnnnnnnnnnnnnnnnnnnnnnnnnnnnnnnnnnnnnnnnnnnnnnnnnnnnnnnnnnnnnnnnnnnnnnnnnnnnnnnnnnnnnnnnnnnnnnnnnnnnnnnnnnnnnnnnnnnnnnnnnnnnnnnnnnnnnnnnnnnnnnnnnnnnnnnnnnnnnnnnnnnnnnnnnnnnnnnnnnnnnnnnnnnnnnnnnnnnnnnnnnnnnnnnnnnnnnnnnnnnnnnnnnnnnnnnnnncccccacagaacctttattgtgtaagtttgctgatggaggacagaaaaagagacagaacccaaacaaatacatccctaatggaagaccatggcatagagaaggagaggtgagacttgnnnnnnnnnnnnnnnnnnnnnnnnnnnnnnnnnnnnnnnnnnnnnnnnnnnnnnnnnnnnnnnnnnnnnnnnnnnnnnnnnnnnnnnnnnnnnnnnnnnnnnnnnnnnnnnnnnnnnnnnnnnnnnnnnnnnnnnnnnnnnnnnnnnnnnnnnnnnnnnnnnnnnnnnnnnnnnnnnnnnnnnnnnnnnnnnnnggtgccgtgttaactccctcaatggagcacaccatgtcactacagcccgcatcgatgatcagccctctggcccagcagatgagtcatctgtcactaggcagcactggaacnnnnnnnnnnnnnnnnnnnnnnnnnnnnnnnnnnnnnnnnnnnnnnnnnnnnnnnnnnnnnnnnnnnnnnnnnnnnnnnnnnnnnnnnnnnnnnnnnnnnnnnnnnnnnnnnnnnnnnnnnnnnnnnnnnnnnnnnnnnnnnnnnnnnnnnnnnnnnnnnnnnngatgtatagaaaggtgttcttacatgaagaagggtgtgaaggctgaacaatcatggatttttctgatcaattgtgctttaggaaattattgacagttttgcacaggttcttgaaaacgttatttataatgaaatcaactaaaactatttttgctataagttctataaggtgcataaaacccttaaattcatctagtagctgttcccctgaacaggtttattttagtaaaaa

SEQ ID NO: 23031 - DNA, 768 bp, Macaca Mulatta
gggtaccggccctggcccctgggaaggaaagaagggacctttccgtttcacttgtctcggctgaacatgtagcggaggaggtcgaccacccggtgactgtagccatattcgttgtcgtacctgtggaggagggattggcaggctcaagggggttccttccgaccaccccttagttcccctgcaagtctccagctcctttccccttaccatgaaatgagcttcacgaaattgtcattgagcgcaatgccggccttagcatcgaagatggacgagtggcgatcaccgacgaagtccgtagagacgacctgagcgtcagaatttcaaagataagtgtgtccggcagagcaaggacttccaggagctgacagtgctcttagctctatcgcccatccatgcattcatctatttttgatgtagccctactgtgttcagtctctggggaacagggacaaggcactctactggggtctgacccaagggcaaagtgtccaaacaccctcatgctgtaccagtacatccccttttcctagaataaaggcaagcctttgaaaatggggccagtaaggaaggggccctctctgaagggtggggccatgaagacctggggtccttggattgactagggaaaaaatctcctctgtggctcttgggcccctcaaaaaaaaaggaatcttaaaggggggaaaaggaacccttgcccgggaaaacggaaagaaaaccctggaagagggtttttagacccccttatgtgggtcccaggagataaat

SEQ ID NO: 23032 - DNA, 2031 bp, Macaca Mulatta
  misc_feature (1)...(2031): n = A,T,C or G
agacttggccttgaaagagctgatacagctgaaaaagccctcaatgtcattgttgacttattagaaaaatatggccagggtggaaattgcacagagggtaggatggtatttagctatcacaacagtttcctaatagctgataggaatgaagcctggattctggagactgcagggaagtactgggcagcagaaaaagtacaannnnnnnnnnnnnnnnnnnnnnnnnnnnnnnnnnnnnnnnnnnnnnnnnnnnnnnnnnnnnnnnnnnnnnnnnnnnnnnnnnnnnnnnnnnnnnnnnnnnnnnnnnnnnnnnnnnnnnnnnnnnnnnnnnnnnnnnnnnnnnnnnnnnnnnnnnnnnnnnnnnnnnnnnnnnnnnnnnnnnnnnnnnnnnnnnnnnnnnnnnnnnnnnnnnnnnnnnnnnnnnnnnnnnnnnnnnnnnnnnnnnnnnnnnnnnnnnnnnnnnnnnnnnnnnnnnnnnnnnnnnnnnnnnnnnnnnnnnnnnnnnnnnnnnnnnnnnnnnnnnnnnnnnnnnnnnnnnnnnnnnnnnnnnnnnnnnnnnnnnnnnnnnnnnnnnnnnnnnnnnnnnnnnnnnnnnnnnnnnnnnnnnnnnnnnnnnnnnnnnnnnnnnnnnnnnnnnnnnnnnnnnnnnnnnnnnnnnnnnnnnnnnnnnnnnnnnnnnnnnnnnnnnnnnnnnnnnnnnnnnnnnnnnnnnnnnnnnnnnnnnnnnnnnnnnnnnnnnnnnnnnnnnnnnnnnnnnnnnnnnnnnnnnnnnnnnnnnnnnnnnnnnnnnnnnnnnnnnnnnnnnnnnnnnnnnnnnnnnnnnnnnnnnnnnnnnnnnnnnnnnnnnnnnnnnnnnnnnnnnnnnnnnnnnnnnnnnnnnnnnnnnnnnnnnnnnnnnnnnnnnnnnnnnnnnnnnnnnnnnnnnnnnnnnnnnnnnnnnnnnnnnnnnnnnnnnnnnnnnnnnnnnnnnnnnnnnnnnnnnnnnnnnnnnnnnnnnnnnnnnnnnnnnnnnnnnnnnnnnnnnnnnnnnnnnnnnnnnnnnnnnnnnnnnnnnnnnnnnnnnnnnnnnnnnnnnnnnnnnnnnnnnnnnnnnnnnnnnnnnnnnnnnnnnnnnnnnnnnnnnnnnnnnnnnnnnnnnnnnnnnnnnnnnnnnnnnnnnnnnnnnnnnnnnnnnnnnnnnnnnnnnnnnnnnnnnnnnnnnnnnnnnnnnnnnnaataactaagtattcaattatatataaagaatgaaacattagaatgatacatggatttatatttattataattatgtagtaccgtcaaatcattttgtctgttacatcaagaaagtagatttttctttagtcatgaaaaatacctcaagtggtaagttgtttgtgcttaaggcaaatattaaccagctctaacaagaaaaatgtctagatttacacattgtcaatacagtatattagttctgcaaatgtacttttggtaaactcaaacatgctcttcgtcaagacttggctaaccagtgagcttgtagctctgattgtctagcatttttagggtcattctccttaataggcttttacgttaataagatatatttttagaagagcttctttgggagattagagaataagataaaagaactaaaaccttagggtatactgtttctgggtctgaaatctctctcattgtttacttctgtttactcagtgaaaacagaaacaagaatgaggtagtggcaatgaaatagnnnnnnnnnnnnnnnnnnnnnnnnnnnnnnnnnnnnnnnnnnnnnnnnnnnnnnnnnnnnnnnnnnnnnnnnntttatacatgagtaatatcttcctaaagtttataaaactttatgtttaggttacataaagattaccaagactcaaaattgcaaatataaacaaaagaaaaatccaactgaaaataacacgaagtatttttgagtttctagaatgtccattttggtatttggttacattatcatatttactagacagtatcagcacaattaggttaataaagaagtgggtc

SEQ ID NO: 23033 - DNA, 731 bp, Macaca Mulatta
cacttatggacaatgctggctcctcgctcagttctggggctgctgttgctctggctccctgggatccagtggggacattgtgatgacccagactccactctccctgcccgtcacccctggagagccggcctccatctcctgcaggtctagtcagagccttgtacacagtgatggaaaaacctacttgaattggtatcagcagaagccaggccagcctccaaggctcctgatttatgaggtttctaaccgggactctggggtcccagacagattcagtggcagtgggtcagggacagatttcacactgaaaatcagcagagtggaggctgaggatgttggggtttattactgcgtgcaaggtacacagcttccgtgcactttcggccaagggaccaaggtggagatcaaacgggctgtggctccaccatctgtcttcatcttcccgccatctgaagatcaggtgaaatctggaactgtctctgttgtgtgcctgctgaataacttctatcccagagaggccagcgtaaagtggaaggtggatggtgtcctcaaaacgggtaactcccaggagagtgtcacagagcaggacagcaaggacaacacctacagcctgagcagcaccctgacgctgagcagcacagactaccagagtcacaatgtctatgcctgcgaagtcacccatcagggcctgagctcgcccgtcaccaagagcttcaacagaggagagtgtt

SEQ ID NO: 23034 - DNA, 563 bp, Macaca Mulatta
  misc_feature (1)...(563): n = A,T,C or G
attccctggaagatgggaatcacactgctgtgatggagtgcatcttactgggcttaacagatagtccaatccttggagtcatcctcttcatgattatcctatntatctggcaatctcagcacaatcattcttatcagaatctcttctcagcttcatcatcttatgtacatttttctgagtcacttggcttttgttgacatgggctattcatcttctgtcacacccaacatgcttatgaacttcctcatggagagaaatacaatctcttaccttggatgtgccatccagcttagttcagtgtttttctttggcacagtcgaatgcttccttctggctgccatggcctatgatcgctttgtggcaatttgcagcccactgctttattcaaccaaaatgtccacacaagtctgtgttcagctactcctagtggcttatataggtggttttcttaactcttcctcctctaccttttccttcctgtctttattcttctgtggaccaaatcaagtcaatcatttttttctgtgattttactcctttacttgaactctcctgttctgata

SEQ ID NO: 23035 - DNA, 642 bp, Macaca Mulatta
  misc_feature (1)...(642): n = A,T,C or G
agctactcggagannnnnnnnnnnnnnnnnnnnnnnggtggaggttgcagtgaactgggatcgcaccactannnnnnnnnnnnnnnnnnnnnnnnnnnnnnnnnnnnnnnnnnctaaacnnnnnnnnnnnnnnnnnnnnnnnnnnnngatactattgggggcccaaaatggtggccagctggtaccggccttttcttaagctctgtgaggaatggccagtggacgagaccaaacggggccgggacttgggcgcttacctgtgacagcgggtagcacaggcctttcgggagggagagaatacccaggttgcagagcctgaggcctgtgatcagatgtaccagagcttagcgcgactccatacaaactactacaaacacaagtaccgtcgccccagagacaccagcttcagtggcctgtcgttggaagagtacaaggtgatcctgtccacagacaccttggaagagcttaaggaaatggataaaagcatgtggaagaaactgcaggagaagttttcctccaagggtccggaggaggatcataaggcctgaactcaggccttacctcgcccacatacctaggtgtggagtcttgtacattgccattgtcaataaaactgccccagtttcccacaggaaaaaaaaa

SEQ ID NO: 23036 - DNA, 91 bp, Macaca Mulatta
  misc_feature (1)...(91): n = A,T,C or G
tttttgagtcaagcctcacagatgtacgactcctctttgattgccagtgtgggctacattctgtccacaaccattgctatcacagcaggtn

SEQ ID NO: 23037 - DNA, 1340 bp, Macaca Mulatta
  misc_feature (1)...(1340): n = A,T,C or G
ggctctgctgggccccaaggtcctcctggtcccagtggtgaagaaggaaagagaggccctaatggggaagttggatctgctggccctccaggacctcctgggctgagannnnnnnnnnnnnnnnnnnnnnnnnnnnnnnnnnnnnnnnnnnnnnnnnnnnnnnnnnnnnnnnnnnnnnnnnnnnnnnnnnnnnnnnnnnnnnnnnnnnnnnnnnnnnnnnnnnnnnnnnnnnnnnnnnnnnnnnnnnnnnnnnnnnnnnnnnnnnnnnnnnnnnnnnnnnnnnnnnnnnnnnnnnnnnnnnnnnnnnnnnnnnngccttcctggcatcgacggcaggcctggcccaattggcccagctggagcaagaggagagcctggcaacattggattccctggnnnnnnnnnnnnnnnnnnnnnnnnnnnnnnnnnnnnnnnnnnnnnnnnnnnnnnnnnnnnnnnnnnnnnnnnnnnnnnnnnnnnnnnnnnnnnnnnnnnnnnnnnnnnnnnnnnnnnnnnnnnnnnnnnnnnnnnnnnnnnnnnnnnnnnnnnnnnnnnnnnnnnnnnnnnnnnnnnnnnnnnnnnnnnnnnnnnnnnnnnnnnnnnnnnnnnnnnnnnnnnnnnnnnnnnnnnnnnnnnnnnnnnnnnnnnnnnnnnnnnnnnnnnnnnnnnnnnnnnnnnnnnnnnnnnnnnnnnnnnnnnnnnnnnnnnnnnnnnnnnnnnnnnnnnnnnnnnnnnnnnnnnnnnnnnnnnnnnnnnnnnnnnnnnnnnnnnnnnnnnnnnnnnnnnnnnnnnnnnnnnnnnnnnnnnnnnnnnnnnnnnnnnnnnnnnnnnnnnnnnnnnnnnnnnnnnnnnnnnnnnnnnnnnnnnnnnnnnnnnnnnnnnnnnnnnnnnnnnnnnnnnnnnnnnnnnngtgctcctggtgctgtaggtgcccctggtcctgctggagccacaggtgaccgggnnnnnnnnnnnnnnnnnnnnnnnnnnnnnnnnnnnnnnnnnnnnnnnnnnnnnnnnnnnnnnnnnnnnnnnnnnnnnnnnnnnnnnnnnnnnnnnnnnnnnnnnnnnggtgctgctggtcaacctggtgctaaaggagaaagaggagccaaagggcctaagggtgaaaacggtgtcgttggtcccacaggccccgttggagctgctggcccnnnggtatttctggccctcctggtccccctggtccttctgggaaagaagggcttcgtggtcctcgtggtgaccaaggtccagttggccgaactggagaagtaggtgctgttggtccccctggctttgctggtgagaagggtccctctggagaggccggtactgct

SEQ ID NO: 23038 - DNA, 2695 bp, Macaca Mulatta
  misc_feature (1)...(2695): n = A,T,C or G
gatgtggacgagtgtgccgagggcaacggcggctgtcagcagagctgcgtcaacatgatgggcagttatgagtgccactgccgggaaggcttcttcctcagcgacaaccagcatacctgcatccagcggccagaannnnnnnnnnnnnnnnnnnnnnnnnnnnnnnnnnnnnnnnnnnnnnnnnnnnnnnnnnnnnnnnnnnnnnnnnnnnnnnnnnnnnnnnnnnnnnnnnnnnnnnnnnnnnnnnnnnnnnnnnnnnnnnnnnnnnnnnnnnnnnnnnnnnnnnnnnnnnnnnnnnnnnnnnnnnnnnnnnnnnnnnnnnnnnnnnnnnnnnnnnnnnnnnnnnnnnnnnnnnnnnnnnnnnnnnnnnnnnnnnnnnnnnnnnnnnnnnnnnnnnnnnnnnnnnnnnnnnnnnnnnnnnnnnnnnnnnnnnnnnnnnnnnnnnnnnnnnnnnnnnnnnnnnnnnnnnnnnnnnnnnnnnnnnnnnnnnnnnnnnnnnnnnnnnnnnnnnnnnnnnnnnnnnnnnnnnnnnnnnnnnnnnnnnnnnnnnnnnnnnnnnnnnnnnnnnnnnnnnnnnnnnnnnnnnnnnnnnnnnnnnnnnnnnnnnnnnnnnnnnnnnnnnnnnnnnnnnnnnnnnnnnnnnnnnnnnnnnnnnnnnnnnnnnnnnnnnnnnnnnnnnnnnnnnnnnnnnnnnnnnnnnnnnnnnnnnnnnnnnnnnnnnnnnnnnnnnnnnnnnnnnnnnnnnnnnnnnnnnnnnnnnnnnnnnnnnnnnnnnnnnnnnnnnnnnnnnnnnnnnnnnnnnnnnnnnnnnnnnnnnnnnnnnnnnnnnnnnnnnnnnnnnnnnnnnnnnnnnnnnnnnnnnnnnnnnnnnnnnnnnnnnnnnnnnnnnnnnnnnnnnnnnnnnnnnnnnnnnnnnnnnnnnnnnnnnnnnnnnnnnnnnnnnnnnnnnnnnnnnnnnnnnnnnnnnnnnnnnnnnnnnnnnnnnnnnnnnnnnnnnnnnnnnnnnnnnnnnnnnnnnnnnnnnnnnnnnnnnnnnnnnnnnnnnnnnnnnnnnnnnnnnnnnnnnnnnnnnnnnnnnnnnnnnnnnnnnnnnnnnnnnnnnnnnnnnnnnnnnnnnnnnnnnnnnnnnnnnnnnnnnnnnnnnnnnnnnnnnnnnnnnnnnnnnnnnnnnnnnnnnnnnnnnnnnnnnnnnnnnnnnnnnnnnnnnnnnnnnnnnnnnnnnnnnnnnnnnnnnnnnnnnnnnnnnnnnnnnnnnnnnnnnnnnnnnnnnnnnnnnnnnnnnnnnnnnnnnnnnnnnnnnnnnnnnnnnnnnnnnnnnnnnnnnnnnnnnnnnnnnnnnnnnnnnnnnnnnnnnnnnnnnnnnnnnnnnnnnnnnnnnnnnnnnnnnnnnnnnnnnnnnnnnnnagccagctgtgcgttgccctgcctccgacagcgaatggaacggcggctgaactgatccctgaagatgctcagaaagtccatcaaccaggaccgcttcctgctgcgcctggcaggccttgattatgagctggcccacaagccgggcctggtagccggggagcgagcagagccgatggagtcctgtaggcctgggcagcaccgtgctggggccaagtgtgngtcagctgcccgcagggaacgtattaccacggccagacggagcnnnnnnnnnnnnnnnnnnnnnnnnnnnnnnnnnnnnnnnnnnnnnnnnnnnnnnnnnnnnnnnnnnnnnnnnnnnnnnnnnnnnnnnnnnnnnnnnnnnnnnnnnnnnnnnnnnnnnnnnnnnnnnnnnnnnnnnnnnnnnnnnnnnnnnnnnnnnnnnnnnnnnnnnnnnnnnnnnnnnnnnnnnnnnnnnnnnnnnnnnnnnnnnnnnnnnnnnnnnnnnnnnnnnnnnnnnnnnnnnnnnnnnnnnnnnnnnnnnnnnnnnnnnnnnnnnnnnnnnnnnnnnnnnnnnnnnnnnnnnnnnnnnnnnnnnnnnnnnnnnnnnnnnnnnnnnnnnnnnnnnnnnnnnnnnnnnnnnnnnnnnnnnnnnnnnnnnnnnnnnnnnnnnnnnnnnnnnnnnnnnnnnnnnnnnnnnnnnnnnnnnnnnnnnnnnnnnnnnnnnnnnnnnnnnnnnnnnnnnnnnnnnnnnnnnnnnnnnnnnnnnnnnnnnnnnnnnnnnnnnnnnnnnnnnnnnnnnnnnnnnnnnnnnnnnnnnnnnnnnnnnnnnnnnnnnnnnnnnnnnnnnnnnnnnnnnnnnnnnnnnnnnnnnnnnnnnnnnnnnnnnnnnnnnnnnnnnnnnnnnnnnnnnnnnnnnnnnnnnnnnnnnnnncatccccatcctccattaccacttatgagacctgccagacctacgagcgccccattgccttcactgcccgttccaggaagctctggatcaacttcaagagaagcgaggccaacagcgcccgtggcttccagatcccataggttacctatgatnnnnnnnnnnnnnnnnnnnnnnnnnnnnnnnnnnnnnnnnnnnnnnnnnnnnnnnnnnnnnnnnnnnnnnnnnnnnnnggacaagaagctcatcaaggccttctttgaggtgctagcccacccccagaactactttcagtacacagagaaacacaaggagatgctgccaaaatccttcatcaagctgctccgctccaaagtttccagcttcctgaggccctacaaatag

SEQ ID NO: 23039 - DNA, 605 bp, Macaca Mulatta
  misc_feature (1)...(605): n = A,T,C or G
aggaaagtattctagacttcaggaattcataagggattacatctctcgggagctgggatcaagtaaaccaatgttaataactccttgaattttccagttgactcttcctgtaccatagtaacaagttctaacgagttatgtaagtttcttcaaggccaagttttatcattgttgctaatatccttagagctgaactatgtcagtcaatatccactaattccacttcaaaaatgagttttgcatttggtggaattttggcatcaggctgtcctttctttccataagcccattctggttcaatctccagtcgagccttttctcctttactcatagtcaagagggcttcatcccactgaaggcaagaactaaatgaaaactaatggtattctgcaaaaagcacatgtaataccaggacagtaaagacaagattgtatgttaaacacagaatctattactagatttcactatattctaaggtaatgtacttcagttgagtccctaaatctttgtcttccatttcttcaatagaaaaaaataagggtattttaaagcaggggttttttaatgtgaaaagaaccttttggnnnnnnnnnnnnnnnnnnnnn

SEQ ID NO: 23040 - DNA, 81 bp, Macaca Mulatta
aggttacagtcttcttcataccttgatgatttgagtccaacaaatttaatgaaagatactaacactgtgaactgcaggagt

SEQ ID NO: 23041 - DNA, 119 bp, Macaca Mulatta
atctgagtattgatgccatggatgtggctggggaacagcagctggatgtggaacacaacctgttcaagcaacgactagacaaagatggcatccccgtgagctcagaggctgagcggcat

SEQ ID NO: 23042 - DNA, 393 bp, Macaca Mulatta
atgtggggagctttccttctttacatttccatgaagatgggagtcactacaggacaaaacattgaccagcccactgagatgacagctatggaaggagtcattgtccagatcaactgcacgtaccagacgtctgggttcaatgggctgtcctggtaccagcaacatgatggcgaagcacccacacttctctcttacaatgctctggatggtttggaggagaaaggtcgtttttcttcattccttagtaactcgaaaaggtacagttacctccttttgaaggagctccagatgaaagactctgccccttacttctgtgctgtaggggacgccaacaagctgatcttcggcacaggaaccattctgagagtcaagccttatatccagaaccctgac

SEQ ID NO: 23043 - DNA, 764 bp, Macaca Mulatta
ggggtgccggttgtacaatctctgatcaatgtcttttcagcactttgagcatttacttggctcatttagtcttccttttgtagcgcatggttgggaggaaaaagtgcatgcatctttccttcactcttctctttttcccgccccacctcccttcgcacataggcatttggtttgcttccatctttttttatgcagtgcctgttttttttaaccaattaatatcccttttgttgatgagctattgagagctgcagtagtttgcttttagtattgttgttgcacttgagacaaacctttattcatagtgtctacaggacatatgaagagtgcaatggcaaaacaagagcaaaaagcacttcctcccatgaccttacagtaaccatactgattgactccccagggacattccatcattgcaatagctcacatttttattcctgtctttttctttgcacaccagctctactctttagtaaaattgtaaaaggctgccattatggacattaggtatcccaacataaccatctggagtgtgtccagtttgttcttcataggaccaatttttatttgcagcttgagtttttatatgaagttgcattattgtggacttggctgtcttgtgatgaatttttttcaaatgtattctgtgccctacaattgttaaaaagaaaccgttgctattgtgaagatggattttaactgacccatttaaggggttcttttccaaatgggactacctttagggaaaattctaagtattttcc

SEQ ID NO: 23044 - DNA, 390 bp, Macaca Mulatta
atcgtggatgggatcctggcctacatttgccttttcttgggtaaacagactgaaagggtaaaggctcagctctggcctgtctctgggaaacaggtgccctaataagccggggcgtccgcagagccagcacaggagtggctcctcaggccaagcaggcgtccagtagccgctgagtgcacttagcaggctttgttggcgccaactgttttttttttcagacaataggtacagactctgcccccacatgtgtactatccaaccctttggaatcatcgcgaaacaaagtgttttgagattctaaggaaaaaagattttcccggggctccaggtaagtggtcctgtttccatggtaatttggaaatgtacgtctcccaaccggccaatcaagaa

SEQ ID NO: 23045 - DNA, 167 bp, Macaca Mulatta
agtcacaaggcatggactcatatagtacgcttgaccctcagttcagcaaaatagagaactgcagtttcactccaacatctttttcagtggagttagcttctaacagacatatttcaaaactaaatttcacacccagaatagcacctactcctcagaaacttgcatat

SEQ ID NO: 23046 - DNA, 703 bp, Macaca Mulatta
  misc_feature (1)...(703): n = A,T,C or G
tttgctggctatgccttcaagaacctggggatcccgaaaaattaggggaatttcttcagaaagacaatatcagcgtgcattatttctgtcttnnnnnnnnnnnnnnnnnnnnnnnnnnnnnnnnnnnnnnnnnnnnnnnnnnnnnnnnnnnnnnnnnnnnnnnnnnnnnnnnnnnnnnnnnnnnnnnnnnnnnnnnnnnnnnnnnnnnnnnnnnnnnnnnnnnnnnnnnnnnnnnnnnnnnnnnnnnnnnnnnnnnnnnnnnnnnnnnnnnnnnnnnnnnnnnnnnnnnnnnnnnnnnnnnnnnnnnnnnnnnnnnnnntcattttgtgacaaacatcgcccagcacagaacatccaacatgggaatatgggggaggaaagttgcatcttgtgttgtgaagacctatcccaacagagtgttgagaacatccagagcccatgttgtagtcaagccatctaccaccgcaagtgcatacagnnnnnnnnnnnnnnnnnnnnnnnnnnnnnnnnnnnnnnnnnnnnnnnnnnnnnnnnnnnnnnnnnnnnnnnnnnnnnnnnnnnnnnnnnnnnnnnnnnnnacagncagagatgctgcctgggaactcgagccaggggctttctcagacttatatcagcgctatcagcactgtgatgcccccatctgtctgtatgaacaaggcagagacagctttgaggatgaagg

SEQ ID NO: 23047 - DNA, 134 bp, Macaca Mulatta
gcgctaccttgatgaagcagacagagataaggagcgctacatgaaggaactggaacagtatcagaaaactgaggcctacaaggtcttcagtaggaaaacccaggaccgtcagaaaggcaaatctcataggcaag

SEQ ID NO: 23048 - DNA, 366 bp, Macaca Mulatta
gaagcggtttctacctctctatgtgcctgagtgatgatacaatcgctgtttagttactagataaagaaatccacagagtgggtaaagagtagaatctgaactatatcttgacaaatattatcaaacttgaatgtaaatatatacagtatgtatatttttaaaaacgatttgcttgcagtgaccttgtaagtgacatttaatgtcatagcatgtaaagggttttttttttgtaataaaaattgtagaatctgctgctgtctgcttttcttacattctttaatcatgattctctttctttaaagttgattcagtttcctgtatttgaattttcttgattctgctatgagaatttgtttatgttgataa

SEQ ID NO: 23049 - DNA, 852 bp, Macaca Mulatta
  misc_feature (1)...(852): n = A,T,C or G
gctttgcttgtgccatctgcccccatcgaccggtactggacaccctggccatgctgactgcccaccgtgcaggcaagaaacatctgtccannnnnnnnnnnnnnnnnnnnnnnnnnnnnnnnnnnnnnnnnnnnnnnnnnnnnnnnnnnnnnnnnnnnnnnnnnnnnnnnnnnnnnnnnnnnnnnnnnnnnnnnnnnnnnnnnnnnnnnnnnnnnnnnnnnnnnnnnnnnnnnnnnnnnnnnnnnnnnnnnnnnnnnnnnnnnnnnnnnnnnnnagaccagaagcccctggtccctctgtctccctttctcctgtgccaccctcagaggtcgaactccaaagcgggaagatcagtagggaacctgaacctggggctggcccacaggccgaggagtcagcaactgtctcagcccctgcacccatgagccccacaagaagacgagccctggaccattatctcacccttcgaannnnnnnnnnnnnnnnnnnnnnnnnnnnnnnnnnnnnnnnnnnnnnnnnnnnnnnnnnnnnnnnnnnnnnnnnnnnnnnnnnnnnnnnnnnnnnnnnnnnnnnnnnnnnnnnnnnnnnnnnnnnnnnnnnnnnnnnnnnnnnnnnnnnnnnnnnnnnnnnnnnnnnnnnnnnnnnnnnnnnnnnnnnnnnnnnnnnnnnnnnnnnnnnnnnnnnnnnnnnnnnnnnnnnnnnnnnnnnnnnnnnnnnnnnnnnnnnnnnnnnnnnnnnnnnnnnnnnnnnnnnagtcttgctctgtcacccaggctggggtgcagtggccagatctcagctcactgcaagctccgcctcccgggtttacgccattctcctgcctcagcctcc

SEQ ID NO: 23050 - DNA, 1364 bp, Macaca Mulatta
  misc_feature (1)...(1364): n = A,T,C or G
tttcagagatcagtttcattccaggacctgactgtgaacttcacccaggaggaatggcagcaactggaccctgctcagaggctcctgtacagggatgtgatgctggagaactacagcaacttggtctccgtgggngggtatcatgttagcaaaccggatgtgattttcaaattggaacaaggagaagaaccatggatagtggaggaattctcaaatcagaactacccagnacattcagagatctgtcataatctttttaatgtcttccatttttctctacatcacttaacagaagtaacacggnnnnnnnnnnnnnnnnnnnnnnnnnnnnnnnnnnnnnnnnnnnnnnnnnnnnnnnnnnnnnnnnnnnnnnnnnnnnnnnnnnnnnnnnnnnnnnnnnnnnnnnnnnnnnnnnnnnnnnnnnnnnnnnnnnnnnnnnnnnnnnnnnnnnnnnnnnnnnnnnnnnnnnnnnnnnnnnnnnnnnnnnnnnnnnnnnnnnnnnnnnnnnnnnnnnnnnnnnnnnnnnnnnnnnnnnnnnnnnnnnnnnnnnnnnnnnnnnnnnnnnnnnnnnnnnnnnnnnnnnnnnnnnnnnnnnnnnnnnnnnnnnnnnnnnnnnnnnnnnnnnnnnnnnnnnnnnnnnnnnnnnnnnnnnnnnnnnnnnnnnnnnnnnnnnnnnnnnnnnnnnnnnnnnnnnnnnnnnnnnatgaatgcaatgaatgtgggagaacctactgcaggaagtcagccctcactcaccatcagagaacacacacaggagagagaccctatgagtgtaatgaatgtgggaaaaccttctnnnnnnnnnnnnnnnnnnnnnnnnnnnnnnnnnnnnnnnnnnnnnnnnnnnnnnnnnnnnnnnnnnnnnnnnnnnnnnnnnnnnnnnnnnnnnnnnnnnnnnnnnnnnnnnnnnnnnnnnnnnnnnnnnnnnnnnnntatgaatgtaatgaatgtgggaaatccttctgccataagngaagtcagccctcactcaccatcagagaacacacacaggagagagaccctatgagtgtaatgaatgtgggaaaaccttctgtcagaagttctcctttgttgaacatcagcgaactcacactggggagaaaccatatgaatgtaatgaatgtgggaaatccttctgccataagtcagccttcagagtccatagaagaattcacacaggagagaaaccatatgaatgtaatcaatgtgggaaaacctaccgccgcctgtggactctcactgaacatcagaaaatacacacaggagagaaaccttatgaatgtaacaaatgtgagaaaacatttcgccacaaatcaaacttccttttacatcagaaatcccac

SEQ ID NO: 23051 - DNA, 317 bp, Macaca Mulatta
acggcttacacctagaatggatgggaaagttcagggccacgaagccgctgcccgtggggagcctccctgaaaggccggccggcttcgggggcaccggaagaggccggcgcggggtctccgggtcctgccccctctccgggctgactccccactctccgcagcgtcactcccatgtcctccagccaagtgcgcaccagcgacgcctacctgctcttctacgaactggccagcccgccctcccgaatgtagcgccaggagccacgtcccttctcccttccccgtggtggccccgctccctaagtttcttaaaaagacaa

SEQ ID NO: 23052 - DNA, 2019 bp, Macaca Mulatta
  misc_feature (1)...(2019): n = A,T,C or G
cagcacgatgtgggtttgaggagggaggggctggcccaaggaaggagcataaacgctcagacagcgaganctggcgctccttncgggaggnnnnnnnnnnnnnnnnnnnnnnnnnnnnnnnnnnnnnnnnnnnnnnnnnnnnnnnnnnnnnnnnnnnnnnnnnnnnnnnnnnnnnnnnnnnnnnnnnnnnnnnnnnnnnnnnnnnnnnnnnnnnnnnnnnnnnnnnnnnnnnnnnnnnnnnnnnnnnnnnnnnnnnnnnnnnnnnnnnnnnnnnnnnnnnnnnnnnnnnnnnnnnnnnnnnnnnnnnnnnnnnnnnnnnnnnnnnnnnnnnnnnnnnnnnnnnnnnnnnnnnnnnnnnnnnnnnnnnnnnnnnnnnnnnnnnnnnnnnnnnnnnnnnnnnnnnnnnnnnnnnnnnnnnnnnnnnnnnnnnnnnnnnnnnnnnnnnnnnnnnnnnnnnnnnnnnnnnnnnnnnnnnnnnnnnnnnnnnnnnnnnnnnnnnnnnnnnnnnnnnnnnnnnnnnnnnnnnnnnnnnnnnnnnnnnnnnnnnnnnnnnnnnnnnnnnnnnnnnnnnnnnnnnnnnnnnnnnnnnnnnnnnnnnnnnnnnnnnnnnnnnnnnnnnnnnnnnnnnnnnnnnnnnnnnnnnnnnnnnnnnnnnnnnnnnnnnnnnnnnnnnnnnnnnnnnnnnnnnnnnnnnnnnnnnnnnnnnnnnnnnnnnnnnnnnnnnnnnnnnnnnnnnnnnnnnnnnnnnnnnnnnnnnnnnnnnnnnnnnnnnnnnnnnnnnnnnnnnnnnnnnnnnnnnnnnnnnnnnnnnnnnnnnnnnnnnnnnnnnnnnnnnggccccttcacgacacaggagatggcagagtggttccaggctggctacttctccatgtcactgctggtgaagcggggctgtgatgagggcttccagcctctaggcgaggtgatcaagatgtggggccgtgtgcccttcgccccagggccctcaccacccccactgctggngggaaacatggaccaggagcggctgaagaagcagcaggagctggccgcggctgccttgtaccagcagctgcagcaccagcagtttcttcagctggtcagcagnnnnnnnncccacaatgcgcgcttcgagaaaaggcagctctgtggggacctgacgccgccnnnnnnnnnnnnnnnnnnnnnnnnnnnnnnnnnnntcacggcattcctgcagcagctccaggcgctcaaaccccccagncagttccaggagcgcagagaagtggagctcagggcgaagcgggaggaagaggaacgcaagcgccgggaggagaagcgccgccagcagcagcaggaggagcagaagcggcggcaagaagaggaagagctgtttcggcgcaagcaggtggnnnnnnnnnnnnnnnnnnnnnnnnnnnnnnnnnnnnnnnnnnnnnnnnnnnnnnnnnnnnnnnnnnnnnnnnnnnnnnnnnnnnnnnnnnnnnnnnnnnnnnnnnnnnnncagcttgggggcctggtgactgcccccctgaaccagtgggtgtctgaggctgggccgctgtggggcgggccagacacagagtgggggcggaagcagcagcctggggctctgggaggacacccccaagagcggcgggagcctggtccgcggcctcggcctgaagaacagccggagcagcccatctctcagnnnnnnnnnnnnnnnnnnnnnnnnnnnnnnnnnnnnnnnnnnnnnnnnnnnnnnnnnnnnnnnnnnnnnnnnnnnnnnnnnnnnnnnnnnnnnnnnnnnnnnnnnnnnnnnnnnnnnnnnnnnnnnnnnnnnnnnnnnnnnnnnnnnnnnnnnnnnnnnnngtgcccatggctgtagcgatcctcaaggaggtggaatccccctatgatgtccacgattatatccgttcctgcttgggggacacgctggaagccaaagaatttgccaaacaattcctggagcggagggccaagcagaaagccagccaacaacggcagcagcagcag

SEQ ID NO: 23053 - DNA, 648 bp, Macaca Mulatta
gccatgaactgtggccccagcatatagtgtttcagtgggggagaagctgaaagaccaagactcttcccaagttagcttgtctcctctgtcaccctaagagccactgagttctatagggatgaagactattgaaggctccattgccaaaccatggcctttcctcagtgttgtaaggcctatgccaaggataaaggaagggtatgcctttgggtactccaggcacacacctttctgaaatccttctccagccagctgctgcagacaaaagatcacatttctgggaagatgaggacttatttccagaccagcacccagtggccatcaggtcttgtggcccaaaggctgtgcttgcgtccagctgagtgcctgggacgggccctttctgtttccccaaggctggggtgctgagcctgccttcctcaccacctagtcatagtctcaaacgtggggaaggaggttttctccctgcccgggaagaggacagataactgatttccgttcttttgactctgttttaaaattctctttctaaacacggagtgtcgggcctggtttgtttctgacaaagttacaatcctgggcctgtgatgaatgtcggcagcgctgaggttgcagggaaaagataaagcctcaaagcgtggacatgtg

SEQ ID NO: 23054 - DNA, 150 bp, Macaca Mulatta
  misc_feature (1)...(150): n = A,T,C or G
tattgtttcgcanacttcagtcactcatattttgtccgtgtaatctttgccatagctgaggtccctcctgctctagcattgtcttgagagcttatagaggtgctacaaacagtgcctattcctggtacctacagcagctgtgtgcacaag

SEQ ID NO: 23055 - DNA, 794 bp, Macaca Mulatta
  misc_feature (1)...(794): n = A,T,C or G
ggcacctgtaataaattcgacctcaaggtcaccataaaaccagcaccggaaacagaaaagaggcctcaggatgccaagaacactatgatccttgagatctgtaccaggtaccggggagaccaggatgccactatgtctatactggacatatccatgatgactggcttcgttccagacacagatgacctcaagcagctggcaaacggcgttgacagatgcatctccaagtatgagctggacaaagccttctccgataggaacaccctcatcatctacctggacaaggtctcacactctgaggatgactgtatagctttcaaagttcaccaatattttaatgtagagcttatccagcctggtgcagtcaaggtctacgcctattacaacctggcggaaagctgtacccggttctaccacccagaaaaggaggatggaaagctgaacaagctctgtcgtgatgagctgtgccgctgtgctgaggagaattgcttcatacaaaagttggatgacaaagtcaccctggaagaacggctggacaaagcctgtgagccaagagtggactatgtgtacaagacccgactgttcaaggcccaagctgtccaatgactttgacgagtacatcatggccatttgagcagatcatccagtcaggctccgaatgaagttgcaggttggaacaacaacccaacgtttcattaaccccccaatccaaatggcaggggaaaaccccctgaaaacccttnnnnnnnnnnnnnnnnnnnnncccttacccctccaatggttggggggggtca

SEQ ID NO: 23056 - DNA, 220 bp, Macaca Mulatta
atgccgagggcggagacaagagtgacactgggggagcaggaaaaggcggggcttccgcttggagcatggaggccgtgcctcacgtcacttccgtaaacaaaggcagctgccgaggcgcgggtcccgggatgtgaccggggctgtgtttgtggctgcggcggtggcttctgaggctgtcgggtctttgcgggttgcggaagggggccccaatacccttctt

SEQ ID NO: 23057 - DNA, 291 bp, Macaca Mulatta
  misc_feature (1)...(291): n = A,T,C or G
tgaagaagccttggatgaagaaacaaagaggagagatcagatgattaaaggtgctatcgaagttttaattcgtgaatactccagtgagctaaatgccccctcacaggaatctgattctcaccccaggaagaagaagaaggaaaagaaggaggacnnnnnnnnnnnnnnnnnnnnnnnnnnnnnnnnnnnnnnnnnnnnnnnnnnnnaggaggatataaatgctatagaaatggaagaagacaaaagagacctgatatctcgagagatcagcaaattcagagacacacataa

SEQ ID NO: 23058 - DNA, 1554 bp, Macaca Mulatta
  misc_feature (1)...(1554): n = A,T,C or G
gtacgacaggacagaaaccgcgatcaacaacctcaaccccgccttctccaagaagttcgtgcttgactatcactttgaggaggtttaaagctcaagttcgcgctctttgaccaggacaagtccagtatgcggctggatgagcatgacttcctgggccagttctcctgcagcctgggcacgnnnnnnnnnnnnnnnnnnnnnnnnnnnnnnnnnnnnnnnnnnnnnnnnnnnnnnnnnnnnnnnnnnnnnnnnnnnnnnnnnnnnnnnnnnnnnnnnnnnnnnnnnnnnnnnnnnnnnnnnnnnnnnnnnnnnnnnnnnnnnnnnnnnnnnnnnnnnnnnnnnnnnnnnnnnnnnnnnnnnnnnnnnnnnnnnnnnnnnnnnnnnnnnnnnnnnnnnnnnnnnnnnnnnnnnnnnnnnnnnnnnnnnnnnnnnnnnnnnnnnnnnnnnnnnnnnnnnnnnnnnnnnnnnnnnnnnnnnnnnnnnnnnnnnnnnnnnnnnnnnnnnnnnnnnnnnnnnnnnnnnnnnnnnnnnnnnnnnnnnnnnnnnnnnnnnnnnnnnnnnnnnnnnnnnnnnnnnnnnnnnnnnnnnnnnnnnnnnnnnnnnnnnnnnnnnnnnnnnnnnnnnnnnnnnnnnnnnnnnnnnnnnnnnnnnnnnnnnnnnnnnnnnnnnnnnnnnnnnnnnnnnnnnnnnnnnnnnnnnnnnnnnnnnnnnnnnnnnnnnnnnnnnnnnnnnnnnnnnnnnnnnnnnttggaatagactttacagcctccaacgggaatcccctggacccttcctctttgcactatatcaaccctatgggcaccaacgaatatctgtcggccatctgggctgttgggcagatcattcaggactatgacagnnnnnnnnnnnnnnnnnnnnnnnnnnnnnnnnnnnnnnnnnnnnnnnnnnnnnnnnnnnnnnnnnnnnnnnnnnnnnnnnnnnnnnnnnnnnnnnnnnnnnnnnnnnnnnnnnnnnnnnnnnnnnnnnnnnnnnnnnnnnnnnnnnnnnnnnnnnnnnnnnnnnnnnnnnnnnnnnnnnnnnnnnnnnnnnnnnnnnnnnnnnnnnnnnnnnnnnnnnnnnnnnnnnnnnnnnnnnnnnnnnnnnnnnnnnnnnnnnnnnnnnnnnnnnnnnnnnnnnnnnnnnnnnnnnnnnnnnnnnnnnnnnnnnnnnnnnnnnnnnnnnnnnnnnnnnnnnnnnnnnnnnnnnnnnnnnnnnnnnnnnnnnnnnnnnnnnnnnnnnnnnnnnnnnnnnnnnnnnnnnnnnnnnnnnnnnnnnnnnnnnnnnnnnnnnnnnnnnnnnnnnnnnnnnnnnnnnnnnnnnnnnnnnnnnnnnnnnnnngcagcaaaagagaccttggccaaagctgtgctggcggagctgccccaacaagttgtgcagtatttcaagcataaaaacctgccccccaccaactcggagcccgcctgagctccagtgcccagcagcagcatgtcggctgagcctcccgccctcccccaggaacatgcacgctcaccctgcttccttgtgggtggc

SEQ ID NO: 23059 - DNA, 1546 bp, Macaca Mulatta
  misc_feature (1)...(1546): n = A,T,C or G
cctcttactcccagttactggcagctacatgccttaccaagcttgtatcacgcacaaacaaccccttaccattggaacagcgaatagatattcgnnnnnnnnnnnnnnnnnnnnnnnnnnnnnnnnnnnnnnnnnnnnnnnnnnnnnnnnnnnnnnnnnnnnnnnnnnnnnnnnnnnnnnnnnnnnnnnnnnnnnnnnnnnnnnnnnnnnnnnnnnnnnnnnnnnnnnnnnnnnnnnnnnnnnnnnnnnnnnnnnnnnnnnnnnnnnnnnnnnnnnnnnnnnnnnnnnnnnnnnnnnnnnnnnnnnnnnnnnnnnnnnnnnnnnnnnnnnnnnnnnnnnnnnnnnnnnnnnnnnnnnnnnnnnnnnnnnnnnnnnnnnnnnnnnnnnnnnnnnnnnnnnnnnnnnnnnnnnnnnnnnnnnnnnnnnnnnnnnnnnnnnnnnnnnnnnnnnnnnnnnnnnnnnnnnnnnnnnnnnnnnnnnnnnnnnnnnnnnnnnnnnnnnnnnnnnnnnnnnnnnnnnnnnnnnnnnnnnnnnnnnnnnnnnnnnnnnnnnnnnnnnnnnnnnnnnnnnnnnnnnnnnnnnnnnnnnnnnnnnnnnnnnnnnnnnnnnnnnnnnnnnnnnnnnnnnnnnnnnnnnnnnnnnnnnnnnnnnnnnnnnnnnnnnnnnnnnnnnnnnnnnnnnnnnnnnnnnnnnnnnnnnnnnnnnnnnnnnnnnnnnnnnnnnnnnnnnnnnnnnnnnnnnnnnnnnnnnnnnnnnnnnnnnnnnnnnnnnnnnnnnnnnnnnnnnnnnnnnnnnnnnnnnnnnnnnnnnnnnnnnnnnnnnnnnnnnnnnnnnnnnnnnnnnnnnnnnnnnnnnnnnnnnnnnnnnnnnnnnnnnnnnnnnnnnnnnnnnnnnnnnnnnnnnnnnnnnnnnnnnnnnnnnnnnnnnnnnnnnnnnnnnnnnnnnnnnnnnnnnnnnnnnnnnnnnnnnnnnnnnnnnnnnnnnnnnnnnnnnnnnnnnnnnnnnnnnnnnnnnnnnnnnnnnnnnnnnnnnnnnnnnnnnnnnnnnnnnnnnnnnnnnnnnnnnnnnnnnnnnnnnnnnnnnnnnnnnnnnnnnnnnnnnnnnnnnnnnnnnnnnnnnnnnnnnnnnnnnnnnnnnnnnnnnnnnnnnnnnnnnnnnnnnnnnnnnnnnnnnnnnnnnnnnnnnnnnnnnnnnnnnnnnnnnnnnnnnnnnnnnnnnnnnnnnnnnnnnnnnnnnnnnnnnnnnnnnnnnnnnnnnnnnnnnnnnnnnnnnnnnnnnnnnnnnnnnnnnnnnnnnnnnnnnnnnnnnnnnnnnnnnnnnnnnnnnnnnnnnnnnnnnnnnnnnnnnnnnnnnnnnnnnnnnnnnnnnnnnnnnnnnnnnnnnnnnnnnnnnnnnnnnnnnnnnnnnnnngggtgctccagctgatgaacctaacagattctcgtttggcccaggcgggtaatgagaagctagagttggccatgctgagcttttttgaacagtttcgtaagatctacattggggaccaagtgcagaaatcctctaa

SEQ ID NO: 23060 - DNA, 178 bp, Macaca Mulatta
ggtctgtttcaatatgggccagatagcgcttgccaagaaaatgctcaggaaggcactgaagctcctcaaccgaatctttccttacaacttaatctccttgtttctccatatccgtatcgagaaaaacagacactttcattatgtgaatcagcaggcccaagacagcccacctccaggg

SEQ ID NO: 23061 - DNA, 156 bp, Macaca Mulatta
agagggcacgagacatccatgtgacagtggagcagaggggttacccagatttcaacctcattgtgaacccttatgagcccataaggaaaggtaaagagaaaacccggaggacgaggggctactctggcatgcagcgtctgtccttccaggttcctg

SEQ ID NO: 23062 - DNA, 2452 bp, Macaca Mulatta
  misc_feature (1)...(2452): n = A,T,C or G
aggaagctgacagctgggaaattatagaagggctgaaaataggccaaaccaatgtccagaaaccagacaaacatgaaggctttatgctgaagaaaagaaaatggcctttaaaaggctggcacaannnnnnnnnnnnnnnnnnnnnnnnnnnnnnnnnnnnnnnnnnnnnnnnnnnnnnnnnnnnnnnnnnnnnnnnnnnnnnnnnnnnnnnnnnnnnnnnnnnnnnnnnnnnnnnnnnnnnnnnnnnnnnnnnnnnnnnnnnnnnnnnnnnnnnnnnnnnnnnnnnnnnnnnnnnnnnnnnnnnnnnnnnnnnnnnnnnnnnnnnnnnnnnnnnnnnnnnnnnnnnnnnnnnnnnnnnnnnnnnnnnnnnnnnnnnnnnnnnnnnnnnnnnnnnnnnnnnnnnnnnnnnnnnnnnnnnnnnnnnnnnnnnnnnnnnnnnnnnnnnnnnnnnnnnnnnnnnnnnnnnnnnnnnnnnnnnnnnnnnnnnnnnnnnnnnnnnnnnnnnnnnnnnnnnnnnnnnnnnnnnnnnnnnnnnnnnnnnnnnnnnnnnnnnnnnnnnnnnnnnnnnnnnnnnnnnnnnnnnnnnnnnnnnnnnnnnnnnnnnnnnnnnnnnnnnnnnnnnnnnnnnnnnnnnnnnnnnnnnnnnnnnnnnnnnnnnnnnnnnnnnnnnnnnnnnnnnnnnnnnnnnnnnnnnnnnnnnnnnnnnnnnnnnnnnnnnnnnnnnnnnnnnnnngggtcaccagacgatggagaacaaaaagtgtcagcaaagatacaaaaatacaactgcaggnnnnnnnnnnnnnnnnnnnnnnnnnnnnnnnnnnnnnnnnnnnnnnnnnnnnnnnnnnnnnnnnnnnnnnnnnnnnnnnnnnnnnnnnnnnnnnnnnnnnnnnnnnnnnnnnnnnnnnnnnnnnnnnnnnnnnnnnnnnnnnnnnnnnnnnnnnnnnnnnnnnnnnnnnnnnnnnnnnnnnnnnnnnnnnnnnnnnnnnnnnnnnnnnnnnnnnnnnnnnnnnnnnnnnnnnnnnnnnnnnnnnnnnnnnnnnnnnnnnnnnnnnnnnnnnnnnnnnnnnnnnnnnnnnnnnnnnnnnnnnnnnnnnnnnnnnnnnnnnnnnnnnnnnnnnnnnnnnnnnnnnnnnnnnnnnnnnnnnnnnnnnnnnnnnnnnnnnnnnnnnnnnnnnnnnnnnnnnnnnnnnnnnnnnnnnnnnnnnnnnnnnnnnnnnnnnnnnnnnnnnnnnnnnnnnnnnnnnnnnnnnnnnnnnnnnnnnnnnnnnnnnnnnnnnnnnnnnnnnnnnnnnnnnnnnnnnnnnnnnnnnnnnnnnnnnnnnnnnnnnnnnnnnnnnnnnnnnnnnnnnnnnnnnnnnnnnnnnnnnnnnnnnnnnnnnnnnnnnnnnnnnnnnnnnnnnnnnnnnnnnnnnnnnnnnnnnnnnnnnnnnnnnnnnnnnnnnnnnnnnnnnnnnnnnnnnnnnnnnnnnnnnnnnnnnnnnnnnnnnnnnnnnnnnnnnnnnnnnnnnnnnnnnnnnnnnnnnnnnnnnnnnnnnnnnnnnnnnnnnnnnnnnnnnnnnnnnnnnnnnnnnnnnnnnnnnnnnnnnnnnnnnnnnnnnnnnnnnnnnnnnnnnnnnnnnnnnnnnnnnnnnnnnnnnnnnnnnnnnnnnnnnnnnnnnnnnnnnnnnnnnnnnnnnnnnnnnnnnnnnnnnnnnnnnnnnnnnnnnnnnnnnnnnnnnnnnnnnnnnnnnnnnnnnnnnnnnnnnnnnnnnnnnnnnnnnnnnnnnnnnnnnnnnnnnnnnnnnnnnnnnnnnnnnnnnnnnnnnnnnnnnnnnnnnnnnnnnnnnnnnnnnnnnnnnnnnnnnnnnnnnnnnnnnnnnnnnnnnnnnnnnnnnnnnnnnnnnnnnnnnnnnnnnnnnnnnnnnnnnnnnnnnnnnnnnnnnnnnnnnnnnnnnnnnnnnnnnnnnnnnnnnnnnnnnnnnnnnnnnnnnnnnnnnnnnnnnnnnnnnnnnnnnnnnnnnnnnnnnnnnnnnnnnnnnnnnnnnnnnnnnnnnnnnnnnnnnnnnnnnnnnnnnnnnnnnnnnnnnnnnnnnnnnnnnnnnnnnnnnnnnnnnnnnnnnnnnnnnnnnnnnnnnnnnnnnnnnnnnnnnnnnnnnnnnnnnnnnnnnnnnnnnnnnnnnnnnnnnnnnnnnnnnnnnnnnnnnnnnnnnnnnnnnnnnnnnnnnnnnnnnnnnnnnnnnnnnnnnnnnnnnnnnnnnnnnnnnnnnnnnnnnnnnnnnnnnnnnnnnnnnnnnnnnnnnnnnnnnnnnnnnnnnnnnnnnnnnnnnnnnnnnnnnnccaggttccatgccaaccaactatgagctgtattatggcttcacaaggtttgctattgagctcaatgagttagatccagtactaaaagatctccttccaccaacagacgcccggttccggccagatcaaa

SEQ ID NO: 23063 - DNA, 156 bp, Macaca Mulatta
cacaacgaggccctcctggaggaggcgaagatgatgaacagactgaggcacagccgagtggtaaagctcctgggcgtcatcatagaggaagggaactactccctggtgatggagtacatggagaagggcaacctgatgcacgtgctaaaagccgag

SEQ ID NO: 23064 - DNA, 1046 bp, Macaca Mulatta
  misc_feature (1)...(1046): n = A,T,C or G
gggcgcaagagccgggcatgagcgcccagtagctgagcgcccgcggctgcccggcctcagaagcgacggtcgagcgagagcgggcggcagcagcgacgtagcccggcggccctggcggcgtgagcagccgccccagaggcccccgtttcaggggggccgagtcgaggctcgctccctgcctgnnnnnnnnnnnnnnnnnnnnnnnnnnnnnnnnnnnnnnnnnnnnnnnnnnnnnnnnnnnnnnnnnnnnnnnnnnnnnnnnnnnnnnnnnnnnnnnnnnnnnnnnnnnnnnnnnnnnnnnnnnnnnnnnnnnnnnnnnnnnnnnnnnnnnnnnnnnnnnnnnnnnnnnnnnnnnnnnnnnnnnnnnnnnnnnnnnnnnnnnnnnnnnnnnnnnnnnnnnnnnnnnnnnnnnnnnnnnnnnnnnnnnnnnnnnnnnnnnnnnnnnnnnnnnnnnnnnnnnnnnnnnnnnnnnnnnnnnnnnnnnnnnnnnnnnnnnnnnnnnnnnnnnnnnnnnnnnnnnnnnnnnnnnnnnnnnnnnnnnnnnnnnnnnnnnnnnnnnnnnnnnnnnnnnnnnnnnnnnnnnnnnnnnnnnnnnnnnnnnnnnnnnnnnnnnnnnnnnnnnnnnnnnnnnnnnnnnnnnnnnnnnnnnnnnnnnnnnnnnnnnnnnnnnnnnnnnnnnnnnnnnnnnnnnnnnnnnnnnnnnnnnnnnnnnnnnnnnnnnnnnnnnnnnnnnnnnnnnnnnnnnnnnnnnnnnnnnnnnnnnnnnnnnnnnnnnnnnnnnnnnnnnnnnnnnnnnnnnnnagcagctcctggtagacgaagaggaagacaaacctacagtcgcttccaaactctagagttggaaaaggaatttctttttaacccctatctgaccagaaaaagaagaatcgaggtttcccacgccctagccctcaccgagagacaggtaaaaatctggttccaaaacaggagaatgaaatggaaaaaggaaaacaacaaggacaaatttgccatttcccggcaggaggtaaaggacggggaaacga

SEQ ID NO: 23065 - DNA, 228 bp, Macaca Mulatta
ggcaattgaacgtagtgtgccaattacatgtgataagatggtgtgagctgtctcgtgccagaattggagactaagggctcacagctaacctttaaaggtacaaaagaagccttcattctaagcgcagagaactgccagctgtggaacttgccactccctgaggggtttgctgagaacatcccagcagcagctgttttagaaagttttgtcctccctgaccccagcacc

SEQ ID NO: 23066 - DNA, 795 bp, Macaca Mulatta
agctccttgctccagagggcgcacgagcagcgcttcttaaagtccattgctgagggcatcagcccggaagaacggcgccaaaccctgttgcagaagatgaacagcttctgacctgcgcggggagctgggccccaacatggcgggtctgcagaagatcaatagcttctcacctgcacagggggagcagaaaagctgggcctcaacatggcgggtctgcagaggccagacccgagcagcctggacttgacggttacgtgaaactgtccccaaaaagtcatggcaataatggtgtacagaaaatagtttgttgggtatttataacgtacaaactatcataaaaattctcctcttttgcatctcactttgtctcttctaagtcggcctcagcaatagcccaggattaagtatgctctgaaattgggtttagtgtcttcaagatcaaatgcagccaggaggaacatgttcataactggacttttccatgctagattttggcaaataagcccaaagttgaaaccatgtgagtggaaaaagcagtacagggtacgtataacccccttcaagagttatttcgtcttttattgttttttcttgaggtatcttggaaaggacagcagcttggaaaataatccagtccagccctggttctgcctctggccatgagattgctgtgcccgagaggcctgcacaattctaaagtgagaggattggaggaccaagataaactcagcagcgaggggctaggttaatgacctcaagaaaatgggtcccctctgaattgaggagtgtgtacag

SEQ ID NO: 23067 - DNA, 251 bp, Macaca Mulatta
ggacgcttttctgattacaatgaacagaaactcatgcaggccataccaaaagtacatttggccttcaagtgtaacatctgcaagaaataaggcagctcaagagactgggtatttggtgtgtgtcacttctgttgctgactgaataattctctctttttaaattgatcattctcctccatacactccagtcgggatctcagcaggagccagtgtggtttagcaaatcactgaatgctcaactctggtctgat

SEQ ID NO: 23068 - DNA, 2110 bp, Macaca Mulatta
  misc_feature (1)...(2110): n = A,T,C or G
attccatagtactcagcacacagatggctacattgggacagaagcctatcatacatacaattctgaagagaaaaacctatgtatcaaatgagaaaatgannnnnnnnnnnnnnnnnnnnnnnnnnnnnnnnnnnnnnnnnnnnnnnnnnnnnnnnnnnnnnnnnnnnnnnnnnnnnnnnnnnnnnnnnnnnnnnnnnnnnnnnnnnnnnnnnnnnnnnnnnnnnnnnnnnnnnnnnnnnnnnnnnnnnnnnnnnnnnnnnnnnnnnnnnnnnnnnnnnnnnnnnnnnnnnnnnnnnnnnnnnnnnnnnnnnnnnnnnnnnnnnnnnnnnnnnnnnnnnnnnnnnnnnnnnnnnnnnnnnnnnnnnnnnnnnnnnnnnnnnnnnnnnnnnnnnnnnnnnnnnnnnnnnnnnnnnnnnnnnnnnnnnnnnnnnnnnnnnnnnnnnnnnnnnnnnnnnnnnnnnnnnnnnnnnnnnnnnnnnnnnnnnnnnnnnnnnnnnnnnnnnnnnnnnnnnnnnnnnnnnnnnnnnnnnnnnnnnnnnnnnnnnnnnnnnnnnnnnnnnnnnnnnnnnnnnnnnnnnnnnnnnnnnnnnnnnnnnnaggctaaagaaagaagaagcaactttgcagtctggacagaaaatgaagtttacctcgaatatattcttcttaaatttaccagattagtaactaccacagaactgaaaaacatcctaaatctatcagtaactgctactctgacgatacacagtgttgagtatacaggacaccctctggagattgctgtgtttttaagttattgcactatatgtaccgtcaccaaaaagattttcttagtgatatataatgaagatacaaaacagtgggtttcccaagagtttacgttagatgcccctattgacagtgttttcgttccatattttatattttcagcactgccaggattaatactatggaacaagcatagtatctactattgttaccataatttcacctttactgggattttacagacacctgcaggacatggaaatctatcaatgctatcaaatgacagcattattcatgaagttttcatannnnnnnnnnnnnnnnnnnnnnnnnnnnnnnnnnnnnnnnnnnnnnnnnnnnnnnnnnnnnnnnnnnnnnnnnnnnnnnnnnnnnnnnnnnnnnnnnnnnnnnnnnnnnnnnnnnnnnnnnnnnnnnnnnnnnnnnnnnnnnnnnnnnnnnnnnnnnnnnnnnnnnnnnnnnnnnnnnnnnnnnnnnnnnnnnnnnnnnnnnnnnnnnnnnnnnnnnnnnnnnnnnnnnnnnnnnnnnnnnnnnnnnnnnnnnnnnnnnnnnnnnnnnnnnnnnnnnnnnnnnnnnnnnnnnnnnnnnnnnnnnnnnnnnnnnnnnnnnnnnnnnnnnnnnnnnnnnnnnnnnnnnnnnnnnnnnnnnnnnnnnnnnnnnnnnnnnnnnnnnnnnnnnnnnnnnnnnnnnnnnnnnnnnnnnnnnnnnnnnnnnnnnnnnnnnnnnnnnnnnnnnnnnnnnnnnnnnnnnnnnnnnnnnnnnnnnnnnnnnnnnnnnnnnnnnnnnnnnnnnnnnnnnnncacaggtcttgtgatggttcaacttcggcctagtgaatattcaaaaacatgtccaatagcccaaaaggtnnnnnnnnnnnnnnnnnnnnnnnnnnnnnnnnnnnnnnnnnnnnnnnnnnnnnnnnnnnnnnnnnnnnnnnnnnnnnnnnnnnnnnnnnnnnnnnnnnnnnnnnnnnnnnnnnnnnnnnnnnnnnnnnnnnnnnnnnnnnnnnnnnnnnnnnnnnnnnnnnnnnnnnnnnnnnnnnnnnnnnnnnnnnnnnnnnnnnnnnnnnnnnnnnnnnnnnnnnnnnnnnnnnnnnnnnnnnnnnnnnnnnnnnnnnnnnnnnnnnnnnnnnnnnnnnnnnnnnnnnnnnnnnnnnnnnnnnnnnnnnnnnnnnnnnnacagagtggttgtttacatgaagcacagacatnnnnnnnnnnnnnnnnnnnnnnnnnnnnnnnnnnnnnnnnnnnnnnnnnnnnnnnngtttctgcaacctaacagctatgtttgcaatagagacgtttggactgattcccag

SEQ ID NO: 23069 - DNA, 720 bp, Macaca Mulatta
  misc_feature (1)...(720): n = A,T,C or G
aggaggtgctggatgcctccaaagcactgctaggccgattaactaccctaatcgagctactactgccaaagttggaagagtggaaagcccagcagcaaaaagcctgcattagagctcccattgaccacgggttggaacagctggagaaatggnnnnnnnnnnnnnnngctgttgtttcatctgaggcagctgctgaaggagctgaagggactgagttgcctggttagctatcaggatgaccctctgatcaaaggggtggacctacgcaacgcccaggtcacagagttgctacagcgtctgctcgacagnctcctcagagcttttgtggtagaaacccagccctgcatgccccaaactccccatcgacccctcatcctcaagactgggagcaagttcaccgtccgaacaaggnaggctgctggtgagactccaggaaggcaatgagtcactgactgtggaagtctccattgacaggnnnnnnnnnnnnnnnnnnnnnnnnnnnnnnnnnnnnnnnnnnnnnnnnnnnnnnnnnnnnnnnnnnnnnnnnnnnnnnnnnnnnnnnnnnnnnnnnnnnnnnnnnnnnnnnnnnnnnnnnnnnnnnnnnnnnnnnnnnnnnnnnnnnnnnnnnnnnnnnnaggggccactaggtgtgacagaggaactgcacatcatcagcttcacggtcaaatatacctaccagggtctgaagcaggagctgaa

SEQ ID NO: 23070 - DNA, 517 bp, Macaca Mulatta
  misc_feature (1)...(517): n = A,T,C or G
tcagcagccaagaaacaatgaggagcaccacaccaaggctttcagctcccggcgcctctttgtgaggagggggcagcccttcaccatcatcctgcacttccgcactccagtccacgcatttctgcctgccctgaagaaggtggccctcattgcacaaactgnggagagcagccttccaaggtcaacaggacccaagccacattcccagtgtccagtctgggggaccgaaagtcgtggagtgcagcggtggaggagagagatgcccagtcctggaccatctctgtgaccacacccgcggatgctgtcattggccactactcgcttctgctgcaggtctcaggcaggaagccacgcctcttaggccagttcacattgctctttaacccctggagtagangaggatgccgtgttcctgaagaatgaggctcagcgcacagagtacttgttgaaccagaatggtctcatctacctgggcacagctgactgcatccaggcagagccctgggactttggccag

SEQ ID NO: 23071 - DNA, 2050 bp, Macaca Mulatta
  misc_feature (1)...(2050): n = A,T,C or G
gtagggaggtgggcaggagccagtgatgagggaatggcaatcacatttgacctctgatctgtttctttcctccttctccttgacttccccatataaatgttacacaggcattcccacactcgggtacgcacctacagagactgattgggggtaaccgtgtcacttgcttgcaacgctggcacctccgccctgcatcccaggagtgagcagtgagtgaggctaggggctgggccctggctccgaatcttcgggctgggaagagactccaccatctgggggcggcctgggggagtagcctgagtgtcttcctgctgatgcaatctgctaagtcgcgagtctccgccgcgagagggcgggtctgcaattccgcccgccacgtgtactcgccgccgcctcgggcactgccccaggtcttgccgcagccggaactgcgctctgcagccgcagacccggtccaagcggtcaggggctgcgacccttgggatttgccctccgctcagctccagcttccctcgtggccgacggaacaatgaaggnnnnnnnnnnnnnnnnnnnnnnnnnnnnnnnnnnnnnnnnnnnnnnnnnnnnnnnnnnnnnnnnnnnnnnnnnnnnnnnnnnnnnnnnnnnnnnnnnnnnnnnnnnnnnnnnnnnnnnnnnnnnnnnnnnnnnnnnnnnnnnnnnnnnnnnnnnnnnnnnnnnnnnnnnnnnnnnnnnnnnnnnnnnnnnnnnnnnnnnnnnnnnnnnnnnnnnnnnnnnnnnnnnnnnnnnnnnnnnnnnnnnnnnnnnnnnnnnnnnnnnnnnnnnnnnnnnnnnnnnnnnnnnnnnnnnnnnnnnnnnnnnnnnnnnnnnnnnnnnnnnnnnnnnnnnnnnnnnnnnnnnnnnnnnnnnnnnnnnnnnnnnnnnnnnnnnnnnnnnnnnnnnnnnnnnnnnnnnnnnnnnnnnnnnnnnnnnnnnnnnnnnnnnnnnnnnnnnnnnnnnnnnnnnnnnnnnnnnnnnnnnnnnnnnnnnnnnnnnnnnnnnnnnnnnnnnnnnnnnnnnnnnnnnnnnnnnnnnnnnnnnnnnnnnnnnnnnnnnnnnnnnnnnnnnnnnnnnnnnnnnnnnnnnnnnnnnnnnnnnnnnnnnnnnnnnnnnnnnnnnnnnnnnnnnnnnnnnnnnnnnnnnnnnnnnnnnnnnnnnnnnnnnnnnnnnnnnnnnnnnnnnnnnnnnnnnnnnnnnnnnnnnnnnnnnnnnnnnnnnnnnnnnnnnnnnnnnnnnnnnnnnnnnnnnnnnnnnnnnnnnnnnnnnnnnnnnnnnnnnnnnnnnnnnnnnnnnnnnnnnnnnnnnnnnnnnnnnnnnnnnnnnnnngaagaagaactggcaactcctccgctagatggcatcattcttccaggagtgacaaggcagtgcattctggacctggcacatcagtgggngggtgaatttaaggtatcagagagatacctcaccatggatgacttgacaaccgccctggaggggaacagagtgagggagatgtttggctctggtacagcctgtgttgtttgcccagtttctgacatactgtacaaaggcgagnnnnnnnnnnnnnnnnnnnnnnnnnnnnnnnnnnnnnnnnnnnnnnnnnnnnnnnnnnnnnnnnnnnnnnnnnnnnnnnnnnnnnnnnnnnnnnnnnnnnnnnnnnnnnnnnnnnnnnnnnnnnnnnnnnnnnnnnnntggaaaatagaagataccaactgtatgctaccgggacagactgttgtatttgaactgtgatagatttctttggctacctgttagcacttgtgcataatgtagtttgtagtgtcagtgtgttacaagagtgattgtttcttcatgccagagaatatgaattgcaatcatcaaatggtgtttcgtaacttggcagtagtagcttaccttacctagaaaaatattaatgtaagccatataacatgggatttccctcaatgatttagtgcctccctttgtacttcactcagatactaaaacagtagtttattctttaatgtaagttacattctgctcctca

SEQ ID NO: 23072 - DNA, 2269 bp, Macaca Mulatta
  misc_feature (1)...(2269): n = A,T,C or G
gggcgtccgcaaagacttcatggcccataaggccttgctggctgccaccagcaagttttttaaggaagtgttccttaacgagaagagtggggatggtactaggactaatgtctacttaaatgaagtgcaggttgctgactttgcttcatttcttgagtttgtctacactgcaaaggtacaggtggaagaagatcgggtgcagcgaatgctggaaatggctgaaaagctgaaatgtttggacttatcagaaacttgttttcagttaaaaaaacagatgttagagtcggtacttttggagttgcaaaatttctcagagtcccaggaggtggaggtgagcagtggctcccaagttagtgctgctcctgcccccagggcaagtgtggccatggatggccctcaccccaatggtctcacggattccttgggctacccaggagagatagccagcaatggcatgtcttcagatttgccaccaaagaagtccaaggacaaactagacaagaagaaagaggtagttaagcctccctaccctaaaatcaggagagctagtggaaggttggctgggaggaaggtctttgtggagatccctaaaaagaaatatacgagaagactccgagagcagcagaaaagtgctgagggtgacatgggggactacaggtgtccccaggaccaaagcccggacagggtgggcacagagatggagccaatttccaaaaatgagggttgccaggtgggtgctgagtnnnnnnnnnnnnnnnnnnnnnnnnnnnnnnnnnnnnnnnnnnnnnnnnnnnnnnnnnnnnnnnnnnnnnnnnnnnnnnnnnnnnnnnnnnnnnnnnnnnnnnnnnnnnnnnnnnnnnnnnnnnnnnnnnnnnnnnnnnnnnnnnnnnnnnnnnnnnnnnnnnnnnnnnnnnnnnnnnnnnnnnnnnnnnnnnnnnnnnnnnnnnnnnnnnnnnnnnnnnnnnnnnnnnnnnnnnnnnnnnnnnnnnnnnnnnnnnnnnnnnnnnnnnnnnnnnnnnnnnnnnnnnnnnnnnnnnnnnnnnnnnnnnnnnnnnnnnnnnnnnnnnnnnnnnnnnnnnnnnnnnnnnnnnnnnnnnnnnnnnnnnnnnnnnnnnnnnnnnnnnnnnnnnnnnnnnnnnnnnnnnnnnnnnnnnnnnnnnnnnnnnnnnnnnnnnnnnnnnnnnnnnnnnnnnnnnnnnnnnnnnnnnnnnnnnnnnnnnnnnnnnnnnnnnnnnnnnnnnnnnnnnnnnnnnnnnnnnnnnnnnnnnnnnnnnnnnnnnnnnnnnnnnnnnnnnnnnnnnnnnnnnnnnnnnnnnnnnnnnnnnnnnnnnnnnnnnnggtgaaagaccttttatgtgtgaaacatgtggcaagagttttgcttctaaggagtacttaaaacaccacaatagaatccatactggatccaaaccctttaaatgtgaagtatgtttcaggacttttgcccagcggaattcactctaccagcatattaaagtccacacaggnnnnnnnnnnnnnnnnnnnnnnnnnnnnnnnnnnnnnnnnnnnnnnnnnnnnnnnnnnnnnnnnnnnnnnnnnnnnnnnnnnnnnnnnnnnnnnnnnnnnnnnnnnnnnnnnnnnnnnnnnnnnnnnnnnnnnnnnnnnnnnnnnnnnnnnnnnnnnatacacgataagaatactccatggaagtctttccttgtcattgtagatggctcacccaagaacgatgacggacacaagactgaacagcctgacgaagagtatgtgtcgtccaaactttcggataaattgctgtcttttgcagaaaatggccatttccacaacctggctgcagtccaaggcactgtacctaccatgcaggagaacagttctgcagacacagcctgcaagtcagatgactccgtggtgtcccaggacaccctgctggccaccaccatcagcgagcttagtgagttgaccccacagacagactcgatgcccacacagcttcactctttgagcaacatggaataagagcttcaagcagttctcatcctgttagtgtgcgtgtgtggtagctgaactcaagatgatgtggggctaagataaacaattgttcacctgcaaagatgtgggcaagaacggcctctgcagattttcctgaacttctgctaacttgcacggctttatcacagcgttttaaaagctttccctcaaaaatcctgatctgcatgatctcagctactttattgacaaacagagacagtgaacataacctcacttaatt

SEQ ID NO: 23073 - DNA, 904 bp, Macaca Mulatta
  misc_feature (1)...(904): n = A,T,C or G
actacatttctctgttaatattngagctaaaccctttaaaaatgaccagattaaaaggtatcaatttgtagttctccctacaaagcaaaaattgttaccctattcacttttctaggctacaaggatatttgagtgcctggttatgaatttcttgaatcatgttagatgagcgtagagttaaaaagtatggtttttttgtgtgtgttaccaaataaggtaaacggtaatttagacagaccccagcttaatgaggtcagaggaacagaggtttcacatcctgactccagaaatgggtagctgctagataaaattggagcaagacctgtggaatgatgcaatgaggtcaagaaaaagagtttagagaattacagcatggatgttcagctctaagaaaaatgtgattgacagcatttgaaaatgcagatttagttatgcaaagaaaagagagtggggctgatccctaggcaaggtgtagtttcggctcagccttctaaaactagaagcctattttcattgttgagaaaggaaacagaagtatcttccattaattcagaaggttttaggagatacggtctaatagtatgaaaaaaatcaaagcccatgtctgttttagttaacaaggaaaacacagtgatttaaatgctgcacataaactcttcttaagatgatatgggcattatgttcccagtggtccacagtatttacatataaaaatctaagaaatttctcatagtccaaagcgctgtggtcagggtagcaatcaatacctatatataataatgatctgtttagtcaggtaaatggaaagcattacagtcaatcatccaaaatatcttccatcccaaatgaaatctgttaagtcaaataccttctaattcccaattaatccaaaatctacttctaa

SEQ ID NO: 23074 - DNA, 189 bp, Macaca Mulatta
gggctactggtggggctcacagtgggagggagcccatgccggctggtccagcgtgctgctgtcctcatccaaggcagactggctgaggtcagcatggagagcagcacacggtgggtgcgaggagtgaccaaggagcactggtgggcatgggtcacagccccagtgctggggtggatgggccaccatggg

SEQ ID NO: 23075 - DNA, 592 bp, Macaca Mulatta
acagagctgcacccggtttttttgcccaagccatgtccacacatttgtcttgcaggaaatgaacctgctgggtagatgcacccccgagacagcccaggtgtctccagaggcagacagccccgtttcaggcttcagggaccctgcctcttccctcctgacaagggccgtggatggcagcccggtctggccctgatgggattgttggaggcctactggaatcagctctaagggggtgtcggctctcctgggggatctaagcccccatccccctgcatgttctctggtaggaggcagagaagagaccccaggtgcctggggaggcgtgctagctgctaggtggtcctaaaaaattccaggccgggttttccagggaggactggttgccaagcgcggtcgctgttgactagacagagtcggctcgggggtcctctgtgggggcttgccctgtcgtggcctgtctgccacgcaccacccctttcaccgttggtgggggccttgaggggaggacccagtcggcgggagctggctcagaacttcggccgaaggtaaatggagttttttgggagcagcacctcctgccccgaggctgacc

SEQ ID NO: 23076 - DNA, 218 bp, Macaca Mulatta
  misc_feature (1)...(218): n = A,T,C or G
ctgggctccacccttctgtgacaacccaggctttggtggcagcacggacagtggccctgtgcagcctgaaannnngacaccttcctgctggccatgctcctcagcgtcctgctgcctctgctcccaggggctggcctggcctggtgttgctaccgactcccaggagcccatctgcagcgatgcagctggggctgcaggagggaccctgcgtgcagtgg

SEQ ID NO: 23077 - DNA, 370 bp, Macaca Mulatta
aaaaaggatttcctctagcagtagctagtgaaagatgaggcgaggcctgaatggagcctgtggatcgtcctgccttgacgtctgagttcggcttgtgaagttagtgggccgcagagggcactgccttcattctgctaagatgcaaagggctggtgagatcttcgcaagagaatcagggacttacactcagcaaaaagccagttagggccgattttaatgtgcgaccttgacctgcatctgtcatggaaagtgccttctaaaaagcttcagtggtggatatgaccatctgaaggaaacaaatgtacaaggaagcactgcatatgctaagccccgtgttcctggagtgagagctgctgttcttcaggtctgt

SEQ ID NO: 23078 - DNA, 122 bp, Macaca Mulatta
ttcagagccactcagtacacatgcatgttgcttagatatttgttagagcctaaagctggcaaaaagaaggtggtaatgaagctcaagaaactggagtccagtgtgagcactggtcgtaaatg

SEQ ID NO: 23079 - DNA, 691 bp, Macaca Mulatta
cctgtacaaggaccagggctaccaccgcctgccccctggagccctggcccgcaggctgcccaccactggctaccttgtctaccgccgggcagagtggcctgagacccaggaggctgcaacagagaaggagggcagagggcagtcagaggcaaggagcagaggggaggagcaagggtgccagggagatgaggacgctggggtcaaagccagccccagggacactcgggaagagtctgacacaactgctgaagggggccagggtcgagcccgtgaaggccctgctcagccaggggagccagaggcagagggaagccaggcagcagaggagtagcttgaagtggccagaagggtcgtttggggcgggagaccttgcgcctgctgagaagtccttttagcgccagcagccccacccagggccctgtccagtgtctgccaccacctttgtctgatacttgtctccagggaagctgagggaactgccacatctgaggaactggaataaagatgagggggctcgggggacccccagactgtgtgcccaaggccccttgcctcttgttcttctcacccagctgagggtgagccagcctgcaatggggagtgtgccaagtgggggcgaatctgatggatgcccaacctctgacatggggagggtaacggtctcggctccttttacccttccccccatggg

SEQ ID NO: 23080 - DNA, 3351 bp, Macaca Mulatta
  misc_feature (1)...(3351): n = A,T,C or G
atgtcgactggggacagttttgagactcgatttgaaaaaatcgacaacctgctgcgggatcccaaatcggaagtgaattcggattgtttgctggnnnnnnnnnnnnnnnnnnnnnnnnnnnnnnnnnnnnnnnnnnnnnnnnnnnnnnnnnnnnnnnnnnnnnnnnnnnnnnnnnnnnnnnnnnnnnnnnnnnnnnnnnnnnnnnnnnnnnnnnnnnnnnnnnnnnnnnnnnnnnnnnnnnnnnnnnnnnnnnnnnnnnnnnnnnnnnnnnnnnnnnnnnnnnnnnnnnnnnnnnnnnnnnnnnnnnnnnnnnnnnnnnnnnnnnnnnnnnnnnnnnnnnnnnnnnnnnnnnnnnnnnnnnnnnnnnnnnnnnnnnnnnnnnnnnnnnnnnnnnnnnnnnnnnnnnnnnnnnnnnnnnnnnnnnnnnnnnnnnnnnnnnnnnnnnnnnnnnnnnnnnnnnnnnnnnnnnnnnnnnnnnnnnnnnnnnnnnnnnnnnnnnnnnnnnnnnnnnnnnnnnnnnnnnnnnnnnnnnnnnnnnnnnnnnnnnnnnnnnnnnnnnnnnnnnnnnnnnnnnnnnnnnnnnnnnncagagatgtgaagcctgataacatgctgctggataaatctggacatttgaagttagcagattttggtacttgtatgaagatgaataaggnnnnnnnnnnnnnnnnnnnnnnnnnnnnnnnnnnnnnnnnnnnnnnnnnnnnnnnnnnnnnnnnnnnnnnnnnnnnnnnnnnnnnnnnnnnnnnnnnnnnnnnnnnnnnnnnnnnnnnnnnnnnnnnnnnnnnnnnnnnnnnnnnnnnnnnnnnnnnnnnnnnnnnnnnnnnnnnnnnnnnnnnnnnnnnnnnnnnnnnnnnnnnnnnnnnnnnnnnnnnnnnnnnnnnnnnnnnnnnnnnnnnnnnnnnnnnnnnnnnnnnnnnnnnnnnnnnnnnnnncagggaagtgagattaggacgaaatggtgtagaagaaatcaaacgacatctcttcttcaaaaatgaccagtgggcttgggaaacactccgagannnnnnnnnnnnnnnnnnnnnnnnnnnnnnnnnnnnnnnnnnnnnnnnnnnnnnnnnnnnnnnnnnnnnnnnnnnnnnnnnnnnnnnnnnnnnnnnnnnnnnnnnnnnnnnnnnnnnnnnnnnnnnnnnnnnnnnnnnnnnnnnnnnnnnnnnnnnnnnnnnnnnnnnnnnnnnnnnnnnnnnnnnnnnnnnnnnnnnnnnnnnnnnnnnnnnnnnnnnnnnnnnnnnnnnnnnnnnnnnnnnnnnnnnnnnnnnnnnnnnnnnnnnnnnnnnnnnnnnnnnnnnnnnnnnnnnnnnnnnnnnnnnnnnnnnnnnnnnnnnnnnnnnnnnnnnnnnnnnnnnnnnnnnnnnnnnnnnnnnnnnnnnnnnnnnnnnnnnnnnnnnnnnnnnnnnnnnnnnnnnnnnnnnnnnnnnnnnnnnnnnnnnnnnnnnnnnnnnnnnnnnnnnnnnnnnnnnnnnnnnnnnnnnnnnnnnnnnnnnnnnnnnnnnnnnnnnnnnnnnnnnnnnnnnnnnnnnnnnnnnnnnnnnnnnnnnnnnnnnnnnnnnnnnnnnnnnnnnnnnnnnnnnnnnnnnnnnnnnnnnnnnnnnnnnnnnnnnnnnnnnnnnnnnnnnnnnnnnnnnnnnnnnnnnnnnnnnnnnnnnnnnnnnnnnnnnnnnnnnnnnnnnnnnnnnnnnnnnnnnnnnnnnnnnnnnnnnnnnnnnnnnnnnnnnnnnnnnnnnnnnnnnnnnnnnnnnnnnnnnnnnnnnnnnnnnnnnnnnnnnnnnnnnnnnnnnnnnnnnnnnnnnnnnnnnnnnnnnnnnnnnnnnnnnnnnnnnnnnnnnnnnnnnnnnnnnnnnnnnnnnnnnnnnnnnnnnnnnnnnnnnnnnnnnnnnnnnnnnnnnnnnnnnnnnnnnnnnnnnnnnnnnnnnnnnnnnnnnnnnnnnnnnnnnnnnnnnnnnnnnnnnnnnnnnnnnnnnnnnnnnnnnnnnnnnnnnnnnnnnnnnnnnnnnnnnnnnnnnnnnnnnnnnnnnnnnnnnnnnnnnnnnnnnnnnnnnnnnnnnnnnnnnnnnnnnnnnnnnnnnnnnnnnnnnnnnnnnnnnnnnnnnnnnnnnnnnnnnnnnnnnnnnnnnnnnnnnnnnnnnnnnnnnnnnnnnnnnnnnnnnnnnnnnnnnnnnnnnnnnnnnnnnnnnnnnnnnnnnnnnnnnnnnnnnnnnnnnnnnnnnnnnnnnnnnnnnnnnnnnnnnnnnnnnnnnnnnnnnnnnnnnnnnnnnnnnnnnnnnnnnnnnnnnnnnnnnnnnnnnnnnnnnnnnnnnnnnnnnnnnnnnnnnnnnnnnnnnnnnnnnnnnnnnnnnnnnnnnnnnnnnnnnnnnnnnnnnnnnnnnnnnnnnnnnnnnnnnnnnnnnnnnnnnnnnnnnnnnnnnnnnnnnnnnnnnnnnnnnnnnnnnnnnnnnnnnnnnnnnnnnnnnnnnnnnnnnnnnnnnnnnnnnnnnnnnnnnnnnnnnnnnnnnnnnnnnnnnnnnnnnnnnnnnnnnnnnnnnnnnnnnnnnnnnnnnnnnnnnnnnnnnnnnnnnnnnnnnnnnnnnnnnnnnnnnnnnnnnnnnnnnnnnnnnnnnnnnnnnnnnnnnnnnnnnnnnnnnnnnnnnnnnnnnnnnnnnnnnnnnnnnnnnnnnnnnnnnnnnnnnnnnnnnnnnnnnnnnnnnnnnnnnnnnnnnnnnnnnnnnnnnnnnnnnnnnnnnnnnnnnnnnnnnnnnnnnnnnnnnnnnnnnnnnnnnnnnnnnnnnnnnnnnnnnnnnnnnnnnnnnnnnnnnnnnnnnnnnnnnnnnnnnnnnnnnnnnnnnnnnnnnnnnnnnnnnnnnnnnnnnnnnnnnnnnnnnnnnnnnnnnnnnnnnnnnnnnnnnnnnnnnnnnnnnnnnnnnnnnnnnnnnnnnnnnnnnnnnnnnnnnnnnnnnnnnnnnnnnnnnnnnnnnnnnnnaggctgttaacaagttggcagaaataatgaatcgaaaagattttaaaattgatagaaagaaagctaatacacaagatttgagaaagaaagaaaaggaaaatcgaaagctacaactggaactcaaccaagaaagagagaaatcaaccagatgnnnnnnnnnnnnnnnnnnnnnnnnnnnnnnnnnnnnnnnnnnnnngtagaagaatgtgcacataggaatgagctttagatgcagttggccagcaaagagagtgatattgagcaattgcgtgctaaacttttggacctctcggattctacaagtgttgctagttttcctagtgctgatgaaactgatggaaacctcccag

SEQ ID NO: 23081 - DNA, 777 bp, Macaca Mulatta
aaaaaagtatgctactttcttaaaattttttgaataataacctaaattctttgtttatcttttaggttataaagttttagcacttttggatgtgcctgataagagtcaagaaaaagctgatttatatatccatgtgacatacatcaaaaagtgggatatatgtgctggtaatgccatcttaaaagcccttggggggcatatgactaccctgagtggtgaagaaatcagttacactggttcagacggcattgaagggggactccttgctagcataagaatgaaccaccaggccctggtcagaaaactcccagatctagaaaagacaggacataaataagcataactgattacagggtacagttcttcacagctgaaatggttagcctgaaatgctggaagcttcgaaggattggtggagactatgcatggttaaggccatcccgaactttttaaagtatttatgaagcatcagagacttattttccctgtaataggatgcaagatcagggaaaatgggttgctttgtgtctcaagtattgtctttatttttgagactattttcatacagttgtcatacacaaggcgcatatatatatttgtgaattaaaatctgtagctgagtctacattgttatgagtcaccattttcacacaacatcatgaatcttccctgttagtactttcatgtagaattcggttgaaggaaagattgaaatttgtgtagatgtttaatataactttacaactttatctcaatgaaaataaagtcattggggat

SEQ ID NO: 23082 - DNA, 814 bp, Macaca Mulatta
  misc_feature (1)...(814): n = A,T,C or G
gaccctagaccacggacattgccgccgctgccaccgggccctaccgctgcccagcagccgggccgtggtctggctgaagctgcggggccgcagggctccgagggaggcaatggaagcagccctgtggccgggcttgaggcggacgatcacggagggaaggccggggaaggctcagtgggtggcggccttgctgtgagccccaaccctggcgacaagcccatgacccaacgggccctgaccgtgttgatggtggtgagcggcgcggtgctggtgtacttcgtggtcaggacggtcagnnnnnnnnnnnnnnnnnnnnnnnnnnnnnnnnnnnnnnnnnnnnnnnnnnnnnnnnnnnnnnnnnnnnnnnnnnnnnnnnnnnnnnnnnnnnnnnnnnnnnnnnnnnnnnnnnnnnnnnnnnnnnnnnnnnnagataagaatgtgccttttgatgaaagaactttatctttctacagcgaagagtggaatttctatgtttaaggaataagaagccactatatcaatgttgggggggtatttaagttacatacattttgacaacctttaatttgttgttgtaataaatactgtatcctttattatatctttatatgtatagaagtactctatcaatgggctcagagatgttggagataaactatactgtaatagtttatcagtttgacaattactataaaacggtgttttctgatcagtttttgtttcttgcttaccatatgattgtaaactgttttcttttatgtattaatcagttaatcctaattatttttgttggtgtcatgttaaagagctataa

SEQ ID NO: 23083 - DNA, 797 bp, Macaca Mulatta
ggggccttttccccccctctagcgccgctgggcctgcaggtttctgtcgacccgcggacgctggtctctgttccgcaggatggggtttgttaaagttgttaagaataaggcctactttaagagataccaagtgaaatttagaagacgacgagagggtaaaactgattactatgctcggaaacgcttggtgatacaggataaaaataaatacaacacacccaaatacaggatgatagttcgtgtaacaaacagagatatcatttgtcagattgcttatgcccgtatagagggggatatgatagtctgcgcagcatatgcacacgaactgccaaaatacggtgtgaaggttggcctgacaaactatgctgcagcatattgtactggcctgctgctggcccgcaggcttctcaataggtttggcatggacaagatctatgaaggccaagtggaggtaactggcgatgaatacaatgtggaaagcattgatggtcagccaggtgcctttacctgctatttggatgcaggccttgccagaactaccactggcaataaagtttttggcgcccttgaagggagctgttggatggaaggctttgtctatcccctccacggtaaccaaaacgaattcccccgggtttattgaattcctgaaaaagccaagggaaattttaatgggccagaaaattccccacccgggaaagccaacatatctttgtggtggcccaaaaaaaggtttttgccaataaaattaaactatggagcccccctcaacctttaaatagggggaaaaaagaaaa

SEQ ID NO: 23084 - DNA, 989 bp, Macaca Mulatta
  misc_feature (1)...(989): n = A,T,C or G
agatcccagagtcattaaaaagtatcacatggcagagattgggaaaaggcagttcaagacagttcttagatgctgcannaggctctccaaggatggccactgatagaaaagaggacatgttggcatggtcatggaggaggaggactccacacagnnnnnnnnnnnnnnnnnnnnnnnnnnnnnnnnnnnnnnnnnnnnnnnnnnnnnnnnnnnnnnnnnnnnnnnnnnnnnnnnnnnnnnnnnnnnnnnnnnnnnnnnnnnnnnnnnnnnnnnnnnnnnnnnnnnnnnnnnnnnnnnnnnnnnnnnnnnnnnnnnnnnnnnnnnnnnnnnnnnnnnnnnnnnnnnnnnnnnnnnnnnnnnnnnnnnnnnnnnnnnnnnnnnnnnnnnnnnnnnnnnnnnnnnnnnnnnnnnnnnnnnnnntggtgtatcaagagccggagctgctttttttaacgaagttcgaaatgcagtatttggcaaggtagcccaaaattcaatccgaagaatagccaaaaatgtctttattcatcttcacaacctggatctgggttttcacctgagcagacagacgggagctttatctaaggctattgacagaggaacaaggggtatcagttttgtcctgagtgctttggtatttaatcttcttcccatcatgtttgaagtgatgcttgtcagtggtgttttgnnnnnnnnnnnnnnnnnnnnnnnnnnnnnnnnnnnnnnnnnnnnnnnnnnnnnnnnnnnnnnnnnnnnnnnnnnnnnnnnnnnnnnnnnnnnnnnnnnnnnnnnnnnnnnnnnnnnnnnnnnnnnnnnnnnnnnnnnnnnnnnnnnnnnnnnnnnnnnnnnnnnnnnnnnnnnnnnagtattttaataatgaaagatatgaagcacagagatatgatggatttttgaagacgtatgagactgcttcattgaaaagtacctctaatctggctatgctgaactttggtcaaagtgatattttc

SEQ ID NO: 23085 - DNA, 1003 bp, Macaca Mulatta
gttctttgcgcagccaagggtgggcgccggtcctgggaggcgcaccgttgtaagccagacaaaaagaaactggggtgcctgagtgccaggtggcgggcaagcggtgggcttttcggcggggtctttaggatttgcagcgccaggaagcgagatgtcgaagccgccacccaaaccagtcaaaccagggcaagttaaagtcttcagagccctgtacacgtttgaacccagaactccagatgaattatactttgaggaaggtgatattatctacattactgacatgagtgacaccaactggtggaaaggcacctccaaaggcaggactggactaattccaagcaactatgtggctgagcaggcagaatctattgacaatccattgcatgaagcagcaaaaagaggcaacttgagctggttgagagagtgtttggacaacagagtgggtgttaatggcttagacaaagctggaagcactgccttgtactgggcttgccacgggggtcacaaagatatagtagaaatgctatttactcaaccaaatattgaactgaaccagcagaacaagttgggagacacagctttgcatgctgctgcctggaagggttatgcagatattgtccagttgcttctggcaaaaggtgctagaacagacttaagaaacaatgagaagaagctggccttcgacatggctaccaatgctgcctgtgcatctctcctgaaaaagaaacagggaacagatgcggttcgaacattaagcaatgccgaggactatctcgatgatgaagactcagattaattcctttctggagctttgagatctaaaacttctgttgcttttgccattccaaaacttggtctttgccaggaaagtgttggttactataaagcaaagtatatatgaacacggcagtgttgcactgtgttttgaatagcaagtgtaaatgacttgttccccaccctttggccttgcccaataagtgaactgggatttctttggcctgta

SEQ ID NO: 23086 - DNA, 1475 bp, Macaca Mulatta
  misc_feature (1)...(1475): n = A,T,C or G
ggacagccaacccccgcatcggcgacgtgatacagaagctggcccccttcctgaagatgtacggtgagtatgtcaagaactttgagcgagcggctgagctgctggccacctggaccgagaagtctccactcttccaggaggttctcactcgcatccannnnnngaggcttcgggcagcctgaccctgcagcaccacatgctggaaccagtgcagagaattccacgctacgagctgctgctcaaggagtacgtccagaagctgccagcccaggccccagaccgggccgatgctcagnnnnnnnnnnnnnnnnnnnnnnnnnnnnnnnnnnnnnnnnnnnnnnnnnnnnnnnnnnnnnnnnnnnnnnnnnnnnnnnnnnnnnnnnnnnnnnnnnnnnnnnnnnnnnnnnnnnnnnnnnnnnnnnnnnnnnnnnnnnnnnnnnnnnnnnnnnnnnnnnnnnnnnnnnnnnnnnnnnnnnnnnnnnnnnnnnnnnnnnnnnnnnnnnnnnnnnnnnnnnnnnnnnnnnnnnnnnnnnnnnnnnnnnnnnnnnnnnnnnnnnnnnnnnnnnnnnnnnnnnnnnnnnnnnnnnnnnnnnnnnnnnnnnnnnnnnnnnnnnnnnnnnnnnnnnnnnnnnnnnnnnnnnnnnnnnnnnnnnnnnnnnnnnnnnnnnnnnnnnnnnnnnnnnnnnnnnnnnnnnnnnnnnnaggccttccaagcagctgttgaccaaattgagaagcggaatgaaaccttcaaggcggcggcccaggggcctgagggagacacccaggagcaggagnnnnnnnnnnnnnnnnnnnnnnnnnnnnnnnnnnnnnnnnnnnnnnnnnnnnnnnnnnnnnnnnnnnnnnnnnnnnnnnnnnnnnnnnnnnnnnnnnnnnnnnnnnnnnnnnnnnnnnnnnnnnnnnnnnnnnnnnnnnnnnnnnnnnnnnnnnnnnnnnnnnnnnnnnnnnnnnnnnnnnnnnnnnnnnnnnnnnnnnnnnnnnnnnnnnnnnnnnnnnnnnnnnnnnnnnnnnnnnnnnnnnnnnnnnnnnnnnnnnnnnnnnnnnnnnnnnnnnnnnnnnnnnnnnnnnnnnnnnnnnnnnnnnnnnnnnnnnnnnnnnnnnnnnnnnnnnnnnnnnnnnnnnnnnnnnnnnnnnnnnnnnnnnnnnnnnnnnnnnnnnnnnnnnnnnnnnnnnnnnnnnnnnnnnnnnnnnnnnnnnnncaggacatgagggctcacacctccatccccctgctgggctaccaggtgaccgttgggccccagggggaccctcgggtcttccagctacagcagtcaggccaactctacactttcaaggccgagacggaggagctgaagggccgctgggtgaaggccatggagcgggcggccagtggatggagtcccagctggcccaacgatggggacctgtccgactgagccactgccagccactctcctgcccacctctcccca

SEQ ID NO: 23087 - DNA, 575 bp, Macaca Mulatta
accaaaactgttctgaagaatgtacccaggtgcctttttgctaatctgatactataatagaatgagacataaaatgaattaatggaaacatatccacgctgtactgtggtataggtactctgattgaaaactttggacatcgtgtgatctgttttaaagttgcggggtggggaatttagctgactagggacaaacatgtaaacctattttcctatgaaaacattttaaatgtcccacttgaataatgtaattctttatagttttttttaatctatggataaatggaaacctaattgtaatgaattatttagacagttttaagccctgtcttctgggagttatcaattttaaagagaacttttgtgcaattcaaatgaactttttataggtaattgaaaatgacaacacaataacactttctgtataaaagtatatattttatgtgatttattcctactaaatgaaagtgcactactgcctcatgtaaagactcttgcacgcagagcctttaaatgactaaggaacaacatagatagtgagcatagtccccgcctccacccctcacaatttatttg

SEQ ID NO: 23088 - DNA, 855 bp, Macaca Mulatta
  misc_feature (1)...(855): n = A,T,C or G
gccccagtccccagccgccctatgtaaggctgtgggaggaagccgcctatgaccagagcctgcctgacttcaaccacatccagatgaaagtcatgagctacagtgaggacccccgccccttgctggcccctgacacggggcagctgaagctgggaannnnnnnnnnnnnnnnnnnnnnnnnnnnnnnnnnnnnnnnnnnnnnnnnnnnnnnnnnnnnnnnnnnnnnnnnnnnnnnnnnnnnnnnnnnnnnnnnnnnnnnnnnnnnnnnnnnnnnnnnnnnnnnngcctgtcgccagggccctgcccccttggcttccttccaagatgacctggacatgggatccagtgaaggcagcagccccaacgcatctcaacatgatggggaggaagcttgttccccacgacaggaacctcggggctgcaggtgcctgctggaccacttccaagactttgccctgatcgatgccccaacattggaggatgagccccaagaggggcagcagtgggaaacagccctgcccaacaactggcagcagtacccaaggacaaaggtggaggagaaggaggcttcagacacaggtggggaggaacctgagaagaaagaggaagacctgtactatgggctgccagacggccctggggaccccctcccggacaaggaactgggttttgagcctgacacccagggctgaagtggttgtgctccgtagcttctagtctagaactgctgctaacccctgtgtaacatcacagggcctcagtttccctatctgcaaaatgggatgatatggaggttcaatgagatggtggcattttgagaatggtaaagaaatgcacagggaggagatggtgact

SEQ ID NO: 23089 - DNA, 242 bp, Macaca Mulatta
agtgcttttacacacctaagtgccaccaagatagaaatgatttgctcaacagtgctctggacataaaggaattcttcgatcacaaaaatggaacccccttttcatgcttctacagtccagacagccaatctgaagatgtcattcttataaaaaagtatgaccaaatggctatcttccactgtttattttggccttcactgactctgctaggtggtgccctgattgttggcatggtgagatta

SEQ ID NO: 23090 - DNA, 301 bp, Macaca Mulatta
atggacgaagctggcagctctgcgagcggcgggggcttccgcccgggcgtggacagcctggacgaaccgcccaacagccgcatcttccttgtgatcagcaagtacacgcctgagtcggtgctgagggagcgcttctcgccttttggcgacatccaggacatctgggtggtgcgggacaagcacactaaggaatccaagggcattgctttcgtcaagttcgcccgcagctcacaggcctgcagggccatggaggagatgcatggccagtgcctcggccccaacgacaccaagcccatcaagg

SEQ ID NO: 23091 - DNA, 232 bp, Macaca Mulatta
agagaagatattatttctgtctgaaaagacaagacttaaaattccccccccttcaaaataagtgttaacttgatttagggttgttatgttagtgaagaagtttttatttatttagcagcctctactgagatatctctgattctgagttcacatgtaaagaactacaaacaatggcctgttaggactttgggggcatacatggtcataacattatcgtagaatgttgcattct

SEQ ID NO: 23092 - DNA, 696 bp, Macaca Mulatta
atggctcctctctcactgccttcactccctgcaggcactggtggtatgcgcccaggtgtacctgccacttcccgccaggtccttgctttgtatttgcacctgccccccttttgtttgtagtctaagtgacacgggtctccctctctttcctccagctgcattgctcaatcctgcaatgtgtcactgtggtgtggagctggcattctggatgatgtggcatgacctcacactgatgccattcccctcccaccaagccaacctggcttcctcctccacccatggaataagccagaatgctgaaagtgggagggaattagagcaccaaggttaaggaggcagtccctgacatttattaatggaatttctgtttctatgatgaatgtagagatttgaggtgactgcctcttaaggtgatatgtagggagatgatgaaccccagtgttttccttaatgatccatcagtttagaggaaaacatacatatacaaagtcaatattgaaaagactgcatagacctacagagtagagaggaggggaaacagatgtgcttggacttacagcagcgcaaaggctgctggagcagtgccctgagctggccctttagggatggataggattcactcagatttgtgtgggtgaatagacagagccttccagggctccaaaactgatggggttatggtggaataggggttga

SEQ ID NO: 23093 - DNA, 410 bp, Macaca Mulatta
taattgccagtaaaccacagaaagtttaaagactggcaggtacaacattatcacataagtgctgtcagtactaagtcgtggggatcaaggagactggatatttttagcacgatgtgcatgataatttatatgcttggtggctgtgctgctgattaagccgtaattaaaattcttctcatcccattggagtttttaataggagcttcctccatcaattggcagaaactaaagaagatcttataaggggcaaaagtaattacaataaaataatttgcagtagtttcgatcatagagggaatagttattaaagtcttgggagaaactagaggtatagtggtgaatactcgctgatatgaatcccagaaaaaaatttctatgagtttaatattctcttcattcccttctacgta

SEQ ID NO: 23094 - DNA, 524 bp, Macaca Mulatta
  misc_feature (1)...(524): n = A,T,C or G
aaattgcaaaaatattggagaaggtgaaacggagtgtaaagaagactcgctccctccccctacttgtgaattgtcaactaattgccaccggtggttcacctagagcccctctcacagctcaggacacactgagctccggctgggctgtcactctctggattcatttgctttgttctcttcaggtgccatcatggaagaacaggcagcagagctccttggagtgaagatgtgcacgtttgttccaaaacacacccggaacttggcaaatgagttccgctgttatgtgaattatgattctgggctggactgtgggatctaattacagatggtgacataacacgggaaggaaccctgtcacattcccctttttgcattttcctagtagatttaaaatatatactctcttcccctccccccaaactggagccgaccttgcctgattttcaaaataaagtacatgaccttcattattgtttccttanggagggcctggcctccctagagctcagtcttctgccaacctg

SEQ ID NO: 23095 - DNA, 628 bp, Macaca Mulatta
ggcttgcagtcctcttggcagacatgaggcaacgattgctcccgttcttcaccagccttctccttgtggctctgctgtttccaggattgtcccaagccagacatgttaaccactcagccaccgaggctctcagagaactccgggaaggagccactgggcaaggcacaaacaggtctcagctgctacgccacccagtgaaacgggcccccataatacggcgcatcccctattacccagaagttgaatcagatttaagaattgtcgactgcaagagaagtgaaggcttctgtcaagaatactgtaattatctggaaacgcaagggatgttccaccgggaattagaaataccatctgccttatgcagcaagggacctgcagactttttttctgccattctggtgagaaaaagcgtgacatttgctctgatccctggaataggtgttgcgtatcaaatagagatgaagaaggaaaagagaagccaaagaccgatggcagatctggaatctaaaatgtaagctcctggaaggcagggatcttgaagtatcccaagggcttaaaggaatgtgtggcttgtagtaggtgttcaataaatatttgttgaatgaatttagcaccaaaaaaaaaaaaa

SEQ ID NO: 23096 - DNA, 786 bp, Macaca Mulatta
  misc_feature (1)...(786): n = A,T,C or G
ggtgacccttcagtaagttaagataaatttttaaaagaactgtagcaaagatggaacctttgtaatttatgttgattttaataaaatcataatttaaaaaatgaaatgggaaggttgtcaggaaattaggatagctactgtagtgtaatttagaaaaactaagcaagagattctccagttgttagtgagtaagcagtctgatttgagaaatgtgtggggacaacggagaaaagttttcaaaaaactactatgtagatttctgaatgtgttttattttgatgaggaatttggtaacaactgaaagggaaaagtgcttcagccatcttttgaaaacaagttaaaattctggaacttgtatctgtaatacatcctaactcctataaaagaaaataatctgtcatagctggtgtcctttcactgaaagttttaatactgtctctaaggagagaggaaaagattattatataattttataactggcaatatttgagttagtattcggctaaaaagagacttgacttcaactgggatgaaaatgtcagtgaatttttgttgaagtagtaaaaatacagggtgacttagttaggaaacatnnnnnnnnnnnnnccnnnnnnnnnnnnnnnnngccactcctaacccaattaaaaaccgggattttttaggtaaataatcctggagggggaattttttgaaatgggggaaggttaagaacctgttatattttgggccaattagaaatattttggggaaaaaatggtaacaacccttggaaaattggtataaaat

SEQ ID NO: 23097 - DNA, 1416 bp, Macaca Mulatta
agcctctatcatgtggaaaacctctgacgccaacttctcctgctaccatgagtctgtgctgggctatcgttatgttgcagttagctggggggtggtggtggctgtgacaggcaccgtgggcaacgtgctcttcctactggccttggtcatccagcgcaagctccgtacccgattcaacctgctcatagccaacctcacactggttgatctcctctactgcacagtccttcagcccttctctgtggacacctacctccacctgcactggcgcaccggtgccaccttctgtagggcatttgggctcctcctttttgcctccaattctgtctccatcttgaccctctgcctcatcgcactgggacgctacctcctcattgcccaccctaagctttttcccaaagttttcagtgccaaggggatagtgctggcactggtgagcacctgggttgtgggtgtggccagctttgcccccctctggcctatttatatcctggtacctgtagtctgcacctgcagctttgaccgcatccgaggccggccttataccaccatcctcatgggcatctactttgtgcttggactcagcagtgttggcatcttctattgcctcatccaccgccaggtcaaacgagcagcacaggcactggaccaatacaagttgcgacaggcaagcatccactccaaccatgtggctgggactgatgaggccatgcctggtcgtttccaggagctggacagcaggttagcatcaggaggacccagtgaggggatttcatctgagtcagtcaatgctgccaccacccagaccctggaaggggactcatcagaagtgggagaccagatcaacagcaagagaactgagcagatggcagagaaaagccctccagaagcatctgccaaagcccagccaattaaaggagcccgaagagctccggattcttcatcggaatttgggaaggtgactcaaatgtgttttgctgtattcctctgctttgccctgagctacgtccccttcttgctgctcaacattctggatgcgagagtccaggctccccgggtggtccacatgcttgctgccaacctcacctggctcaacggttgcatcaaccctgtgctgtatgcagccatgaaccgccaattccgccaagcatatgcctccgttttcaaaagagggccctggagtttccgtaggctccattagaactgtgaccctagtcaccagaattcagaaccgtctcctccaggaccaaagtggccagctgataggagaataggtgaaataacacgtgcgggcattttcacaacaacctctccccagcctcccaaatcaagtctctccatcacttgatcaatgtttcagccctagactgcccaaggagtattattaactattaataaatgaattctgtgctttta

SEQ ID NO: 23098 - DNA, 1077 bp, Macaca Mulatta
  misc_feature (1)...(1077): n = A,T,C or G
cagaggaaggaaagatctactctctggtagtgaatgagacccagctggaccagccacgctcctacacggttcagctggccctgaggaaggtgtcccactacctgcctcacctgcnnnnnnnnnnnnnnnnnnnnnnnnnnnnnnnnnnnnnnnnnnnnnnnnnnnnnnnnnnnnnnnnnnnnnnnnnnnnnnnnnnnnnnnnnnnnnnnnnnnnnnnnnnnnnnnnnnnnnnnnnnnnnnnnnnnnnnnnnnnnnnnnnnnnnnnnnnnnnnnnnnnnnnnagatcctattctgtgctcttggctacaatcaccttggtctggtggatgaatttggccgaatctttatgcaaggaaataacagatacgggcagctaggaacaggggacaaaatggaccgaggggaacccacacaggnnnnnnnnnnnnnnnnnnnnnnnnnnnnnnnnnnnnnnnnnnnnnnnnnnnnnnnnnnnnnnnnnnnnnnnnnnnnnnnnnnnnnnnnnnnnnnnnnnnnnnnnnnnnnnnnnnnnnnnnnnnnnnnnnnnnnnnnnnnnnnnnnnnnnnnnnnnnnnnnnnnnncaaggtccctctgtgtgcctgcgccctctgtgccaccagggagtgcctatacatcctgtccagccacgacatcgagcagcacaccccctatcgtgacctgccagccagcagggtggtggggattcccgagcccagcctggggactggagcaccccaggaccccggggggacggcccaggcctgtgaggagtaccttagccagatccacagttgccacacgttgcaggaccgcatggagaagatgaaggagatcgtagggtggatgcccctgatggctgcacagaaagacttcttctgggaggccctggacatgctgcagaaggctgaaggaggcgggggtggtgtagggcccccagcctctgagacctaatccccctcatgctagcctagtccctggagggagtctggccccaggccagggactaaggagcaatgaccactgtgtgcatgcatgtgggaaggggttgctagggggtggagaccgctaaccagggta

SEQ ID NO: 23099 - DNA, 812 bp, Macaca Mulatta
gcacgagggactagtcgtagatatgttcgttttgaaaactatgtactgtataacattaagaaaatatttaactccctgtaacaagctccattatgaaaatcttattcctcagtgaggttatcttgctgcactctgtagcaaatttgtttaatccacattataataaaatgtcttgctgcagtgcaacaggaagctttttcagtgatctccactgtatatgtaaattacaaatgtggctgtaaaacttattccaggtattaaaggttaaattactttctgtatcttcttataacttgtaagtttgatttttaagatttcattttgtccacttgtaagaatgtcaggaatttaagaatttgtttaaattaggcatatctctgccatcacatagtattatgtcactataatgaacaattgatatttaaatagataaccaattttcagacacatttttagatttctgtgaagttgaataaacatgaaagttaatatgagtgtattattttgtttatgtaaatcaacatatatatttaaatactaaatggagaaaggcacatttgatgatttttaattttggagcctttgtttcatgaagtggaaacacgtctcagtaactttttccaaaccttttgtttaaacttctcatgcaaaatgttggcggagagaggtaccataagtattacgttacataattgcgtaactgaaacaaaataactgttataactataaactttaccaataagcacttaaatacttacgtcgccagtcgcaaactaatccatttggcaaaccttccttaagttgcctctatg

SEQ ID NO: 23100 - DNA, 703 bp, Macaca Mulatta
gggtagctgctgcagcctacgctgcctcggccactgcctgctgcgcacggagccggagcccgaccctgagtggcgccgggcccgacgtggggctcctgggtcgcggcggcgggcgggcgatgctccagcggcctgaccagccatggaggccgaggcaggcggcctggaggagctgacggacgaggagatggcggcgctgggcaaggaagagctagtgcggcgcctgcggagggaggaggcggcgcgcctggcggcactggtgcagcgtggccgcctcatgcaggaggtgaatcggcagctgcagggccacctgggcgagatccgcgaactcaagcagctcaaccggcgtctgcaggcagaaaaccgtgagctgcgcgacctctgctgcttcctggactcggagcgccagcgcgggcggcgcgccgcgcgccagtggcagctcttcgggacccaagcatcccgggcagtgcgcgaggacctgggcggctgttggcagaagctggccgagctggagggccgccaggaggagctgctgcgggagaacctggcgcttaaggagctctgcctggcgctgggcgaagaatggggcccccgcggcggccccggtggcgcggggggctcaggcgccgggccagcaccagagcttgctctgcccccgtgtgggccccgcgacttaggcgaagggagctccagcaccggcagc

SEQ ID NO: 23101 - DNA, 799 bp, Macaca Mulatta
ccatgtcttctctgtcatggcctcttctgtcttgcttgccatgtccattgatcgggcactgcgttcatctgccgacctctccactattcagctctcctcaccaacggtgtaattagcaaaatcagcgtggccattgcttttagatgcctgggtctccatctgcccctgccatttctgctggcctgcatgccctactgccgcccacaggtcctaacccattcttattgcttgcatccagatgtggctcgtttggcctgcccaggagcttggggtgcagcctatagcctatctgtggttctttcagtcatgggtttggaccccctgctgattttcttttcctatggcctgattggcaaggtgttgcaaggtgtggagtccagggaagatcgctggaaggctggtcaaacctgtgttgcccaactttctgccgtgctcctcttctatattcctatgatcctcctggcactgattagccatcttgagctgccaatcactcagcatacccatactcttctctcctatgtccatttccttcttcctccattgataaaccctattctctatagtgtcaagatgaaggagattagagaaagaatactcaataggttgcagcccaggaagatgggttgtgctcagtgaggaggatgcccctccatgtttggtggtacagggctcctgatactaaagtttctgtgagaactcagttcaccaagcatgaaatgatcattcacgtactcctaagtgcatatacatggatgtggcttcctatccctggacatatgcctgtgtatattgatga

SEQ ID NO: 23102 - DNA, 191 bp, Macaca Mulatta
gtgcacttgcaggaaagacatggtgaaaatttcaatggatatctttgtgaggaaatttcagccagacaggtatcagctttggaaacaaggaaaggatatatataccattgatcacacgaagcctacaagagcatccacccctgaagtaaaagcatggctgcagagaaagaggaaagtaagaaaagcatccc

SEQ ID NO: 23103 - DNA, 397 bp, Macaca Mulatta
agggtctgctatgtgtgacgaaagtgtcagcgccctctctgggggatccagagctgtgatttttggcaccccttgaggaggcagtgcctttaggaagggcacagtgtctttaggaagcgcacagaccctccagggcactgtacttaccactcccctggttattaagtgggtcatttcagtgtcctagccaaaatggatattctaacaacctgccaaatatgtgaagatttccaagccaataagcctttccggtgatttaaaatagacctttttcattgcaatccacagttcgcagtcccttaagaatgttgcctttgagtatgatatcctatagaaacctaaggagactgcattatttttaattgtcctggggctacacagcaggaggtaaccaacg

SEQ ID NO: 23104 - DNA, 2194 bp, Macaca Mulatta
  misc_feature (1)...(2194): n = A,T,C or G
ggctccgggcgctgaggcttccgcgcctgctggttcctcgctccggggcggggctcgcgatagcgagcgggagcagggcgcggggcgggacccgggtccgaggcgaggaagccggaagccgtgcgcggggagcctcccccttcgactgcagcctcgctcggcgccttctgcacgcctgggatcccggagcctgtctagttctgtgcgctcccgcccaggccggtgcccgccgcccgcctgcgccccaggcaggtcccaggcctccggctgnnnnnnnnnnnnnnnnnnnnnnnnnnnnnnnnnnnnnnnnnnnnnnnnnnnnnnnnnnnnnnnnnnnnnnnnnnnnnnnnnnnnnnnnnnnnnnnnnnnnnnnnnnnnnnnnnnnnnnnnnnnnnnnnnnnnnnnnnnnnnnnnnnnnnnnnnnnnnnnnnnnnnnnnnnnnnnnnnnnnnnnnnnnnnnnnnnnnnnnnnnnnnnnnnnnnnnnnnnnnnnnnnnnnnnnnnnnnnnnnnnnnnnnnnnnnnnnnnnnnnnnnnnnnnnnnnnnnnnnnnnnnnnnnnnnnnnnnnnnnnnnnnnnnnnnnnnnnnnnnnnnnnnnnnnnnnnnnnnnnnnnnnnnnnnnnnnnnnnnnnnnnnnnnnnnnnnnnnnnnnnnnnnnnnnnnnnnnnnnnnnnnnnnnnnnnnnnnnnnnnnnnnnnnnnnnnnnnnnnnnnnnnnnnnnnnnnnnnnnnnnnnnnnnnnnnnnnnnnnnnnnnnnnnnnnnnnnnnnnnnnnnnnnnnnnnnnnnnnnnnnnnnnnnnnnnnnnnnnnnnnnnnnnnnnnnnnnnnnnnnnnnnnnnnnnnnnnnnnnnnnnnnnnnnnnnnnnnnnnnnnnnnnnnnnnnnnnnnnnnnnnnnnnnnnnnnnnnnnnnnnnnnnnnnnnnnnnnnnnnnnnnnnnnnnnnnnnnnnnnnnnnnnnnnnnnnnnnnnnnnnnnnnnnnnnnnnnnnnnnnnnnnnnnnnnnnnnnnnnnnnnnnnnnnnnnnnnnnnnnnnnnnnnnnnnnnnnnnnnnnnnnnnnnnnnnnnnnnnnnnnnnnnnnnnnnnnnnnnnnnnnnnnnnnnnnnnnnnnnnnnnnnnnnnnnnnnnnnnnnnnnnnnnnnnnnnnnnnnnnnnnnnnnnnnnnnnnnnnnnnnnnnnnnnnnnnnnnnnnnnnnnnnnnnnnnnnnnnnnnnnnnnnnnnnnnnnnnnnnnnnnnnnnnnnnnnnnnnnnnnnnnnnnnnnnnnnnnnnnnnnnnnnnnnnnnnnnnnnnnnnnnnnnnnnnnnnnnnnnnnnnnnnnnnnnnnnnnnnnnnnnnnnnnnnnnnnnnnnnnnnnnnnnnnnnnnnnnnnnnnnnnnnnnnnnnnnnnnnnnnnnnnnnnnnnnnnnnnnnnnnnnnnnnnnnnnnnnnnnnnnnnnnnnnnnnnnnnnnnnnngccccagcacccactccccagaggggaggcctccacctctgctgcctgggggtcccatgtgtaaggcagctgcacctgcacctgcaccgagctccctcctggaccagctgtgcctctgccctgcaccctctgtccgcaccaccgttgccctgacagcgccagatatcacactggtcctgccccctgatgtcatccaacaggaagggtcagccctgagggaggagacagaagcctgggccaggnnncaggccacatgagtccctggcccgggaggaggccctcactgcacttgggaagctcctgtacctcttagatgggatgctggatgggcaggtnnnnnnnnnnnnnnnnnnnnnnnnnnnnnnnnnnnnnnnnnnnnnnnnnnnnnnnnnnnnnnnnnnnnnnnnnnnnnnnnnnnnnnnnnnnnnnnnnnnnnnnnnnnnnnnnnnnnnnnnnnnnnnnnnnnnnnnnnnnnnnnnnnnnnnnnnnnnnnnnnnnnnnnnnnnnnnnnnnnnnnnnnnnnnnnnnnnnnnnnnnnnnnnnnnnnnnnnnnnnnnnngatgactggtggcttcctgagctgcatcttgggcttggtactgcccctggcctatggcttccagcctgacctggtgctagtggcgctagggcctggccatggcctgcagggcccccacgctgcactcctggctgccatgcttcggggactggcagggggccgagtcctggccctccaggagga

SEQ ID NO: 23105 - DNA, 385 bp, Macaca Mulatta
cagatgacttcgaggccctgtgcaatgtgctacgcccccctgcatatagccccccgcgaccaggtggctttggactcccctacgagtacggcccagacttaggcccaccttaccagggcctcccgtatgggcctgagttgtacccgccacctgcgctaccctacgacccctacccaccgccacctgggcccttcgcccgccgggaggctccttacggggcaccccgcttcgacatgccagactttgaggacgatggtggcccctatggcgaatctgaggctcctgcgccacccggcccgggcacccgctggccctatcggtcccgggacacccgccgctccttcccagagcccgaggagcttcctgaaggtggaagttatgctgg

SEQ ID NO: 23106 - DNA, 3227 bp, Macaca Mulatta
  misc_feature (1)...(3227): n = A,T,C or G
ggatcgacgattcaatgatgaaatcgacaagctaactggatacaagacgaaatcattattgtgcatgcctatccgaagcagtgatggtgagattattggtgtggcccaagcgataaataagattcctgaaggagctccatttactgaagatgatgaaaaagtnnnnnnnnnnnnnnnnnnnnnnnnnnnnnnnnnnnnnnnnnnnnnnnnnnnnnnnnnnnnnnnnnnnnnnnnnnnnnnnnnnnnnnnnnnnnnnnnnnnnnnnnnnnnnnnnnnnnnnnnnnnnnnnnnnnnnnnnnnnnnnnnnnnnnnnnnnnnnnnnnnnnnnnnnnnnnnnnnnnnnnnnnnnnnnnnnnnnnnnnnnnnnnnnnnnnnnnnnnnnnnnnnnnnnnnnnnnnnnnnnnnnnnnnnnnnnnnnnnnnnnnnnnnnnnnnnnnnnnnnnnnnnnnnnnnnnnnnnnnnnnnnnnnnnnnnnnnnnnnnnnnnnnnnnnnnnnnnnnnnnnnnnnnnnnnnnnnnnnnnnnnnnnnnnnnnnnnnnnnnnnnnnnnnnnnnnnnnnnnnnnnnnnnnnnnnnnnnnnnnnnnnnnnnnnnnnnnnnnnnnnnnnnnnnnnnnnnnnnnnnnnnnnnnnnnnnnnnnnnnnnnnnnnnnnnnnnnnnnnnnnnnnnnnnnnnnnnnnnnnnnnnnnnnnnnnnnnnnnnnnnnnnnnnnnnnnnnnnnnnnnnnnnnnnnnnnnnnnnnnnnnnnnnnnnnnnnnnnnnnnnnnnnnnnnnnnnnnnnnnnnnnnnnnnnnnnnnnnnnnnnnnnnnnnnnnnnnnnnnnnnnnnnnnnnnnnnnnnnnnnnnnnnnnnnnnnnnnnnnnnnnnnnnnnnnnnnnnnnnnnnnnnnnnnnnnnnnnnnnnnnnnnnnnnnnnnnnnnnnnnnnnnnnnnnnnnnnnnnnnnnnnnnnnnnnnnnnnnnnnnnnnnnnnnnnnnnnnnnnnnnnnnnnnnnnnnnnnnnnnnnnnnnnnnnnnnnnnnnnnnnnnnnnnnnnnnnnnnnnnnnnnnnnnnnnnnnnnnnnnnnnnnnnnnnnnnnnnnnnnnnnnnnnnnnnnnnnnnnnnnnnnnnnnnnnnnnnnnnnnnnnnnnnnnnnnnnnnnnnnnnnnnnnnnnnnnnnnnnnnnnnnnnnnnnnnnnnnnnnnnnnnnnnnnnnnnnnnnnnnnnnnnnnnnnnnnnnnnnnnnnnnnnnnnnnnnnnnnnnnnnnnnnnnnnnnnnnnnnnnnnnnnnnnnnnnnnnnnnnnnnnnnnnnnnnnnnnnnnnnnnnnnnnnnnnnnnnnnnnnnnnnnnnnnnnnnnnnnnnnnnnnnnnnnnnnnnnnnnnnnnnnnnnnnnnnnnnnnnnnnnnnnnnnnnnnnnnnnnnnnnnnnnnnnnnnnnnnnnnnnnnnnnnnnnnnnnnnnnnnnnnnnntctttgaacttgtcagtaaaggagaatacgattggaacatcaaaaaccatcgtgatgtatttcnnnnnnnnnnnnnnnnnnnnnnnnnnnnnnnnnnnnnnnnnnnnnnnnnnnnnnnnnnnnnnnnnnnnnnnnnnnnnnnnnnnnnnnnnnnnnnnnnnnnnnnnnnnnnnnnnnnnnnnnnnnnnnnnnnnnnnnnnnnnnnnnnnnnnnnnnnnnnnnnnnnnnnnnnnnnnnnnnnnnnnnnnnnnnnnnnnnnnnnnnnnnnnnnnnnnnnnnnnnnnnnnnnnnnnnnnnnnnnnnnnnnnnnnnnnnnnnnnnnnnnnnnnnnnnnnnnnnnnnnnnnnnnnnnnnnnnnnnnnnnnnnnnnnnnnnnnnnnnnnnnnnnnnnnnnnnnnnnnnnnnnnnnnnnnnnnnnnnnnnnnnnnnnnnnnnnnnnnnnnnnnnnnnnnnnnnnnnnnnnnnnnnnnnnnnnnnnnnnnnnnnnnnnnnnnnnnnnnnnnnnnnnnnnnnnnnnnnnnnnnnnnnnnnnnnnnnnnnnnnnnnnnnnnnnnnnnnnnnnnnnnnnnnnnnnnnnnnnnnnnnnnnnnnnnnnnnnnnnnnnnnnnnnnnnnnnnnnnnnnnnnnnnnnnnnnnnnnnnnnnnnnnnnnnnnnnnnnnnnnnnnnnnnnnnnnnnnnnnnnnnnnnnnnnnnnnnnnnnnnnnnnnnnnnnnnnnnnnnnnnnnnnnnnnnnnnnnnnnnnnnnnnnnnnnnnnnnnnnnnnnnnnnnnnnnnnnnnnnnnnnnnnnnnnnnnnnnnnnnnnnnnnnnnnnnnnnnnnnnnnnnnnnnnnnnnnnnnnnnnnnnnnnnnnnnnnnnnnnnnnnnnnnnnnnnnnnnnnnnnnnnnnnnnnnnnnnnnnnnnnnnnnnnnnnnnnnnnnnnnnnnnnnnnnnnnnnnnnnnnnnnnnnnnnnnnnnnnnnnnnnnnnnnnnnnnnnnnnnnnnnnnnnnnnnnnnnnnnnnnnnnnnnnnnnnnnnnnnnnnnnnnnnnnnnnnnnnnnnnnnnnnnnnnnnnnnnnnnnnnnnnnnnnnnnnnnnnnnnnnnnnnnnnnnnnnnnnnnnnnnnnnnnnnnnnnnnnnnnnnnnnnnnnnnnnnnnnnnnnnnnnnnnnnnnnnnnnnnnnnnnnnnnnnnnnnnnnnnnnnnnnnnnnnnnnnnnnnnnnnnnnnnnnnnnnnnnnnnnnnnnnnnnnnnnnnnnnnnnnnnnnnnnnnnnnnnnnnnnnnnnnnnnnnnnnnnnnnnnnnnnnnnnnnnnnnnnnnnnnnnnnnnnnnnnnnnnnnnnnnnnnnnnnnnnnnnnnnnnnnnnnnnnnnnnnnnnnnnnnnnnnnnnnnnnnnnnnnnnnnnnnnnnnnnnnnnnnnnnnnnnnnnnnnnnnnnnnnnnnnnnnnnnnnnnnnnnnnnnnnnnnnnnnnnnnnataggaagccaagtttacaataggtaagaataaactgtattaagtagatgtaatgactagaaagctgctttgctccctgttntgagaaattgtggacatagtatatcttatccaaagaacgctgggctagaagatagatttctatccctagctttggcattattgactagattgactggaacaagtcacttcatttctccaagcttgtttccttatttgtcaaattagattacactaggaaatgattcttgaacatgttttaaccttacaactctttgttcaaataaatctttcaacgaatccccaacatataaaacatcaaaa

SEQ ID NO: 23107 - DNA, 3823 bp, Macaca Mulatta
  misc_feature (1)...(3823): n = A,T,C or G
ccgcggcgcgcattgcggagggcgcggagcgcaggagctgccgcctgccgggnnnnnnnnnnnnnnnnnnnnnnnnnnnnnnnnnnnnnnnnnnnnnnnnnnnnnnnnnnnnnnnnnnnnnnnnnnnnnnnnnnnnnnnnnnnnnnnnnnnnnnnnnnnnnnnnnnnnnnnnnnnnnnnnnnnnnnnnnnnnnnnnnnnnnnnnnnnnnnnnnnnnnnnnnnnnnnnnnnnnnnnnnnnnnnnnnnnnnnnnnnnnnnnnnnnnnnnnnnnnnnnnnnnnnnnnnnnnnnnnnnnnnnnnnnnnnnnnnnnnnnnnnnnnnnnnnnnnnnnnnnnnnnnnnnnnnnnnnnnnnnnnnnnnnnnnnnnnnnnnnnnnnnnnnnnnnnnnnnnnnnnnnnncagcccaacagcagctaccagaacaacatcacgcccttcaacaatgagaacctgaagaagtcgctgtcgtgcgccaacctgtccacattcgcccagcccccaccggcccttccgcccgcacccccggccagccagctctcgggctcccagaccgggggctcctcctcggtcaagaaagcccctcaccctgccgtcacctccgcagggacgcccaaacgggtcatcgtccaggcgtccaccagcgagctgctgcgctgcctgggtgagtttctctgccgccggtgctaccgcctgaagcacctgtcccccacggaccccgtgctctggctgcgcagtgtggaccgctcgctgcttctgcagggctggcaggaccagggcttcatcacgccggccaacgtggtcttcctctacatgctctgcagggatgttatctcctccgaggtgggctcggatcacgagctccaggccgtcctgctgacgtgcctgtacctctcctactcctacatgggcaacgagatctcctacccgctcaagcccttcctggtggagagctgcaaggaggccttttgggaccgttgcctctctgtcatcaacctcctgagctnnnnnnnnnnnnnnnnnnnnnnnnnnnnnnnnnnnnnnnnnnnnnnnnnnnnnnnnnnnnnnnnnnnnnnnnnnnnnnnnnnnnnnnnnnnnnnnnnnnnnnnnnnnnnnnnnnnnnnnnnnnnnnnnnnnnnnnnnnnnnnnnnnnnnnnnnnnnnnnnnnnnnnnnnnnnnnnnnnnnnnnnnnnnnnnnnnnnnnnnnnnnnnnnnnnnnnnnnnnnnnnnnnnnnnnnnnnnnnnnnnnnnnnnnnnnnnnnnnnnnnnnnnnnnnnnnnnnnnnnnnnnnnnnnnnnnnnnnnnnnnnnnnnnnnnnnnnnnnnnnnnnnnnnnnnnnnnnnnnnnnnnnnnnnnnnnnnnnnnnnnnnnnnnnnnnnnnnnnnnnnnnnnnnnnnnnnnnnnnnnnnnnnnnnnnnnnnnnnnnnnnnnnnnnnnnnnnnnnnnnnnnnnnnnnnnnnnnnnnnnnnnnnnnnnnnnnnnnnnnnnnnnnnnnnnnnnnnnnnnnnnnnnnnnnnnnnnnnnnnnnnnnnnnnnnnnnnnnnnnnnnnnnnnnnnnnnnnnnnnnnnnnnnnnnnnnnnnnnnnnnnnnnnnnnnnnnnnnnnnnnnnnnnnnnnnnnnnnnnnnnnnnnnnnnnnnnnnnnnnnnnnnnnnnnnnnnnnnnnnnnnnnnnnnnnnnnnnnnnnnnnnnnnnnnnnnnnnnnnnnnnnnnnnnnnnnnnnnnnnnnnnnnnnnnnnnnnnnnnnnnnnnnnnnnnnnnnnnnnnnnnnnnnnnnnnnnnnnnnnnnnnnnnnnnnnnnnnnnnnnnnnnnnnnnnnnnnnnnnnnnnnnnnnnnnnnnnnnnnnnnnnnnnnnnnnnnnnnnnnnnnnnnnnnnnnnnnnnnnnnnnnnnnnnnnnnnnnnnntgaataatgcagtgcagtcgccctgtggcaaatgccaggacagctgcaggtgcccattagcaacgcctgccttctgggcaaggtgagggatgccataccttgagaccaagccggtgcccacctaagggctaaggcctcttgctggtgcacatgacatttgtcctgcagagctggggggaaggcgatgtggtggccccacccccacccctgttaatttaaagctgtttccaaacagttgagtttcttctaaagaggaagacatacaatacagggaccagtgagacagctggatcttggagacaattacaagacgggagtgagactcctgattgctctggaagcctgctgatttctacaactgatcatttgccgctgctggttttggtttccaccttcccctactggctgtaaaaacacaaatgtgtactttattgattttctttctcattctcccgtattggtggcttgggacttgggagattgagaaagccttcctccatggcccatcactctgctgtnnnnnnnnnnnnnnnnnnnnnnnnnnnnnnnnnnnnnnnnnnnnnnnnnnnnnnnnnnnnnnnnnnnnnnnnnnnnnnnnnnnnnnnnnnnnnnnnnnnnnnnnnnnnnnnnnnnnnnnnnnnnnnnnnnnnnnnnnnnnnnnnnnnnnnnnnnnnnnnnnnnnnnnnnnnnnnnnnnnnnnnnnnnnnnnnnnnnnnnnnnnnnnnnnnnnnnnnnnnnnnnnnnnnnnnnnnnnnnnnnnnnnnnnnnnnnnnnnnnnnnnnnnnnnnnnnnnnnnnnnnnnnnnnnnnnnnnnnnnnnnnnnnnnnnnnnnnnnnnnnnnnnnnnnnnnnnnnnnnnnnnnnnnnnnnnnnnnnnnnnnnnnnnnnnnnnnnnnnnnnnnnnnnnnnnnnnnnnnnnnnnnnnnnnnnnnnnnnnnnnnnnnnnnnnnnnnnnnnnnnnnnnnnnnnnnnnnnnnnnnnnnnnnnnnnnnnnnnnnnnnnnnnnnnnnnnnnnnnnnnnnnnnnnnnnnnnnnnnnnnnnnnnnnnnnnnnnnnnnnnnnnnnnnnnnnnnnnnnnnnnnnnnnnnnnnnnnnnnnnnnnnnnnnnnnnnnnnnnnnnnnnnnnnnnnnnnnnnnnnnnnnnnnnnnnnnnnnnnnnnnnnnnnnnnnnnnnnnnnnnnnnnnnnnnnnnnnnnnnnnnnnnnnnnnnnnnnnnnnnnnnnnnnnnnnnnnnnnnnnnnnnnnnnnnnnnnnnnnnnnnnnnnnnnnnnnnnnnnnnnnnnnnnnnnnnnnnnnnnnnnnnnnnnnnnnnnnnnnnnnnnnnnnnnnnnnnnnnnnnnnnnnnnnnnnnnnnnnnnnnnnnnnnnnnnnnnnnnnnnnnnnnnnnnnnnnnnnnnnnnnnnnnnnnnnnnnnnnnnnnnnnnnnnnnnnnnnnnnnnnnnnnnnnnnnnnnnnnnnnnnnnnnnnnnnnnnnnnnnnnnnnnnnnnnnnnnnnnnnnnnnnnnnnnnnnnnnnnnnnnnnnnnnnnnnnnnnnnnnnnnnnnnnnnnnnnnnnnnnnnnnnnnnnnnnnnnnnnnnnnnnnnnnnnnnnnnnnnnnnnnnnnnnnnnnnnnnnnnnnnnnnnnnnnnnnnnnnnnnnngaattattcatagctgtatatttgaaactgctaattacacacgtgtgatgtatgttggttttttagtgcaatttcttctgtagctattctttgaccaaactgtgggtattgttaatattaatttatatttgtctcattttgtatgtatgtgtagtgtgtttgtatgtgtggtttataatctgacaaagtcatgaagctcagtttggctctaatttaattccccttcccttatttttatttatttttgtactgtgctgattcaataaaatgcactgaccatcc

SEQ ID NO: 23108 - DNA, 1207 bp, Macaca Mulatta
  misc_feature (1)...(1207): n = A,T,C or G
gcagatgagattgtggggctcgccagcatcccccacggcttctgagtagctcaggagtggagtcagcaccacgccaggctccccgcgcctgccttgccctcacttgttcctgctctctaacagaggcagcatggtccgcagggcaccatggggccggacagagtgacagcacgagaactgtgcgagaacgacgacctggccaccagcctcgtcctggacccctacctcggtttccgcacccataagatgaacgtcaggnnnnnnnnnnnnnnnnnnnnnnnnnnnnnnnnnnnnnnnnnnnnnnnnnnnnnnnnnnnnnnnnnnnnnnnnnnnnnnnnnnnnnnnnnnnnnnnnnnnnnnnnnnnnnnnnnnnnnnnnnnnnnnnnnnnnnnnnnnnnnnnnnnnnnnnnnnnnnnnnnnnnnnnnnnnnnnnnnnnnnnnnnnnnnnnnnnnnnnnnnnnnnnnnnnnnnnnnnnnnnnnnnnnnnnnnnnnnnnnnnnnnnnnnnnnnnnnnnnnnnnnnnnnnnnnnnnnnnnnnnnnnnnnnnnnnnnnnnnnnnnnnnnnnnnnnnnnnnnnnnnnnnnnnnnnnnnnnnnnnnnnnnnnnnnnnnnnnnnnnnnnnnnnnnnnnnnnnnnnnnnnnnnnnnnnnnnnnnnnnnnnnnnnnnnnnnnnnnnnnnnnnnnnnnnnnnnnnnnnnnnnnnnnnnnnnnnnnnnnnnnnnnnnnnnnnnnnnnnnnnnnnnnnnnnnnnnnnnnnnnnnnnnnnnnnnnnnnnnnnnnnnnnnnnnnnnnnnnnnnnnnnnnnnnnnnnnnnnnnnnnnnnnnnnnnnnnnnnnnnnnnnnnnnnnnnnnnnnnnnnnnnnnnnnnnnnnnnccgcctgccaacccctgcgcctgccagcctgtagcgcccgcccagacacctcacccctctggctccagtggctgcctcagccccagccccgagtgcggtcccggaagcgccgacgcccccggccccggagggccccagtgctctccacccaccacgccgcccgcatctccctgcaccgatggggaggctgtggcccccactgccgcctgcgaggagaggccctggtggccctgggccagcccccccgtgcccgctgggttccccagcaggactggcactgggcccggcgctatgggctgccttacgtggtgcgtgtggaccttcgtcgcctgg

SEQ ID NO: 23109 - DNA, 600 bp, Macaca Mulatta
  misc_feature (1)...(600): n = A,T,C or G
atataaaggaaagagttatcgagctactgttgagatagtgaaaacagcagatcgggtgactgaattctgccggcaaacctgtatcaaactggaatgctgtcctaacctcttcggtccacggatggttctggataagtgttctgagaactgttctgtacttacaaagaccaaatacnnnnnnnnnnnnnnnnnnnnnnnnnnnnnnnnnnnnnnnnnnnnnnnnnnnnnnnnnnnnnnnnnnnnnnnnnnnnnnnnnnnnnnnnnnnnnnnnnnnnnnnnnnnnnnnnnnnnnnnnnnnnnnnnnnnnnnnnnnnnnnnnnnnnnnnnnnnnnnnnnnnnnnnnnnnnnnnnnnnnnnnnnnnnnnnnnnnnnnnnnnnnnnnnnnnnnnnnnnnnnnnnnnnnnnnnnnnnnnnnnnnnnnnnnnnnnnnnnnnnnnnnnnnnnnnnnnnnnnnnnnnnnnnnnnnnnnnnnnnnnnnnnnnnnnnnnnnnnnnnnnnnnnnnnnnnnnnnnnnnnnnnnnnnnnnnnnnnnnnnnnnnnnnnnnnnnnnnnnnnnnnnnnnnnnnnnnnnnngatgaaaataaacctccttcaccaaag

SEQ ID NO: 23110 - DNA, 261 bp, Macaca Mulatta
  misc_feature (1)...(261): n = A,T,C or G
ggaatggtctggaacacggacctggtggagaccctggagctgcagaacctgatgctgtgtgcgctgcagaccatctacggagcagaggcgcggaaggagtcacggggcgcacacgccagggaagactacaaggtgcnnnnnnaggtgcggattgatgagtacgattactccaagcccatccaggggcaacagaagaagccttttgaggagcactggaggaagcacaccctgtcctatgtggacgtcagcactgggaaggtc

SEQ ID NO: 23111 - DNA, 765 bp, Macaca Mulatta
ggggaataaagatggaaaaatttgtctttgacatcttccagtttgcaaagaagtttgtggtgtatgaagtattacgggaagatgagttttccccactaaagaatgctgacagtcagaatgggaaggacaaccctactactgcaaggcatgctttgatgtcccttcatcattgctgggtccttaatgcagggggccacttcatagatgaaaatggctctcgccttccagcaattccccgtgctacaaatgggaagtcagagaccatcacagctgatgtcaatcacaacttgaaggatgccaatgatgtaccaatccagtgtgaaatctctcctcttatttcctatgctggagaaggattagaaagttatgtggcagataaagaatttcatgcgcctctaatcatcgatgagaatggagttcatgagctggtgaaaaatggtatttgaaccagataccaagttttgtttgccacaataggaatagcttttatttttgatagaccaactgtgaacctacaagacctcttggacaaccgaagtttaaatatccacagggttttattttgctcgttgaactcttacagctattgcacacttcccgagatccagatgactcaactgcagatagcatttttatgattcccaactcattgaaggtcttatttatataatttttttccaagccaaggagactattggccatccaggaaaatttggtacagctgaaatacaggcagggagtttcaacatcagttttacttgggat

SEQ ID NO: 23112 - DNA, 1234 bp, Macaca Mulatta
gggcgtgggtgctggggggcgttcatcttcagcctggtgtgggccttttaaacatataacataaaaatggcttccaaaagagctctggtcatcctggctaaaggagcagaggaaatggagacggtcatccctgtagatgtcatgaggcgagctgggattaaggtcaccgttgcaggtctggctggaaaagacccagtacagtgtagccgtgatgtggtcatttgtcctgatgccagtcttgaagatgcaaaaaaagagggaccgtatgatgtggtggttctaccaggaggtaatctgggtgcacagaatttatctgagtctgctgccgtgaaggagatactgaaggagcaggaaaaccggaagggcctgatagccgccatctgtgcaggtcctactgctcttttggctcatgaaataggttttggaagtaaagttaccacacaccctcttgctaaagacaaaatgatgaatggaggtcattacacctactctgagaatcgtgtggaaaaggacggcctgattcttacaagccgggggcctgggaccagcttcgagtttgcacttgcaattgttgaagccctgaacggcaaggaggtggcggctcaagtgaaggctccacttgttcttaaagactagagcagcgaactgtgatgatcacttagagaaacaggccattaggaatccattctcactatggttcgctctaaacaaaacaatgggtaggtttaatggtgttcagaaagcggctgtcactactgcttttgcgggaagtatagttgtgaactcacaacgacacagagatttctcagcctacaaattgtgtctatacatttctaaaccttgtttgcagaataaacagggcattttagcttggacgcattcccctgggtctaggggattcttgtcggccccccttgggccctggaagaaacttttctaaaccattcccattggcggccggggccccataaaggcacagggaactatggtcctaagtctgtcctcctcacggacacctcgggttccccgaccaatggccctggaacatccccaccccaacagaaaaacacccccggcggtacaaacctaagcgtgttctcgaacaaaacatcccacaaaggagaggtttcacggagcggcgcttttcatgctgggagacacatgcaccccgcggagagcgtgccacacgcgccaagcgtcgtggtacctgcgcgaatatgccaaccgccgcccc

SEQ ID NO: 23113 - DNA, 282 bp, Macaca Mulatta
  misc_feature (1)...(282): n = A,T,C or G
gggtggtggggacagaggcggctttggccctggcaagatggattccaggggtgagcacagacaggatcgcagggagaggccgtattaattagcctggcttcccagattctggaacagctttttgtcctgtacccagtgttaccctcgttattttgtaaccttccaattcctgatcacccaagggtttttttgtgtcggactatgtaattgtaactatacctctggttcccattaaaaatgaccattttagcnnnnnnnnnnnnnnnnnnnnnnnnnnnnnnn

SEQ ID NO: 23114 - DNA, 573 bp, Macaca Mulatta
ctcccaccccagactctcccactccagaatgtacaatcctgtctctgtacctctaactggcagcagattaaattttgtcatttatctctgatggcattttgaggaaaaagaatgtccacatacagtttttgcaagatcttttctccaaaccagttagttagagccagtgacgcctctgtgttctggggtggaatctgtgctgtctaggtttgcgcttctagccatgccccgttcccgcccccaccatgcctctttgcattgcccattttccagatgggtattctattgaggacccaggcccacccaggcatttcatctctaagcctggcagtgccggggggaaatgtgtttctgtgtatatagctcctcttgtccaccctgctttcggaagtgctgtggtctgggggtcttcgtaataaacttcatttgcaattcatatcgtgtgctgtctgcgtgatgtcaaatgttggtggaagtgggcagccacagacaagggaggtttgggcatgaaggaggggctcctgggtgaggagtgtgcctccctgagggaagcccagacgccggcctctggac

SEQ ID NO: 23115 - DNA, 1260 bp, Macaca Mulatta
  misc_feature (1)...(1260): n = A,T,C or G
atttaaatgtgtgtttgtggggaaaatggctgcgcaggtcggagcggtgcgcgtagtacgggcggtggcggcgcaggaggagccggacaaagaggggaaggagaaacctcctgctggggtctccccgcggggagtgaaacggcagcgccgatctagcagtggggggtctcaggagaagcggggacggccgagccaggagccctctctcgctccccctcaccggcggcgtcgcagccgccaacatcctgggccgctgccgccaacgaatgcagccccaactgtcccaggccctgttgagcctcttctcctgccgcctccgccgccaccttcgctggcacccgccgggcccgctgtcgctgcccctctcccggccccaagcacctcggccctcttcaccttctcgcctctgacggtgagcgcggccgggcccaagcataagggccacaaggagcggcacaagcaccatcaccaccgcggctccgatggtgaccccagctcctgcggaacggatctcaagcacaaggacaagcaggaaaacggcgagaggactggaggggtgcctctgatcaaagcccccaagagagnnnnnnnnnnnnnnnnnnnnnnnnnnnnnnnnnnnnnnnnnnnnnnnnnnnnnnnnnnnnnnnnnnnnnnnnnnnnnnnncaccgagaagacatgcgaggaagacgccttaaaatgtacaataaggaagttcaaaccgtctgtgctggcctgacccgcatcagtaaagaaattctcacccaaggacaaataaatagcacttcaggacttaataaggagtccttcaggtatctgaaagatgaacagctgtgccgattaaatttgggcatgcaagaatatcgggtaccccagggagtacagacaccttttatgactcaccaggaacattctattcgtagaaatttcttaaaaacaggtactaaatttagcaactttattcatgaggaacaccagtccaatggtggtgctcttgtccttcatgcttacatggatgaactctcatttttgtctccaatggagatggagagattttctgaggagtttcttgctttgacattcagtgaaaatgagaaaaatgctgcttactatgctttagcaatagtgcatggagcggctgcttatctcccagacttcttggactactttgcttttaatttccccaacactccagtgaaaatggaaattctgggcaagaaagatattgaaacaaccaccatttcaaattttcacactcaggt

SEQ ID NO: 23116 - DNA, 362 bp, Macaca Mulatta
ctcttatcttcagtggagcttaggagaggctcccactcccacgggccatcgagggcccagcacgactgagcgactgaaaaaccgtagccatagatcctgtccacctccactcccctctgactcctcagcctttcccagcttcctccccttgctacagcctctgccctggtttgggctatgtcagatccaaaaacatcctgaacctctgtctgtaaaatgagttgtgtctgtactttgatgcgggtggtggcaggggccagctgaatgtgctaagcggggcggtggaaagggtagtaaatgtgctggggcaaactgacaaatcttcccatccatttcaccacccatccccttccaggccgcgc

SEQ ID NO: 23117 - DNA, 956 bp, Macaca Mulatta
acccagaggtggggtgtgtgtcatagtgtgtgggcttcaggggctagcctgaccagtgcatttcaaactatgcaacagaaagactctgaggaccacacctgaaaacttacaacttttctaccctgagcatcgatttggcatctgccattggtctgtcctgtaaacaaacctgaacctccctaccatgtgacctgcaggctctggagacactgtgaacctctgggcagctaaaaggaccctggtccacacctacccttgcatggcctagatcagggcttctgcccagggcctgttccttaaaggacaagggccaccctgggaacctctttcagcagctcctccgccagaggagccccagggaagtgagattcagactcagtgttggaggggagacgaggaggacagtgacacactcgatttgagaaaggaaggagacaaagcctacttgggcctggtggctctggagagtctcttgcatctcaatctctctttgttgcttttcacattctccaaaccccccactcccagccaacaggggaagcagatggaggccgtctggaagaccgaggtggtctcctccagttacgcaatagaaaaaaagacccctgccagccttccctgggaccagctgaggggacacccagatattccccggctgttgacactggacgtgtagtcctcctaccacaaaagcctgaacttcctgaaggcccagtaaggtgcgaggctgatggtcaatgtggattctccccaataaatctttctccaggctttaacaatgacctcatttactatcccacaccagacagagagaggctaacctggttcctctgctaggcggatgtaagcagagtccctgtgccaacagcacttcagttctagtgaagggtttccttagtgtctcagaggccaccaggggggcttttccttcacactggcctcctgagctgcacatg

SEQ ID NO: 23118 - DNA, 520 bp, Macaca Mulatta
  misc_feature (1)...(520): n = A,T,C or G
gcccagagccctaagatcacaaactactatggccggaacctcctcggctctccctctgcagagttccttgccctaacagaatgttaccacctgaacagtcctcggtgaatctgagaggagaggatggggtgaggcagcagcaccagctgtactactggaagggagcttttggtggtagatcccctggtgtctccaacctgaccaggtggacagagctcagagaggcccacatcgctagcgaggtgataggacatctggcttgccacaaagctctgtttgaccagacatatcttagctgagggatgtccaaacatcagaatgtgaggccaaccttctaccagagttaaacttttgacaagggaacaaatctcaaactgatccgtcagtcatgtagctagctgtagagcttgcaacttaatagcagcagctgcccaatgccatgtgaagtaacaaactggnnnnnnnnnnnnnnnnnnnnnncagttttaatgttatgtgtaatgtatttaaacccttattt

SEQ ID NO: 23119 - DNA, 1154 bp, Macaca Mulatta
  misc_feature (1)...(1154): n = A,T,C or G
tcacaaatgagggaaaacgtcaggctgttacaattccatgcagtatttacatacatttactttggcagagtttatgccctccccttgttttcttgctttattcggagcaagtttgaaggggaaaatttgtgctgctgttagtgcaactgctgtgtatgttgagccactgttgtcatgccagccaggtgcaaaggcagcttagctactgaggtagcgaatgttctgaggacattctagacaacagcttagttcctttttcaggctcatttgcttttgcttttttgttgaatgattccaatcgtaaataaagcttttaataattttgtgaattttttggttgttgttccctgaactactgtctatatttaaaattagatggaatccaaagatacatgggattaatagtatatttttttattcttgattaggtttgggttattgaactattttttacttttgagaccacaaccatattcagtatcataccgtaatgtgtcatgctgtagacacaagaaaaacaacagtttgagggaatattgtataagatgatgtgccctgttaaaggaagaggcaaaatagtcaaacccaggttagtttacacttaatgctagagaggctcttgaaacattattacgttttgaggaaagactctctagatatattcctaatgtaccagtccataactataggaagctaaaacaccaatgtggaattcatgtcttccgatacatgtatatctctataaacgaaggatcagttgataacgcaagccttaatgccgtcagaaaaacttgttcctcacgacccggctaacgggctctgcacagttgcacccacatcttatccacaactcgattcgtgttcacacacgttatgtacacatagaaggcaagaacaaactacaatgaatntcctctccgtgtcaccttgatccccgcgcgagcacgaaaaactaacagacacaaaagaacaaacaacaatcaaaacgatacagaaggcaaacaaatgaagaatacagagtagaagagcatgaacaacgcgcagaggggaggggacaaaagcaggagcaggaaagaggaagggagaggcagagagaggggaggcgactaggagagagaaagacggggagaacggaagagggagcaagcggggga

SEQ ID NO: 23120 - DNA, 105 bp, Macaca Mulatta
aggatgctggatgagtactttgaggagcagatgaaggagatcatccgaatgtgttcccaccaccgccagaccatgctcttctcagccaccatgacagacgaggtg

SEQ ID NO: 23121 - DNA, 1489 bp, Macaca Mulatta
  misc_feature (1)...(1489): n = A,T,C or G
aggtacagcaggtacagactgtgcagcaggtacaacatgtctatccagctcaggtgcagtatgtggaaggaagcgatactgtctataccaatggagcaatnnnnnnnnnnnnnnnnnnnnnnnnnnnnnnnnnnnnnnnnnnnnnnnnnnnnnnnnnnnnnnnnnnnnnnnnnnnnnnnnnnnnnnnnnnnnnnnnnnnnnnnnnnnnnnnnnnnnnnnnnnnnnnnnnnnnnnnnnnnnnnnnnnnnnnnnnnnnnnnnnnnnnnnnnnnnnnnnnnnnnnnnnnnnnnnnnnnnnnnnnnnnnnnnnnnnnnnnnnnnnnnnnnnnnnnnnnnnnnnnnnnnnnnnnnnnnnnnnnnnnnnnnnnnnnnnnnnnnnnnnnnnnnnnnnnnnnnnnnnnnnnnnnnnnnnnnnnnnnnnnnnnnnnnnnnnnnnnnnnnnnnnnnnnnnnnnnnnnnnnnnnnnnnnnnnnnnnnnnnnnnnnnnnnnnnnnnnnnnnnnnnnnnnnnnnnnnnnnnnnnnnnnnnnnnnnnnnnnnnnnnnnnnnnnnnnnnnnnnnnnnnnnnnnnnnnnnnnnnnnnnnnnnnnnnnnnnnnnnnnnnnnnnnnnnnnnnnnnnnnnnnnnnnnnnnnnnnnnnnnnnnnnnnnnnnnnnnnnnnnnnnnnnnnnnnnnnnnnnnnnnnnnnnnnnnnnnnnnnnnnnnnnnnnnnnnnnnnnnnnnnnnnnnnnnnnnnaggtacaagcctatgcagaaagtggatggggttgcagatggtttcacaggaagtggtcaacagacaggcacatctgttgagcaaactgtaattgcccaaagccaacatcatcaacagtttttannnnnnnnnnnnnnnnnnnnnnnnnnnnnnnnnnnnnnnnnnnnnnnnnnnnnnnnnnnnnnnnnnnnnnnnnnnnnnnnnnnnnnnnnnnnnnnnnnnnnnnnnnnnnnnnnnnnnnnnnnnnnnnnnnnnnnnnnnnnnnnnnnnnnnnnnnnnnnnnnnnnnnnnnnnnnnnnnnnnnnnnnnnnnnnnnnnnnnnnnnnnnnnnnnnnnnnnnnnnnnnnnnnnnnnnnnnnnnnnnnnnnnnnnnnnnnnnnnnnnnnnnnnnnnnnnnnnnnnnnnnnnnnnnnnnnnnnnnnnnnnnnnnnnnnnnnnnnnnnnnnnnnnnnnnnnnnnnnnnnnnnnnnnnnnnnnnnnnnnnnnnnnnnnnnnnnnnnnnnnnnnnnnnnnnnnnnnnnnnnnnnnnnnnnnnnnnnnnnnnnnnnnnnnnnnnnnnnnnnnnnnnnnnnnnnnnnnnnnnnnnnnnnnnnnnnnnnnnnnggttgccgctgtaagtgcctttgcccagactctgcgaagatacacgtcgctcaatcacctggcccaggcagctcgtgcagtgcttcagaacacttcccaaatcaaccagatgcttaatgacctcaaccgtgtcgactttgccaatgtccagg

SEQ ID NO: 23122 - DNA, 524 bp, Macaca Mulatta
aaatactctggaaacaaaagagctttgtgcaaacgagataagtaagaatcaagttattttgagtgttcctagatcttgggctaagaaccagtcctgattccagaaaaaagaagatcctaatgaaggaagaaatactataaaaaatgaccatactggcctagaatgcagaataattgtgaaatgagaaacaaaaataaattcctttaagttctctagtagttcattgccttggttctacttttgtccgacacttcttgtattttttttttcttatatagcaagtgaactgcacaaactcttgcagccatttctgctgaggcgagtgaaagctgacgtagctacagagcttcccaagaagacagaagtagtgatataccatggcatgtcagcattgcagaagaaatactacaaggccattttgatgaaagacctaggtaatcagagggcacttgtcaattttagaactaaatgaggatgtgatttcatgtagtaaaatattttataatcacactcatttgtatgat

SEQ ID NO: 23123 - DNA, 361 bp, Macaca Mulatta
gctcaaaggtctgagttctcacccacctgtgactactagatggagtaatattctttccaagcccaaattgccatggctcaagctggtcctgggtggaatgctgagaattagctacctctaaatctccctccactacttccagcatgccctgggtgtggctccggaagtgcccagctccccatgtttctgtgcttcctcactccagcctctaccaccagtgaccctactcagtggccgcttccatggtggtcactgcagccaccaccactctgccttcaggactgaggacatcaccctcccctgggttgtactttttcatgcgtgagcgagctggttgatcccttaattcaccaacacagtg

SEQ ID NO: 23124 - DNA, 731 bp, Macaca Mulatta
  misc_feature (1)...(731): n = A,T,C or G
ggctcaaagagagggctgaactccagttttgaaacctctcctaagaaagtgaagtggtccagcaccgtcacctctccccgattatccctattctcagatggtgacagttctgagtctgaagatactctgagttcctctgagagatccaaaggnnnnnnnnnnnnnnnnnnnnnnnnnnnnnnnnnnnnnnnnnnnnnnnnnnnnnnnnnnnnnnnnnnnnnnnnnnnnnnnnnnnnnnnnnnnnnnnnnnnnnnnnnnnnnnnnnnnnnnnnnnnnnnnnnnnnnnnnnnnnnnnnnnnnnnnnnnnnnnnnnnnnnnnnnnnnnnnnnnnnnnnnnnnnnnnnnnnnnnnnnnnnnnnnnnnnnnnnnnnnnnnnnnnnnnnnnnnnnnnnnnnnnnnnnnnnnnnngctgcacccacctccgccctcgcctatgactcagaactccagaagcaaaagttctcgctcaaactggnnnnnnnnnnnnnnnnnnnnnnnnnnnnnnnnnnnnnnnnnnnnnnnnnnnnnnnnnnnnnnnnnnnnnnnnnnnnnnnnnnnnnnnnnnnnnnnnnnnnnnnnnnnnnnnnnnnnnnnnnnnnnnnnnnnnnnnnnnnnnnnnnnnncaggttcttggtgttacccagcctggggaggagccttcagtcggccctggatgtcagcccagagcatgtgctgtcagagaggtctgtgctgcaggtggcctgccggct

SEQ ID NO: 23125 - DNA, 786 bp, Macaca Mulatta
  misc_feature (1)...(786): n = A,T,C or G
ggattaatcaacattacttaaaataaatagcctcttaggtaaaaatataagaacttgatatatttcattctcttatatagtattcatttttcctacctatattacacaaaaaatatagaaaagatttaagtaattttgccaccctaggcttcaatgcaatattcctggtattatttacaatgcagaactttttgggtaattctagcttttaaaaattagtgaagttcttttactgtaactggtgacaatgtcacataatggatgctattgaaaaggttaacagatacagctcggagttgtgagcactctactgcaaggcttaaacaattcagtataaattgtcgtttttttcttgtgctgactaactataagcatgatcttgttaatgcatttttgatgggaagaaaaggtaaatgtttacaaagaggttttatgaaaggaataaaaattgacttcttgcttgtacatataggagcaatactattatattatttagtccgttaacaccacttaaaagtttaaggttttctcttggttgtggagtggcccagaaatgcattctgaatgaataaannnnnnnnnnnnnnnnnnnnnnnnnnnnnnnnnnnnnnnnnnnnnnnnnnnnnnnnnncaannnntccttgttgggcgtctccggccctaaaaaaactttttcaaaacaatttcgttttggcgcccggggccccagtaggaaaaagagaaaagggtccataacctgttttcccaaagaaaatctccggcgcaaagaacacagggtgcttggaa

SEQ ID NO: 23126 - DNA, 1009 bp, Macaca Mulatta
  misc_feature (1)...(1009): n = A,T,C or G
nagtgtgccagcctgcaggccgccattgctgatgctgagcagcgtggggaaatggcactcaaggatgccaagaacaagctggaagggctggaggatgccctgcagaaggccaagcaggacctggcccggctgctgaaggagtaccaggagttgatgaacgtgaagctggccctggacgtggagattgccacctaccgcaagctgctggagggcgaggagtgcagnnnnnnnnnnnnnnnnnnnnnnnnnnnnnnnnnntgtggtacaatccaccgtctccagtggctatggcggtgccagtggtgtcggcagtggcttaggcctgggtggaggaagcagctactcctatggcagtggtcttggtgttggaggtggcttcagttccagcagcggcagagccattgggggtggcctcagctctgttggaggcggcagttccaccatcaagtacaccaccacctcctcctccagcaggaagagctacaggcactgaagtgctgccaccagctctcggtcccacagttctcaggcccctctctggctgcagagccctcttctcaggctgcctgtcctcttatggcctccagtctcccctgctctcccaggtagagctggggatggatgcttagtgccctcacttcttctctctgtctataccagccccatttgagcacccattgctcaccatcagatcaacctctgattttacatcatgatgtaatcaccactggagcttcactctgttactaatttattaatatcttgcctccggtgttctatctctgaggctgagcatgataagaaaatgatctctgctccttttcattactgaaaactgcctgaggcttatatcagaacaacttccacttattttccattggcccccagactccctaccttaaaagtattgtgaactccccctgcagtatccatggaagcgcaagtgactagtcgtatgatgtatacagtctgtctccctgtgatgaattctctgctctttgctctttgt

SEQ ID NO: 23127 - DNA, 864 bp, Macaca Mulatta
  misc_feature (1)...(864): n = A,T,C or G
tgaatggagatgacgcctttgcaaggagacccagggttgcttctaaaatgccagaaaagatnnnnnnggcctttgatgatattgccaaatacttccctaagaaagagtgggaaaagatgaaagcctcggagaaaatcatctatgtgtacatgaagagaaagtatgaggccatgactaaactaggtnnnnnnnnnnnnnnnnnnnnnnnnnnnnnnnnnnnnnnnnnnnnnnnnnnnnnnnnnnnnnnnnnnnnnnnnnnnnnnnnnnnnnnnnnnnnngttgaacgtcctcagatgactttcggcaggctccagggaatcnnnnnnnnnnnnnnnnnnnnnnnnnnnnnnnnnnnnnnnnnnnnnnnnnnnnnnnnnnnnnnnnnnnnnnnnnnnnnnnnnnnnnnnnnnnnnnnnnnnnnnnnnnnnnnnnnnnnnnnnnnnnnnnnnnnnnnnnnnnnnnnnggacccaaaagggggaaacatgcctggacccacagactgtgtgagagaaagcagttggtgatttatgaagagatcagcgaccctgaggaagatgacgagtannnncctcagggatatgacacatgcccatgatgagaagcagaccttggtgacctttcacaaacatgggcatggcggcggaccccttgtcatcaggtgtatagcaagtgaaagcaagtgttcacaacagtgaaaagttgagcgtcatttttcttagtgtgccaagcgttccatgttagcatttcccttgtagtttcttgcagtgtgccattttgttagatattagcattttcactgatcagcaagacatacttaatgcatatttcggtttgtgtatccatgcatctaccttataaagcaa

SEQ ID NO: 23128 - DNA, 3656 bp, Macaca Mulatta
  misc_feature (1)...(3656): n = A,T,C or G
gatcctggagctgctggtgctggagcagttcctgactatcttgcctagggaggtccagacctgggtgcagtcacgccaccctgagagtggtgaggaggctgtggccctggtggaggattggcaccgagagaccaggactgcaggacannnnnnnnnnnnnnnnnnnnnnnnnnnnnnnnnnnnnnnnnnnnnnnnnnnnnnnnnnnnnnnnnnnnnnnnnnnnnnnnnnnnnnnnnnnnnnnnnnnnnnnnnnnnnnnnnnnnnnnnnnnnnnnnnnnnnnnnnnnnnnnnnnnnnnnnnnnnnnnnnnnnnnnnnnnnnnnnnnnnnnnnnnnnnnnnnnnnnnnnnnnnnnnnnnnnnnnnnnnnnnnnnnnnnnnnnnnnnnnnnnnnnnnnnnnnnnnnnnnnnnnnnnnnnnnnnnnnnnnnnnnnnnnnnnnnnnnnnnnnnnnnnnnnnnnnnnnnnnnnnnnnnnnnnnnnnnnnnnnnnnnnnnnnnnnnnnnnnnnnnnnnnnnnnnnnnnnnnnnnnnnnnnnnnnnnnnnnnnnnnnnnnnnnnnnnnnnnnnnnnnnnnnnnnnnnnnnnnnnnnnnnnnnnnnnnnnnnnnnnnnnnnnnnnnnnnnnnnnnnnnnnnnnnnnnnnnnnnnnnnnnnnnnnnnnnnnnnnnnnnnnnnnnnnnnnnnnnnnnnnnnnnnnnnnnnnnnnnnnnnnnnnnnnnnnnnnnnnnnnnnnnnnnnnnnnnnnnnnnnnnnnnnnnnnnnnnnnnnnnnnnnnnnnnnnnnnnnnnnnnnnnnnnnnnnnnnnnnnnnnnnnnnnnnnnnnnnnnnnnnnnnnnnnnnnnnnnnnnnnnnnnnnnnnnnnnnnnnnnnnnnnnnnnnnnnnnnnnnnnnnnnnnnnnnnnnnnnnnnnnnnnnnnnnnnnnnnnnnnnnnnnnnnnnnnnnnnnnnnnnnnnnnnnnnnnnnnnnnnnnnnnnnnnnnnnnnnnnnnnnnnnnnnnnnnnnnnnnnnnnnnnnnnnnnnnnnnnnnnnnnnnnnnnnnnnnnnnnnnnnnnnnnnnnnnnnnnnnnnnnnnnnnnnnnnnnnnnnnnnnnnnnnnnnnnnnnnnnnnnnnnnnnnnnnnnnnnnnnnnnnnnnnnnnnnnnnnnnnnnnnnnnnnnnnnnnnnnnnnnnnnnnnnnnnnnnnnnnnnnnnnnnnnnnnnnnnnnnnnnnnnnnnnnnnnnnnnnnnnnnnnnnnnnnnnnnnnnnnnnnnnnnnnnnnnnnnnnnnnnnnnnnnnnnnnnnnnnnnnnnnnnnnnnnnnnnnnnnnnnnnnnnnnnnnnnnnnnnnnnnnnnnnnnnnnnnnnnnnnnnnnnnnnnnnnnnnnnnnnnnnnnnnnnnnnnnnnnnnnnnnnnnnnnnnnnnnnnnnnnnnnnnnnnnnnnnnnnnnnnnnnnnnnnnnnnnnnnnnnnnnnnnnnnnnnnnnnnnnnnnnnnnnnnnnnnnnnnnnnnnnnnnnnnnnnnnnnnnnnnnnnnnnnnnnnnnnnnnnnnnnnnnnnnnnnnnnnnnnnnnnnnnnnnnnnnnnnnnnnnnnnnnnnnnnnnnnnnnnnnnnnnnnnnnnnnnnnnnnggttttgaaatgaggcatgaggatgaagaccagatttcagagcaggacatttttgaggatttgcctggagccttatcaaaatgtcctacagaagctgtttgccagcctcttgactggggagaagacagtgaaaatgaaaatgaagatgaagggcagtggggaaatccctcacaggaacggtggcaagaaagttcttctgaagaggacttagaaaaacttattgaccatcaaggcctgtaccttgtggagaaatcctacaagtgtgacacatgcatgaagagcttcagtcggagctcccacttcatcgcccaccagcgaatccacacaggtgagaagccctacaaatgccttgaatgtggaaaaaactttagtgaccgctctaacctcaatacccatcagagaatccacactggagagaagccctataaatgccttgaatgtgggaaaagctttagcgatcactctaatctcgtcactcaccagagaatccacacggnnnnnnnnnnnnnnnnnnnnnnnnnnnnnnnnnnnnnnnnnnnnnnnnnnnnnnnnnnnnnnnnnnnnnnnnnnnnnnnnnnnnnnnnnnnnnnnnnnnnnnnnnnnnnnnnnnnnnnnnnnnnnnnnnnnnnnnnnnnnnnnnnnnnnnnnnnnnnnnnnnnnnnnnnnnnnnnnnnnnnnnnnnnnnnnnnnnnnnnnnnnnnnnnnnnnnnnnnnnnnnnnnnnnnnnnnnnnnnnnnnnnnnnnnnnnnnnnnnnnnnnnnnnnnnnnnnnnnnnnnnnnnnnnnnnnnnnnnnnnnnnnnnnnnnnnnnnnnnnnnnnnnnnnnnnnnnnnnnnnnnnnnnnnnnnnnnnnnnnnnnnnnnnnnnnnnnnnnnnnnnnnnnnnnnnnnnnnnnnnnnccacactggagagaagccctataaatnnnnnnnnnnnnnnnnnnnnnnnnnnnnnnnnnnnnnnnnnnnnnnnnnnnnnnnnnnnnnnnnnnnnnnnnnnnnnnnnnnnnnnnnnnnnnnnnnnnnnnnnnnnnnnnnnnnnnnnnnnnnnnnnnnnnnnnnnnnnnnnnnnnnnnnnnnnnnnnnnnnnnnnnnnnnnnnnnnnnnnnnnnnnnnnnnnnnnnnnnnnnnnnnnnnnnnnnnnnnnnnnnnnnnnnnnnnnnnnnnnnnnnnnnnnnnnnnnnnnnnnnnnnnnnnnnnnnnnnnnnnnnnnnnnnnnnnnnnnnnnnnnnnnnnnnnnnnnnnnnnnnnnnnnnnnnnnnnnnnnnnnnnnnnnnnnnnnnnnnnnnnnnnnnnnnnnnnnnnnnnnnnnnnnnnnnnnnnnnnnnnnnnnnnnnnnnnnnnnnnnnnnnnnnnnnnnnnnnnnnnnnnnnnnnnnnnnnnnnnnnnnnnnnnnnnnnnnnnnnnnnnnnnnnnnnnnnnnnnnnnnnnnnnnnnnnnnnnnnnnnnnnnnnnnnnnnnnnnnnnnnnnnnnnnnnnnnnnnnnnnnnnnnnnnnnnnnnnnnnnnnnnnnnnnnnnnnnnnnnnnnnnnnnnnnnnnnnnnnnnnnnnnnnnnnnnnnnnnnnnnnnnnnnnnnnnnnnnnnnnnnnnnnnnnnnnnnnnnnnnnnnnnnnnnnnnnnnnnnnnnnnnnnnnnnnnnnnnnnnnnnnnnnnnnnnnnnnnnnnnnnnnnnnnnnnnnnnnnnnnnnnnnnnnnnnnnnnnnnnnnnnnnnnnnnnnnnnnnnnnnnnnnnnnnnnnnnnnnnnnnnnnnnnnnnnnnnnnnnnnnnnnnnnnnnnnnnnnnnnnnnnnnnnnctggtgattattgagcagtatggtctttggnaagctctgtgccaagaactttggatccttcatctcatttaatcttcacaacagccccaggagataactactaactttctccccatttcctagaggcttgggaaattaagtaacttgcactggtcacacatctgtaagtgggagaggcaggattcaacagatctgtctgtcttgagtctgtcgtgctcttattgctataatgaattcccattcatgttaggtagctta

SEQ ID NO: 23129 - DNA, 688 bp, Macaca Mulatta
cactattgccggatcaacaccattgcacacacattttgtgagcacatgggcattgcccacctctcctgttctgatatctccatcaatgtctggtatgggttggcagctgctcttctctccacaggcctggacatcatccttattactgtttcttacatccacatcctccaagcagtcttccacctcccttctcaagatgcccgctccaaggccctgagtacctgtggatcccatgtctgtgtcatcctactcttctatgtccctgcccttttttctgtctttgcctataggtttggtgggagaagcatcccacgctatgtccatattctcctggccaacctctacgttgtcattcctcctatgctcaatcccattatttatggagtgaggaccaagcaaatactggaaggggctaagcagatgttttcaaatcttgccaaaggatctaaataaaggctttcaacttagtctcaacccttttctatatctatcaattgtcccgtatttagcccattcttgcctctacattttccaattatccctgtgttattctcatcgatctttcaatttatttaaatatgtcatctattcaaacccacctctgatttcttttattggaaatctctagcagaatatatctaatcctcttacccttactattgaaatgcaatctgatttcccatcacct

SEQ ID NO: 23130 - DNA, 1028 bp, Macaca Mulatta
  misc_feature (1)...(1028): n = A,T,C or G
ggggtgcctaggttggtttcccctgcactcctgactttagcttattgatcccacatttccatggggttagatcctctttactatgggcggaagtgagcccccccttaaagggaattcgatgcccccctagaataatctcatcccccgaccagacttcttttgaaatgtgaacaccctctctttcactgtctagccactccctcccagaaaaactggctctgattggcatttctggcctcctaaggctccccatcccgaaatcagcccccagccctgtttctcatgacagtgttatcccaagaccctgccccttgccagccagccctcctggccttcctcgttgggccgctctgctttcaggcagcagggggtgctgtgatgccgtcctgctggagtgatttatactgtgaaatgagttggccagattgtggggtgcagctgggtggggcagcacccctttagagggataatgcccccactcccgaaagccttccctcggtctcccttccgtccatcccccttcttcctcccctcaacagtgagttagactcaagggggtgacagagccgagaagggggtgacagtcctccatccacgtggcnnnnnnnnnnnnntcaggaccctcagccctggcctttttctttaaggcctccccgacccatccccagcctaggacgccaacttctcccacaccttggcccccgacatcctctctaggaagggagtgagggggtgtgacatttttccggagaagatttcagagctgaggctttggtacccccaaacccccaatatttttggaccgccagactcaaggggctggaatctcatgattccatgcccaagtccccccagccccgtcgctggttttggctctcccaccctgccgttccctgcgcttcatctcatgaggatttctttacgaagcanatttatattttttaatatcgggggtggaccacgccgccctccatccgtgctgcatgaaaacattccacgtgccgcttgtcgcgcgtctcccgtcctga

SEQ ID NO: 23131 - DNA, 158 bp, Macaca Mulatta
tgctcttcctttcctgggctgacctctgagcagcagacggggctgagtgttccccagctcgcctctacacacagcccgtgccaccgcagccgacggcaccatgaaggacgaggtagctctactggccaccgtcaccctcctgggagtcctgctgcaag

SEQ ID NO: 23132 - DNA, 2946 bp, Macaca Mulatta
  misc_feature (1)...(2946): n = A,T,C or G
aggtaaactaacatggatttttccaagctacccaaaatactcgatgaagataaagaaagcacctttggttatctgcatggggtctcagnnnnnnnnnnnnnnnnnnnnnnnnnnnnnnnnnnnnnnnnnnnnnnnnnnnnnnnnnnnnnnnnnnnnnnnnnnnnnnnnnnnnnnnnnnnnnnnnnnnnnnnnnnnnnnnnnnnnnnnnnnnnnnnnnnnnnnnnnnnnnnnnnnnnnnnnnnnnnnnnnnnnnnnnnnnnnnnnnnnnnnnnnnnnnnnnnnnnnnnnnnnnnnnnnnnnnnnnnnnnnnnnnnnnnnnnnnnnnnnnnnnnnnnnnnnnnnnnnnnnnnnnnnnnnnnnnnnnnnnnnnnnnnnnnnnnnnnnnnnnnnnnnnnnnnnnnnnnnnnnnnnnnnnnnnnnnnnnnnnnnnnnnnnnnnnnnnnnnnnnnnnnnnnnnnnnnnnnnnnnnnnnnnnnnnnnnnnnnnnnnnnnnnnnnnnnnnnnnnnnnnnnnnnnnnnnnnnnnnnnnnnnnnnnnnnnnnnnnnnnnnnnnnnnnnnnnnnnnnnnnnnnnnngatgttgtcttggagcttgaatttgaaggtgtaaaggaaaagttcaccatggtgcaagtatggcctgtacgtcaagttcgacctgtcactgagaagcagccagccaatcatcctctgttgactggccagagagtccttgatgccctttttccgnnnnnnnnnnnnnnnnnnnnnnnnnnnnnnnnnnnnnnnnnnnnnnnnnnnnnnnnnnnnnnnnnnnnnnnnnnnnnnnnnnnnnnnnnnnnnnnnnnnnnnnnnnnnnnnnnnnnnnnnnnnnnnnnnnnnnnnnnnnnnnnnnnnnnnnnnnnnnnnnnnnnnnnnnnnnnnnnnnnnnnnnnnnnnnnnnnnnnnnnnnnnnnnnnnnnnnnnnnnnnnnnnnnnnnnnnnnnnnnnnnnnnnnnnnnnnnnnnnnnnnnnnnnnnnnnnnnnnnnnnnnnnnnnnnnnnnnnnnnnnnnnnnnnnnnnnnnnnnnnnnnnnnnnnnnnnnnnnnnnnnnnnnnnnnnnnnnnnnnnnnnnnnnnnnnnnnnnnnnnnnnnnnnnnnnnnnnnnnnnnnnnnnnnnnnnnnnnnnnnnnnnnnnnnnnnnnnnnnnnnnnnnnnnnnnnnnnnnnnnnnnnnnnnnnnnnnnnnnnnnnnnnnnnnnnnnnnnnnnnnnnnnnnnnnnnnnnnnnnnnnnnnnnnnnnnnnnnnnnnnnnnnnnnnnnnnnnnnnnnnnnnnnnnnnnnnnnnnnnnnnnnnnnnnnnnnnnnnnnnnnnnnnnnnnnnnnnnnnnnnnnnnnnnnnnnnnnnnnnnnnnnnnnnnnnnnnnnnnnnnnnnnnnnnnnnnnnnnnnnnnnnnnnnnnnnnnnnnnnnnnnnnnnnnnnnnnnnnnnnnnnnnnnnnnnnnnnnnnnnnnnnnnnnnnnnnnnnnnnnnnnnnnnnnnnnnnnnnnnnnnnnnnnnnnnnnnnnnnnnnnnnnnnnnnnnnnnnnnnnnnnnnnnnnnnnnnnnnnnnnnnnnnnnnnnnnnnnnnnnnnnnnnnnnnnnnnnnnnnnnnnnnnnnnnnnnnnnnnnnnnnnnnnnnnnnnnnnnnnnnnnnnnnnnnnnnnnnnnnnnnnnnnnnnnnnnnnnnnnnnnnnnnnnnnnnnnnnnnnnnnnnnnnnnnnnnnnnnnnnnnnnnnnnnnnnnnnnnnnnnnnnnnnnnnnnnnnnnnnnnnnnnnnnnnnnnnnnnnnnnnnnnnnnnnnnnnnnnnnnnnnnnnnnnnnnnnnnnnnnnnnnnnnnnnnnnnnnnnnnnnnnnnnnnnnnnnnnnnnnnnnnnnnnnnnnnnnnnnnnnnnnnnnnnnnnnnnnnnnnnnnnnnnnnnnnnnnnnnnnnnnnnnnnnnnnnnnnnnnnnnnnnnnnnnnnnnnnnnnnnnnnnnnnnnnnnnnnnnnnnnnnnnnnnnnnnnnnnnnnnnnnnnnnnnnnnnnnnnnnnnnnnnnnnnnnnnnnnnnnnnnnnnnnnnnnnnnnnnnnnnnnnnnnnnnnnnnnnnnnnnnnnnnnnnnnnnnnnnnnnnnnnnnnnnnnnnnnnnnnnnnnnnnnnnnnnnnnnnnnnnnnnnnnnnnnnnnnnnnnnnnnnnnnnnnnnnnnnnnnnnnnnnnnnnnnnnnnnnnnnnnnnnnnnnnnnnnnnnnnnnnnnnnnnnnnnnnnnccaggtttctataacttttgaacaggtactttgtgaaatgactcaatatctattgtgataagctcattggcagcttagcattttgcagaggaattgttttgcaggaaatatttanttttcaaaaacataatgattaatgttccaattatgcattgcttcccccagtataaatcaggaatatttgtgagaaactattggnnnnnnnnnnnnnnnnnnnnnnnnnnnnnnnnnnnnnnnnnnnnnnnnnnnnnnnnnnnnnnnnnnnnnttgttgcccaggctggggtgcaatggtgcaatcttggctcactgcaacctcagcctcccaggttcaaatgattctcctgcctcagcctcctgagtagctgggattatacaggcatgcttcaccatgcccagctaattttgtatttttagtagaaacggggtttcaccatatcgttcaggctggtcttgaactcccgacctcaggtgattggccagcctcggcttcccaaagtgctgggattacaggcatgagccaccacgcccggccagggactatactctttttaaaatagacatttgtggggctcacacaataaatgaaacagtaccctctaaaaaagagaagaaaagaatcaggcggtcaaacttagagcaacattgtcttattaaagcatagtttatttcactagaaaacatttagtatcaaggactatt

SEQ ID NO: 23133 - DNA, 666 bp, Macaca Mulatta
aggctctatatgctatacctagttatcccttctcagacgtaatttctgttatttgggcaaattcttaaaccatggtttaaactgtaatggttacaatccacttatggcatccatccaaagactgtgaaaccattttcatccggtcagtggcaaaactgttgaaagggcaatagttgaagctgttgggttttaaatactgggaactctggtatatattcctaccaggactaaaacacagcacactctgcaggcatgtctgactcacggaggctgtaacagacaagaactactctttactcgacagcacagctcagaggccaccgagaggcacgagagactgacagctcctctgcctataaatgaatgaaacccacactggatgtcgttctcacagcactgaaagtgcttcaggactcacgctgatccaatactaactttcttccctattttacacatatttttctactgtccagtgaaatcattttctgttttggctgaaaaacaaatattagtttataacaggaatggtaaaatccgtgagaattctgctcaatttaatacaagatcattactttctttagaatggtgtctgcgtgtttctgtgtcaccctctgtatttttagcttccagtttctggtaaggagtaagttctcctttccagtcaca

SEQ ID NO: 23134 - DNA, 2928 bp, Macaca Mulatta
  misc_feature (1)...(2928): n = A,T,C or G
agaattcatactggagagaaaccttatgaatgcagtgactgtgggaagtccttcatttccaagtcacaacttcaggtccatcaacgcgttcacacgagagtgaagccctatatatgtaccgaatatgggaaggtcttcagcaataattccaacctcattacacataagaaagtccaaattagagagaaatcttccatatgtactgagtgtgggaaggcctttacctacaggtcagagttgattattcatcagagaattcacactggagagaaaccgtatgaatgcagtgactgtggaaaagccttcactcagaagtcagcactcacagtgcatcagagaattcatacaggagaaaaatcatatgtatgcatgaaatgtggactggccttcattcagaaggcacatttgattgcacatcaaataattcatactggagagaaacctcataaatgtggtnnnngtgggaaattgtttacttccaagtcacaactgcatgttcataaacgaattcacacaggagaaaaaccctacatgtgcaataaatgtgggaaggcatttaccaaccggtcaaatctcattacacatcagaaaactcatacaggagagaaatcttatatatgttccaaatgtggaaaggccttcacccagaggtcagacttgattacacatcagagaatccatactggggagaagccttatgaatgcagtacttgtggaaaagccttcactcagaagtcacacctcaatatacaccagaaaattcatactggagagagacagtatgaatgccacgaatgtgggaaagccttcaaccagaaatcaatactcattgttcatcagaaaattcatacaggagagaaaccctatgtatgcaccgagtgtggaagagctttcatccgcaagtcaaactttattactcatcaaagaattcatactggagagaaaccttatgaatgcagtgactgtgggaagtcctttacctctaagtctcagctcctggtgcatcagccaattcacacaggagagaaaccctatgtgtgtgccgagtgtgggaaagcctttagtggcaggtcaaatctcagtaagcatcagataactcataccggagagaagccctacatctgttctgaaagcgggaagacctttcgacagaaggcagaggtgattacacatcatagaattcatactgtagagaaaccgtacgagtgcagtgannnnnnnnnnnnnnnnnnnnnnnnnnnnnnnnnnnnnnnnnnnnnnnnnnnnnnnnnnnnnnnnnnnnnnnnnnnnnnnnnnnnnnnnnnnnnnnnnnnnnnnnnnnnnnnnnnnnnnnnnnnnnnnnnnnnnnnnnnnnnnnnnnnnnnnnnnnnnnnnnnnnnnnnnnnnnnnnnnnnnnnnnnnnnnnnnnnnnnnnnnnnnnnnnnnnnnnnnnnnnnnnnnnnnnnnnnnnnnnnnnnnnnnnnnnnnnnnnnnnnnnnnnnnnnnnnnnnnnnnnnnnnnnnnnnnagcagaaaaatatgtagattattgtaaataaaaacaaccacatcagaatgtcacacatggctgttctggagagggcccctgagaaggcattgaatgaagcgagggacccttcctacattgtcaccatccccagtaaaccttggggtattattcatactgacaaggaaccgagtcaatttggtgaataggaaaagccttctcatgaaaacgacaatagaacactgttaccaaattcttcataagaaagatcatattatgttaatgataatcctatttactgtggattaggtatagtgccaacaaattgaatgataaagcaacataatacgtagttattttgatagtgatgaatcctaagttatgtaagttgttcgttgtggaacacattgtgtaacagactcgtgggtgtttttctttcttgttcaaatttaccacagttggtcatttccaaccctcattcaatatttctatcaagaaagagatnnnnnnnnnnnnnnnnnnnnnnnnnnnnnnnnnnnnnnnnnnnnnnnnnnnnnnnnnnnnnnnnnnnnnnnnnnnnnnnnnnnnnnnnnnnnnnnnnnnnnnnnnnnnnnnnnnnnnnnnnnnnnnnnnnnnnnnnnnnnnnnnnnnnnnnnnnnnnnnnnnnnnnnnnnnnnnnnnnnnnnnnnnnnnnnnnnnnnnnnnnnnnnnnnnnnnnnnnnnnnnnnnnnnnnnnnnnnnnnnnnnnnnnnnnnnnnnnnnnnnnnnnnnnnnnnnnnnnnnnnnnnnnnnnnnnnnnnnnnnnnnnnnnnnnnnnnnnnnnnnnnnnnnnnnnnnnnnnnnnnnnnnnnnnnnnnnnnnnnnnnnnnnnnnnnnnnnnnnnnnnnnnnnnnnnnnnnnnnnnnnnnnnnnnnnnnnnnnnnnnnnnnnnnnnnnnnnnnnnnnnnnnnnnnnnatgtgtgtcacacttcatcagttccaggaaatagtttctggagatctcctcattacctcttttacaatcacctcactccagcatgatgtctgttacctcctcccacttgtgaccacgtctagtaaggtccactctccattctgcgtgatgaccacttattacaatcctcagaatcggggacagtggtgtgccccccgcaatacaatggttactatctcctgatacttttattacacttctagcaggatgtcttgtggtcccccttattgatttttccctcnnnnnnnnnnnnnnnatctcccattactcacctagcagtatctaactgtccctaacccagcatgtgggaatgccttcgatacggtggatgctgttgacttccttcctttcattcaggtaagggcagtggcttacaatgaaccataatgtccacctttcccaactgtattttggagcctcttctgtccccttctttataggaccccagt

SEQ ID NO: 23135 - DNA, 515 bp, Macaca Mulatta
ctgggcgtggggcgcagagaagcagaacagcccaaggccccaggtgcctagcctggcccagacctctggagttgagattaaacactttggagttggatacccgtgttgtgtggtgtgtctgcttctgtttcttcgcccaccaagcaagggcttgttcaggtctttgtgtctggatacagaccacccttgcatgtgacagtttaataagtattgggacagggttgagttcccaggctgctgcttaggatgtggttttgggccccaggggaagcctgcttcctgctgtcagggcctcactgctctgacacagcaacccaactggacacgcagaccttgctcggggctgaaagggttgtgctgagggaatgctgttagtctgatgatgtgttgaaggcctttgcattactgactgttgcccatcttgggtccccattctctggctcccttttcatctcctgggccatgtgccctactgctgtctgtctgagggaagacctgctgtggagggaatctca

SEQ ID NO: 23136 - DNA, 2988 bp, Macaca Mulatta
  misc_feature (1)...(2988): n = A,T,C or G
gccctggggggccgatggaggaggtggccggggctctcaagcaggtctccgacagaggccctgtccggcccgaagatgagtcggtggaagctaagagagagcggccctcnnnnnnnnnnnnnnnnnnnnnnnnnnnnnnnnnnnnnnnnnnnnnnnnnnnnnnnnnnnnnnnnnnnnnnnnnnnnnnnnnnnnnnnnnnnnnnnnnnnnnnnnnnnnnnnnnnnnnnnnnnnnnnnnnnnnnnnnnnnnnnnnnnnnnnnnnnnnnnnnnnnnnnnnnnnnnnnnnnnnnnnnnnnnnnnnnnnnnnnnnnnnnnnnnnnnnnnnnnnnnnnnnnnnnnnnnnnnnnnnnnnnnnnnnnnnnnnnnnnnnnnnnnnnnnnnnnnnnnnnnnnnnnnnnnnnnnnnnnnnnnnnnnnnnnnnnnnnnnnnnnnnnnnnnnnnnnnnnnnnnnnnnnnnnnnnnnnnnnnnnnnnnnnnnnnnnnnnnnnnnnnnnnnnnnnnnnnnnnnnnnnnnnnnnnnnnnnnnnnnnnnnnnnnnnnnnnnnnnnnnnnnnnnnnnnnnnnnnnnnnnnnnnnnnnnnnnnnnnnnnnnnnaagtcccctgttcccgcaggccggacgatagtgaagacgctgttgccctgggattccgatgaatctcctgaggcctcccctggtcctccaggcccacgcnnnnnnnnnnnnnnnnnnnnccccgggaggaggtggtggcccccccagggcccgaggagcaggactccctcctgcagcgcaagtcagcccggcgctgcgtcaaacagcgaccctcctatgatatcttcgaggattcggatgactcggagcccgggggcccccctgctcctcggcgtcggaccccccgagaaaatnnnnnnnnnnnnnnnnnnnnnnnnnnnnnnnnnnnnnnnnnnnnnnnnnnnnnnnnnnnnnnnnnnnnnnnnnnnnnnnnnnnnnnnnnnnnnnnnnnnnnnnnnnnnnnnnnnnnnnnnnnnnnnnnnnnnnnnnnnnnnnnnnnnnnnnnnnnnnnnnnnnnnnnnnnnnnnnnnnnnnnnnnnnnnnnnnnnnnnnnnnnnnnnnnnnnnnnnnnnnnnnnnnnnnnnnnnnnnnnnnnnnnnnnnnnnnnnnnnnnnnnnnnnnnnnnnnnnnnnnnnnnnnnnnnnnnnnnnnnnnnnnnnnnnnnnnnnnnnnnnnnnnnnnnnnnnnnnnnnnnnnnnnnnnnnnnnnnnnnnnnnnnnnnnnnnnnnnnnnnnnnnnnnnnnnnnnnnnnnnnnnnnnnnnnnnnnnnnnnnnnnnnnnnnnnnnnnnnnnnnnnnnnnnnnnnnnnnnnnnnnnnnnnnnnnnnnnnnnnnnnnnnnnnnnnnnnnnnnnnnnnnnnnnnnnnnnnnnnnnnnnnnnnnnnnnnnnnnnnnnnnnnnnnnngatctgttcagcctgtgtgcgctgtaagagctgtggggcaactccaggcaagaactgggacgtcgagtggtctggagattacagcctctgccccaggtgcatccagctatatgagaaagnnnnnnnnnnnnnnnnnnnnnnnnnnnnnnnnnnnnnnnnnnnnnnnnnnnnnnnnnnnnnnnnnnnnnnnnnnnnnnnnnnnnnnnnnnnnnnnnnnnnnnnnnnnnnnnnnnnnnnnnnnnnnnnnnnnnnnnnnnnnnnnnnnnnnnnnnnnnnnnnnnnnnnnnnnnnnnnnnnnnnnnnnnnnnnnnnnnnnnnnnnnnnnnnnnnnnnnnnnnnnnnnnnnnnnnnnnnnnnnnnnnnnnnnnnnnnnnnnnnnnnnnnnnnnnnnnnnnnnnnnnnnnnnnnnnnnnnnnnnnnnnnnnnnnnnnnnnnnnnnnnnnnnnnnnnnnnnnnnnnnnnnnnnnnnnnnnnnnnnnnnnnnnnnnnnnnnnnnnnnnnnnnnnnnnnnnnnnnnnnnnnnnnnnnnnnnnnnnnnnnnnnnnnnnnnnnnnnnnnnnnnnnnnnnnnnnnnnnnnnnnnnnnnnnnnnnnnnnnnnnnnnnnnnnnnnnnnnnnnnnnnnnnnnnnnnnnnnnnnnnnnnnnnnnnnnnnnnnnnnnnnnnnnnnnnnnnnnnnnnnnnnnnnnnnnnnnnnnnnnnnnnnnnnnnnnnnnnnnnnnnnnnnnnnnnnnnnnnnnnnnnnnnnnnnnnnnnnnnnnnnnnnnnnnnnnnnnnnnnnnnnnnnnnnnnnnnnnnnnnnnnnnnnnnnnnnnnnnnnnnnnnnnnnnnnnnnnnnnnnnnnnnnnnnnnnnnnnnnnnnnnnnnnnnnnnnnnnnnnnnnnnnnnnnnnnnnnnnnnnnnnnnnnnnnnnnnnnnnnnnnnnnnnnnnnnnnnnnnnnnnnnnnnnnnnnnnnnnnnnnnnnnnnnnnnnnnnnnnnnnnnnnnnnnnnnnnnnnnnnnnnnnnnnnnnnnnnnnnnnnnnnnnnnnnnnnnnnnnnnnnnnnnnnnnnnnnnnnnnnnnnnnnnnnnnnnnnnnnnnnnnnnnnnnnnnnnnnnnnnnnnnnnnnnnnnnnnnnnnnnnnnnnnnnnnnnnnnnnnnnnnnnnnnnnnnnnnnnnnnnnnnnnnnnnnnnnnnnnnnnnnnnnnnnnnnnnnnnnnnnnnnnnnnnnnnnnnnnnnnnnnnnnnnnnnnnnnnnnnnnnnnnnnnnnnnnnnnnnnnnnnnnnnnnnnnnnnnnnnnnnnnnnnnnnnnnnnnnnnnnnnnnnnnnnnnnnnnnnnnnnnnnnnnnnnnnnnnnnnnnnnnnnnnnnnnnnnnnnnnnnnnnnnnnnnnnnnnnnnnnnnnnnnnnnnntgctcccgtctgtactggagcacggtggatgctcggaggcgctgctggtatcggtgccgaattctggagtatcggccgtgggggcctcgggaagagccagctcacctggaggctgcagaggagaaccagaccattgtgcacagccccgccccttcctcag

SEQ ID NO: 23137 - DNA, 959 bp, Macaca Mulatta
ggggggctcctaaacactttcttcctgagatgttaagcaaagtaatcatcctgtcactagatagaagcgatgaagataaagaaaaagcaagttctttgatcagtttactcaaacaggaagggatagccacaagtgacaacttcatgcaggctttcctgaatgtattggaccagtgtcccaaactggaggttgacatccccttggtgaaatcatatttagcacagtttgcgagctcgtgccatcatttcagagctggtgagcatttcagaactagctcaaccactagaaagtggcacccattttcctctcttcctactttgtcttcagcaattagctaaattacaagatcgagaatggttaacagaactttttcaacaaagcaaggtcaatatgcagaaaatgctcccagaaattgatcagaataaggaccgcatgttggagattttggaaggaaagggactgagtttcttattcccactcctcaaactggagaaggaactgttgaagcaaataaagttggatccatcccctcaaaccatatataaatggattaaagataacatctctcccaaacttcatgtagataaaggatttgtgaacatcttaatgactagcttcttacagtacatttctagtgaagtaaacccccccagcgatgaaacagattcatcctctgctccttccagagaacagttagagcaggaaaaacaactacttctttctttcaagccagtaatgcagaaatttcttcatgatcacgttgatctacaagtcagcgccctgtatgctcttcaggtgcctgctataacaggaattcccaaacggctgttctccgcttttgggcactcttctttggcatttgagaacagctctgggtggaagagattacccagattccggaagcaggttttccgcgactcgcaccgctccatgtggtgcaaattggcacagtcacacca

SEQ ID NO: 23138 - DNA, 1566 bp, Macaca Mulatta
  misc_feature (1)...(1566): n = A,T,C or G
ggtatgttcaagatcaataaatttagaaaaagcttcagagtctttgaaaggaaacatggctgcttttctaaagnnnnnnnnnnnnnnnnnnnnnnnnnnnnnnnnnnnnnnnnnnnnnnnnnnnnnnnnnnnnnnnnnnnnnnnnnnnnnnnnnnnnnnnnnnnnnnnnnnnnnnnnnnnnnnnnnnnnnnnnnnnnnnnnnnnnnnnnnnnnnnnnnnnnnnnnnnnnnnnnnnnnnnnnnnnnnnnnnnnnnnnnnnnnnnnnnnnnnnnnnnnnnnnnnnnnnnnnnnnnnnnnnnnnnnnnnnnnnnnnnnnnnnnnnnnnnnnnnnnnnnnnnnnnnnnnnnnnnnnnnnnnnnnnnnnnnnnnnnnnnnnnnnnnnnnnnnnnnnnnnnnnnnnnnnnnnnnnnnnnnnnnnnnnnnnnnnnnnnnnnnnnnnnnnnnnnnnnnnnnnnnnnnnnnnnnnnnnnnnnnnnnnnnnnnnnnnnnnnnnnnnnnnnnnnnnnnnnnnnnnnnnnnnnnnnnnnnnnnnnnnnnnnnnnnnnnnnnnnnnnnnnnnnnnnnnnnnnnnnnnnnnnnnnnnnnnnnnnnnnnnnnnnnnnnnnnnnnnnnnnnnnnnnnnnnnnnnnnnnnnnnnnnnnnnnnnnnnnnnnnnnnnnnnnnnnnnnnnnnnnnnnnnnnnnnnnnnnnnnnnnnnnnnnnnnnnnnnnnnnnnnnnnnnnnnnnnnnnnnnnnnnnnnnnnnnnnnnnnnnnnnnnnnnnnnnnnnnnnnnnnnnnnnnnnnnnnnnnnnnnnnnnnnnnnnnnnnnnnnnnnnnnnnnnnnnnnnnnnnnnnnnnnnnnnnnnnnnnnnnnnnnnnnnnnnnnnnnnnnnnnnnnnnnnnnnnnnnnnnnnnnnnnnnnnnnnnnnnnnnnnnnnnnnnnnnnnnnnnnnnnnnnnnnnnnnnnnnnnnnnnnnnnnnnnnnnnnnnnnnnnnnnnnnnnnnnnnnnnnnnnnnnnnnnnnnnnnnnnnnnnnnnnnnnnnnnnnnnnnnnnnnnnnnnnnnnnnnnnnnnnnnnnnnnnnnnnnnnnnnnnnnnnnnnnnnnnnnnnnnnnnnnnnnnnnnnnnnnnnnnnnnnnnnnnnnnnnnnnnnnnnnnnnnnnnnnnnnnnnnnnnnnnagtctgtggactttgaagctgtggcaatcacagtgaaagagctagttcgatacacactcagtataaatccaaataaccattcctggttaattatccaggcagatatttactttgnnnnnnnnnnnnnnnnnnnnnnnnnnnnnnnnnnnnnnnnnnnnnnnnnnnnnnnnnnnnnnnnnnnnnnnnnnnnnnnnnnnnnnnnnnnnnnnnnnnnnnnnnnnnnnnnnnnnnnnnnnnnnnnnnnnnnnnnnnnnnnnnnnnnnnnnnnnnnnnnnnnnnnnnnnnnnnnnnnnnnnnnnnnnnnnnnnnnnnnnnnnnnnnnnnnnnnnnnnnnnnnnnnagtcatgatgctatggactcctactacgactacatatgggatgttactattttggaatacttgactt

SEQ ID NO: 23139 - DNA, 444 bp, Macaca Mulatta
ccacattccttctttggcgtcagcaagtggcaggatgcccagctggacgaggaaagaacttcatgcatcctaccacgtgagcatgggcacccaacagggatgcggcctcctggccattgttacctacacctccattctgtgcgttctgttcctctgcatggctctcattggctactgcttctggaggatctatgcagaggccaacacttcaggcatctgggggcagggctattcccgggccaggggcgccctgctgatccactcagtgctgatcacattgtatgtgagcacaggggtggtgttctccctggacatggtgcgaaccaggtaccagcacattgactctgagactcacaaatggctcctggcagctaacagtgaggtactcatgatgcttcgccgtgccatgctcccatatctgtacatgctccgctaccgtcagct

SEQ ID NO: 23140 - DNA, 1325 bp, Macaca Mulatta
  misc_feature (1)...(1325): n = A,T,C or G
tgagaagattgctcacgtctggcatcgcgattcaggtgtttccactgcatgacaaagaagccctgaagaagcttgaggacagctggtacactcggtttgctttaaagtatcagcccatagnnnnnnnnnnnnnnnnnnnnnnnnnnnnnnnnnnnnnnnnnnnnnnnnnnnnnnnnnnnnnnnnnnnnnnnnnnnnnnnnnnnnnnnnnnnnnnnnnnnnnnnnnnnnnnnnnnnnnnnnnnnnnnnnnnnnnnnnnnnnnnnnnnnnnnnnnnnnnnnnnnnnnnnnnnnnnnnnnnnnnnnnnnnnnnnnnnnnnnnnnnnnnnnnnnnnnnnnnnnnnnnnnnnnnnnnnnnnnnnnnnnnnnnnnnnnnnnnnnnnnnnnnnnnnnnnnnnnnnnnnnnnnnnnnnnnnnnnnnnnnnnnnnnnnnnnnnnnnnnnnnnnnnnnnnnnnnnnnnnnnnnnnnnnnnnnnnnnnnnnnnnnnnnnnnnnnnnnnnnnnnnnnnnnnnnnnnnnnnnnnnnnnnnnnnnnnnnnnnnnnnnnnnnnnnnnnnnnnnnnnnnnnnnnnnnnnnnnnnnnnnnnnnnnnnnnnnnnnnnnnnnnnnnnnnnnnnnnnnnnnnnnnnnnnnnnnnnnnnnnnnnnnnnnnnnnnnnnnnnnnnnnnnnnnnnnnnnnnnnnnnnnnnnnnnnnnnnnnnnnnnnnnnnnnnnnnnnnnnnnnnnnnnnnnnnnnnnnnnnnnnnnnnnnnnnnnnnnnnnnnnnnnnnnnnnnnnnnnnnnnnnnnnnnnnnnnnnnnnnnnnnnnnnnnnnnnnnnnnnnnnnnnnnnnnnnnnnnnnnnnnnnnnnnnnnnnnnnnnnnnnnnnnnnnnnnnnnnnnnnnnnnnnnnnnnnnnnnnnnnnnnnnnnnnnnnnnnnnnnnnnnnnnnnnnnnnnnnnnnnnnnnnnnnnnnnnnnnnnnnnnnnnnnnnnnnnnnnnnnnnnnnnnnnnnnnnnnnnnnnnnnnnnnnnnnnnnnnnnnnnnnnnnnnnnnnnnnnnnnnnnnnnnnnnnnnnnnnnnnnnnnnnnnnnnnnnnnnnnnnnnnnnnnnnnnnnnnnnnnnnnnnnnnnnnnnnnnnnnnnnnnnnnnnnnnnnnnnnnnnnnnnnnnnnnnnnnnnnnnnnnnnnnnnnnnnnnnnnnnnnnnnnnnnnnnnnnagttggcttttgaaacaatgagtgttatatctgtggtcactaactgtgctctgattggaatgtcaccacaagtgaatgcagtctttccagagtcaaaagcagacctcattttgattgtagtggcagtggag

SEQ ID NO: 23141 - DNA, 137 bp, Macaca Mulatta
cttggagcatggcaagtccagagcaccctgggagccctggctggaagggacccataacacagtgcacagcaaggacccagcaggaagcaccagccgctggccctgacctcccgcacccaggacctgacaggcattta

SEQ ID NO: 23142 - DNA, 1405 bp, Macaca Mulatta
  misc_feature (1)...(1405): n = A,T,C or G
ggggagtgcctgtgtgactgagggacacgtccaagccgtagtcagctctgtggatgtggacacctggcagagccatgcctcctctagtctgggtcatccaaacatatgtggggtacaggggccagatggagccctcttgtcatttttgttatctgacggtaattacgaagtccagaaagagaactggaaacgctggcagtttaactaaagctggatggcaggagagggacatttggaggctccctacctgccttcactccccgtcctgccgcccaggcaggatatcagatgaggagacgttgagctcacaaaacaccccatgagaagtcttacaacatcagaggctgtctgccaatgtgcctgcgatggcttatagaaactgctgccacctcgaattaacctctctccccaggcattgtgcatcagtaggtaaccaggnnnnnnnnnnnnnnnnnnnnnnnnnnnnnnnnnnnnnnnnnnnnnnnnnnnnnnnnnnnnnnnnnnnnnnnnnnnnnnnnnnnnnnnnnnnnnnnnnnnnnnnnnnnnnnnnnnnnnnnnnnnnnnnnnnnnnnnnnnnnnnnnnnnnnnnnnnnnnnnnnnnnnnnnnnnnnnnnnnnnnnnnnnnnnnnnnnnnnnnnnnnnnnnnnnnnnnnnnnnnnnnnnnnnnnnnnnnnnnnnnnnnnnnnnnnnnnnnnnnnnnnnnnnnnnnnnnnnnnnnnnnnnaggttcacctgggagttcctcctacgtggacaggaacctcctcctgctcctgacagggcagaacgtggagccctttgacacagagttccgggagctgtacgccatctccgaggaggtggacttgtaccggcagctgggcctggcgggcaggattggcctccactactcctccactgtggctcgaaagctcatcaaccccaagtacgccttggtgtcaggctgccgccacccacctggggagatgatgcgctgggctgcccggcaacagcgggaggcaggcggcaacccggaggggcaggaggatggtggcagcggtggtgagtcggcccggcgcctggagagcttcctgagagacctggttacggtggagcaggtgctgccccctgtggagcccatccccttgggagagctgagccggaaggatggcaagatggtctctcacacgcacagagacctaaagcccaaatcccgagaggcacccagccaaaatggcatgggagaagcagcccggggtgaggccgcccccgccaggcgcttcagcagcaggctcttcagtcgccgagccaagaggcccacggcgcccaacggcatggccagctccgtctccactgagactgtccctgaagtggagtttctgacagggaagaggcccaacgagaattccagtgctgacatctcaggt

SEQ ID NO: 23143 - DNA, 931 bp, Macaca Mulatta
  misc_feature (1)...(931): n = A,T,C or G
ggtgaatgtcgtgaatgtgggaagacttttagccatggctcatcccttacacgacatctgataagccatagtggagagaaaccttacaaatgtgttgaatgtgggaaggcctttagccatgtgtcatcacttactaaccatcagagcacnnnnnnnnnnnnnnnnnnatacgaatgtatgaactgtggaaagtcttttagtcgtgtgtcgcatcttattgaacatctaagaattcatacgcaagaaaaactctatgagtgtcgtatatgtggaaaggccttcattcataggtcatctctcattcaccatcagaaaatccatactggagagaagccttatgaatgtagagaatgtgggaaagctttttgctgtagctcacaccttactcgacatcaaagaattcacactatggagaaacaatatgaatgcaacaaatgtctcaaagtctttagtagcctctcatttcttgttcagcatcagagtattcatactgaagaaaaaccctttgaatgtcagaaatgcaggaaatccttcaaccagcttgaatcactgaatatgcatttgagaaatcacattagattgaaaccctatgaatgcagtatatgtgggaaagccttcagtcataggtcatccctgcttcaacatcacagaannnnnnnnnnnnnnnnnnnnnnnnnnnnnattaaatgtgggaaaaccttcagctgtagttcaaaccttactgtacatcagagaattcatactggagaaaagccatataaatgtaatgagtgtgggaaagcttttagcaaaggctcaaatcttactgcccatcaaagagtacataatggagggaaacccaataatgtggtaagtgtggaaaagcctttagaccatatgaatcactatacatgtgagaaaccttacagaagagaaaccatatgaagcagtg

SEQ ID NO: 23144 - DNA, 621 bp, Macaca Mulatta
  misc_feature (1)...(621): n = A,T,C or G
ngaaggcctttctctccatgctccttttgcaggaactccctggcaccaaggccaggggggacaggacggtctctgaggaggatgggtccgtaggctgctctgagtgctgtccctgcgccaaagaagttatagttccctcctggggggccccctccctgcccctcagcacagcctcaatcaagaagttccccgtctttgatcaccactctaagtaggagaaacccgcccagggctcccttagagccgaaaacggtggtgagttgagggccagcatggacagtagctctgggatacagttaagctggtgaggagctcacagtcccatgcagaaagcgcctaccatcccttactcctggctcccagctggagatccccactgaggacgctgtggcaggttcagcaggtctacccctcagtgtcagcaagagcagggacgggggcatcaggggccggcctgggacagggtcgggcctcccagcacctggtaagcctctcacttatggacagagctggccatgacggaggaggtatggatgggcacctggaggccccatcgcccccggggacccatcatggccctctacagcagccctggacccaagtacctgattccaccaacaa

SEQ ID NO: 23145 - DNA, 754 bp, Macaca Mulatta
  misc_feature (1)...(754): n = A,T,C or G
tcaagttcatccgagaagtaacaccatatatcaagaagccatcattagtatcagatctgccgtgggaaggtgcagccccccagtcaccaagctttagtggcagtgaggactctggttcgccaaaacaccagaacagcaccaaagacaggaagatcatccctctcaaaatgtgctttgctgctagaaacctaagcatgccggatctggaaaacaggnnnnnacaggcaaaactagatggtggaagacagcaatggagacctgtccttatggctgtgactgagaaggatttgctgctctatgactgtatgccatggacaagagatgcctgggcatcaccatgccacagctacccacttgttgccacnnngttgtttcattctggctctggatgtcgatccccctcccttggatctgaccttacatttgctaccaggacaggctctcgacagggcattgagatgcatctcttcagggtggagacacatcgggatctgtcatcctggaccaggatacttgttcagggttgccatgctgctgctgagctgatcaaggaagtctctctaggnggctgcatgttaaatggccaagaggtgaggcttactattcactatgaaaatgggttcaccatctccagggaaaacggaggctccagcagcatattataccgctacccctttgaaaggctgaagatgtctgcggatgatggcatccgaaatctatacttggattttggtggtcctgagggagaactggn

SEQ ID NO: 23146 - DNA, 623 bp, Macaca Mulatta
  misc_feature (1)...(623): n = A,T,C or G
ccaggtggggagacttccctctgtgactattgttatttttaaattctgaactatccatattttaaggaaagagctaaaaatggaaattcatgaaacataaatagtatcaagaactttctttatcagtatgctttgttgaaagcagaaattaagataataattgagttcaattcacctctctgcattgcctattgatatactttactaatcaagaaattctaacctaaaaggaaaacattttcttgtttgttttagaagaaagtggaataattccatggattgtgataacgatgtccatttctacacaatataaatatccagtataaaggaaagcgttaagtcagtaagctagaggattgtaaatatcttttatgtcctctagataaaacacccgattaacagatgttaaacctttgaatgttttgatttgctttaaaaatggccttcctacacattagctccagccaaaaagacacattggagagcttagtggacaagtctccggagcagaactgatcacacacaaaagttacaccaacagaataccaagaagaatgatgaggacctgtaaaataccttgtgccctgtttnnnnnnnnnnnnnnnnnnnngcagtaactgaat

SEQ ID NO: 23147 - DNA, 469 bp, Macaca Mulatta
aatagctgtgaccaagtttacacttttcgaaataagaatactccagagttctataaaatggaacaaaaatagaaaccatacaacacatggaatttcagaagtttagtacaaagaaaaatcgtttttatggaaaagccacatcgctgtcattctttgggcatgactacagagaggactgaatgactagaggcagctaatgagaactccaaatcgaagcctaacagaggttgttgattaatggagtggcaagtccgctttcagtggcagtggttgcttagtcgcatagttggctgaaatctgggctcgtgtcctgcagtgagcaacccagacaacaagcttaagcacctgcttgaacagaggagaaatagctgaaagctgtcagcaaattttcagagaattaaagccacaaagaaagaaatcctctgaaaaaccatgcaaagaaaacacaacccagaccacacaggcaggc

SEQ ID NO: 23148 - DNA, 765 bp, Macaca Mulatta
gggagtcgcctcgcgcctgcagtgaccaaagacttgaccactcaaaagtccagctccccagaacactgctcgacatggacaccggtgtgattgaaggtggattaaatgtcactctcaccatccggctacttatgcatggaaaggaagttggcagtatcatcggaaagaaaggagaatcagttaagaagatgcgcgaggagagtggtgcacgtatcaacatctcagaagggaattgtcctgagagaattatcactttggctggacccactaatgccatcttcaaagcctttgctatgatcattgacaaactggaagaggacataagcagctctatgaccaatagcacagctgccagtagacccccggtcaccctgaggctggtggtccctgcaagtcagtgtggctctctcattggaaaaggtggttgcaagatcaaggaaatacgagagagtacagggggctcaggtccaggtggcagggggatatgctacccaactcaactgagcgggccatcactattgctggcattccgcaatccatcattgagtgtgtcaaacagatctgcgtggtcatgttgggaatcccccccgaaagggcgtgaccatcccctaccgggcccaagcccgtcccactctccggttccatctttgccaggggggccaagggcccatacccatttctagggacaaatatgcccatttcccccagcccggaatttgaaccaaaccctgccacccggctggggcaatggcaccagggcctcat

SEQ ID NO: 23149 - DNA, 2664 bp, Macaca Mulatta
  misc_feature (1)...(2664): n = A,T,C or G
agcaggcttggatggtgagaaaaggaaagattcctgtgagaagagcaggagagcagagggagtctatgctnnnnnnnnnnnnnnnnnnnnnnnnnnnnnnnnnnnnnnnnnnnnnnnnnnnnnnnnnnnnnnnnnnnnnnnnnnnnnnnnnnnnnnnnnnnnnnnnnnnnnnnnnnnnnnnnnnnnnnnnnnnnnnnnnnnnnnnnnnnnnnnnnnnnnnnnnnnnnnnnnnnnnnnnnnnnnnnnnnnnnnnnnnnnnnnnnnnnnnnnnnnnnnnnnnnnnnnnnnnnnnnnnnnnnnnnnnnnnnnnnnnnnnnnnnnnnnnnnnnnnnnnnnnnnnnnnnnnnntttcatgtttggaaagaggaaagatccggagggccttcattcagacagaatctattaccttgnnnnnnnnnnnnnnnnnnnnnnnnnnnnnnnnnnnnnnnnnnnnnnnnnnnnnnnnnnnnnnnnnnnnnnnnnnnnnnnnnnnnnnnnnnnnnnnnnnnnnnnnnnnnnnnnnnnnnnnnnnnnnnnnnnnnnnnnnnnnnnnnnnnnnnnnnnnnnnnnnnnnnnnnnnnnnnnnnnnnnnnnnnnnnnnnnnnnnnnnnnnnnnnnnnnnnnnnnnnnnnnnnnnnnnnnnnnnnnnnnnnnnnnnnnnnnnnnnnnnnnnnnnnnnnnnnnnnnnnnnnnnnnnnnnnnnnnnnnnnnnnnnnnnnnnnnnnnnnnnnnnnnnnnnnnnnnnnnnnnnnnnnnnnnnnnnnnnnnnnnnnnnnnnnnnnnnnnnnnnnnnnnnnnnnnnnnnnnnnnnnnnnnnnnnnnnnnnnnnnnnnnnnnnnnnnnnnnnnnnnnnnnnnnnnnnnnnnnnnnnnnnnnnnnnnnnnnnnnnnnnnnnnnnnnnnnnnnnnnnnnnnnnnnnnnnnnnnnnnnnnnnnnnnnnnnnnnnnnnnnnnnnnnnnnnnnnnnnnnnnnnnnnnnnnnnnnnnnnnnnnnnnnnnnnnnnnnnnnnnnnnnnnnnnnnnnnnnnnnnnnnnnnnnnnnnnnnnnnnnnnnnnnnnnnnnnnnnnnnnnnnnnnnnnnnnnnnnnnnnnnnnnnnnnnnnnnnnnnnnnnnnnnnnnnnnnnnnnnnnnnnnnnnnnnnnnnnnnnnnnnnnnnnnnnnnnnnnnnnnnnnnnnnnnnnnnnnnnnnnnnnnnnnnnnnnnnnnnnnnnnnnnnnnnnnnnnnnnnnnnnnnnnnnnnnnnnnnnnnnnnnnnnnnnnnnnnnnnnnnnnnnnnnnnnnnnnnnnnnnnnnnnnnnnnnnnnnnnnnnnnnnnnnnnnnnnnnnnnnnnnnnnnnnnnnnnnnnnnnnnnnnnnnnnnnnnnnnnnnnnnnnnnnnnnnnnatccatgacatctttcatgtttttccccaaagtcacgaagaggaaattgagtttatttttgcctctgaatgcaaaacaggtttccgtcatttatacaaaattacatctattttaaaggaaagcaaatataaacgatccagtggtgggctgcctgctccaagtnnnnnnnnnnnnnnnnnnnnnnnnnnnnnnnnnnnnnnnnnnnnnnnnnnnnnnnnnnnnnnnnnnnnnnnnnnnnnnnnnnnnnnnnnnnnnnnnnnnnnnnnnnnnnnnnnnnnnnnnnnnnnnnnnnnnnnnttagagcatcatctgtacgtagtcagttacgtaaatcctggagaggtgacaaggctgactgaccgtggctattcacattcttgctgcatcagtcagnagcattgtgacttctttataagtaagtatagtaaccagaagaatccacactgtgtgtccctttacaagctatcaagttctgaagatgatctaacttgcaaaacaaaggaattttgggccaccattttggattcagcaggtnnnnnnnnnnnnnnnnnnnnnnnnnnnnnnnnnnnnnnnnnnnnnnnnnnnnnnnnnnnnnnnnnnnnnnnnnnnnnnnnnnnnnnnnnnnnnnnnnnnnnnnnnnnnnnnnnnnnnnnnnnnnnnnnnnnnnnnnnnnnnnnnnnnnnnnnnnnnnnnnnnnnnnnnnnnnnnnnnnnnnnnnnnnnnnnnnnnnnnnnnnnnnnnnnnnnnnnnnnnnnnnnnnnnnnnnnnnnnnnnnnnnnnnnnnnnnnnnnnnnnnnnnnnnnnnnnnnnnnnnnnnnnnnnnnnnnnnnnnnnnnnnnnnnnnnnnnnnnnnnnnnnnnnnnnnnnnnnnnnnnnnnnnnnnnnnnnnnnnnnnnnnnnnnnnnnnnnnnnnnnnnnnnnnnnnnnnnnnagatctatcctcaggagagacacagcataagagttcctgaatctggagaacattatgaactgcatcttttgcactaccttcaagaaaaccttggatcacgtattgctgctctaaaagtgatataattttgacctgtatagaactctctggtatacactggctattttaacaaatgaggaggtttaatcatagaaaacacaagattgatcatcacactttgatacctgccacgtaccatctactcctgaaaaaaaatgtggtgccatgcaggggtctacagtttggggtaataatccaataccttaaccccccatgctcaaaatcaaatgatacaatttcctgaaagaccc

SEQ ID NO: 23150 - DNA, 1398 bp, Macaca Mulatta
  misc_feature (1)...(1398): n = A,T,C or G
ggagccatgtctgatcaggacgtttggaagatcatatccatgccggaggctcttgtgaggagatgagttggtaaagagagaggccgggatgaagatgctgccaggagtgggcgtgtttgggactggcagctccgcccgagttctggtcccactgctgagggcagaagggttcactgttgaggccctgtgggggaagactgaggaggaggcaaagcagcttgctgaggagatgaacatcgccttctataccagccggactgatgacatcttgctgcatcaagacgtggatctggtgtgcatcagcatcccccctccactcacccggcagatatccgtgaaggctctaggtannnnnnnnnnnnnnnnnnnnnnnnnnnnnnnnnnnnnnnnnnnnnnnnnnnnnnnnnnnnnnnnnnnnnnnnnnnnnnnnnnnnnnnnnnnnnnnnnnnnnnnnnnnnnnnnnnnnnnnnnnnnnnnnnnnnnnnnnnnnnnnnnnnnnnnnnnnnnnnnnnnnnnnnnnnnnnnnnnnnnnnnnnnnnnnnnnnnnnnnnnnnnnnnnnnnnnnnnnnnnnnnnnnnnnnnnnnnnnnnnnnnnnnnnnnnnnnnnnnnnnnnnnnnnnnnnnnnnnnnnnnnnnnnnnnnnnnnnnnnnnnnnnnnnnnnnnnnnnnnnnnnnnnnnnnnnnnnnnnnnnnnnnnnnnnnnnnnnnnnnnnnnnnnnnnnnnnnnnnnnnnnnnnnnnnnnnnnnnnnnnnnnnnnnnnnnnnnnnnnnnnnnnnnnnnnnnnnnnnnnnnnnnnnnnnnnnnnnnnnnnnnnnnnnnnnnnnnnnnnnnnnnnnnnnnnnnnngtaggctctgcaggacgcctcgtcgcccggggagctgacctctatgggcagaagaactctgccactccagaagagctgctgttgagggactcgctggccgtgggtgcggggctgccagaacaggggccccaggacgtcccgctgctgtacctgaaaggcatggtctacatggtgcaggccttgcgccagtcctttcaggggcggggtgaccgccgaacctgggaccgcacccctgtctccatggccgcctccttcgaagatgggctgtacatgcagagtgtggttttttccatcaagaggtcgagccgatccggtgagtgggaggctgtggaggtgctgactgaggagcccgactccaaccagaacttgtgtgaggcacttcagcggaacatcctatgaacctgcacctgggctccttgtcacaggggaaaggggccagggaggggaacaggagccatatgtgacaggggcttggccctagcacacatggtatctttcacccttaatgacgctgggtgaagccagaggtggccctgggacttcgccccctcc

SEQ ID NO: 23151 - DNA, 113 bp, Macaca Mulatta
cagtgccacactctgctctatgtttataacctaccagcaaataaagatggcaagagcgtcagcaacaggctcagacgcctgtccgataattgtggtgggaaagtgctgagtat

SEQ ID NO: 23152 - DNA, 293 bp, Macaca Mulatta
  misc_feature (1)...(293): n = A,T,C or G
caggtatgataagtattctcagcaacataatagttctgggcatcttcattaagtacaaggaacttcggacacccacaaatgcaattattattaacctggctgttactgatataggggtcagtagcattggctatcccatgtctgctgcctcagatctgtatnnnnnnnnnnnnnnnnnnnnnnnnnnnnnnnnnnnnnnnnnnnnnnnnnnnnnnnnnnnggaatggcaagcattggattactcactgtcgtggccgtggaccgatacctgaccatctgccttcctgacatag

SEQ ID NO: 23153 - DNA, 827 bp, Macaca Mulatta
  misc_feature (1)...(827): n = A,T,C or G
agcctgaagtcttgcacatgatctacatgagagccttacaaatagtatatggaattcgactggagcatttttacatgnnnnnnnnnnnnnnnnnnnnnnnnnnnnnnnnnnnnnnnnnnnnnnnnnnnnnnnnnnnnnnnnnnnnnnnnnnnnnnnnnnnnnnnnnnnnnnnnnnnnnnnnnnnnnnnnnnnnnnnnnnnnnnnnnnnnnnnnnnnnnnnnnnnnnnnnnnnnnnnnnnnnnnnnnnnnnnnnnnnnnnnnnnnnnnnnnnnnnnnnnnnnnnnnnnnnnnnnnnnnnnnnnnnnnnnnnnnnnnnnnnnnnnnnnnnnnnnnnnnnnnnnnnnnnnnnnnnnnnnnnnnnnnnnnnnnnnnnnnnnnnnnnnnnnnnnnnnnnnnnnnnnnnnnnnnnnnnnnnnnnnnnnnnnnnnnnnnnnnnnnnnnnnnnnnnnnnnnnnnnnnnnnnnnnnnnnnnnnnnnnnnnnnnnnnnnnnnnnnnnnnnnnnnnnnnnnnnnnnnnnnnnnnnnnnnnnnnnnnnnnnnnnnnnnnnnnnnnnnnnnnnnnnnnnnnnnnnnnnnnnnnnnnnnnnnnnnnnnnnnnnnnnnnnnnnnnnnnnnnnnnnnnnnnnnnnnnnnnnnnnnnnnnnnnnnnnnnnnnnnnnnnnnnnnnnnnnnnnnnnnnnnnnnnncaagaagtggtggagaaatatgaaatctatggagattcagttgactgcctgccttcatgtcagttggaagtgcagttatatcaaaagaaaatacaggacctttcagataatagggaaaaattagccagtatcttaaaggag

SEQ ID NO: 23154 - DNA, 744 bp, Macaca Mulatta
  misc_feature (1)...(744): n = A,T,C or G
ggcagtctccccaggccttctccatctatgagaattgttttgatttgttttgagatgaagtcctgctctgtcacccagggtagagtgcagtggtgcgatcttagctcactgcaatctccacctcttggannnnnnnnnnnnnnannnnnnnnnnnnnnnnnnnnnnnnaactacaggcacgcaccaccatgcccgcccagctaatttttgcatttttagcagagacggggttttgctnnnnnnnnnnnnnnnnnnnnaaactccatcctcaggtgattcacccgcctcagcttcccaaagtgtnnnnnnnnnnnnnnnnnnnnnnngctcacggccaccatccatgaggattcttagagacggacagccgtgtctcctttgtctcctgaaggcagtcctctccccggacttcctctttccagacggggcatccactcgcttgggccgctgcctggacatccctgctgcatccacctcatcctcccacctgtgtattgtgtcacatggaaccccagaaatggaagcacggtgcagccccttctttctctcccgttcccctcatgctgtgcatgttccttcttttccccgatgggaccagctgctccagccagccactctctggctttcagacgtgtctaaggaaatgtaggaacaagacgcaggcttgcatcccatgtactttcccttaaatttccggagagggggcacatggcaaaattcttcgccctggaattgaaaccagtt

SEQ ID NO: 23155 - DNA, 219 bp, Macaca Mulatta
aatgggcagttagatttcccagaatttcttaatctgattggtggcctagctgtggcttgccatgactccttccttaaggctgtcccttcccagaaatggacctgaggaccccttgggcctggccttcaaacccaccccctttccttccagcctttctgtcatcatctcctcctcacagcccacacgtcccctaagcccagcacacccaccacatcatgc

SEQ ID NO: 23156 - DNA, 422 bp, Macaca Mulatta
accatggcacaaggctgtggagctccaaggtggaagagaaggatagccaggtggggatcccagtgagctaactaaagtataggccttttcagtttctgatatttattgtcagggttattttattaaaagaagccttactatttttaattactagtaatttttaacacatcacatattttaaataggaaacgaaatgacaaaatagaattactggtgggttgtattgccgaactttcagaaattgaggagaacatgctacttagacatggagaaaacgacttcagtgtcatgtattccacaaggaaaaactgtgctcaactctggctgggtcctgctgcatttataaagccatggtaagctgtatttccaaggtgttggcgctagtatgggcgttcttgctaacggctagaatggcctcgtca

SEQ ID NO: 23157 - DNA, 667 bp, Macaca Mulatta
tctctgaaacactgtgaaactgagagaaatctccttgcttttcaaagattttggcttaaacccttattttcctcagttgtttagctttagaattcagtaaatatcttgagggtaatactagtcctgaaacctctaattgtgtcagtctagtccattggaagcagcatagattccatgtttttttcacccactagtagatagtctctgcctggttttaagattctcagtctgttgcccttgcctacattcctcaaatacccacaaggaaagctgcagattttcacctcacctttaaaagattctgtcctctatgcaggtttattccctttagtcttcattgcttcacagcacctgataccttttaatatgttttttctgcatgttttacttcctctactggttgttcctagtgggagcatttacctgcagaaaaatatgtcattttatctagcttcatcctgataccaaagccagacaaaaagagcacacacaaaaaaactatgagttaatctcacaattatggatagagataaaataaataaaattttagcaagttaattccaagtgttttaagaaagtaattttgtactagtgtgtaggatttattccagaaatgcaaggatggtttgatattttagaaaatctgttaatataatttatcacatta

SEQ ID NO: 23158 - DNA, 1693 bp, Macaca Mulatta
  misc_feature (1)...(1693): n = A,T,C or G
ggcttatgtgcacaagagtgtaatggaagaactgaagagaattattgatgacagtgaaattacaaaagaagatgatgctttgtggcctccccctgatagggttggccgacaggnnnnnnnnnnnnnnnnnnnnnnnnnnnnnnnnnnnnnnnnnnnnnnnnnataggttctcttattgacgtaaatcagtcaaagnnnnnnnnnnnnnnnnnnnnnnnnnnnnnnnnnnnnnnnnnnnnnnnnnnnnnnnnnnnnnnnnnnnnnnnnnnnnnnnnnnnnnnnnnnnnnnnnnnnnnnnnnnnnnnnnnnnnnnnnnnnnnnnnnnnnnnnnnnnnnnnnnnnnnnnnnnnnnnnnnnnnnnnnnnnnnnnnnnnnnnnnnnnnnnnnnnnnnnnnnnnnnnnnnnnnnnnnnnnnnnnnnnnnnnnnnnnnnnnnnnnnnnnnnnnnnnnnnnnnnnnnnnnnnnnnnnnnnnnnnnnnnnnnnnnnnnnnnnnnnnnnnnnnnnnnnnnnnnnnnnnnnnnnnnnnnnnnnnnnnnnnnnnnnnnnnnnnnnnnnnnnnnnnnnnnnnnnnnnnnnnnnnnnnnnnnnnnnnnnnnnnnnnnnnnnnnnnnnnnnnnnnnnnnnnnnnnnnnnnnnnnnnnnnnnnnnnnnnnnnnnnnnnnnnnnnnnnnnnnnnnnnnnnnnnnnnnnnnnnnnnnnnnnnnnnnnnnnnnnnnnnnnnnnnnnnnnnnnnnnnnnnnnnnnnnnnnnnnnnnnnnnnnnnnnnnnnnnnnnnnnnnnnnnnnnnnnnnnnnnnnnnnnnnnnnnnnnnnnnnnnnnnnnnnnnnnnnnnnnnnnnnnnnnnnnnnnnnnnnnnnnnnnnnnnnnnnnnnnnnnnnnnnnnnnnnnnnnnnnnnnnnnnnnnnnnnnnnnnnnnnnnnnnnnnnnnnnnnnnnnnnnnnnnnnnnnnnnnnnnnnnnnnnnnnnnnnnnnnnnnnnnnnnnnnnnnnnnnnnnnnnnnnnnnnnnnnnnnnnnnnnnnnnnnnnntttaactcctattgaccacgggtctcacctaagtttcccagttcctttcaacctctttctaatagatttcctctttcgttacttttagtaaccatgtcctttgtttccttttattcttccatgtgaacctccactctttaaaagttatactgtttcagtagttataatccacttgccctaggaacaagttagcactgacttttgggtggaataattagtttctgaaggcttgccaggactcctgagcagctaggctctagagttgggctgtctaataacttttttgcaataatggaaatgttctatgtgcagtccagtagggtagccactggccaaacgaggctactgattacttgaggtgtgcctcgtataactgaacttatcgtgttatttaaacaattttttttttctaacgtgaaaaggataaaacaaaactcttgacaattgtaaagtgaacacctatatgccaacctagattctatacttaacatcttttttactgtaatatctcttataataaatcttagtttttcacttaactggtgtaattggtgccannnnnnnnnnnnnnnntagtgctacttaattttgattaaatttagatagccacatgtgtctagtggctaccctttggacagtataactctagagcatggcttggtaac

SEQ ID NO: 23159 - DNA, 144 bp, Macaca Mulatta
ctcatggaaattctctctaagtctaatatgcaggttcacagcccgagagaatctgtatccagtaaacaaactgtgatccaagagcttctaccgagcaaacctcccaagtcccgagtactcctgaagccagccaagttctcttca

SEQ ID NO: 23160 - DNA, 110 bp, Macaca Mulatta
  misc_feature (1)...(110): n = A,T,C or G
ngtgtgactgcacagaaaagttacaaaacaaatttgactttttgcgctcacagttgaatgatatttcatcatttaagaatatctacagatatgcctttgattttgcaagg

SEQ ID NO: 23161 - DNA, 2238 bp, Macaca Mulatta
  misc_feature (1)...(2238): n = A,T,C or G
gtacaagaaaattccccaggacacagagctggattggagcctttctttgattttattgtttctattaatggttcaagattannnnnnnnnnnnnnnnnnnnnnnnnnnnnnnnnnnnnnnnnnnnnnnnnnnnnnnnnnnnnnnnnnnnnnnnnnnnnnnnnnnnnnnnnnnnnnnnnnnnnnnnnnnnnnnnnnnnnnnnnnnnnnnnnnnnnnnnnnnnnnnnnnnnnnnnnnnnnnnnnnnnnnnnnnnnnnnnnnnnnnnnnnnnnnnnnnnnnnnnnnnnnnnnnnnnnnnnnnnnnnnnnnnnnnnnnnnnnnnnnnnnnnnnnnnnnnnnnnnnnnnnnnnnnnnnnnnnnnnnnnnnnnnnnnnnnnnnnnnnnnnnnnnnnnnnnnnnnnnnnnnnnnnnnnnnnnnnnnnnnnnnnnnnnnnnnnnnnnnnnnnnnnnnnnnnnnnnnnnnnnnnnnnnnnnnnnnnnnnnnnnnnnnnnnnnnnnnnnnnnnnnnnnnnnnnnnnnnnnnnnnnnnnnnnnnnnnnnnnnnnnnnnnnnnnnnnnnnnnnnnnnnnnnnnnnnnnnnnnnnnnnnnnnnnnnnnnnnnnnnnnnnnnnnnnnnnnnnnnnnnnnnnnnnnnnnnnnnnnnnnnnnnnnnnnnnnnnnnnnnnnnnnnnnnnnnnnnnnnnnnnnnnnnnnnnnnnnnnnnnnnnnnnnnnnnnnnnnnnnnnnnnnnnnnnnnnnnnnnnnnnnnnnnnnnnnnnnnnnnnnnnnnnnnnnnnnnnnnnnnnnnnnnnnnnnnnnnnnnnnnnnnnnnnnnnnnnnnnnnnnnnnnnnnnnnnnnnnnnnnnnaggtctgatgcctttaccagcaggactgcccaacctccccagcctcaacctcaacctcccagcaccacacatcatgccaggggttggcttacccgaacttgtaaacccaggtnnnnnnnnnnnnnnnnnnnnnnnnnnnnnnnnnnnnnnnnnnnnnnnnnnnnnnnnnnnnnnnnnnnnnnnnnnnnnnnnnnnnnnnnnnnnnnnnnnnnnnnnnnnnnnnnnnnnnnnnnnnnnnnnnnnnnnnnnnnnnnnnnnnnnnnnnnnnnnnnnnnnnnnnnnnnnnnnnnnnnnnnnnnnnnnnnnnnnnnnnnnnnnnnnnnnnnnnnnnnnnnnnnnnnnnnnnnnnnnnnnnnnnnnnnnnnnnnnnnnnnnnnnnnnnnnnnnnnnnnnnnnnnnnnnnnnnnnnnnnnnnnnnnnnnnnnnnnnnnnnnnnnnnnnnnnnnnnnnnnnnnnnnnnnnnnnnnnnnnnnnnnnnnnnnnnnnnnnnnnnnnnnnnnnnnnnnnnnnnnnnnnnnnnnnnnnnnnnnnnnnnnnnnnnnnnnnnnnnnnnnnnnnnnnnnnnnnnnnnnnnnnnnnnnnnnnnnnnnnnnnnnnnnnnnnnnnnnnnnnnnnnnnnnnnnnnnnnnnnnnnnnnnnnnnnnnnnnnnnnnnnnnnnnnnnnnnnnnnnnnnnnnnnnnnnnnnnnnnnnnnnnnnnnnnnnnnnnnnnnnnnnnnnnnnnnnnnnnnnnnnnnnnnnnnnnnnnnnnnnnnnnnnnnnnnnnnnnnnnnnnnnnnnnnnnnnnnnnnnnnnnnnnnnnnnnnnnnnnnnnnnnnnnnnnnnnnnnnnnnnnnnnnnnnnnnnnnnnnnnnnnnnnnnnnnnnnnnnnnnnnnnnnnnnnnnnnnnnnnnnnnnnnnnnnnnnnnnnnnnnnnnnnnnnnnnnnnnnnnnnnnnnnnnnnnnnnnnnnnnnnnnnnnnnnnnnnnnnnnnnnnnnnnnnnnnnnnnnnnnnnnnnnnnnnnnnnnnnnnnnnnnnnnnnnnnnnnnnnnnnnnnnnnnnnnnnnnnnnnnnnnnnnnnnnnnnnnnnnnnnnnnnnnnnnnnnnnnnnnnnnnnnnnnnnnnnnnnnnnnnnnnnnnnnnnnnnnnnaggtgtcacagttttaaaccagaaggtggcactctgtggtcttttgcccataatagctatactggggaaagcatagatacagcaataaagtacagtaattttactttttttcttgtgttacatctaaattacaacccttaattgccacgtgtgcacttactactctccggtatgtcncttactactctccggtatgtcatgcatctttaacttttcatgtcctatgtttgctttctcccgtttttaagagatggtaagctaactg

SEQ ID NO: 23162 - DNA, 138 bp, Macaca Mulatta
caattcctatttgttggtatgggaagagcacctgccagggcagagcctgagagaaatatcctattaacctcaggaataatgctcaattctgggaaaaagtcaggaagatggacatttatgtgttccatagcaatacat

SEQ ID NO: 23163 - DNA, 361 bp, Macaca Mulatta
gatattagttcatattacaattttccgacgttccaaaaagtagaatttatatagagatcaaacattcaaaagatacattctctcctaagctcaaaggttataattttattgggtagaacagtataggtaagttgacatgaaattgcatcctgtaccatgtccacattagtaatatcaaaacttttgagaaatactggattttgaatggtttgagactaattctttaaaaattaggctgagcaacactcacaatccaaaaatattcattttaagccttacacatttgaagagtggtacattttgtataaaatcatatttcataccattatttccacatacctacttttcatctgctgcttat

SEQ ID NO: 23164 - DNA, 1310 bp, Macaca Mulatta
  misc_feature (1)...(1310): n = A,T,C or G
gggggaggtgattgttggattctagaggaaggggctccgttacattggagagctggagtggtctggagttccacggtgtggtgagccagaggtcacctctcctgcggcttctcagtgtctcgccggcgaggttcggcccgagttggatagacatagcccttggccgatttaaacaacctaataagcaatacagctgcctcaaatctttgggaatttcagaatgactgacactgccgaagctgttccaaattttgaagagatgtttgctagtagattcacagaaaatgacaaggagtatcaggaatacctgaaacgccctcctgagtctcctccaattgtggaggaatggaatagcagagctggtgggaaccaaagaaacagaggcaatcggttgcaagacaacagacagttcagaggcagggacaacagatgggggtggccaagtgacaatcgatccaatcagtggcatggacgatcctggggtaacaattacccacaacacagacaagaaccttactatccccagcaatatggacattatggttacaaccagcggcctccttacggttactactgatagaaatgttggcagcttttagtaaagcatttactctgtttacatgacaaaagtttgggtgttttctgttggtcatagttttatatctgattttagagaatggattattgattttgtggaagttgagactttaaaaaaaaatagatcttacttgccgaagatgcgaatgggttgctggggaaatacctgaaattgtggattatattgcttgacttctacctcagaatcttctttatttcatgacttaatactgctatgagtttggtatattatttgacctctaggagttctttgttttacacagnnnnnnnnnnnnnnnnnnagaaaatgcttacttttactttgtaaggtaagagagttatccatatgcttagatgtgttcgtttctaaaattctagaggttgatataatcagctcatgaatgcacagctatgcttcttgtgatagattgtacataacattagcagttgaaaggtaaaacaatcgcttttttttttgcttttgcttttgtaaagtactatggtactttgtgattccttactctatagatgagtcagcgtcacatttatttgggtttctttttagaggaaaatcagtaataaagctgtaaaataagaaaaannnnnnnnnnnnnnnnnnnnnnnnnnnataaaaaaataannaattttgtggtnagaaatgacctttaagaaaaatatcttggagaatatattttgtaaagaggtgtcctttt

SEQ ID NO: 23165 - DNA, 122 bp, Macaca Mulatta
agaatgtacctgaaacatgggagcccagttaaaatgatggagagttatattgcagttctcacaaaggggatatgccagagtgaagaaaatggctctttccttagtaaggattttgatgtccg

SEQ ID NO: 23166 - DNA, 112 bp, Macaca Mulatta
aaggtgatttacttcacagccttgttcccttacctggtcctgaccatctttgtcatcagagggctgaccctgccgggggccacacaaggactaatctacttgttcactccca

SEQ ID NO: 23167 - DNA, 796 bp, Macaca Mulatta
gggagacaacttttcttccaatgtggcccagggaagccaaaagactggacacctctgatttatactagctcatcttccttgttcaaaaatttggccaaatagttattgtcagcattcttgggtgaggattagcctaccacgttctaatctggccctgccactaccatgctctacctttagcaagttggtttacctctctgggctgccccatttttaactgtaggttgacgtgtctggagtgatccatcccacctctaatattttgtgaatttatgactttgccttcagatgaggctaagctatacacaaaacagtataaactagggtactgcctcatacctctcgtaggctctcccaaatctctgtaccttccactcaacccttaattgaaccaagctttagtcagggggtctgagtatctaccagaatgtcaggagactcatcttgcacagtcacggtggccagtgtttctggtgggttgtgctgaaacagctcttctgagaacttcccaccacccatgctctaacctggggacagccatcccgtgcctcagaataagtaccaattcataggtcatgcatggtactcttgtccccaagaaaagttaggaaggttgtcagcttgaatgaggggaggtgcccttctggggatctccgtgttgggtgtatccgtggccattgactaccgaaaccagaaaaatacttttttgccctgcctattaccctgggcagaatgtatggggtgaaaagtcatcctgtattttgagttgaaaagggccagtggggtttgtaaattc

SEQ ID NO: 23168 - DNA, 1039 bp, Macaca Mulatta
  misc_feature (1)...(1039): n = A,T,C or G
ggatgaaaagaatcagctgatgacaaccaatgtgtggctcaaacagnnnnnnnnnnnnnnnnnnnnnnnnnnnnnnnnnnnnnnnnnnnnnnnnnnnnnnnnnnnnnnnnnnnnnnnnnnnnnnnnnnnnnnnnnnnnnnnnnnnnnnnnnnnnnnnnnnnnnnnnnnnnnnnnnnnnnnnnnnnnnnnnnnnnnnnnnnnnnnnnnnnnnnnnnnnnnnnnnnnnnnnnnnnnnnnnnnnnnnnnnnnnnnnnnnnnnnnnnnnnnnnnnnnnnnnnnnnnnnnnnnnnnnnnnnnnnnnnnnnnnnnnnnnnnnnnnnnnnnnnnnnnnnnnnnnnnnnnnnnnnnnnnnnnnnnnnnnnnnnnnnnnnnnnnnnnnnnnnnnnnnnnnnnnnnnnnnnnnnnnnnnnnnnnnnnnnnnnnnnnnnnnnnnnagggatggcatgtactcctatccctttatcacatattccttcgtcctgagacgcctgcctttattctatacactctttctcatcatcccctgcctggggctgtctttcctaacagttctcgtgttctatttaccttcagatgagggagaaaaactttcattatccacatcagtcttggtttctctgactgttttccttttagtgattgaagaaatcatcccatcgtcttccaaagtcattcctctcattggggagtacctgctgttcatcatgattttcgtgaccctgtccatcattgttaccgtgtttgtcattaacgttcaccatagatcttcttccacataccaccccatggccccctgggttaagaggttctttctgcagaaacttccaaaattactttgcatgaaagaccacgtggatcgctactcattcccagagaaagaggagagtcaaccagtagtgaaaggcaaagtcctcaaaaaaaagaaacagaaacagcttagtgatggagaaaaagttctggttgcttttttggaaaaagctgctgattctattagatacatttcaagacatgtgaagaaagaacattttatcagccaggt

SEQ ID NO: 23169 - DNA, 1965 bp, Macaca Mulatta
  misc_feature (1)...(1965): n = A,T,C or G
agtcttttgcacagaagctccagctccgggtgccctccgtggagtctttgtttcgaagtccaataaaggaatctctattccggtcttcttctaaagagtctttggtacgaacatcttccagagaatccctgaatcgacttgacctggacagttctactgccaattttgatccaccctccgatatggatagcgaggctgaagacttggtagggaattcagacagtctcaacaaagaacagttgattcatcggttgcgaagaatggaacgaagcttaagtagctacagaggaaaatattctgagnnnnnnnnnnnnnnnnnnnnnnnnnnnnnnnnnnnnnnnnnnnnnnnnnnnnnnnnnnnnnnnnnnnnnnnnnnnnnnnnnnnnnnnnnnnnnnnnnnnnnnnnnnnnnnnnnnnnnnnnnnnnnnnnnnnnnnnnnnnnnnnnnnnnnnnnnnnnnnnnnnnnnnnnnnnnnnnnnnnnnnnnnnnnnnnnnnnnnnnnnnaggtttctctgctgaaacaacgattacgaaatggcccgatgaatgttgatgtactgaaaccacttcctcagctggaaccacaggctgaattcttgactaaagaagagaatccagagagtgatgtagagccagtannnnnnnnnnnnnnnnnnnnnnnnnnnnnnnnnnnnnnnnnnnnnnnnnnnnnnnnnnnnnnnnnnnnnnnnnnnnnnnnnnnnnnnnnnnnnnnnnnnnnnnnnnnnnnnnnnnnnnnnnnnnnnnnnnnnnnnnnnnnnnnnnnnnnnnnnnnnnnnnnnnnnnnnnnnnnnnnnnnnnnnnnnnnnnnnnnnnnnnnnnnnnnnnnnnnnnnnnnnnnnnnnnnnnnnnnnnnnnnnnnnnnnnnnnnnnnnnnnnnnnnnnnnnnnnnnnnnnnnnnnnnnnnnnnnnnnnnnnnnnnnnnnnnnnnnnnnnnnnnnnnnnnnnnnnnnnnnnnnnnnnnnnnnnnnnnnnnnnnnnnnnnnnnnnnnnnnnnnnnnnnnnnnnnnnnnnnnnnnnnnnnnnnnnnnnnnnnnnnnnnnnnnnnnnnnnnnnnnnnnnnnnnnnnnnnnnnnnnnnnnnnnnnnnnnnnnnnnnnnnnnnnnnnnnnnnnnnnnnnnnnnnnnnnnnnnnnnnnnnnnnnnnnnnnnnnnnnnnnnnnnnnnnnnnnnnnnnnnnnnnnnnnnnnnnnnnnnnnnnnnnnnnnnnnnnnnnnnnnaaatcctcagaagaacaaattgctaagctacagaagcttcatgaaaaggagctggccagaaaagagcaggaactgaccaagaagcttcagacccgagaaagggaatagcaggagcaaatgaaagtagctcttnnnnnnnnnnnnnnnnnnnnnnnnnnnnnnnnnnnnnnnnnnnnnnnnnnnnnnnnnnnnnnnnnnnnnnnnnnnnnnnnnnnnnnnnnnnnnnnnnnnnnnnnnnnnnnnnnnnnnnnnnnnnnnnnnnnnnnnnnnnnnnnnnnnnnnnnnnnagaattcttgaattggaaagttctttggaaaaaagcttacaagaaaacaaaaatcagtcaaaagatttggctgttcatctggaagctgaaaaaaataagcacaataaggagattacagtcatggttgaaaaacacaagacagaattggaaagccttaagcatcagcaggatgccctttggactgaaaaactacaagtcttaaagcaacaatatcagacagaaatggaaaaacttagggaaaggtgtgaacaagaaaaagaaacattgttgaaagacaaagagattctcttccaggcccacatagaagaaatgaatgaaaagactttagaaaagcttgacgtgaaacaaacagaactagaatcattatcttctgaactgtcagaggtattaaaagcccgtcacaagctagaagaggaactttctgttctgaaagatcaaaca

SEQ ID NO: 23170 - DNA, 434 bp, Macaca Mulatta
  misc_feature (1)...(434): n = A,T,C or G
taggtttcaaggccaccctcccacctttcatgcgtaatacagtggccgcagacttccaggggaatgattctgataatgacnnnnnnnnnnnnnnnnnnnnnnnnnnnnnnnnnnnnnnnnnnnnnnnnnnnnnnnnnnnnnnnnnnagatcatgctcaagaagccagcagaggaaggaaatgattcgaaggaagtgccagaagcatctggcccacaaaacgatgggaaatagctgtgccccccgggaaaagcaaatacctctgagaagattaacaagagatctggnggaaatagggaggcccaagaagaggaagagagacccgggacagctcactggtggagcagtcagaacacacacaacattggtcgattaagtttatcatcgtctatgggtacagttcctgttacccccaaaactattacaaacaagaggg

SEQ ID NO: 23171 - DNA, 885 bp, Macaca Mulatta
  misc_feature (1)...(885): n = A,T,C or G
ggggctcttacgggttgagctgcagccactgaagattgtggaaaaacatgcctcttgtttctcaccccatatcatgaaatgggttctttcaagttcatccttgctgcttttcctggagacgtctactgaactgctggttccttatctggccctgggtgaggagatataagcttaccaaagtcagcaacaatatgctacacagctgctttgctcaaagcaagagctgtctctgacaaattctctcctgaggctgcatctcggcgggggctgagcacagcagagatgaatgcagtagaagccattcatagagctgtggaattcaatcctcatgtgccaaaatacctactagaaatgaaaagcttaatcctacccccagaacatatcctgaagagaggagacagtgaagcaattaacatatgcattctttcatcttgcacactggtaagaaagtgggaaaggggctttgaaatctttttggcttttgtacgtggggaaaggcactattttccggatggattcccctttatccccctttggaaaaaaaggggaccaaccctcattttttaatcccccttaccccccaaaccctggtaactagaaataaaaggctcagaacccgcagaaatccttgcatttcccaattcctttttaccaatgagaaagaacgccccaatattttatcacccccaaagaaaaagaggaagaccttttccgccgtttcacatattaattacccccattttaaacggaataggaaatataacatgttttccccatgccacaaaagtacaatgtgctggagagtacccctctatcttagaaaaccactcctatatatttcncaccgggtatacattttatcgtgggggagatgctatctcacta

SEQ ID NO: 23172 - DNA, 399 bp, Macaca Mulatta
  misc_feature (1)...(399): n = A,T,C or G
actattatagatactctaacgccaaggtcagctgctggtacaagtacctccttttcagctacaacatcatcttctgggngggtgtgctgtccgacctcaccaaagtgacccggatgcatggaatcgaccccgtggtgctggtcctgatggtgggcgtggtgatgttcaccctggggttcgccggctgtgtgggggctctgcgggagaatatctgcctgctcaactttnttctgtggcaccatcgtgctcatcttcttcctggagctggctgtggcggtgctggccttcctgttccaggactgggtgagggaccgattccgggagttcttcgagagcaacatcaagtcctaccgggacgatatcgacctgcagaacctcatcgactcccttcagaaagct

SEQ ID NO: 23173 - DNA, 307 bp, Macaca Mulatta
tgtgaggaaggaacgtgcttggggctgttgccatacctgcacagcattctttcaaaatagtgcctgcccgtgcttcttccttatgtcccacagacaggaccttcactaagaaacgttcttaaaatggccccatccagtgagattttccattatacgaacatacttgaaataattttacaatttactagtgtggttctgcccctgcatacccaatgggaatgatgcacttgtatgggtaattaggcatctcccaccctcccccgacaaaagcacactgggagttttatagcagggtcacatggctagt

SEQ ID NO: 23174 - DNA, 5335 bp, Macaca Mulatta
  misc_feature (1)...(5335): n = A,T,C or G
aggccgtagccatggacgccctgtctctggagcagcagctgccctacgccttcttcacccaggcgggctcccagcnnnnnnnnnnnnnnnnnnnnnnnnnnnnnnnnnnnnnnnnnnnnnnnnnnnnnnnnnnnnnnnnccacccccacaggcgcccgtccgcctgccccctggtggccccctgttgcccagcgccagcctgactcgtgggccacagccgcccccacttgcggtcacggtaccgtcctctctcccccagtcccccccagagaaccctggccagccgtcgatggggatcgacatcgcctcggngcgccggctctacagcagtaccgaactagcgccggctccccggccaaccagtctcccacctcaccagtctccaatcaaggcttctccccggggagctccccgcaannnnnnnnnnnnnnnnnnnnnnnnnnnnnnnnnnnnnnnnnnnnnnnnnnnnnnnnnnnnnnnnnnnnnnnnnnnnnnnnnnnnnnnnnnnnnnnnnnnnnnnnnnnnnnnnnnnnnnnnnnnnnnnnnnnnnnnnnnnnnnnnnnnnnnnnnnnnnnnnnnnnnnnnnnnnnnnnnnnnnnnnnnnnnnnnnnnnnnnnnnnnnnnnnnnnnnnnnnnnnnnnnnnnnnnnnnnnnnnnnnnnnnnnnnnnnnnnnnnnnnnnnnnnnnnnnnnnnnnnnnnnnnnnnnnnnnnnnnnnnnnnnnnnnnnnnnnnnnnnnnnnnnnnnnnnnnnnnnnnnnnnnnnnnnnnnnnnnnnnnnnnnnnnnnnnnnnnnnnnnnnnnnnnnnnnnnnnnnnnnnnnnnnnnnnnnnnnnnnnnnnnnnnnnnnnnnnnnnnnnnnnnnnnnnnnnnnnnnnnnnnnnnnnnnnnnnnnnnnnnnnnnnnnnnnnnnnnnnnnnnnnnnnnnnnnnnnnnnnnnnnnnnnnnnnnnnnnnnnnnnnnnnnnnnnnnnnnnnnnnnnnnnnnnnnnnnnnnnnnnnnnnnnnnnnnnnnnnnnnnnnnnnnnnnnnnnnnnnnnnnnnnnnnnnnnnnnnnnnnnnnnnnnnnnnnnnnnnnnnnnnnnnnnnnnnnnnnnnnnnnnnnnnnnnnnnnnnnnnnnnnnnnnnnnnnnnnnnnnnnnnnnnnnnnnnnnnnnnnnnnnnnnnnnnnnnnnnnnnnnnnnnnnnnnnnnnnnnnnnnnnnnnnnnnnnnnnnnnnnnnnnnnnnnnnnnnnnnnnnnnnnnnnnnnnnnnnnnnnnnnnnnnnnnnnnnnnnnnnnnnnnnnnnnnnnnnnnnnnnnnnnnnnnnnnnnnnnnnnnnnnnnnnnnnnnnnnnnnnnnnnnnnnnnnnnnnnnnnnnnnnnnnnnnnnnnnnnnnnnnnnnnnnnnnnnnnnnnnnnnnnnnnnnnnnnnnnnnnnnnnnnnnnnnnnnnnnnnnnnnnnnnnnnnnnnnnnnnnnnnnnnnnnnnnnnnnnnnnnnnnnnnnnnnnnnnnnnnnnnnnnnnnnnnnnnnnnnnnnnnnnnnnnnnnnnnnnnnnnnnnnnnnnnnnnnnnnnnnnnnnnnnnnnnnnnnnnnnnnnnnnnnnnnnnnnnnnnnnnnnnnnnnnnnnnnnnnnnnnnnnnnnnnnnnnnnnnnnnnnnnnnnnnnnnnnnnnnnnnnnnnnnnnnnnnnnnnnnnnnnnnnnnnnnnnnnnnnnnnnnnnnnnnnnnnnnnnnnnnnnnnnnnnnnnnnnnnnnnnnnnnnnnnnnnnnnnnnnnnnnnnnnnnnnnnnnnnnnnnnnnnnnnnnnnnnnnnnnnnnnnnnnnnnnnnnnnnnnnnnnnnnnnnnnnnnnnnnnnnnnnnnnnnnnnnnnnnnnnnnnnnnnnnnnnnnnnnnnnnnnnnnnnnnnnnnnnnnnnnnnnnnnnnnnnnnnnnnnnnnnnnnnnnnnnnnnnnnnnnnnnnnnnnnnnnnnnnnnnnnnnnnnnnnnnnnnnnnnnnnnnnnnnnnnnnnnnnnnnnnnnnnnnnnnnnnnnnnnnnnnnnnnnnnnnnnnnnnnnnnnnnnnnnnnnnnnnnnnnnnnnnnnnnnnnnnnnnnnnnnnnnnnnnnnnnnnnnnnnnnnnnnnnnnnnnnnnnnnnnnnnnnnnnnnnnnnnnnnnnnnnnnnnnnnnnnnnnnnnnnnnnnnnnnnnnnnnnnnnnnnnnnnnnnnnnnnnnnnnnnnnnnnnnnnnnnnnnnnnnnnnnnnnnnnnnnnnnnnnnnnnnnnnnnnnnnnnnnnnnnnnnnnnnnnnnnnnnnnnnnnnnnnnnnnnnnnnnnnnnnnnnnnnnnnnnnnnnnnnnnnnnnnnnnnnnnnnnnnnnnnnnnnnnnnnnnnnnnnnnnnnnnnnnnnnnnnnnnnnnnnnnnnnnnnnnnnnnnnnnnnnnnnnnnnnnnnnnnnnnnnnnnnnnnnnnnnnnnnnnnnnnnnnnnnnnnnnnnnnnnnnnnnnnnnnnnnnnnnnnnnnnnnnnnnnnnnnnnnnnnnnnnnnnnnnnnnnnnnnnnnnnnnnnnnnnnnnnnnnnnnnnnnnnnnnnnnnnnnnnnnnnnnnnnnnnnnnnnnnnnnnnnnnnnnnnnnnnnnnnnnnnnnnnnnnnnnnnnnnnnnnnnnnnnnnnnnnnnnnnnnnnnnnnnnnnnnnnnnnnnnnnnnnnnnnnnnnnnnnnnnnnnnnnnnnnnnnnnnnnnnnnnnnnnnnnnnnnnnnnnnnnnnnnnnnnnnnnnnnnnnnnnnnnnnnnnnnnnnnnnnnnnnnnnnnnnnnnnnnnnnnnnnnnnnnnnnnnnnnnnnnnnnnnnnnnnnnnnnnnnnnnnnnnnnnnnnnnnnnnnnnnnnnnnnnnnnnnnnnnnnnnnnnnnnnnnnnnnnnnnnnnnnnnnnnnnnnnnnnnnnnnnnnnnnnnnnnnnnnnnnnnnnnnnnnnnnnnnnnnnnnnnnnnnnnnnnnnnnnnnnnnnnnnnnnnnnnnnnnnnnnnnnnnnnnnnnnnnnnnnnnnnnnnnnnnnnnnnnnnnnnnnnnnnnnnnnnnnnnnnnnnnnnnnnnnnnnnnnnnnnnnnnnnnnnnnnnnnnnnnnnnnnnnnnnnnnnnnnnnnnnnnnnnnnnnnnnnnnnnnnnnnnnnnnnnnnnnnnnnnnnnnnnnnnnnnnnnnnnnnnnnnnnnnnnnnnnnnnnnnnnnnnnnnnnnnnnnnnnnnnnnnnnnnnnnnnnnnnnnnnnnnnnnnnnnnnnnnnnnnnnnnnnnnnnnnnnnnnnnnnnnnnnnnnnnnnnnnnnnnnnnnnnnnnnnnnnnnnnnnnnnnnnnnnnnnnnnnnnnnnnnnnnnnnnnnnnnnnnnnnnnnnnnnnnnnnnnnnnnnnnnnnnnnnnnnnnnnnnnnnnnnnnnnnnnnnnnnnnnnnnnnnnnnnnnnnnnnnnnnnnnnnnnnnnnnnnnnnnnnnnnnnnnnnnnnnnnnnnnnnnnnnnnnnnnnnnnnnnnnnnnnnnnnnnnnnnnnnnnnnnnnnnnnnnnnnnnnnnnnnnnnnnnnnnnnnnnnnnnnnnnnnnnnnnnnnnnnnnnnnnnnnnnnnnnnnnnnnnnnnnnnnnnnnnnnnnnnnnnnnnnnnnnnnnnnnnnnnnnnnnnnnnnnnnnnnnnnnnnnnnnnnnnnnnnnnnnnnnnnnnnnnnnnnnnnnnnnnnnnnnnnnnnnnnnnnnnnnnnnnnnnnnnnnnnnnnnnnnnnnnnnnnnnnnnnnnnnnnnnnnnnnnnnnnnnnnnnnnnnnnnnnnnnnnnnnnnnnnnnnnnnnnnnnnnnnnnnnnnnnnnnnnnnnnnnnnnnnnnnnnnnnnnnnnnnnnnnnnnnnnnnnnnnnnnnnnnnnnnnnnnnnnnnnnnnnnnnnnnnnnnnnnnnnnnnnnnnnnnnnnnnnnnnnnnnnnnnnnnnnnnnnnnnnnnnnnnnnnnnnnnnnnnnnnnnnnnnnnnnnnnnnnnnnnnnnnnnnnnnnnnnnnnnnnnnnnnnnnnnnnnnnnnnnnnnnnnnnnnnnnnnnnnnnnnnnnnnnnnnnnnnnnnnnnnnnnnnnnnnnnnnnnnnnnnnnnnnnnnnnnnnnnnnnnnnnnnnnnnnnnnnnnnnnnnnnnnnnnnnnnnnnnnnnnnnnnnnnnnnnnnnnnnnnnnnnnnnnnnnnnnnnnnnnnnnnnnnnnnnnnnnnnnnnnnnnnnnnnnnnnnnnnnnnnnnnnnnnnnnnnnnnnnnnnnnnnnnnnnnnnnnnnnnnnnnnnnnnnnnnnnnnnnnnnnnnnnnnnnnnnnnnnnnnnnnnnnnnnnnnnnnnnnnnnnnnnnnnnnnnnnnnnnnnnnnnnnnnnnnnnnnnnnnnnnnnnnnnnnnnnnnnnnnnnnnnnnnnnnnnnnnnnnnnnnnnnnnnnnnnnnnnnnnnnnnnnnnnnnnnnnnnnnnnnnnnnnnnnnnnnnnnnnnnnnnnnnnnnnnnnnnnnnnnnnnnnnnnnnnnnnnnnnnnnnnnnnnnnnnnnnnnnnnnnnnnnnnnnnnnnnnnnnnnnnnnnnnnnnnnnnnnnnnnnnnnnnnnnnnnnnnnnnnnnnnnnnnnnnnnnnnnnnnnnnnnggtcctgatggagccatctcagaggccgaggggccctccctgtgggggtgggacgcaagggctctcagaacaagggccacaaagccgatggcacagatgtgcccctgggcctggcccgtcacctgcgtgtggtgctctgggtcagggtgtgcgggcgccagagccttccctacacagcctaagagcaggggcaagactcggcccctcaccctgggatgcctgcctgggctacatggacacctgggtctctctctatccccattcgccatggaccaggggcctccatttcctggggggtcttgcggcgtgtgatttggtccctgggatgttccgcagccagctccacctgagtgtcctgttccctgtggcccttggccttccagggtcctgaccaggcaggggtcaggcaccccatacccttccgtgtggcacaggtgtccacccacccccactggccacagacactgttctcccctgggagcaggaggtggagtaagttgtacccccaggactgggtgctggggagctccaaagggcatgggtggggcaggaacgagtgcctcgtgacccgagcctcagtttctctcctgtcactttctcagacctgcaggtctcagggccctggctcctcctgggcaggatggggggcaggggctgggccttggggtgctggctttgatgattccagaggctctgtccaccttctgggctcctggccagcagcccatccccagaagccagggac

SEQ ID NO: 23175 - DNA, 3116 bp, Macaca Mulatta
  misc_feature (1)...(3116): n = A,T,C or G
tttagggagagactgcttccgggtcgaaggtcttgcttccggannnnnnnnnnnnnnnnnnnnnnnnnnnnnnnnnnnnnnnnnnnnnnnnnnnnnnnnnnnnnnnnnnnnnnnnnnnnnnnnnnnnnnnnnnnnnnnnnnnnnnnnnnnnnnnnnnnnnnnnnnnnnnnnnnnnnnnnnnnnnnnnnnnnnnnnnnnnnnnnnnnnnnnnnntcaggcatctcaagatgaaagtttcggtaatactacaccaagaaaccaggttatccctcgaactcctagctcatttcgacagccttnnnnnnnnnnnnnnnnnnnnnnnnnnnnnnnnnnnnnnnnnnnnnnnnnnnnnnnnnnnnnnnnnnnnnnnnnnnnnnnnnnnnnnnnnnnnnnnnnnnnnnnnnnnnnnnnnnnnnnnnnnnnnnnnnnnnnnnnnnnnnnnnnnnnnnnnnnnnnnnnnnnnnnnnnnnnnnnnnnnnnnnnnnnnnnnnnnnnnnnnnnnnnnnnnnnnnnnnnnnnnnnnnnnnnnnnnnnnnnnnnnnnnnnnnnnnnnnnnnnnnnnnnnnnnnnnnnnnnnnnnnnnnnnnnnnnnnnnnnnnnnnnnnnnnnnnnnnnnnnnnnnnnnnnnnnnnnnnnnnnnnnnnnnnnnnnnnnnnnnnnnnnnnnnnnnnactgagtaaaatagtgagtcgagcaacacctgggacttcaaaaattttcaaaaacagccagtatgctctggcttcttcaacaggagatggtcacatggaggctgctggcttctttgtatagnnnnnnnnnnnnnnnnnnnnnnnnnnnnnnnnnnnnnnnnnnnnnnnnnnnnnnnnnnnnnnnnnnnnnnnnnnnnnnnnnnnnnnnnnnnnnnnnnnnnnnnnnnnnnnnnnnnnnnnnnnnnnnnnnnnnnnnnnnnnnnnnnnnnnnnnnnnnnnnnnnnnnnnnnnnnnnnnnnnnnnnnnnnnnnnnnnnnnnnnnnnnnnnnnnnnnnnnnnnnnnnnnnnnnnnnnnnnnnnnnnnnnnnnnnnnnnnnnnnnnnnnnnnnnnnnnnnnnnnnnnnnnnnnnnnnnnnnnnnnnnnnnnnnnnnnnnnnnnnnnnnnnnnnnnnnnnnnnnnnnnnnnnnnnnnnnnnnnnnnnnnnnnnnnnnnnnnnnnnnnnnnnnnnnnnnnnnnnnnnnnnnnnnnnnnnnnnnnnnnnnnnnnnnnnnnnnnnnnnnnnnnnnnnnnnnnnnnnnnnnnnnnnnnnnnnnnnnnnnnnnnnnnnnnnnnnnnnnnnnnnnnnnnnnnnnnnnnnnnnnnnnnnnnnnnnnnnnnnnnnnnnnnnnnnnnnnnnnnnnnnnnnnnnnnnnnnnnnnnnnnnnnnnnnnnnnnnnnnnnnnnnnnnnnnnnnnnnnnnnnnnnnnnnnnnnnnnnnnnnnnnnnnnnnnnnnnnnnnnnnnnnnnnnnnnnnnnnnnnnnnnnnnnnnnnnnnnnnnnnnnnnnnnnnnnnnnnnnnnnnnnnnnnnnnnnnnnnnnnnnnnnnnnnnnnnnnnnnnnnnnnnnnnnnnnnnnnnnnnnnnnnnnnnnnnnnnnnnnnnnnnnnnnnnnnnnnnnnnnnnnnnnnnnnnnnnnnnnnnnnnnnnnnnnnnnnnnnnnnnnnnnnnnnnnnnnnnnnnnnnnnnnnnnnnnnnnnnnnnnnnnnnnnnnnnnnnnnnnnnnnnnnnnnnnnnnnnnnnnnnnnnnnnnnnnnnnnnnnnnnnnnnnnnnnnnnnnnnnnnnnnnnnnnnnnnnnnnnnnnnnnnnnnnnnnnnnnnnnnnnnnnnnnnnnnnnnnnnnnnnnnnnnnnnnnnnnnnnnnnnnnnnnnnnnnnnnnnnnnnnnnnnnnnnnnnnnnnnnnnnnnnnnnnnnnnnnnnnnnnnnnnnnnnnnnnnnnnnnnnnnnnnnnnnnnnnnnnnnnnnnnnnnnnnnnnnnnnnnnnnnnnnnnnnnnnnnnnnnnnnnnnnnnnnnnnnnnnnnnnnnnnnnnnnnnnnnnnnnnnnnnnnnnnnnnnnnnnnnnnnnnnnnnnnnnnnnnnnnnnnnnnnnnnnnnnnnnnnnnnnnnnnnnnnnnnnnnnnnnnnnnnnnnnnnnnnnnnnnnnnnnnnnnnnnnnnnnnnnnnnnnnnnnnnnnnnnnnnnnnnnnnnnnnnnnnnnnnnnnnnnnnnnnnnnnnnnnnnnnnnnnnnnnnnnnnnnnnnnnnnnnnnnnnnnnnnnnnnnnnnnnnnnnnnnnnnnnnnnnnnnnnnnnnnnnnnnnnnnnnnnnnnnnnnnnnnnnnnnnnnnnnnnnnnnnnnnnnnnnnnnnnnnnnnnnnnnnnnnnnnnnnnnnnnnnnnnnnnnnnnnnnnnnnnnnnnnnnnnnnnnnnnnnnnnnnnnnnnnnnnnnnnnnnnnnnnnnnnnnnnnnnnnnnnnnnnnnnnnnnnnnnnnnnnnnnnnnnnnnnnnnnnnnnnnnnnnnnnnnnnnnnnnnnnnnnnnnnnnnnnnnnnnnnnnnnnnnnnnnnnnnnnnnnnnnnnnnnnnnnnnnnnnnnnnnnnnnnnnnnnnnnnnnnnnnnnnnnnnnnnnnnnnnnnnnnnnnnnnnnnnnnnnnnnnnnnnnnnnnnnnnnnnnnnnnnnnnnnnnnnnnnnnnnnnnnnnnnnnnnnnnnnnnnnnnnnnnnnnnnnnnnnnnnnnnnnnnnnnnnnnnnnnnnnnnnnnnnnnnnnnnnnnnnnnnnnnnnnnnnnnnnnnnnnnnnnnnnnnnnnnnnnnnnnggtattttctaaggaagagctaaggaagttgctgcagaagctaagagagtcctctctaatgctcctagaccagggacttgacccattagggtatgaaattcagttatagtttaatctttgtaatctcactaattttcatgataaatgaagtttttaataaaatatacttattattaattttttcttttgcattgccatgtaaaatttagacatttgaattttgtacgtttcagaatattatcgtgacactttgaacatgtaatgtatatatatcagcgtttctctgtatgcttattaataaaactatataaaaactaaaatttttgattttacaa

SEQ ID NO: 23176 - DNA, 723 bp, Macaca Mulatta
  misc_feature (1)...(723): n = A,T,C or G
gattgtgaaagtcgggatggatatccatttgaatgaaatggctggagacatcttggtttttctgactggnnnnnnnnnnnnnnnnnnnnnnnnnnnnnnnnnnnnnnnnnnnnnnnnnnnnnnnnnnnnnnnnnnnnnnnnnnnnnnnnnnnnnnnnnnnnnnnnnnnnnnnnnnnnnnnnnnnnnnnnnnnnnnnnnnnnnnnnnnnnnnnnnnnnnnnnnnnnnnnnnnnnnnnnnnnnnnnnnnnnnnnnnnnnnnnnnnnnnnnnnnnnnnnnnnnnnnnnnnnnnnnnnnnnnnnnnnnnnnnnnnnnnnnnnnnnnnnnnnnnnnnnnnnnnnnnnnnnnnnnnnnnnnnnnnnnnnnnnnnnnnnnnnnnnnnnnnnnnnnnnnnnnnnnnnnnnnnnnnnnnnnnnnnnnnnnnnnnnnnnnnnnnnnnnnnnnnnnnnnnnnnnnnnnnnnnnnnnnnnnnnnnnnnnnnnnnnnnnnnnnnnnnnnnnnnnnnnatgctttcggatctatagtaaagatttttggaaccagtgtatgcctgaccatgtgatccctgaaattaagagaactagtttgacatctgtagttctgaccttaaagtgccttgccatacacgatgtcataaggnnnggtttccctatttggatccacctaatgagagacttattttagaagctcttaaacaactttaccagtgtgatgctattgacagg

SEQ ID NO: 23177 - DNA, 2334 bp, Macaca Mulatta
  misc_feature (1)...(2334): n = A,T,C or G
ccctgtcggatcagaggcgctactccctcatcgacccgtcctcggcgcccgagctcctgcggctgcagcaccagctgatgagcacggaggacgccctgcgggacgcactggaccaggctcagcaggtggagaagctgatggaggccatgaggagctgccctgacaaggcccagnnnnnnnnnnnnnnnnnnnnnnnnnnnnnnnnnnnnnnnnnnnnnnnnnnnnnnnnnnnnnnnnnnnnnnnnnnnnnnnnnnnnnnnnnnnnnnnnnnnnnnnnnnnnnnnnnnnnnnnnnnnnnnnnnnnnnnnnnnnnnnnnnnnnnnnnnnnnnnnnnnnnnnnnnnnnnnnnnnnnnnnnnnnnnnnnnnnnnnnnnnnnnnnnnnnnnnnnnnnnnnnnnnnnnnnnnnnnnnnnnnnnnnnnnnnnnnnnnnnnnnnnnnnnnnnnnnnnnnnnnnnnnnnnnnnnnnnnnnnnnnnnnnnnnnnnnnnnnnnnnnnnnnnnnnnnnnnnnnnnnnnnnnnnnnnnnnnnnnnnnnnnnnnnnnnnnnnnnnnnnnnnnnnnnnnnnnnnnnnnnnnnnnnnnnnnnnnnnnnnnnnnnnnnnnnnnnnnnnnnnnnnnnnnnnnnnnnnnnnnnnnnnnnnnnnnnnnnnnnnnnnnnnnnnnnnnnctaagtttgtccatgcaggcaccaagggggaacgtccagtctttaagagccaagtgggggccccttttccgaagccactttcaggccaaggcggtccccagggctgctcgtccccaccttctgaaccttcttcaaacagtggtaccagttcccctcagccagcaaaaatgcccagcgaggcccccaggttcaaggtgttggcgggggcggagggcaggggaacagggtctttctcccgccgcccaccaacaccnnnnnnnnnnnnnnnnnnnnnnnnnnnnnnnnnnnnnnnnnnnnnnnnnnnnnnnnnnnnnnnnnnnnnnnnnnnnnnnnnnnnnnnnnnnnnnnnnnnnnnnnnnnnnnnnnnnnnnnnnnnnnnnnnnnnnnnnnnnnnnnnnnnnnnnnnnnnnnnnnnnnnnnnnnnnnnnnnnnnnnnnnnnnnnnnnnnnnnnnnnnnnnnnnnnnnnnnnnnnnnnnnnnnnnnnnnnnnnnnnnnnnnnnnnnnnnnnnnnnnnnnnnnnnnnnnnnnnnnnnnnnnnnnnnnnnnnnnnnnnnnnnnnnnnnnnnnnnnnnnnnnnnnnnnnnnnnnnnnnnnnnnnnnnnnnnnnnnnnnnnnnnnnnnnnnnnnnnnnnnnnnnnnnnnnnnnnnnnnnnnnnnnnnnnnnnnnnnnnnnnnnnnnnnnnnnnnnnnnnnnnnnnnnnnnnnnnnnnnnnnnnnnnnnnnnnnnnnnnnnnnnnnnnnnnnnnnnnnnnnnnnnnnnnnnnnnnnnnnnnnnnnnnnnnnnnnnnnnnnnnnnnnnnnnnnnnnnnnnnnnnnnnnnnnnnnnnnnnnnnnnnnnnnnnnnnnnnnnnnnnnnnnnnnnnnnnnnnnnnnnnnnnnnnnnnnnnnnnnnnnnnnnnnnnnnnnnnnnnnnnnnnnnnnnnnnnnnnnnnnnnnnnnnnnnnnnnnnnnnnnnnnnnnnnnnnnnnnnnnnnnnnnnnnnnnnnnnnnnnnnnnnnnnnnnnnnnnnnnnnnnnnnnnnnnnnnnnnnnnnnnnnnnnnnnnnnnnnnnnnnnnnnnnnnnnnnnnnnnnnnnnnnnnnnnnnnnnnnnnnnnnnnnnnnnnnnnnnnnnnnnnnnnnnnnnnnnnnnnnnnnnnnnnnnnnnnnnnnnnnnnnnnnnnnnnnnnnnnnnnnnnnnnnnnnnnnnnnnnnnnnnnnnnnnnnnnnnnnnnnnnnnnnnnnnnnnnnnnnnnnnnnnnnnnnnnnnnnnnnnnnnnnnnnnnnnnnnnnnnnnnnnnnnnnnnnnnnnnnnnnnnnnnnnnnnnnnnnnnnnnnnnnnnnnnnnnnnnnnnnnnnnnnnnnnnnnnnnnnnnnnnnaatcaggcagctctgccccatctgcaggggcatctgattagtctactaacagccagaggtccacctagcagagcgctgggagaagctgagccgccggaggtgggctcctggtgatgggtgtccaagaagcggtttccctgggagcttctgcctccgtgggcctctcagcctgcccggtgtggccgcccaagcgtggctcagccatnnnnnnnnnnnnnnnnnnnnnnnnnnnnnnnnnnnnnnnnngtggaattgttgaagtgtggcgagtctgtgctcgggacaataaagcttgtgacaggtccagga

SEQ ID NO: 23178 - DNA, 120 bp, Macaca Mulatta
tgtcagtgtgaggaaggggcatgagctggtgaacatctattgccccgtcgtggtctccaatgcagggctgttcaacacctatgagcacctactgccggggaatgcccgctgtctgccagg

SEQ ID NO: 23179 - DNA, 840 bp, Macaca Mulatta
actgctggtgcaggtgctcgtctgctttatgcccttccacatctgttttgctttcctgatgctgggaacgggggagaacagttatagtccctggggagcctttaccaccttcctcatgaacctcagcacatgtctggatgtgattctctactacatcgtttcaaaacaatttcaggctcgagtcattagtgtcatgctataccgtaattaccttcgaagcatgcgcagaaaaagtttccgatctggtagtttacggtcactaagcaatataaacagtgaaatgttatgaataatagaaaggttctttatctcaatcccatcaaaattcacttcactaactactctggtgtcaatggatattctgtaaaatattatcaagtcccttttctcttgaaaaaaataaattcattatcttcattttaaaaacttatataaaacatttttgtgaattattcagagaaaagcatctgatttgtctttcacagtcaagccttatttacacagataattaactttttgcatttctatgtgcaagtgacacatgtatgttaatcaactcagtagaggagaaatcaaactaccatacaaaataatttgattaaattattttctatttagatgcagctcccttaggtctaatttgcactaggaatggaattataaatccagtacttcatgtcccaaacactgacttccagaattcctatataagaaattatgttgaactcattactgttacttactacaaggcaaaattaacaggaacaagaacccaaggggcctgtaaaggtcatccccatcagccctcccctactctgaattcatccttttgaaaacaga

SEQ ID NO: 23180 - DNA, 838 bp, Macaca Mulatta
  misc_feature (1)...(838): n = A,T,C or G
ctgcttgcacatctctccccagagctgtcccttgacttgggggtgaatttcaggccaacagggctacctgggatacaagnnnnnnnnnnnnnnnnnnnnnnnnnnnnnnnnnnnnnnnnnnnnnnnnnnnnnnnnnnnnnnnnnnnnnnnnnnnnnnnnnnnnnnnnnnnnnnnnnnnnnnnnnnnnnnnnnnnnnnnnnnnnnnnnnnnnnnnnnnnnnnnnnnnnnnnnnnnnnnnnnnnnnnnnnnnnnnnnnnnnnnnnnnnnnnnnnnnnnnnnnnnnnnnnnnnnnnnnnnnnnnnnnnnnnnnnnnnnnnnnnnnnnnnnnnnnnnnnnnnnnnnnnnnnnnnnnnnnnnnnnnnnnnnnnnnnnnnnnnnnnnnnnnnnnnnnnnnnnnnnnnnnnnnnnnnnnnnnnnnnnnnnnnnnnnnnnnnnnnnnnnnnnnnnnnngaacagtaacagcgattatgtggatgtcttgccttgaagataaggctgccagacaaagcaagttaaggagatgagtaacaggtctcgctggtgacccacttctgcaggcgtaggtccagagcaccaaactctagtggacaattcagactctcctgtttgtgtaactgaagatgttctgcccaccagcaccagaggtcgctctccacatccctgcctcccagacatacaccaggagcaatttcaaagccctctccagtttcactcttctttctcggaatgggacagcctaaaccttttccccttgacttgttaaagataccgtcctacatcatggttgacaccctccttcggaccatacagtcagaggggcagcttcatagagaggagg

SEQ ID NO: 23181 - DNA, 2580 bp, Macaca Mulatta
  misc_feature (1)...(2580): n = A,T,C or G
aggaaaaactgcagaagtgtctggagcccctggaacagaagctgcaggagatcactcgctgcaagtcctctgaggagaagaagcctggtgagctcaannnnnnnnnnnnnnnnnnnnnnnnnnnnnnnnnnnnnnnnnnnnnnnnnnnnnnnnnnnnnnnnnnnnnnnnnnnnnnnnnnnnnnnnnnnnnnnnnnnnnnnnnnnnnnnnnnnnnnnnnnnnnnnnnnnnnnnnnnnnnnnnnnnnnnnnnnnnnnnnnnnnnnnnnnnnnnnnnnnnnnnnnnnnnnnnnnnnnnnnnnnnnnnnnnnnnnnnnnnnnnnnnnnnnnnnnnnnnnnnnnnnnnnnnnnnnnnnnnnnnnnnnnnnnnnnnnnnnnnnnnnnnnnnnnnnnnnnnnnnnnnnnnnnnnnnnnnnnnnnnnnnnnnnnnnnnnnnnnnnnnnnnnnnnnnnnnnnnnnnnnnnnnnnnnnnnnnnnnnnnnnnnnnnnnnnnnnnnnnnnnnnnnnnnnnnnnnnnnnnnnnnnnnnnnnnnnnnnnnnnnnnnnnnnnnnnnnnnnnnnnnnnnnnnnnnnnnnnnnnnnnnnnnnnnnnnnnnnnnnnnnnnnnnnnnnnnnnnnnnnnnnnnnnnnnnnnnnnnnnnnnnnnnnnnnnnnnnnnnnnnnnnnnnnnnnnnnnnnnnnnnnnnnnnnnnnnnnnnnnnnnnnnnnnnnnnnnnnnnnnnnnnnnnnnnnnnnnnnnnnnnnnnnnnnnnnnnnnnnnnnnnnnnnnnnnnnnnnnnnnnnnnnnnnnnnnnnnnnnnnnnnnnnnnnnnnnnnnnnnnnnnnnnnnnnnnnnnnnnnnnnnnnnnnnnnnnnnnnnnnnnnnnnnnnnnnnnnnnnnnnnnnnnnnnnnnnnnnnnnnnnnnnnnnnnnnnnnnnnnnnnnnnnnnnnnnnnnnnnnnnnnnnnnnnnnnnnnnnnnnnnnnnnnnnnnnnnnnnnnnnnnnnnnnnnnnnnnnnnnnnnnnnnnnnnnnnnnnnnnnnnnnnnnnnnnnnnnnnnnnnnnnnnnnnnnnnnnnnnnnnnnnnnnnnnnnnnnnnnnnnnnnnnnnnnnnnnnnnnnnnncagattgggagtgacaggttgggatgtgggaataattggggtgaggcagggtcaagtgctacgggcctccttcctgtgtcctgctggaacgtcttcgtgtccacctggttccagtcctgaatcatcatggagaaacacctcggtttctaggatggttttgtgtggagaaggaggtaggactgggctggatgagacagcacagctgtgactccctcctaactgtcagggtggggagctggttcccagaggattgtctaccctgaagtccatcaggttttctgttgcacaaggacgggttggaaaggaaggagaggcttttccagaaacaaaatctgtgagggtctgacttgctcaaaccagaggaggaaacagaaacccctgcacatctttttagggagttctttgacccaggatagtcttgcttcttgaggtagatcacaggggtctgtgtacctctaaattcaagaaagatgaatgacagatgctctcatgggtctagatgttgaggagtttttctgagggcagagattggacatcaacaaggctagaaggaaggtcagggaagtgggctaaaggaacagattcctagagattaataaaggggagggaggtttctttggtcttctattttaaaggtaagattgccattatgggtaggattgaccagaggtaggaatgtggggagaaggaaaggttgaaaggaaagcagagaacccaggtccctgcctcagcattcagcagagttggcttattgcttgcctctttataccaataagtcagtcactttgctcctctcccaggggcaaaggtggaagagnnnnnnnnnnnnnnnnnnnnnnnnnnnnnnnnnnnnnnnnnnnnnnnnnnnnnnnnnnnnnnnnnnnnnnnnnnnnnnnnnnnnnnnnnnnnnnnnnnnnnnnnnnnnnnnnnnnnnnnnnnnnnnnnnnnnnnnnnnnnnnnnnnnnnnnnnnnnnnnnnnnnnnnnnnnnnnnnnnnnnnnnnnnnnnnnnnnnnnnnnnnnnnnnnnnnnnnnnnnnnnnnnnnnnnnnnnnnnnnnnnnnnnnnnnnnnnnnnnnnnnnnnnnnnnnnnnnnnnnnnnnnnnnnnnnnnnnnnnnnnnnnnnnnnnnnnnnnnnnnttgccatccctcaccctttgccatttcccttttcagagaatgtaaatgattttcatgttaggccaaaataaacaacttatagggtacatatgttgtcataaaaggtaaaagtgatgcatgccaaaccaaactaaaccaatttggattatctgctgttcgggtaatcttcacagaaatgactgagagaagaatctgcagtttattgagggcatttcagttcctcctaccacctcaacaggactttgtccagactctcctcctcttacctttgtgccttgactgtggttctttgtggcaagatactttggttggttaaaataatatggaacaaaggatccactga

SEQ ID NO: 23182 - DNA, 738 bp, Macaca Mulatta
  misc_feature (1)...(738): n = A,T,C or G
caactttcccaaaaatgttgcaaaaatcaatatttaaaagaagaaaatncctgttcatggtaaagggtgcaaaaatacccatactgatacaacaatttgaacataaaaggtgaagcctttgattttttgtaagtttgcaatcaagctcaatattggacttttctaaatttcatcagcatacaaaaaaatattaactttgtcaagcaacattgagagaacattacaaaatccttacttagctaagggatggttcatgcatttttatggaagtatacttaaataatgttaagttctcaatgtgaagttttccatggggataatgcaactagggaaagagtcaaatacgtttcaaatgataaaatggaaatcttgtttcctaatacagatagttcctgacttaagaggatgtgacttacagtttctcaacattacaatggtatccatacaactactatttttcacttccagtattcaataattacatcagatattcaacaccttttgataaaatagacgatgcattagaatgtgttctgagaatgtttaaggtaggctaggctaagctatgatgtttggtaggttgggtgtattaaatgcattttcgacttacaataatttcaacttacaatgggtttattgggatgtaaccccattgtaagttcaggatcatatgtacttttccagtgaccacagaaatttgctagaaaataggcttccttgaatgtcaaaaatgtttcc

SEQ ID NO: 23183 - DNA, 740 bp, Macaca Mulatta
  misc_feature (1)...(740): n = A,T,C or G
ggtcaatgggaaggatctttcgaaggccacccacgaagaggcagtggaagcctttcgcaatgccaaggagcccnnnnnnnnnnnnnnnnnnnnnnnnnnnnnnnnnnnnnnnnnnnnnnnnnnnnnnnnnnnnnnnnnnnnnnnnnnnnnnnnnnnnnnnnnnnnnnnnnnnnnnnnnnnnnnnnnnnnnnnnnnnnnnnnnnnnnnnnnnnnnnnnnnnnnnnnnnnnnnnnnnnnnnnnnnnnnnnnnnnnnnnnnnnnnnnnnnnnnnnnnnnnnnnnnnnnnnnnnnnnnnnnnnnnnnnnnnnnnnnnnnnnnnnnnnnnnnnnnnnnnnnnnnnnnnnnnnnnnnnnnnnnnnggaggtcgagttgtgtcgtgttagcagtcaagagaagctgggcctgacagtctgttaccgaacagatgatgaagaagacaccggcatttatgtcagcgaggtnnnnnnnnnnnnnnnnnnnnnnnnnnnnnnnnnnnnnnnnnnnnnnnnnnnnnnnnnnnnnnnnnnnnnnnnnnnnnnnnnnnnnnnnnnnnnnnnnnnnnnnnnnnnnnnnnnnnnnnnnnnnnnnnnnnnnnnnnnnnnnnnnnnnnnnnnnnnnnnncagctagatgaaggctggctggaagatgaaaggaatgaattcttagaggagttaaacttggagatgttggaagaagagcatagtgaagcaatgcagcccactgccaatgaggtggagca

SEQ ID NO: 23184 - DNA, 443 bp, Macaca Mulatta
cagcacccaaccactacaaatatggcctgacagtcaaattggcatcatttaacattaccattgctgcctctgctttccccaccactgtcattctcaaacactcacacattgctttaacttcacaaagtgacatcagattaactattagaactcaccacaaaatgtatgaacaaatgtgacccaggtaaactgatagatattgacatttaggaaaatctccagatttctctttacttcttttatctgcccagcactcaaccctcaccaacagaaagtgatattcaatatctgagatatctgattcacagaattttgggggatagggcaaattatgctaggggcacaacttctctttctctttccttcttgaggttttaactgtcttccaaaaaattacatgttaagagatgttagaaattaaatccttctaggatttccagttg

SEQ ID NO: 23185 - DNA, 470 bp, Macaca Mulatta
actgctgagggcgttgcagataaccgcttcccgcaccggtgaaagtctcccctgcctcccactttctgctcgccgccagcgccggagcgtcgccagcatgtctgtggtaccgcccaatcgctcgcagaccggctggccccggggggtcactcagttcggcaacaagtacatccagcagaccaagcccctcaccctggagcgcaccatcaatcttatattttctttcaggaaatattgcatgaatgcctactttgtgccaggcactgtgcacaatactggatatacagtggtgaggaagtaaggtgtaaaccctgcttaatgaagctcacagtatgatgagaacaatatgtatgtctgggctggcactctgattcacagagtaccctcttaccaattataacttatggtacaaaaagagccccactatgagaaggacaagatctgtggcagccagatttcagcgcatgagg

SEQ ID NO: 23186 - DNA, 622 bp, Macaca Mulatta
aagggagctatccccgccccacagagctgagggtggcagatctccggtatcctcagcactacccacctccgcctgcttcccagcacaaaggaccctttcgacaagacgtcccgccttcccctccccagcaccaaagaatgccagcctatcaggaaacgggcagaccagcgccccgcgggggcagcccagaccagtacccttaccgaacccaggattcccggcagaagaaccccatgactgcagccgtatagccgagtgccaccgaggccaacccagcccagaaaggaaggtgtctacactacttttgccctttctagacctgaagacctccttggtgttaggaattctccacgggactgattagcgttttctcactgacgttgtaacgcttgactgctaatcagaggggaaaagaaggggaaggggattggggaggaaaaaaaaatcagaaggaagatgaaagatggggctatagaaacaaaactacctgctagttgaaacattttcagagttgttcaaatcggtgagagcggcagcggaacacacaaacagctaacagtggagctctactctggggagcctccctgactagttaacctgcctgatgcgcagacacgtggac

SEQ ID NO: 23187 - DNA, 4520 bp, Macaca Mulatta
  misc_feature (1)...(4520): n = A,T,C or G
aggctcccggctgcagcgcctggtcccagccagctatgcagatggtgtgtaccaggccttgggagaaccccacctgcccaatccccgagaccttagcaacaccatctcgaggggccctgcagggctggcctccctgcgaaaccgcacagtgttggccgtcttctttgngctatcacctgctctcggacctggtgagcgtggaaacgcccggctgccctgccgagttcctcaacatccacatcccgcccggagaccccgtgttcgacccagaccagcgtggggatgtggtgctgcccttccagaggagccgctgggaccccgagaccggacggagccccannnnnnnnnnnnnnnnnnnnnnnnnnnnnnnnnnnnnnnnnnnnnnnnnnnnnnnnnnnnnnnnnnnnnnnnnnnnnnnnnnnnnnnnnnnnnnnnnnnnnnnnnnnnnnnnnnnnnnnnnnnnnnnnnnnnnnnnnnnnnnnnnnnnnnnnnnnnnnnnnnnnnnnnnnnnnnnnnnnnnnnnnnnnnnnnnnnnnnnnnnnnnnnnnnnnnnnnnnccttcggggcggagcgagggaaccgggagcccttcctgcaggcgctgggtctgctctggttccgctatcacaacctgtgcgcgcagaggctggcccgccagcacccagactggggggacgaggagctgttccagcacgcgcgcaagagggtcatcgccacctaccagnnnnnnnnnnnnnnnnnnnnnnnnnnnnnnnnnnnnnnnnnnnnnnnnnnnnnnnnnncaggataccggccatttctggaccccagcatctcctcggagttcgtggcggcctctgagcagttcctctccaccatggtgccccctggcgtctacatgannnnnnnnnnnnnnnnnnnnnnnnnnnnnnnnnnnnnnnnnnnnnnnnnnnnnnnnnnnnnnnnnnnnnnnnnnnnnnnnnnnnnnnnnnnnnnnnnnnnnnnnnnnnnnnnnnnnnnnnnnnnnnnnnnnnnnnnnnnnnnnnnnnnnnnnnnnnnnnnnnnnnnnnnnnnnnnnnnnnnnnnnnnnnnnnngatttctggcctgggccactgaagttttcccgcacagaccacctggccagctgcctgcagcggggccgggatctgggcctgccctcttacaacaaggccagggcagcgctgggcttgtctcctattacccgctggcaggacatcaaccctgtgctcttccggagcaatgacactgntactggaggccacagctgacctgtacaagcaggacttgtcctggctggagctgctccctgggggactcctggagagccannnnnnnnnnnnnnnnnnnnnnnnnnnnnnnnnnnnnnnnnnnnnnnnnnnnnnnnnnnnnnnnnnnnnnnnnnnnnnnnnnnnnnnnnnnnnnnnnnnnnnnnnnnnnnnnnnnnnnnnnnnnnnnnnnnnnnnnnnnnnnnnnnnnnnnnnnnnnnnnnnnnnnnnnnnnnnnnnnnnnnnnnnnnnnnnnnnnnnnnnnnnnnnnnnnnnnnnnnnnnnnnnnnnnnnnnnnnnnnnnnnnnnnnnnnnnnnnnnnnnnnnnnnnnnnnnnnnnnnnnnnnnnnnnnnnnnnnnnnnnnnnnnnnnnnnnnnnnnnnnnnnnnnnnnnnnnnnnnnnnnnnnnnnnnnnnnnnnnnnnnnnnnnnnnnnnnnnnnnnnnnnnnnnnnnnnnnnnnnnnnnnnnnnnnnnnnnnnnnnnnnnnnnnnnnnnnnnnnnnnnnnnnnnnnnnnnnnnnnnnnnnnagctttggaatggcaaggccgcaaggagccctgccggcccgtgctcgtgcacctgcagcctgggcagatccgtgtggtagacggcaggctcaccatgctccgcaccatccagctgcagcctccacagcaggtcaaccttgtcctgtccagcaatcgtggacgccgcactctgctgctcaagatccccaaggagtatgacctggtactgcnnnnnnnnnnnnnnnnnnnnnnnnnnnnnnnnnnnnnnnnnnnnnnnnnnnnnnnnnnnnnnnnnnnnnnnnnnnnnnnnnnnnnnnnnnnnnnnnnnnnnnnnnnnnnnnnnnnnnnnnnnnnnnnnnnnnnnnnnnnnnnnnnnnnnnnnnnnnnnnnnnnnnnnnnnnnnnnnnnnnnnnnnnnnnnnnnnnnnnnnnnnnnnnnnnnnnnnnnnnnnnnnnnnnnnnnnnnnnnnnnnnnnnnnnnnnnnnnnnnnnnnnnnnnnnnnnnnnnnnnnnnnnnnnnnnnnnnnnnnnnnnnnnnnnnnnnnnnnnnnnnnnnnnnnnnnnnnnnnnnnnnnnnnnnnnnnnnnnnnnnnnnnnnnnnnnnnnnnnnnnnnnnnnnnnnnnnnnnnnnnnnnnnnnnnnnnnnnnnnnnnnnnnnnnnnnnnnnnnnnnnnnnnnnnnnnnnnnnnnnnnnnnnnnnnnnnnnnnnnnnnnnnnnnnnnnnnnnnnnnnnnnnnnnnnnnnnnnnnnnnnnnnnnnnnnnnnnnnnnnnnnnnnnnnnnnnnnnnnnnnnnnnnnnnnnnnnnnnnnnnnnnnnnnnnnnnnnnnnnnnnnnnnnnnnnnnnnnnnnnnnnnnnnnnnnnnnnnnnnnnnnnnnnnnnnnnnnnnnnnnnnnnnnnnnnnnnnnnnnnnnnnnnnnnnnnnnnnnnnnnnnnnnnnnnnnnnnnnnnnnnnnnnnnnnnnnnnnnnnnnnnnnnnnnnnnnnnnnnnnnnnnnnnnnnnnnnnnnnnnnnnnnnnnnnnnnnnnnnnnnnnnnnnnnnnnnnnnnnnnnnnnnnnnnnnnnnnnnnnnnnnnnnnnnnnnnnnnnnnnnnnnnnnnnnnnnnnnnnnnnnnnnnnnnnnnnnnnnnnnnnnnnnnnnnnnnnnnnnnnnnnnnnnnnnnnnnnnnnnnnnnnnnnnnnnnnnnnnnnnnnnnnnnnnnnnnnnnnnnnnnnnnnnnnnnnnnnnnnnnnnnnnnnnnnnnnnnnnnnnnnnnnnnnnnnnnnnnnnnnnnnnnnnnnnnnnnnnnnnnnnnnnnnnnnnnnnnnnnnnnnnnnnnnnnnnnnnnnnnnnnnnnnnnnnnnnnnnnnnnnnnnnnnnnnnnnnnnnnnnnnnnnnnnnnnnnnnnnnnnnnnnnnnnnnnnnnnnnnnnnnnnnnnnnnnnnnnnnnnnnnnnnnnnnnnnnnnnnnnnnnnnnnnnnnnnnnnnnnnnnnnnnnnnnnnnnnnnnnnnnnnnnnnnnnnnnnnnnnnnnnnnnnnnnnnnngtgggccatgtggtgaatgtgtacctgttctccatcagccccctcagcgtcctctcctgcctctttcctggcctcttccatgatgatgggtnnggtctgagttcccccagaagtattactggtggttcttccagaccgtaccagnnnnnnnnnnnnnnnnnnnnnnnnnnnnnnnnnnnnnnnnnnnnnnnnnnnnnnnnnnnnnnnnnnnnnnnnnnnnnnnnnnnnnnnnnnnnnnnnnnnnnnnnnnnnnnnnnnnnnnnnnnnnnnnnnnnnnnnnnnnnnnnnnnnnnnnnnnnnnnnnnnnnnnnnnnnnnnnnnnnnnnnnnnnnnnnnnnnnnnnnnnnnnnnnnnnnnnnnnnnnnnnnnnnnnnnnnnnnnnnnnnnnnnnnnnnnnnnnnnnnnnnnnnnnnnnnnnnnnnnnnnnnnnnnnnnnnnnnnnnnnnnnnnnnnnnnnnnnnnnnnnnnnnnnnnnnnnnnnnnnnnnnnnnnnnnnnnnnnnnnnnnnnnnnnnnnnnnnnnnnnnnnnnnnnnnnnnnnnnnnnnnnnnnnnnnnnnnnnnnnnnnnnnnnnnnnnnnnnnnnnnnnnnnnnnnnnnnnnnnnnnnnnnnnnnnnnnnnnnnnnnnnnnnnnnnnnnnnnnnnnnnnnnnnnnnnnnnnnnnnnnnnnnnnnnnnnnnnnnnnnnnnnnnnnnnnnnnnnnnnnnnnnnnnnnnnnnnnnnnnnnnnnnnnnnnnnnnnnnnnnnnnnnnnnnnnnnnnnnnnnnnnnnnnnnnnnnnnnnnnnnnnnnnnnnnnnnnnnnnnnnnnnnnnnnnnnnnnnnnnnnnnnnnnnnnnnnnnnnnnnnnnnnnnnnnnnnnnnnnnnnnnnnnnnnnnnnnnnnnnnnnnnnnnnnnnnnnnnnnnnnnnnnnnnnnnnnnnnnnnnnnnnnnnnnnnnnnnnnnnnnnnnnnnnnnnnnnnnnnnnnnnnnnnnnnnnnnnnnnnnnnnnnnnnnnnnnnnnnnnnnnnnnnnnnnnnnnnnnnnnnnnnnnnnnnnnnnnnnnnnnnnnnnnnnnnnnnnnnnnnnnnnnnnnnnnnnnnnnnnnnnnnnnnnnnnnnncaggtccggaagatcggggtgtttagctgtggcccccctggcatgaccaagaatgtggaaaaggcttgtcagctcatcaacaggcaggaccggactcacttctcccaccattatgagaacttcta

SEQ ID NO: 23188 - DNA, 195 bp, Macaca Mulatta
  misc_feature (1)...(195): n = A,T,C or G
gcgaatagctaaagaaaggcaaaagcaatataactgcctgacacagcggattgaacgagagaagaaattgttcgttattgctcagaaaattcaaacacgcaaagatcttatggnnnnnnnnnnnnnnnnnnnnnnnnnnnnnnnnnnntgaactcgccagctatttataaatttcagagtcgtcgaaaacgttga

SEQ ID NO: 23189 - DNA, 946 bp, Macaca Mulatta
aggggagaagccctaccggtgtactgtgtgcgggaaacacttctccccggagctcgaatctcatccgccaccagaaaactcacttgggcgagcaggctgggaaagattccagctgaaggagagccccatttagagtgaaggagagagagcgagagaccccaacctattggaggaagatcttgagcatctgctgctgctaccttgacctcaagcccttcatcccactttggagaatggttttgtattgcctctgaagtcaggatctcaggaagtcctgataagggactctggagtaaaaacccttgcctctttccgggccaatttctcgtgctgaaaagtcagaggacccagtcttggcttcactttcttggggtgaaagagaaatagggtaggctcagaacatgctcgtgtcattaaggcagcagtcccctggcctttgaggaagtacctatgagatgggtgtcactatctgaaggttctccaaattgtctgtgaacttgcttaggtaggagtgcactgcagtgtcctgctagttcctacctattgtgccccaactttgcttctagatctctgggctgggaggagtgaccttctcaatggaaggcgcctccttggtctggagaagagatctgaggtcctgccttagaaatgaaagggaaaccctcagggagccatgacccagggaccttcacactccccaatgtttgttacttgttatccctcccccaacctccccaacctgcctctgttttccccagagtgattagcagtaaaacccttcaatgaaaaggacccgtgtacttatttggggaagtggggagctggggagattgtcccactgaacccactctgcaagggagttgaattctaagaaagacagatgggtagatgctctggaaagcaaaagaaagccgactgagtttctggggcctttgaagagaagggg

SEQ ID NO: 23190 - DNA, 1148 bp, Macaca Mulatta
  misc_feature (1)...(1148): n = A,T,C or G
caggtgcctggctgctgcaaaccatgcaatgagccatgccccgccctggacacccccgcccagcatctgggcctccacgcttgggaccctgggagcagccaacagagctatgtctggagacatatgataaaccacctcagcccccaccaagccgccgcacccgtagacgagaccccaaggaccctgnnnnnnnnnncagagagcattaccttcatctctggctctgctgagccagccactgattttcctgcctgctgcctgctctggcgaccctgggtgtgggagtggtgccgggctgccttctgcttccgccgctgccgggattgcctccagcgctgtggagcctgtgtgcggggctgcagcccctgcctttctactgaggactccactgagggggctgccgaagccaactggaccaaggagcacaatggagtgccccctagccctgaccgtgcaccccccagccggcgggatggccagcgactcaagtcaaccatgggcagcagcttcagctatcccgacgttaagctcaaaggcatccctgtgtatccctatcccagggccacctccctagcccctgatgcggactcctgctgcaaggagccactggccgatcccccacccatgagacacagcctgcccagcacccttgtcagtagtcctcgtggctccgaggagtactactctttccatgagtcggacctggacctgcccgagatgggcagtggctccatgtcgagccgagagattgatgtgctcatcttcaagaagctgacagagctgttcagcgtacaccagatcgatgagctggccaagtgcacatcagacactgtgttcctggagaagaccagtaagatctcggaccttatcagcagcatcacgcaggactaccaccctggatgagcaggatnnnnnnnnnnnnnnnnnnnnnnnnnnnnnnnnnnnnnnnnnnnnnnnnnnnnnnnnnnnnnnnnnnnnnnnnnnnnnnnnnnnnnnnnnnnnnnnnnnnnnnnnnnnnnnnnnnnnnnnnnnnnnnnnnnnnnnnnnnnnnnnnnnnnnnnnnnnnnnnnnngagctgacagtgcagatctcccaggagacgactgcagatgccatcgcccggaagctgaggccttatggagctccag

SEQ ID NO: 23191 - DNA, 258 bp, Macaca Mulatta
gtggtcaaacagaccagtatgttccctgttctcttgagcttcgactcttctgtgctctatcgctgtgcactgctttttctacaggtattacatcaactctaaggggtcctctgggattagttatgcagccgttaaatcacccgaagacactaatttatcgaagacacacctccttccccggtgatcacgctcataaccagtgcgctatcatatcccatcactgggaggactgatgttgacttacatcattttctttat

SEQ ID NO: 23192 - DNA, 575 bp, Macaca Mulatta
  misc_feature (1)...(575): n = A,T,C or G
cagagtagaggccagcggagggctctgtgccggccccgatgaggacgctgctgaccatcctggctgtgggatccctggcnnnnnnnnnnnnnnnnnnnnnnnnnnnnnnnnnnnnnnnnnnnnnnnnnnnnnnnnnnnnnnnnnnnnnnnnnnnnnnnnnnnnnnnnnnnnnnnnnnnnnnnnnnnnnnnnnnnnnnnnnnnnnnnnnnnnnnnnnnnnnnnagagggactgggtggcaaagaagggctgtcagcggattccccgaaagtcctgcaacctgacggtggagacggggcaaccccacggagctctactatgaccgggtcaccccctgtcagcgcgggagggtccggtcaaccaacccaagatgactgannnnnnnnnnnnnnnnnnnnnnnnnnccctcaagccacctgatgtgacctgtatccccaaagtgagatcgattcagatgattgttcatcctacccccacgcccatccgtgcaggggacggccaccggctaaccctggaagacatcttccatgacctgttctaccacttagagctccaggtcaaccgcacctaccaaatg

SEQ ID NO: 23193 - DNA, 2003 bp, Macaca Mulatta
  misc_feature (1)...(2003): n = A,T,C or G
attttcctgcagcagcggcagcagggacggctgctgaaggttcgaggtcggccggcctgcgcgtgggtttgcgaggaagctgttcatcccctgcgctgaggtgtccgacagtgaggaggaaagcgacgcacggagcccgcgcgagtggaaccagcaaagctccatcggtcggcacaggagaagggggaggaggcacggccgaggcaaacgagcggacgcctagtcgccgggtaccggtatcaccctgctgcaacgccttccagaaaaagccaccgcggcccgggttgcagcggccggacggatgccaaggccacacggcaggcgcgggggcagccgtcgcagtcgcagtcccacgcgcgctgcggacacccagggttgcnnnnnnnnnnnnnnnnnnnnnnnnnnnnnnnnnnnnnnnnnnnnnnnnnnnnnnnnnnnnnnnnnnnnnnnnnnnnnnnnnnnnnnnnnnnnnnnnnnnnnnnnnnnnnnnnnnnnnnnnnnnnnnnnnnnnnnnnnnnnnnnnnnnnnnnnnnnnnnnnnnnnnnnnnnnnnnnnnnnnnnnnnnnnnnnnnnnnnnnnnnnnnnnnnnnnnnnnnnnnnnnnnnnnnnnnnnnnnnnnnnnnnnnnnnnnnnnnnnnnnnnnnnnnnnnnnnnnnnnnnnnnnnnnnnnnnnnnnnnnnnnnnnnnnnnnnnnnnnnnnnnnnnnnnnnnnnnnnnnnnnnnnnnnnnnnnnnnnnnnnnnnnnnnnnnnnnnnnnnnnnnnnnnnnnnnnnnnnnnnnnnnnnnnnnnnnnnnnnnnnnnnnnnnnnnnnnnnnnnnnnnnnnnnnnnnnnnnnnnnnnnnnnnnnnnnnnnnnnnnnnnnnnnnnnnnnnnnnnnnnnnnnnnnnnnnnnnnnnnnnnnnnnnnnnnnnnnnnnnnnnnnnnnnnnnnnnnnnnnnnnnnnnnnnnnnnnnnnnnnnnnnnnnnnnnnnnnnnnnnnnnnnnnnnnnnnnnnnnnnnnnnnnnnnnnnnnnnnnnnnnnnnnnnnnnnnnnnnnnnnnnnnnnnnnnnnnnnnnnnnnnnnnnnnnnnnnnnnnnnnnnnnnnnnnnnnnnnnnnnnnnnnnnnnnnnnnnnnnnnnnnnnnnnnnnnnnnnnnnnnnnnnnnnnnnnnnnnnnnnnnnnnnnnnnnnnnnnnnnnnnnnnnnnnnnnnnnnnnnnnnnnnnnnnnnnatttagtggttgaaggactgcgatgtgcagttttgccaaaagatctttgccacaaatttctgcagctggcagaatctaatacagtgagaggaatagaaacctgtggaatactctgtggaaaactnnnnnnnnnnnnnnnnnnnnnnnnnnnnnnnnnnnnnnnnnnnnnnnnnnnnnnnnnnnnnnnnnnnnnnnnnnnnnnnnnnnnnnnnnnnnnnnnnnnnnnnnnnnnnnnnnnnnnnnnnnnnnnnnnnnnnnnnnnnnncatcccactcaaactgcattcttatccagcgttgatcttcacactcactgttcctatcaactcatgttaccagaggccattgccattgtttgctcaccaaagcataaagactggcatcttcaggctcaccaatgctggcatgcttgaggtttctgcttgtaaaaaaaagggctttcatccacacaccaaggagcccaggctgttcagtnatatgcaaacatgtgttggtaaaagacataaaaataattgtgttggatctgaggtgatatgttctgaatgtaagcaccatcaacatcagacacctactcacggacatgtggttgccggattttcttaagatgtttccagaaatgactgatattttatatttatacattttagatcagaaagcttgatatttattgctgttgcacattttgaagttttctttttgggttgctctgtgtcaagagaggttacatggtgttaaatctgtacctaataatgtgcccaaatactatgaccagataataaattgtgctgcaaac

SEQ ID NO: 23194 - DNA, 2070 bp, Macaca Mulatta
  misc_feature (1)...(2070): n = A,T,C or G
tggataggagaagtgtgggtgaaacagaaaatggagatactttccttgacctgaagaagccacctgcctccaaatgcccccatcgctatacaaaagnnnnnnnnnnnnnnnnnnnnnnnnnnnnnnnnnnnnnnnnnnnnnnnnnnnnnnnnnnnnnnnnnnnnnnnnnnnnnnnnnnnnnnnnnnnnnnnnnnnnnnnnnnnnnnnnnnnnnnnnnnnnnnnnnnnnnnnnnnnnnnnnnnnnnnnnnnnnnnnnnnnnnnnnnnnnnnnnnnnnnnnnnnnnnnnnnnnnnnnnnnnnnnnnnnnnnnnnnnnnnnnnnnnnnnnnnnnnnnnnnnnnnnnnnnnnnnnnnnnnnnnnnnnnnnnnnnnnnnnnnnnnnnnnnnnnnnnnnnnnnnnnnnnnnnnnnnnnnnnnnnnnnnnnnnnnnnnnnnnnnnnnnnnnnnnnnnnnnnnnnnnnnnnnnnnnnnnnnnnnnnnnnnnnnnnnnnnnnnnnnnnnnnnnnnnnnnnnnnnnnnnnnnnnnnnnnnnnnnnnnnnnnnnnnnnnnnnnnnnnnnnnnnnnnnnnnnnnnnnnnnnnnnnnnnnnnnnnnnnnnnnnnnnnnnnnnnnnnnnnnnnnnnnnnnnnnnnnnnnnnnnnnnnnnnnnnnnnnnnnnnnnnnnnnnnnnnnnnnnnnnnnnnnnnnnnnnnnnnnnnnnnnnnnnnnnnnnnnnnnnnnnnnnnnnnnnnnnnnnnnnnnnnnnnnnnnnnnnnnnnnnnnnnnnnnnnnnnnnnnnnnnnnnnnnnnnnnnnnnnnnnnnnnnnnnnnnnnnnnnnnnnnnnnnnnnnnnnnnnnnnnnnnnnnnnnnnnnnnnnnnnnnnnnnnnnnnnnnnnnnnnnnnnnnnnnnnnnnnnnnnnnnnnnnnnnnnnnnnnnnnnnnnnnnnnnnnnnnnnnnnnnnnnnnnnnnnnnnnnnnnnnnnnnnnnnnnnnnnnnnnnnnnnnnnnnnnnnnnnnnnnnnnnnnnnnnnnnnnnnnnnnnnnnnnnnnnnnnnnnnnnnnnnnnnnnnnnnnnnnnnnnnnnnnnnnnnnnnnnnnnnnnnnnnnnnnnnnnnncaggtctggagcaagccatcctctctcctggacagaactcggggaattactttgctcctataccattggaagaccatactgaaaataaagtggatattttagaaatgctacagaaagccaaagtggatttgaaacctcttctttctagcctttctgcaaataaagaaaaacttaaagaaagcnnnnnnnnnnnnnnnnnnnnnnnnnnnnnnnnnnnnnnnnnnnnnnnnnnnnnnnnnnnnnnnnnnnnnnnnnnnnnnnnnnnnnnnnnnnnnnnnnnnnnnnnnnnnnnnnnnnnnnnnnnnnnnnnnnnnnnnnnnnnnnnnnnnnnnnnnnnnnnnnnnnnnnnnnnnnnnnnnnnnnnnnnnnnnnnnnnnnnnnnnnnnnnnnnnnnnnnnnnnnnnnnnnnnnnnnnnnnnnnnnnnnnnnnnnnnnnnnnnnnnnnnnnnnnnnnnnnnnnnnnnnnnnnnnnnnnnnnnnnnnnnnnnnnnnnnnnnnnnnnnnnnnnnnnnnnnnnnnnnnnnnnnnnnnnnnnnnnnnnnnnnnnnnnnnnnnnnnnnnnnnnnnnnnnnnnnnnnnnnnnnnnnnnnnnnnnnnnnnnnnnnnnnnnnnnnnnnnnnnnnnnnnnnnnnnnnnnnnnnnnnnnnnnnnnnnnnnnnnnnnnnnnnnnnnnnnnnnnnnnnnnnnnnnnnnnnnnnnnnnnnnnnnnnnnnnnnnnnnnnnnnnnnnnnnnnnnnnnnnnnnnnnnnnnnnnnnnnnnnnnnnnnnnnnnnnnnnnnnnnnnnnnnnnnnnnnnnnnnnnnnnnnnnnnnnnnnnnnnnnnnnnnnnnnnnnnnnnnnnnnnnnnnnnnnnnnnnnnnnnnnnnnnnnnnnnnnnnnnnnnnnnnacaggcaacagcgagtgaccaagtcaccagcaccagtgcatcgagggaattcctcttcccctgcccctgctgcctccatcacaagcat

SEQ ID NO: 23195 - DNA, 1814 bp, Macaca Mulatta
  misc_feature (1)...(1814): n = A,T,C or G
agaaacatcttcacaccagcaggacacaaatagtacatgtgaaatttccaagcattatggtttacagagatgattatttcatcagacattccatctctgtatctgcagtgatagtacgcgcctggattactcacaaatacagtggcggagactggaatgttaaatgggaggaaaacttgctccatgctgtagcaaagaattataccctcctgcagaccatcccgccttttgaacgccctttcaaagatcatcaagtgtgccttgagtggaacatgggttatatttggaaccttcaggcaaacaggattccacagtgtgctctggaaaatnnnnnnnnnnnnnnnnnnnnnnnnnnnnnnnnnnnnnnnnnnnnnnnnnnnnnnnnnnnnnnnnnnnnnnnnnnnnnnnnnnnnnnnnnnnnnnnnnnnnnnnnnnnnnnnnnnnnnnnnnnnnnnnnnnnnnnnnnnnnnnnnnnnnnnnnnnnnnnnnnnnnnnnnnnnnnnnnnnnnnnnnnnnnnnnnnnnnnnnnnnnnnnnnnnnnnnnnnnnnnnnnnnnnnnnnnnnnnnnnnnnnnnnnnnnnnnnnnnnnnnnnnnnnnnnnnnnnnnnnnnnnnnnnnnnnnnnnnnnnnnnnnnnnnnnnnnnnnnnnnnnnnnnnnnnnnnnnnnnnnnnnnnnnnnnnnnnnnnnnnnnagatagtagtaaccactagcattggacaggatttgaaaagctaccacaatcagaccattannnnnnnnnnnnnnnnnnnnnnnnnnnnnnnnnnnnnnnnnnnnnnnnnnnnnnnnnnnnnnnnnnnnnnnnnnnnnnnnnnnnnnnnnnnnnnnnnnnnnnnnnnnnnnnnnnnnnnnnnnnnnnnnnnnnnnnnnnnnnnnnnnnnnnnnnnnnnnnnnnnnnnnnnnnnnnnnnnnnnnnnnnnnnnnnnnnnnnnnnnnnnnnnnnnnnnnnnnnnnnnnnnnnnnnnnnnnnnnnnnnnnnnnnnnnnnnnnnnnnnnnnnnnnnnnnnnnnnnnnnnnnnnnnnnnnnnnnnnnnnnnnnnnnnnnnnnnnnnnnnnnnnnnnnnnnnnnnnnnnnnnnnnnnnnnnnnnnnnnnnnnnnnnnnnnnnnnnnnnnnnnnnnnnnnnnnnnnnnnnnnnnnnnnnnnnnnnnnnnnnnnnnnnnnnnnnnnnnnnnnnnnnnnnnnnnnnnnnnnnnnnnnnnnnnnnnnnnnnnnnnnnnnnnnnnnnnnnnnnnnnnnnnnnnnnnnnnnnnnnnnnnnnnnnnnnnnnnnnnnnnnnnnnnnnnnnnnnnnnnnnnnnnnnnnnnnnnnnnnnnnnnnnnnnnnnnnnnnnnnnnnnnnnnnnnnnnnnnnnnnnnnnnnnnnnnnnnnnnnnnnnnnnnnnnnnnnnnnnnnnnnnnnnnnnnnnnnnnnnnnnnnnnnnnnnnnnnnnnnnnnnnnnnnnnnnnnnnnnnnnnnnnnnnnnnnnnnnnnnnnnnnnnnnnnnnnnnnnnnnnnnnnnnnnnnnnnnnnnnnnnnnnnnnnnnnnnnnnnnnnnnnnnnnnnnnnnnnnnnnnnnnnnnnnnnnnnnnnnnnnnnnnnnnnnncaaagaagatggagacgtctttatgtggttgaagcatgaagctacccgaggcaatgcagcagctcanagcaacgattggcccagatgctgttctgggggcagcaaggtgtggccaagaatcccgaagcagcaattgagtggtatgccaagggcgccctggagacggaggatcctgcgttaatctatgactatgccattgtgctattcaag

SEQ ID NO: 23196 - DNA, 83 bp, Macaca Mulatta
aaatattgaatgaggccggtgcttttttagttaactccctacatcttccctcatatcatttaaaatgatgtcagatcaggtac

SEQ ID NO: 23197 - DNA, 498 bp, Macaca Mulatta
caggatcgtctgctgcctccgagtcatgggagaagaggagtataggacaaggggtggaagggcaggagctcagaccgcaccaggctggcctgacacaatggtagctctgaagggaggggaagaggagagaggcctgagtgtgacctgaaacctgccactacttgagtggacagcagctggactgggtgggccccatagtggtcagctgttcctgcccagtaggtttagcctggccccactgtcacagacccctgggggaggcttccagatcagtcccacagccccttgcttctaaggggtccagatacctgccccagattctctttccccactgaagaattctgcgccctctggacttccctctccttccttccttgttcaggctcaaggtgtggtgggcaaggctgagtattaggggagcttctaagttctgaatctttgggtgacctgcttggagtctcaggtccaaatacttgaactctgtgagaagtctaagtt

SEQ ID NO: 23198 - DNA, 743 bp, Macaca Mulatta
tcttcaaggggatctctttctgcatcgacagaaatgcctgtgtcccttcattcagagagacagaggagaaagagcagtctcatgtattccttaagaaccaagatgaatagcaatagaattgcttccaaaatgggttccttctcccaatcagattctgtaggtcttcaccaaagggagcatgctgaactgcttagagccaggagattagccaagtcactggccattctcttaggagtctttgctgtttgctgggctccgtattctctgttcacaattgttctttcattttactcctcagagacaggttctaaatccgtttggtacagaattgcattttggcttcagtggttcaattcctttgtcaatcctcttttgtatccattgtgtcacaagcgctttcaaaaggctttcttgaaaatattttgtataaaaaagcaacctctaccatcaccacacagtcggtcagtatcttcttaaagacaattttctcacttctgtaaattttagtctcaatctcacctaaatggattaggtctgccctttatcttgcccttttcattctaccaacagatctgcactttgaagtcaatggaaaattactccagtgaataatagcagtataattatgacttgataatattgttgtaaacttgtagtcataatagtactatattcttcttagtcttcacctcttccttgtcttttagatctttatatcatgctgattacaaaaatccagtttt

SEQ ID NO: 23199 - DNA, 229 bp, Macaca Mulatta
tagacatttttcttttatcactctatctctgaattgacattttatatgagagaaattgagctatccatacaacctgtatttactttaattttgctatgcttttagcttactttattgtatggtatgtaggtctaaaatatagtttgagtcaaataaaattagaaaagctttggtgcttctacttttttcactaatatttgcatgtacaaataatacatattaacatacc

SEQ ID NO: 23200 - DNA, 767 bp, Macaca Mulatta
gccctctctccattgcctataccccatcccagccactcaactcctgcttttttttcctttggccatttgaaggtttaccagtagaatccttgctaggctgatgtgggccgtacattcctttaataaaccattgtgtacataagaggttgctgtgttccagttcagtagtggtgaaagtggaaaagtgaaataagaccaagaaatatacccaagtgcttcttcgtctccttcatctgagtctctacctcctccaacccagcaacagcactggttcaaggagaggagagatgcaggtgacctgcctgccagcttctgagcagggttgggcaagtgggtactatttaattgagtgcttctcagcttatgagggggatgacagtcacagcaggtatggtggaggtgacctggaccctggacgctcatctcccccactgccactgacaacccgtgtggccttgtgtgactctctttgccctgtgaggtttggaatggcttacggggtggttacttcaataatgaggaggtgattttgcctgcaaacagatatatgactccctaggtcacgaatctgcatggtcatgtaaaaagaagcaaatatggactcaatgattacagcatatggctgcggtatgatcacattcgcattccttagaggaaaaagccaccagacaggagaggccatgtgggttggctgtgcagttcaggctgtgtggatcgccacttgctttatccatgatgtgctgccaaccggtaaacacaccgagtct

SEQ ID NO: 23201 - DNA, 3555 bp, Macaca Mulatta
  misc_feature (1)...(3555): n = A,T,C or G
gccccccgaagagtcactcaaggaggaggaagtggctgtggcggacccaagtcctcagnnnnnnnnnnnnnnnnnnnnnnnnnnnnnnnnnnnnnnnnnnnnnnnnnnnnnnnnnnnnnnnnnnnnnnngtcccagccgcagggtgctgacctggctcatgaagggcgtggagaaggtgatcccacagcctgtccatagcgtcacagaggacccggctcagnnnnnnnnnnnnnnnnnnnnnnnnnnnnnnnnnnnnnnnnnnnnnnncaatgaggccctcgaggcccaagacgctagnnnnnnnnnnnnnnnnnnnnnnnnnnnnnnnnnnnnnnnnnnnnnnnnnnnnnnnnnnnnnnnnnnnnnnnnnnnnnnnnnnnnnnnnnnnnnnnnnnnnnnnnnnnnnnnnnnnnnnnnnnnnnnnnnnnnnnnnnnnnnnnnnnnnnnnnnnnnnnnnnnnnnnnnnnnnnnnnnnnnnnnnnnnnnnnnnnnnnnnnnnnnnnnnnnnnnnnnnnnnnnnnnnnnnnnnnnnnnnnnnnnnnnnnnnnnnnnnnnnnnnnnnnnnnnnnnnnnnnnnnnnnnnnnnnnnnnnnnnnnnnnnnnnnnnnnnnnnnnnnnnnnnnnnnnnnnnnnnnnnnnnnnnnnnnnnnnnnnnnnnnnnnnnnnnnnnnnnnnnnnnnnnnnnnnnnnnnnnnnnnnnnnnnnnnnnnnnnnnnnnnnnnnnnnnnnnnnnnnnnnnnnnnnnnnnnnnnnnnnnnnnnnnnnnnnnnnnnnnnnnnnnnnnnnnnnnnnnnnnnnnnnnnnnnnnnnnnnnnnnnnnnnnnnnnnnnnnnnnnnnnnnnnnnnnnnnnnnnnnnnnnnnnnnnnnnnnnnnnnnnnnnnnnnnnnnnnnnnnnnnnnnnnnnnnnnnnnnnnnnnnnnnnnnnnnnnnnnnnnnnnnnnnnnnnnnnnnnnnnnnnnnnnnnnnnnnnnnnnnnnnnnnnnnnnnnnnnnnnnnnnnnnnnnnnnnnnnnnnnnnnnnnnnnnnnnnnnnnnnnnnnnnnnnnnnnnnnnnnnnnnnnnnnnnnnnnnnnnnnnnnnnnnnnnnnnnnnnnnnnnnnnnnnnnnnnnnnnnnnnnnnnnnnnnnnnnnnnnntgaaaaggaacaccaggaccacgcggagatcaaggaggagcctgaggctgaggccaaggctgccagttcaggagcnnnnnnnnnnnnnnnnnnnnnnnnnnnnnnnnnnnnnnnnnnnnnnnnnnnnnnnnnnnnnnnnnnnnnnnnnnnnnnnnnnnnnnnnnnnnnnnnnnnnnnnnnnnnnnnnnnnnnnnnnnnnnnnnnnnnnnnnnnnnnnnnnnnnnnnnnnnnnnnnnnnnnnnnnnnnnnnnnnnnnnnnnnnnnnnnnnnnnnnnnnnnnnnnnnnnnnnnnnnnnnnnnnnnnnnnnnnnnnnnnnnnnnnnnnnnnnnnnnnnnnnnnnnnnnnnnnnnnnnnnnnnnnnnnnnnnnnnnnnnnnnnnnnnnnnnnnnnnnnnnnnnnnnnnnnnnnnnnnnnnnnnnnnnnnnnnnnnnnnnnnnnnnnnnnnnnnnnnnnnnnnnnnnnnnnnnnnnnnnnnnnnnnnnnnnnnnnnnnnnnnnnnnnnnnnnnnnnnnnnnnnnnnnnnnnnnnnnnnnnnnnnnnnnnnnnnnnnnnnnnnnnnnnnnnnnnnnnnnnnnnnnnnnnnnnnnnnnnnnnnnnnnnnnnnnnnnnnnnnnnnnnnnnnnnnnnnnnnnnnnnnnnnnnnnnnnnnnnnnnnnnnnnnnnnnnnnnnnnnnnnnnnnnnnnnnnnnnnnnnnnnnnnnnnnnnnnnnnnnnnnnnnnnnnnnnnnnnnnnnnnnnnnnnnnnnnnnnnnnnnnnnnnnnnnnnnnnnnnnnnnnnnnnnnnnnnnnnnnnnnnnnnnnnnnnnnnnnnnnnnnnnnnnnnnnnnnnnnnnnnnnnnnnnnnnnnnnnnnnnnnnnnnnnnnnnnnnnnnnnnnnnnnnnnnnnnnnnnnnnnnnnnnnnnnnnnnnnnnnnnnnnnnnnnnnnnnnnnnnnnnnnnnnnnnnnnnnnnnnnnnnnnnnnnnnnnnnnnnnnnnnnnnnnnnnnnnnnnnnnnnnnnnnnnnnnnnnnnnnnnnnnnnnnnnnnnnnnnnnnnnnnnnnnnnnnnnnnnnnnnnnnnnnnnnnnnnnnnnnnnnnnnnnnnnnnnnnnnnnnnnnnnnnnnnnnnnnnnnnnnnnnnnnnnnnnnnnnnnnnnnnnnnnnnnnnnnnnnnnnnnnnnnnnnnnnnnnnnnnnnnnnnnnnnnnnnnnnncagttatattcgctgttactactttgctgtgaagaccctcatcaccatcggggggctgcctgaccccaagacactctttgaaattgtcttccagctgctgaattatttcacgggcgtctntgctttctctgtcatgattggacannnnnnnnnnnnnnnnnnnnnnnnnnnnnnnnnnnnnnnnnnnnnnnnnnnnnnnnnnnnnnnnnnnnnnnnnnnnnnnnnnnnnnnnnnnnnnnnnnnnnnnnnnnnnnnnnnnnnnnnnnnnnnnnnnnnnnnnnnnnnnnnnnnnnnnnnnnnnnnnnnnnnnnnnnnnnnnnnnnnnnnnnnnnnnnnnnnnnnnnnnnnnnnnnnnnnnnnnnnnnnnnnnnnnnnnnnnnnnnnnnnnnnnnnnnnnnnnnnnnnnnnnnnnnnnnnnnnnnnnnnnnnnnnnnnnnnnnnnnnnnnnnnnnnnnnnnnnnnnnnnnnnnnnnnnnnnnnnnnnnnnnnnnnnnnnnnnnnnnnnnnnnnnnnnnnnnnnnnnnnnnnnnnnnnnnnnnnnnnnnnnnnnnnnnnnnnnnnnnnnnnnnnnnnnnnnnnnnnnnnnnnnnnnnnnnnnnnnnnagcttgctggctgttgggggtgggaaccggcgcacggccaacgtggtggcccacgggtttaccaacctcttcatcctggataagaaggacctgaatgagattttggtgcattatcctgagtctcagaagttactccggaagaaagccagnnnnnnnnnnnnnnnnnnnnnnnnnnnnnnnnnnnnnnnnnnnnnnnnnnnnnnnnnnnnnnnnnnnnnnnnnnnnnnnnnnnnnnnnnnnnnnnnnnnnnnnnnnnnnnnnnnnnnnnnnnnnnnnnnnnnnnnnnnnnnnnnnnnnnnnnnnnnnnnnnnnnnnnnnnnnnnnnnnnnnnnnnnnnnnnnnnnnnnnnnnnnnnnnnnnnnnnncaggccaagagctcgcaagacgccaagggagaggaaggctcggccgccctagaccggcccacgcccccaaaggaggcnnnnnnnnnnnnnnnnnnnnnnnnnnnnnnnnnnnnnnnnnggggtctccaccgcgctctccaccgcctgcctcccttgggaggcccgagggagaagaggagggggtggcccagcctgaggagcactcggtaaggatccgcatgagcccaggcccggagcgcgacgagcagatcctgtcggt

SEQ ID NO: 23202 - DNA, 361 bp, Macaca Mulatta
ggaggtcttatgggtattttttaacagattaagagccctaggtagggctgaaagccatgtggggagaagaattaatgagaagcatcagggatagagtcctagggagcatcagcctttaataggcagggtggggggtcagtgaaggagattgccgtttgcagggcaggtaaaacgaaggagaggacctgcttgagctggctataattgtgcagcagacggacactgctcatatgggaaatcacatgaattcaactctacatccttgacaaaaagtttaaatggtgtgggtgattccacccactggtggatgtgagaaccatatgctcaggagtgggtgggatgggagggaggtgtgtacctg

SEQ ID NO: 23203 - DNA, 170 bp, Macaca Mulatta
  misc_feature (1)...(170): n = A,T,C or G
ctgggcaaaagacaacctgtggccagggtctggaggggccctgggagcgcccaccccctctggatgagcccgagagagatggaagctctgaggaccaagtggaagacccagcactaagtgngagcctggggaggaacctcagcgcccttccccctctgagcctggcacat

SEQ ID NO: 23204 - DNA, 822 bp, Macaca Mulatta
  misc_feature (1)...(822): n = A,T,C or G
tcttccgtcggcggaattgcggccgtatgcacggctctgtggagnnnnnnnnnnnnnnnnnnnnnnnnnnnnnnnnnnnnngctccttttgactctgtttctgtttgcagccccatttggcctgctgggggagacgacccgccaggtgnnnnnnnnnnnnnnnnnnnnnnnnnnnnnnnnnnnnnnnnnnnnnnnnnnnnnnnnnnnnnnnnnnnnnnnnnnnnnnnnnnnnnnnnnnnnnnnnnnnnnnnnnnnnnnnnnnnnnnnnnnnnnnnnnnnnnnnnnnnnnnnnnnnnnnnnnnnnnnnnnnnnnnnnnnnnnnnnnnnnnnnnnnnnnnnnnnnnnnnnnnnnnnnnnnnnnnnnnnnnnnnnnnnnnnnnnnnnnnnnnnnnnnnnnnnnnnnnnnnnnnnnnnnnnnnnnnnnnnnnnnnnnnnnnnnnnnnnnnnnnnnnnnnnnnnnnnnnnnnnnnnnnnnnnnnnnnnnnnnnnnnnnnnnnnnnnnnnnnnnnnnnnnnnnnnnnnnnnnnnnnnnnnnnnnnnnnnnnnnnnnnnnnnnnnnnnnnnnnnnnnnnnnnnnnnnnnnnnnnnnnnnnnnnnnnnnnnggtccaggccttttccaggtccagccgaccagcccaaccccctcgcctcctgcacacagcagacacctgtcagctagaggtggccctggttggagcctctccccgaggaaaccgttccctgtttgggctggaggtagccacactgggccagggccctgactgcccatcagtgcaggagcagcactccatcgacgatgaatatgcacctgccgtcttcca

SEQ ID NO: 23205 - DNA, 646 bp, Macaca Mulatta
  misc_feature (1)...(646): n = A,T,C or G
aggaacagtcgtggtaaaataattaaacccctgcaatatcagtcaacggtggcttctggcacagtagcaagagtagagccaaatattaaatggtttgnnnnnnnnnnnnnnnnnnnnnnnnnnnnnnnnnnnnnnnnnnnnnnnnnnnnnnnnnnnnnnnnnnnnnnnnnnnnnnnnnnnnnnnnnnnnnnnnnnnnnnnnnnnnnnnnnnnnnnnnnnnnnnnnnnnnnnnnnnnnnnnnnnnnnnnnnnnnnnnnnnnnnnnnnnnnnnnnnnnnnnnnnnnnnnnnnnnnnnnnnnnnnnnnnnnnnnnnnnnnnnnnnnnnnnnnnnnnnnnnnnnnnnnnnnnnnnnnnnnnnnnnnnnnnnnnnnnnnnnnnnnnnnnnnnnnnnnnnnnnnnnnnnnnnnnnnnnnnnnnnnnnnnnnnnnnnnnnnnnnnnnnnnnnnnnnnnnnnnnnnnnnnnnnnnnnnnnnnnnnnnnnnnnnnggtgatagattcatcagatgttgtagttcaagttcttgatgctagagatccaatgggcactcgttcccctcacattgaaacttacctgaagaaggaaaaaccttggaaacacctcatttttgtacttaacaaatgtgaccttgttccaacttgggcaaca

SEQ ID NO: 23206 - DNA, 2803 bp, Macaca Mulatta
  misc_feature (1)...(2803): n = A,T,C or G
aggtggagttaaatgaatgtgtccagtgtgaattcaactttatcaacactggaaagttcaccttcagcttccaggcagagctgtgtggctccaaagccttgctgcagtacttggaattttcacccatcgacagcactgtggatgtagggcagagtgtacatgccaccctgtcttttcaaccattaaagaagtgtgtcttgacagacctggaacnnnnnnnnnnnnnnnnnnnnnnnnnnnnnnnnnnnnnnnnnnnnnnnnnnnnnnnnnnnnnnnnnnnnnnnnnnnnnnnnnnnnnnnnnnnnnnnnnnnnnnnnnnnnnnnnnnnnnnnnnnnnnnnnnnnnnnnnnnnnnnnnnnnnnnnnnnnnnnnnnnnnnnnnnnnnnnnnnnnnnnnnnnnnnnnnnnnnnnnnnnnnnnnnnnnnnnnnnnnnnnnnnnnnnnnnnnnnnnnnnnnnnnnnnnnnnnnnnnnnnnnnnnnnnnnnnnnnnnnnnnnnnnnnnnnnnnnnnnnnnnnnnnnnnnnnnnnnnnnnnnnnnnnnnnnnnnnnnnnnnnnnnnnnnnnnnnnnnnnnnnnnnnnnnnnnnnnnnnnnnnnnnnnnnnnnnnnnnnnnnnnnnnnnnnnnnnnnnnnnnnnnnnnnnnnnnnnnnnnnnnnnnnnnnnnnnnnnnnnnnnnnnnnnnnnnnnnnnnnnnnnnnnnnnnnnnnnnnnnnnnnnnnnnnnnnnnnnnnnnnnnnnnnnnnnnnnnnnnnnnnnnnnnnnnnnnnnnnnnnnnnnnnnnnnnnnnnnnnnnnnnnnnnnnnnnnnnnnnnnnnnnnnnnnnnnnnnnnnnnnnnnnnnnnnnnnnnnnnnnnnnnnnnnnnnnnnnnnnnnnnnnnnnnnnnnnnnnnnnnnnnnnnnnnnnnnnnnnnnnnnnnnnnnnnnnnnnnnnnnnnnnnnnnnnnnnnnnnnnnnnnnnnnnnnnnnnnnnnnnnnnnnnnnnnnnnnnnnnnnnnnnnnnnnnnnnnnnnnnnnnnnnnnnnnnnnnnnnnnnnnnnnnnnnnnnnnnnnnnnnnnnnnnnnnnnnnnnnnnnnnnnnnnnnnnnnnnnnnnnnnnnnnnnnnnnnnnnnnnnnnnnnnnnnnnnnnnnnnnnnnnnnnnnnnnnnnnnnnnnnnnnnnnnnnnnnnnnnnnnnnnnnnnnnnnnnnnnnnnnnnnnnnnnnnnnnnnnnnnnnnnnnnnnnnnnnnnnnnnnnnnnnnnnnnnnnnnnnnnnnnnnnnnnnnnnnnnnnnnnnnnnnnnnnnnnnnnnnnnnnnnnnnnnnnnnnnnnnnnnnnnnnnnnnnnnnnnnnnnnnnnnnnnnnnnnnnnnnnnnnnnnnnnnnnnnnnnnnnnnnnnnnnnnnnnnnnnnnnnnnnnnnnnnnnnnnnnnnnnnnnnnnnnnnnnnnnnnnnnnnnnnnnnnnnnnnnnnnnnnnnnnnnnnnnnnnnnnnnnnnnnnnnnnnnnnnnnnnnnnnnnnnnnnnnnnnnnnnnnnnnnnnnnnnnnnnnnnnnnnnnnnnnnnnnnnnnnnnnnnnnnnnnnnnnnnnnnnnnnnnnnnnnnnnnnnnnnnnnnnnnnnnnnnnnnnnnnnnnnnnnnnnnnnnnnnnnnnnnnnnnnnnnnnnnnnnnnnnnnnnnnnnnnnnnnnnnnnnnnnnnnnnnnnnnnnnnnnnnnnnnnnnnnnnnnnnnnnnnnnnnnnnnnnnnnnnnnnnnnnnnnnnnnnnnnnnnnnnnnnnnnnnnnnnnnnnnnnnnnnnnnnnnnnnnnnnnnnnnnnnnnnnnnnnnnnnnnnnnnnnnnnnnnnnnnnnnnnnnnnnnnnnnnnnnnnnnnnnnnnnnnnnnnnnnnnnnnnnnnnnnnnnnnnnnnnnnnnnnnnnnnnnnnnnnnnnnnnnnnnnnnnnnnnnnnnnnnnnnnnnnnnnnnnnnnnnnnnnnnnnnnnnnnnnnnnnnnnnnnnnnnnnnnnnnnnnnnnnnnnnnnnnnnnnnnnnnnnnnnnnnnnnnnnnnnnnnnnnnnnnnnnnnnnnnnnnnnnnnnnnnnnnnnnnnnnnnnnnnnnnnnnnnnnnnnnnnnnnnnnnnnnnnnnnnnnnnnnnnnnnnnnnnnnnnnnnnnnnnnnnnnnnnnnnnnnnnnnnnnnnnnnnnnnnnnnnnnnnnnnnnnnnnnnnnnnnnnnnnnnnnnnnnnnnnnnnnnnnnnnnnnnnnnnnnnnnnnnnnnaccgactgtacagacttccacgcagaaaaactcattaatgcagccgcaggaggccagggaggcactgaagccagcgtggaagtcttcttcgagcccagccacctgggtgagaccaagggcatcctaattctatcatcgctcgcaggtggagagtatatcatccccctctttggaatggctctgcctcccaagccccaaggtcccttcccaatccgagccgggtacagcataatcatccccttcaagaatgttttctatcacttggtgaccttctccattatcgtggataacccagccttcaccgttcgcgctgtagagtctgtgcggcccaagaagatcaacaacatcacagtctcctttgaaggaaacccgtctggcagcaaaatccccatcaccaccaagctgattgtgagctgccctcctggcgaagggagtgaaactggaattaaatgggtttattatctgaaggggatcaccctttagtggtaaccagggttacctatatcaaaccaaaagctacgcgttgtcttagcctgaagaagaataaagaaaacaataagaattctaaagg

SEQ ID NO: 23207 - DNA, 809 bp, Macaca Mulatta
cacttggcgcaggagggagaactttgtaagaagctgccctctgttttttttacccactcgtcaatctggatttacttcttctgttttatacaagctctgttaagttatgtttacagtattttgtatcgctgtttacaaatcttgcatggactcctgccacgtgaaagagaaaatcttcgtgtcttcaaaaattaggcaggtaatctttgtatacttctgacaattgccagatctatggcataaataataggcacacaaaaaggtacttaaacagttatagtcaccatcacctgcttaagaatggtcttttagatttgtgtttgttttgttcaagttgttggcaccaggatgcagagaaccagactggcctgaggtgaaggagcacacagccctgagggcttggaaccctgggtccagttcctcttcacacccccttccactctgagtggcacaactccccaggtgcccatggaacacctgctttcatgccaactatccgtccacctaggcggggtgatgtgttcttacgtctctctgactttgatgccactcattctatagttcagatgtttttcattcaagatattcttggtagtaactgacaaatgtgttgcacatgcattgggggaggggcttcatttttattttaatacacatgtatttcctccttgcacaggattttgatggcatagaaatatcctaagtgatagccttccaagttagcagtgagttgacattcaactgcttttaactattcaggctaccttttatactaaaccttgaaaactagaatctaaagtccaccccaa

SEQ ID NO: 23208 - DNA, 684 bp, Macaca Mulatta
caaatgcgagttgtggtcgatatctcctgggagagagcctgatgggtgcatcctacctatctctatcatagagttggggagggaggccccctagccctccaggagtttcctttgtccatcccagcctcctacaagatgcaggcattgtcaagcctggcgacttcagtcaggatacgctgtccaggtccccttctttcccgcctcgctacccggctggcgctaacgcccacctcccaacagcgccacccgctggcggatatctgccaccgcggctgcccgctcctgcgccgctggctgcgccggcgctgcgtggtgtgccaggcacccaagccgcccgagtcctccgtgtgcccgtcgctggactgcgaggccgtgtactgctggtcgtgctgggacgacatgcggcagcggtgcccggtctgcacgccccgcgaggagctctcctcctccgcctttagtgacagcaacgacgacactgcctccgcggggtgaagaggcgtcctgctcgctcttccgccccgtccttcccggttaataaaatgccctgtacgcttcacgtgagtcggggactggggtgagccgcgcgctgcctcgcctgcagtcgggagagcctgtccgcccgacctctccagagccaggccgcgcacagtggcagagaggcagagaagctactagggaggggtc

SEQ ID NO: 23209 - DNA, 1294 bp, Macaca Mulatta
  misc_feature (1)...(1294): n = A,T,C or G
gnnnnnnnnnnnnnnnnnnnnnnnttaaaaactttattttagtccttcctggcccatgctaaaacttacatctagaaatatggcaaaacaaaatgaaacagatctctccttgtacataaaatagctaaaaatttggcctctttattgatcttatgtcatatatttggcttgaaataaaacaacaacaaaacaaacagttacaattaagggttatacaaactaaatttttcttctaaatctctaaatgcgcttagagagcaactcgcagggcatacacagggccttgagagtcggtcccacagaaaatacttatgtaaatgaaacaagaaggatgctatttgcttttcattacataaatatcacctgaacttaactaatcaatccacttatttgataaaaatcatctaggacccaaaaggccactatcaaggtttggctgggtggcccattttcactctaattcatacccaaaaggcctagaaattaattcgaaactagaaagagggcccaagtagtaaggctacctgtggctcttgctgaaaaacatttgccagtctgatgtgcgtgtgtctagaaagaatgatagaaactaaagagttctgcttgagttcaggagaacttcccagaaggaggtggtgggccaagaaatccacctgcctgcttggtggcggctcgtgaaggggcaaggccgagaatcttctgaatgttctgtcgaattgacatagtacagagaatatacaggaaaatgaaggaacagtctgtggtatcatctcccagcagatttcgatgagacagtccttggatgtaagaaagaggggtaaaaggaagctttgccaccactctaccatcaaatatagaattgaacattcccattagggcagtaaaacaaaagccaatcgcaaacatggatttcattcgaaccattgatagatctctgttgttattcttcagtttctcttcttgtctctctattttctttttctgttgtcgaccagctgactctgttattnnnnnnnnnnnnnnnnnnnnnnnnnnactctgtttttccacttctgccttcagtctcttgtacttgtctgttctgtaaaccaggacccaggttatgccttctgcgagcaaagccgtgcacacagagataaaaacgatgaggagagtgtctgcgaacatagtgctcatctcgcaccttcgtccctgcactcccacccgccagggggaaagcgctctagagccagtaaaagtgaagcgaaaacggcttccgtagagtccaccaccaccgagtaacagaccaactccc

SEQ ID NO: 23210 - DNA, 554 bp, Macaca Mulatta
ttccttgagcgatttctttcttttcataggagtcttattcttgatagagaaacatccttaattagcatacatcctggatggacttgcagctataaattggcaattcagattgctgtagtcttaatggaagaataaatttctgtcaatggcataaattttgtgtgtgtttcattaaagattgcttttaagtgatcatttgggggagagaggaagtgtctaaaagctggccagagctcgacttttgattctttttcagggtgaaagggaggctaatgtcaccaaaattctcatgaagttgagactcactaggactagagagtaggcagtataacccatttctgttgctttagtgtgattggtgaacagtatactaattttccttgttaactagcatatataaatcaatcgagtcacatagaacaatataacatttgcccccctcatggaaattgccttgcatgtttttccaagaaaatctgtgtaaaagactttgtaagtatatttttttctttatatatttaaaacctctgaccttatgaaaggaagccagggaa

SEQ ID NO: 23211 - DNA, 572 bp, Macaca Mulatta
  misc_feature (1)...(572): n = A,T,C or G
atgaataagtaaatgtatcaagtcgtttatataataaattataaaactcgaggcatttggtatgttaaaaaattttaagatttaatatgatttaaaaatttgtaaatagttccaaagggcaatgttttctttaaatttcttatagtcttaattttgttatccatgtacataatttacctcatgatttcttttgaccaatcaggatctataacacaatatagaaattgtgtaataattattataaatgttaatacacttaactttcaagtaattttaactgattatttcttttgctcttttaagttattaaagtttaaaagtttgtannnnnnnnnnnnnnnnnnnnnnnnnnnnnnnnnnnnnnnnnnnnnnnnnnnnnnnnnnnnnnnnnnnnnnnnnnnnnnnnnnnnnnnnnnnnnnnnnnnnnnnnnnnnnnnnnnnnnnnnnnnnnnnnnnnnnnnnnnnnnnnnnnnnnnnnnnnnnnnnnnnnnnnnnnnnnnnnnnnnnnnnnnnnnnnnnnnnnnnnnnnnnnnnnnnnnnnnnnnnnnnnnnnnnnnnnnnnnnnnnnnnnn

SEQ ID NO: 23212 - DNA, 2047 bp, Macaca Mulatta
  misc_feature (1)...(2047): n = A,T,C or G
gtccctgggaatattgtctccttaggccatggagggctgaaccagctgggaggggcctttgtgaacggcagacccctgccagaagtggtccgccagcgcattgtagacctggcccaccagggtgtgaggccctgtgacatctctcgccagctccgcgtcagccatggctgcgtcagcaagatcctcggcaggtnnnnnnnnnnnnnnnnnnnnnnnnnnnnnnnnnnnnnnnnnnnnnnnnnnnnnnnnnnnnnnnnnnnnnnnnnnnnnnnnnnnnnnnnnnnnnnnnnnnnnnnnnnnnnnnnnnnnnnnnnnnnnnnnnnnnnnnnnnnnnnnnnnnnnnnnnnnnnnnnnnnnnnnnnnnnnnnnnnnnnnnnnnnnnnnnnnnnnnnnnnnnnnnnnnnnnnnnnnnnnnnnnnnnnnnnnnnnnnnnnnnnnnnnnnnnnnnnnnnnnnnnnnnnnnnnnnnnnnnnnnnnnnnnnnnnnnnnnnnnnnnnnnnnnnnnnnnnnnnnnnnnnnnnnnnnnnnnnnnnnnnnnnnnnnnnnnnnnnnnnnnnnnnnnnnnnnnnnnnnnnnnnnnnnnnnnnnnnnnnnnnnnnnnnnnnnnnnnnnnnnnnnnnnnnnnnnnnnnnnnnnnnnnnnnnnnnnnnnnnnnnnnnnnnnnnnnnnnnnnnnnnnnnnnnnnnnnnnnnnnnnnnnnnnnnnnnnnnnnnnnnnnnnnnnnnnnnnnnnnnnnnnnnnnnnnnnnnnnnnnnnnnnnnnnnnnnnnnnnnnnnnnnnnnnnnnnnnnnnnnnnnnnnnnnnnnnnnnnnnnnnnnnnnnnnnnnnnnnnnnnnnnnnnnnnnnnnnnnnnnnnnnnnnnnnnnnnnnnnnnnnnnnnnnnnnnnnnnnnnnnnnnnnnnnnnnnnnnnnnnggcagatcctcattcacccttcgccataaagcaggaaacccccgaggtgtccagttctagctccaccccttcctctttatctagctccgcctttttggatctgcagcaagtcggctccggggtccnnnnnnnnnnnnnnnnnnnnnnnnnnnnnnnnnnnnnnnnnnnnnnnnnnnnnnnnnnnnnnnnnnnnnnnnnnnnnnnnnnnnnnnnnnnnnnnnnnnnnnnnnnnnnnnnnnnnnnnnnnnnnnnnnnnnnnnnnnnnnnnnnnnnnnnnnnnnnnnnnnnnnnnaggaagtgaatactctggctatgcctatggccacaccccctactcctcctacagcgaggcctggcgcttccccaactccagcttgctgagtnnnnnnnnnnnnnnnnnnnnnnnnnnnnnnnnnnnnnnnnnnnnnnnnnnnnnnnnnnnnnnnnnnnnnnnnnnnnnnnnnnnnnnnnnnnnnnnnnnnnnnnnnnnnnnnnnnnnnnnnnnnnnnnnnnnnnnnnnnnnnnnnnnnnnnnnnnnnnnnnnnnnnnnnnnnnnnnnnnnnnnnnnnnnnnnnnnnnnnnnnnnnnnnnnnnnnnnnnnnnnnnnnnnnnnnnnnnnnnnnnnnnnnnnnnnnnnnnnnnnnnnnnnnnnnnnnnnnnnnnnnnnnnnnnnnnnnnnnnnnnnnnnnnnnnnnnnnnnnnnnnnnnnnnnnnnnnnnnnnnnnnnnnnnnnnnnnnnnnnnnnnnggtacccaccaaaggagagaagaaggaatagccaaggaacttggggggatggcgaatggttcctgcctgggcccaaggggtacacagggcacctccatggctccattattaacacaactctagcaattatggaccgtaagcacttccctccagcccacaagtcacagcctggtgctgaggctctcctcaccagccacccagggagtagtcacctccctcagcctcccgcctgccccacacggaggctctaactgtcctctttctccacatcatttgcttggctctttctacacctccctcttgggcatgggctggctgaaggctggggcgagtccctcagaaattccaccaggctgtcagctgacttgttatgcctgctgctgtga

SEQ ID NO: 23213 - DNA, 163 bp, Macaca Mulatta
  misc_feature (1)...(163): n = A,T,C or G
agttgcctatgaggagctcctggacaaccgaaaactggaagnagtgacccagaccacagatccatcacggcagctggaaggggggaacctggccctggccatcttgctgcctctaggcttggtcattgttctcggcagtggcgtttacatatactacaccaag

SEQ ID NO: 23214 - DNA, 4005 bp, Macaca Mulatta
  misc_feature (1)...(4005): n = A,T,C or G
atatgatgcttcctggtgtgtttagtggttggtgccattgcaattttctgtgctgaaatcattctgaaaactcacacagtagacttcagcatacaaggaaagccaaagccatttgagggggaataaagccaaaagcccttcaccttattcgttccaagaatctcaccatcccctctctacccccctccaaaactaagccattgcacacagacaggcagcatggctagcaaacgaaaatctacaactccgtgcatggttcggacatcacaagtagtagaacaagatgtgcccgaggaggtagacagggccaaagagaaaggaatcggcacaccacagcctgacgtggccaaggacagttgggcagcagaacttgaaaactcttccaaagaaaatgaagtgatagaggtgaaatctacgggagaaagccagtccaaaaaactccaaggtggttatgagtgcaaatactgcccctactccacgcaaaacctgaacgagttcacggagcacgttgacatgcaacatcccaacgtgattcnnnnnnnnnnnnnnnnnnnnnnnnnnnnnnnnnnnnnnnnnnnnnnnnnnnnnnnnnnnnnnnnnnnnnnnnnnnnnnnnnnnnnnnnnnnnnnnnnnnnnnnnnnnnnnnnnnnnnnnnnnnnnnnnnnnnnnnnnnnnnnnnnnnnnnnnnnnnnnnnnnnnnnnnnnnnnnnnnnnnnnnnnnnnnnnnnnnnnnnnnnnnnnnnnnnnnnnnnnnnnnnnnnnnnnnnnnnnnnnnnnnnnnnnnnnnnnnnnnnnnnnnnnnnnnnnnnnnnnnnnnnnnnnnnnnnnnnnnnnnnnnnnnnnnnnnnnnnnnnnnnnnnnnnnnnnnnnnnnnnnnnnnnnnnnnnnnnnnnnnnnnnnnnnnnnnnnnnnnnnnnnnnnnnnnnnnnnnnnnnnnnnnnnnnnnnnnnnnnnnnnnnnnnnnnnnnnnnnnnnnnnnnnnnnnnnnnnnnnnnnnnnnnnnnnnnnnnnnnnnnnnnnnnnnnnnnnnnnnnnnnnnnnnnnnnnnnnnnnnnnnnnnnnnnnnnnnnnnnnnnnnnnnnnnnnnnnnnnnnnnnnnnnnnnnnnnnnnnnnnnnnnnnnnnnnnnnnnnnnnnnnnnnnnnnnnnnnnnnnnnnnnnnnnnnnnnnnnnnnnnnnnnnnnnnnnnnnnnnnnnnnnnnnnnnnnnnnnnnnnnnnnnnnnnnnnnnnnnnnnnnnnnnnnnnnnnnnnnnnnnnnnnnnnnnnnnnnnnnnnnnnnnnnnnnnnnnnnnnnnnnnnnnnnnnnnnnnnnnnnnnnnnnnnnnnnnnnnnnnnnnnnnnnnnnnnnnnnnnnnnnnnnnnnnnnnnnnnnnnnnnnnnnnnnnnnnnnnnnnnnnnnnnnnnnnnnnnnnnnnnnnnnnnnnnnnnnnnnnnnnnnnnnnnnnnnnnnnnnnnnnnnnnnnnnnnnnnnnnnnnnnnnnnnnnnnnnnnnnnnnnnnnnnnnnnnnnnnnnnnnnnnnnnnnnnnnnnnnnnnnccagccagtgaccgcaagaagacaaaggagcagatagcacatctcaaggccagctttctccagagccagttccctgatgatgctgaggtttaccggcttatcgaggtgactggccttgccaggagcgagatcaagaagtggttcagtgaccaccggtatcggtgtcaaaggggcatcgtccacatcaccagcgaatcccttgccaaagaccagttggccatcgcggcctcccgacacggtcgcacctaccatgcatacccagactttgccccccagaagttcaaagagaaaacacagggtcaggtgaaaatcttggaagacagcttttaagaaaagttcttttcctacccaagcagaactggatcggctaagggtggagaccaagctgagcaggagagagatcgactcctggttctcggagaggcggaagcttcgagacagcatggaacaagccgtcttggattccatggggtctggcaaaaaaggccaagatgcgggagcccccaacggtgctctgtctcgactcgaccagctctctggtgcccagttaaccagttctctgcccagcccttcgccagcaattgcaaaaagtcaagaacaggttcatctcctgaggagcacgtttgcaagaacccagtggcctactccccaggagtacgaccagttagcggccaagacgggcctggtccgaactgagatagtgcgttggttcaaggagaacagatgctcgctgaaaacaggaaccgtgaactggatnnnnnnnnnnnnnnnnnnnnnnnnnnnnnnnnnnnnnnnnnnnnnnnnnnnnnnnnnnnnnnnnnnnnnnnnnnnnnnnnnnnnnnnnnnnnnnnnnnnnnnnnnnnnnnnnnnnnnnnnnnnnnnnnnnnnnnnnnnnnnnnnnnnnnnnnnnnnnnnnnnnnnnnnnnnnnnnnnnnnnnnnnnnnnnnnnnnnnnnnnnnnnnnnnnnnnnnnnnnnnnnnnnnnnnnnnnnnnnnnnnnnnnnnnnnnnnnnnnnnnnnnnnnnnnnnnnnnnnnnnnnnnnnnnnnnnnnnnnnnnnnnnnnnnnnnnnnnnnnnnnnnnnnnnnnnnnnnnnnnnnnnnnnnnnnnnnnnnnnnnnnnnnnnnnnnnnnnnnnnnnnnnnnnnnnnnnnnnnnnnnnnnnnnnnnnnnnnnnnnnnnnnnnnnnnnnnnnnnnnnnnnngggaagtcagttagaactgctgtgctgatcaaggggatgctctgtctttgaagaaagaagaaatggtccctccccagccatgggccaccctcgccagtgactccaaatggaactgcttagctcgtgtgtgcctggagggannnnnnnnnnnnnnnnnnnnnnnnnnnnnnnnnnnnnnnnnnnnnnnnnnnnnnnnnnnnnnnnnnnnnnnnnnnnnnnnnnnnnnnnnnnnnnnnnnnnnnnnnnnnnnnnnnnnnnnnnnnnnnnnnnnnnnnnnnnnnnnnnnnnnnnnnnnnnnnnnnnnnnnnnnnnnnnnnnnnnnnnnnnnnnnnnnnnnnnnnnnnnnnnnnnnnnnnnnnnnnnnnnnnnnnnnnnnnnnnnnnnnnnnnnnnnnnnnnnnnnnnnnnnnnnnnnnnnnnnnnnnnnnnnnnnnnnnnnnnnnnnnnnnnnnnnnnnnnnnnnnnnnnnnnnnnnnnnnnnnnnnnnnnnnnnnnnnnnnnnnnnnnnnnnnnnnnnnnnnnnnnnnnnnnnnnnnnnnnnnnnnnnnnnnnnnnnnnnnnnnnnnnnnnnnnnnnnnnnnnnnnnnnnnnnnnnnnnnnnnnnnnnnnnnnnnnnnnnnnnnnnnnnnnnnnnnnnnnnnnnnnnnnnnnnnnnnnnnnnnnnnnnnnnnnnnnnnnnnnnnnnnnnnnnnnnnnnnnnnnnnnnnnnnnnnnnnnnnnnnnnnnnnnnnnnnnnnnnnnnnnnnnnnnnnnnnnnnnnnnnnnnnnnnnnnnnnnnnnnnntctttaagcacctttctaaataccagcggaagaggctcctgcttctgttagtatgatcagtactattgtgacattaaaacaacaacaataagatcttcctatctggagggtacaaaggtgaatggctttggttttcatttctcttcttcactgccttttctcggtgtggtatttgacaagattttagctcaaagcctcaccatgaattgnnnnnnnnnnnnnnnnnnnnnnnnnnnnnnnnnnnnnnnnnnnnnnnnnnnnnnnnnnnnnnnnnnnnnnnnnnnnnnnnnnnnnnnnnnnnnnaagagacatatctggtgtacatgttgcaatatgaattctggttgcaatccctcccccgtcccacattgccccccatttgagtacaccgcacaagtcaattgctaggaagtttgaataaaaccaatttttctaacttgtcactcatttgttgtaactcaataaagcaaagactaaacattttta

SEQ ID NO: 23215 - DNA, 624 bp, Macaca Mulatta
atggctgctgaaccagcagaagacaattgcatcaattttgtggcaatgaaatttattgacagtacgctttactttatagctgaagatgatgaaaacctggaatcagattactttggcaagcttgaatctaaattatcaatcataagaaatttgaatgaccaagttctcttcattgaccaaggaaatcggcccctatttgaagatatgactgattctgactgtagagataatgcaccccggaccatatttattataaatatgtataaagatagccagcctagaggtatggctgtagccatctctgtgaaatgtgagaaaatttcaactctctcctgtgagaacagaattatttcctttaaggaaatgaatcctcctgataacatcaaggatacgaaaagtgacatcatattctttcagagaagtgtcccaggacatgataataagatgcaatttgaatcttcatcatacgaaggatactttctagcttgtgaaaaagagagagacctttataaactcattttgaaaaaaaaggatgaattgggggatagatctataatgttcactgttcaaaacgaagactagctattaaaatttcatgccgggcgcagtggctcacgccaagcc

SEQ ID NO: 23216 - DNA, 231 bp, Macaca Mulatta
  misc_feature (1)...(231): n = A,T,C or G
gaatctcggaggaaaaccccagtgattgtgaccctgaaagaaaatgaaagattctttggagacagtgcagcaagcatggnnattaagaatccaaaggctacgctgcgttacttccagcacctcctggggaagcaggcagataacccccacgtagctctttaccaggcccgcttcccggagcatgagctgactttcgacccacagaggcagactgtgcactttcagatcagc

SEQ ID NO: 23217 - DNA, 4490 bp, Macaca Mulatta
  misc_feature (1)...(4490): n = A,T,C or G
ccgccgtgtctgcttccagagccaaatctgtagaggctggaattgccggggaggcccaaagcaaaaagcctgtgtcgaggccggcccccgctgccgctgccagcgccagggagccccgtatcaagcaaggtnnnnnnnnnnnnnnnnnnnnnnnnnnnnnnnnnnnnnnnnnnnnnnnnnnnnnnnnnnnnnnnnnnnnnnnnnnnnnnnnnnnnnnnnnnnnnnnnnnnnnnnnnnnnnnnnnnnnnnnnnnnnnnnnnnnnnnnnnnnnnnnnnnnnnnnnnnnnnnnnnnnnnnnnnnnnnnnnnnnnnnnnnnnnnnnnnnnnnnnnnnnnnnnnnnnnnnnnnnnnnnnnnnnnnnnnnnnnnnnnnnnnnnnnnnnnnnnnnnnnnnnnnnnnnnnnnnnnnnnnnnnnnnnnnnnnnnnnnnnnnnnnnnnnnnnnnnnnnnnnnnnnnnnnnnnnnnnnnnnnnnnnnnnnnnnnnnnnnnnnnnnnnnnnnnnnnnnnnnnnnnnnnnnnnnnnnnnnnnnnnnnnnnnnnnnnnnnnnnnnnnnnnnnnnnnnnnnnnnnnnnnnnnnnnnnnnnnnnnnnnnnnnnnnnnnnnnnnnnnnnnnnnnnnnnnnnnnnnnnnnnnnnnnnnnnnnnnnnnnnnnnnnnnnnnnnnnnnnnnnnnnnnnnnnnnnnnnnnnnnnnnnnnnnnnnnnnnnnnnnnnnnnnnnnnnnnnnaaaggtactcacatcttgcagcaaaactgctggatgcaaaagagcaagcagctaccttaaactagaaaaaaacaagcaaggccaaaaagaggctcaagaaaaaataaggaaatttcaaagannnnnnnnnnnnnnnnnnnnnnnnnnnnnnnnnnnnnnnnnnnnnnnnnnnnnnnnnnnnnnnnnnnnnnnnnnnnnnnnnnnnnnnnnnnnnnnnnnnnnnnnnnnnnnnnnnnnnnnnnnnnnnnnnnnnnnnnnnnnnnnnnnnnnnnnnnnnnnnnnnnnnnnnnnnnnnnnnnnnnnnnnnnnnnnnnnnnnnnnnnnnnnnnnnnnnnnnnnnnnnnnnnnnnnnnnnnnnnnnnnnnnnnnnnnnnnnnnnnnnnnnnnnnnnnnnnnnnnnnnnnnnnnnnnnnnnnnnnnnnnnnnnnnnnnnnnnnnnnnnnnnnnnnnnnnnnnnnnnnnnnnnnnnnnnnnnnnnnnnnnnnnnnnnnnnnnnnnnnnnnnnnnnnnnnnnnnnnnnnnnnnnnnnnnnnnnnnnnnnnnnnnnnnnnnnnnnnnnnnnnnnnnnnnnnnnnnnnnnnnnnnnnnnnnnnnnnnnnnnnnnnnnnnnnnnnnnnnnnnnnnnnnnnnnnnnnnnnnnnnnnnnnnnnnnnnnnnnnnnnnnnnnnnnnnnnnnnnnnnnnnnnnnnnnnnnnnnnnnnnnnnnnnnnnnnnnnnnnnnnnnnnnnnnnnnnnnnnnnnnnnnnnnnnnnnnnnnnnnnnnnnnnnnaatcctgaggaatcttgggaaaatttgttatcggatgaggatttttgtgcaagggtcctttgggatcagccaatgtggaagatttggaacctgttagaaacctctttagaaagttgcaaagcacacctaagtatcagaaacttctaaaggaaagacaacagttacctgtatttaaacatcaggactcaattgttgaaactcttaaaaggcaccgggtagtggttgtggcaggtgaaacagggagtggtaaaagtactcaggtaccacattttctattggaagatttgcttctaaatgagtgggaagcaagtaaatgtaacattgtctgtactcaacctcgaagaatctcagcagtgagtttagccaccagagtatgtgatgaattgggctgtgaaaatggacctggaggaagnnnnnnnnnnnnnnnnnnnnnnnnnnnnnnnnnnnnnnnnnnnnnnnnnnnnnnnnnnnnnnnnnnnnnnnnnnnnnnnnnnnnnnnnnnnnnnnnnnnnnnnnnnnnnnnnnnnnnnnnnnnnnnnnnnnnnnnnnnnnnnnnnnnnnnnnnnnnnnnnnnnnnnnnnnnnnnnnnnnnnnnnnnnnnnnnnnnnnnnnnnnnnnnnnnnnnnnnnnnnnnnnnnnnnnnnnnnnnnnnnnnnnnnnnnnnnnnnnnnnnnnnnnnnnnnnnnnnnnnnnnnnnnnnnnnnnnnnnnnnnnnnnnnnnnnnnnnnnnnaggtttttcatcttgaagatataatagaagaaacaggttttgtactggagaaagactcggaataagtcagaagtttctggaagaggaagaagaagtaaccattaatgttacaaggaaagcagggggaannnnnnnnnnnnnnnnnnnnnnnnnnnnnnnnnnnnnnnnnnnnnnnnnnnnnnnnnnnnnnnnnnnnnnnnnnnnnnnnnnnnnnnnnnnnnnnnnnnnnnnnnnnnnnnnnnnnnnnnnnnnnnnnnnnnnnnnnnnnnnnnnnnnnnnnnnnnnnnnnnnnnnnnnnnnnnnnnnnnnnnnnnnnnnnnnnnnnnnnnnnnnnnnnnnnnnnnnnnnnnnnnnnnnnnnnnnnnnnnnnnnnnnnnnnnnnnnnnnnnnnnnnnnnnnnnnnnnnnnnnnnnnnnnnnnnnnnnnnnnnnnnnnnnnnnnnnnnnnnnnnnnnnnnnnnnnnnnnnnnnnnnnnnnnnnnnnnnnnnnnnnnnnnnnnnnnnnnnnnnnnnnnnnnnnnnnnnnnnnnnnnnnnnnnnnnnnnnnnnnnnnnnnnnnnnnnnnnnnnnnnnnnnnnnnnnnnnnnnnnnnnnnnnnnnnnnnnnnnnnnnnnnnnnnnnnnnnnnnnnnnnnnnnnnnnnnnnnnnnnnnnnnnnnnnnnnnnnnnnnnnnnnnnnnnnnnnnnnnnnnnnnnnnnnnnnnnnnnnnnnnnnnnnnnnnnnnnnnnnnnnnnnnnnnnnnnnnnnnnnnnnnnnnnnnnnnnnnnnnnnnnnnnnnnnnnnnnnnnnnnnnnnnnnnnnnnnnnnnnnnnnnnnnnnnnnnnnnnnnnnnnnnnnnnnnnnnnnnnnnnnnnnnnnnnnnnnnnnnnnnnnnnnnnnnnnnnnnnnnnnnnnnnnnnnnnnnnnnnnnnnnnnnnnnnnnnnnnnnnnnnnnnnnnnnnnnnnnnnnnnnnnnnnnnnnnnnnnnnnnnnnnnnnnnnnnnnnnnnnnnnnnnnnnnnnnnnnnnnnnnnnnnnnnnnnnnnnnnnnnnnnnnnnnnnnnnnnnnnnnnnnnnnnnnnnnnnnnnnnnnnnnnnnnnnnnnnnnnnnnnnnnnnnnnnnnnnnnnnnnnnnnnnnnnnnnnnnnnnnnnnnnnnnnnnnnnnnatggaagaaagcacgacaagaaggaggttatcgttctgaaatcacatattgccggaggaactttctcaatagaacatcactgttaaccctagaggnnaggatgtaaagcaggagttaataaagctggttaaggcagcaggattttcatcttccacaacttctaccagctgggaaggaaacagagcctcacagaccctctcattccaagaaattgcccttcttaaagctgtactggtggctggactgtatgacaatgtggggaagataatctatacaaagtcagtggatgttacagaaaaattggcttgcattgtggagacggcccaaggcaaagcacaagtacacccatcctcagtaaacagagatttgcaaactcatggatggctcttataccaggagaannnnnnnnnnnnnnnnnnnnnnnnnnnnnnnnnnnnnnnnnnnnnnnnnnnnnnnnnnnnnnnnnnnnnnnnnnnnnnnnnnnnnnnnnnnnnnnnnnnnnnnnnnnnnnnnnnnnnnnnnnnnnnnnnnnnnnnnnnnnnnnnnnnnnnnnnnnnnnnnnnnnnnnnnnnnnnnnnnnnnnnnnnnnnnnnnnnnnnnnnnnnnnnnnnnnnnnnnnnnnnnnnnnnnatgacaagattctacagatcattacggaattgataaaaacagagaataattgacgctgaaattcatggtcaactgctttaaaaattaagatgaagatacagtcatgaaattatctgaaaatggatcatcacattaagtatttcattacttaaaatgttggtactagccattaacttaaaggtggtggggaaaaaagcacatactttaaatatgtgtaattttctagttcctttttaatgatgattattctgaatgtatttgccactacatttacaataaattctttggtatcgtccatgttttgctcatcgttgtgtgctttaagggcaaggcctatgtctgtggtatctgtagcttaatgttgtgattccctgtgtggctgcctcctcatctatcagtccttgatgtctgcagaatttaaaccctatagacccagaagggaaaataatctccaaaatcaattataattaaatttccatgaaaaggaaca

SEQ ID NO: 23218 - DNA, 825 bp, Macaca Mulatta
  misc_feature (1)...(825): n = A,T,C or G
gggctcttcgccatctcttcttttcccgtgaatccgtcgccatgaaggtggagctgtgcagttttagcgggtacaagatctaccccggacacgggaggcgctacgccaggaccgacgggaaggttttccagtttcttaatgcaaaatgcgagtcggcgttcctttccaagaggaatcctcggcagataaactggactgtcctctacagaaggaagcacaaaaagggtcagtcggaagaaattcaaaagaaaagaacccgccgagcagtcaaattccagagggccattactggtgcatctcttgctgatataatggccaagaggaatcagaaacctgaagttagaaaggctcaacgagaacaagctatcagggctgctaaggaagcaaaaaaggctaagcaagcatctaaaaagactgcaatggctgctgctaaggcacctacaaaggcagcacctaagcaaaagattgtgaagcctgtgaaagtttcagctccccgagttggtggaaaacgctaaactggcagattcgatttttaaataaagattgcattataactctaggnnnnnnnnnnnnngnnnnnnnnnnnanccttgttgggccgcctcggcccttgaagaagcttttctagaacatttcgttttggcgcgcggggccccagtagggtaaagtgaaacatgggtcaatacgctgttttcctaggaggatccctgggtcatgaactaggtgctttggatttctcaccccaataaaaaaaaccccgggggggcaaacggagcggtttctggaacaaattcccggaatggaattcctgaaagttcatttcct

SEQ ID NO: 23219 - DNA, 388 bp, Macaca Mulatta
tcagcttagaagaaatctgtgtgggttgggttaattttggatctttgcctaataatgcatgttgattttattgtgggtctgtgtttatttttatttttatatgttgttagctgcagattaaccccagccccttctgtcttctgttaagtacagtcgatactgacattgttcactcatcaaaccacatcttgatactgagtaacatttcccatgagcctcaaaactgaatgctgaaaagctactagactggaaaagaaacactgcattatgtacgttaagtgactaatttaatttcaattaaaaagtataaagtgaaaatgaataagtgaaagtcatgtgtttatatttcacacgtttcattacgaattacatgttaacatagggtgca

SEQ ID NO: 23220 - DNA, 323 bp, Macaca Mulatta
  misc_feature (1)...(323): n = A,T,C or G
agtttgctctgaaaatgagtctgaagctgaagctgaccagcagatggacaacttgtacctgaaagccttggagggtttcattgccgtggtgacccaagatggcgacatgatctttctgtcagaaaacatcagcaagttcatgggacttacacaggtgnnnnnnnnnnnnnnnnnnnnnnnnnnnnnnnnnnnnnnnnnnnnnnnnnnnnnnnnnnnnnnnnnnnnnnnnnnnnnnnnnnnnnnnnnnnnnnnnnnnnnnnnnnnngacatgtccacagagcgggacttcttcatgaggatgaagtgcacggtcaccaacagag

SEQ ID NO: 23221 - DNA, 944 bp, Macaca Mulatta
  misc_feature (1)...(944): n = A,T,C or G
tcccacccacccacaggccgcaatggcgtctcagctccagaaccggctccgctccgcactggccttggtcacaggtncaggtgcggggagcggcatcggccgagcagtcagtgtacgcctggccggagagggggccaccgtagctgcctgcgacctggacggggcagcggcacaggagacggtgcggctgctgggcgggccagggaacaaggaggggccgccccgagggaaccacgctgccttccaggctgacgtgtctgaggccagagccgccaggcacctgctggaacaagtgcaggnnnnnnnnnnnnnnnnnnnnnnnnnnnnnnnnnnnnnnnnnnnnnnnnnnnnnnnnnnnnnnnnnnnnnnnnnnnnnnnnnnnnnnnnnnnnnnnnnnnnnnnnnnnnnnnnnnnnnnnnnnnnnnnnnnnnnnnnnnnnnnnnnnnnnnnnnnnnnnnnnnnnnnnnnnnnnnnnnnnnnnnnnnnnnnnnnnnnnnnnnnnnnnnnnnnnnnnnnnnnnnnnnnnnnnnnnnnnnnnnnnnnnnnnnnnnnnnnnnnnnnnnnnnnnnnnnnnnnnnnnnnnnnnnnnnnnnnnnnnnnnnnnnnnnnnnnnnnnnnnnnnnnnnnnnnnnnnnnnnnnnnnnnnnnnnnaaagtgccacagaaagtggtggacaagnagattactgaaatgatcccgatgggatacttgggggaccctgaggngatgtggcagatgtggtcgcattcttggcatctgaagacagtggatacatcacaggggcctcagtggaagtcactggnggaggtcttttcatgtaaccgcctcaaggaccctggactctgctcacccccccatcactctgcctggcctcctgctgatgaggactctgagttaacaggctacaaaaggggtggcagtgtatggctcaggaatgctgaata

SEQ ID NO: 23222 - DNA, 368 bp, Macaca Mulatta
tcaggcaggacaggaccgcaagtgggggtagctcatcatggcctagcttccaccagacgtgccttgcaatccatgacatcaagacggccttcagcgattgcaccggcaagatcggcaggcgggattgcctgacccaggcttgctcggccctcacggggtgagtggagctgcacctgcaggggctttggggaccaaggccagccccatcacaccccctgtattcacagcaaaggggtgcgcgagggcatcgagtggatggtgaagtgtgtcgtgcggaacgtgcaccggccgccgcggcagagggacatcacgtaggcgcggccgcgctgccgtcgggacggctggtgcccggtgaaggaggagtggcc

SEQ ID NO: 23223 - DNA, 431 bp, Macaca Mulatta
agatcaagaagctgaggcccaaggttacacactaaagtgaatggcagaggcagaaataacacctatgtccttctgaccccaaagcatgttcctaaagttctggaagccaactggaggcttccttgttgctcctgtgggaccaccaccctgagcagggtgttctgtggcccctcatcattgtggcttttgaccacaggcccttcaccagcacagcagcggcaggcatggcggcaagcgtggagcagcacgagggcaccatccaggtgcagggccaggccctcttcttccgagaggcccggcccagcagtgggcaagctcacttctctgtactgctactgcatggtattcgcttctcctccgagacctggcagaacctgggtacactgcacaggctggcccaggctggctaccaggctgtggccattgacctg

SEQ ID NO: 23224 - DNA, 115 bp, Macaca Mulatta
gtcatctgtcactttgacaaccagctggtgcggaacgcggccctgcgggaggagctggatctgctgcggatcgacaggaaccgctatctgaacatggaccgcaagctgaagaagg

SEQ ID NO: 23225 - DNA, 338 bp, Macaca Mulatta
atgtaaatggaattttaaaagcagagttctttattgtatggatgaagtctgaataaatatcagtaactcctgccatctggcctttgtctgtcaagacacagaacgtcttagcggtcagggtttccagggctgcagtgcgccgtgcttgcacattggaagtcattgttgggatggaaaagaaacctggggtgagcaaggcccagggtgcagctcaaggcaccaagcaacccctttgctttctttcgtccgacagcgatgatgacaaaacagccaccaggttgtgagtggcggaaacgcataggcagcggatgaagcgtagaggaacccttaccgaatcc

SEQ ID NO: 23226 - DNA, 413 bp, Macaca Mulatta
tcttctgtggctgtggctatagatgcagatctggctctggctccggctccagctttggccactactattgaggacaccatgggagactctcaccctctatcctgtgacattgggattcgccaattctgaagcccacatgctctgagcctttcccttgattgatgatatcctgccgtggaagtgtaatgtgatctgttgttgacctaccaggtaacccaaaaataccctgagtttccatcatgaagtgggataaggtgaagttcacctgtcacttctccttttatcaggatgatggtgtcacagtgactcctttgatgactttcatgctgcagtttgtttctctgctgacctaataaacacatttaatccacaagagaaaacttggtgtttgtatctattatttattgtccaaa

SEQ ID NO: 23227 - DNA, 162 bp, Macaca Mulatta
  misc_feature (1)...(162): n = A,T,C or G
cttgccaccgagacatttataaaggaattgatatgagaggagtcaattttaatgtatctaaggttagcagtgttgaagaatgccaaaaaaggtgcaccaataacattcgctgccaatttttttcatatgccacacaaacatttcacaatgcagagtaccggn

SEQ ID NO: 23228 - DNA, 954 bp, Macaca Mulatta
  misc_feature (1)...(954): n = A,T,C or G
cgcgagctgggaccccgccgacccggcgtgcccgggccgaggagagcgcggcggagacagtccgaagaccggccaggactaagagagaaggacgaggtcttcttcggatgggaggggcaagcccgccatcctgggaccccaggcgtgcaggttctctttgagggtnnnnnnnnnnnnnnnnnnnnnnnnnnnnnnnnnnnnnnnnnnnnnnnnnnnnnnnnnnnnnnnnnnnnnnnnnnnnnnnnnnnnnnnnnnnnnnnnnnnncaagtcaaatccagacctacattggatgttggtttactaggtgactgtctcctggaaatgttatgcagctcagcaaggtgaannnnnnnnnnnnnnnnnnnnnnnnnnnnnnnnnnnnnnnnnnngggcaggattcatcaaattgaatatgcaatggaagctgttaaacaaggttcagccacagttggtctgaaatcaaaaactcatgcagtgttggttgcattgaaanagggcacaatcagagcttgcagctcatcagaaaaaaattctccatgttgacaaccatattggtatctcaattgcggggcttactgctgatgctagactgttatggtaattttatgcgtcaagagtgtttggattccagatttgtatttgatagaccactgcctgtgtctcgtcttgtatctctaattggaagcnnnnnnnnnnnnnnnnnnnnnnnnnnnnnnnnnnnnnnnnnnnnnnnnnnnnnnnnnnnnnnnnnnnnnnngatatgggccctcacattttccaaacctgtccatctgctaactattttgactgcagagccatgtccattggagcccgatcccagtcagctcgtacttacttggagagacatatgtctgaatttatggagtgtanaatttaaatgaactagttaaacaaggtctgcgtgccttaagagagacacttcctgcagaaca

SEQ ID NO: 23229 - DNA, 647 bp, Macaca Mulatta
  misc_feature (1)...(647): n = A,T,C or G
gcatatcttcattgacatcacagaagtgagatggcccagtcttggtacagacggtaccatgatatgtatggagagtggcattgtgaagataacgtctttagatggtcatgcatacctgtgcctgcccagatctcagcatgaatttacagtacattttttgtgtaaagttagccagaagtcagactcatctgcagggttgtcagaaacaaataataaagccccaaaagataaactagaaaaagctggcaaaatctgtatacatggaaatttatcaggacagagactgaagaataaagaaaatgagcttcattgccagatcatgaaatccaaagaaactttaaagaagatgaattgtgtaaatggaactgaagggagggaagagctgcctttggctggtacaaagcacacatgtgtatacacatgggtcaagcagtgctggtctgtggctgcctgtccagaggaatggaaatatcctttgtctttagcacttcattttcataagaaaatcaacaatatgtctaanattgatgcacatataactcagagtagatgtttaacttctgatatttcagagganagaggagaagtggtttctgttcttcccagggccctgccactcagctgtccagttccacacctgcacaggt

SEQ ID NO: 23230 - DNA, 584 bp, Macaca Mulatta
gagcctggtgagggaagcgtctctgttggggtcggccgctctgcaggaccctgaggaaaagctcgcaccaggtggacgccgatctgtcagcagtgggtaaaggagacccaacaagccgcggggcaaaatgtcctcgtacgccttcttcgtgcagacctgccgggaagagcacaagaagaaacacccggactcttccgtcaatttcgcggaattctccaagaagtgttcggagagatggaagaccatgtctgcaaaggagaagtcgaagtttgaagatatggcaaaaagtgacaaagctcgctatgatagggagatgaaaaattacgttcctcccaaaggtgataagaaagggaagaaaaaggatcccaatgctcctaaaaggccgccatctgcctttttcctgttttgctctgaacatcgcccaaagatcaaaagtgaacacccgggcctatccattggggatactgcaaagaaattgggtgaaatgtggtccgagcagtcagccaaagataaacaaccatatgaacagaaagcagctaagctaaaggagaaatctgacaaggatattgctgcatatcgtgcca

SEQ ID NO: 23231 - DNA, 912 bp, Macaca Mulatta
ggctctgcggcgtcccatgggccgcggcggctggcgggacggctccggccaggagaagtaccggctcgtggtggtcggcgggggtggcgtgggcaagtcggcgctcaccatccagttcatccagtcctattttgtaacagattatgatccaaccattgaagattcttacacaaagcagtgtgtgatagatgacagagcagcccggctagatattttggatacagcaggacaagaagagtttggagccatgagagaacagtatatgaggactggcgagggcttcctgttggtcttttcagtcacagatagaggcagttttgaagaaatctataagtttcaaagacagattctcagagtaaaggatcgtgatgagttcccaatgattttaattggtaataaagcagatctggatcatcaaagacaggtaacacaggaagaaggacagcagttagcacggcaacttaaggtaacatacatggaggcatcagcaaaaattaggatgaatgtagatcaagctttccatgaacttgtccgggttatcaggaaatttcaagagcaggaatgtcctccttcaccagaaccaacacggaaagaaaaagacaagaaaggctgccattgtgtcattttctataatcccttcagttttagctaccaactgccaggaaaagccctcatctcctcctcctctcctcggtttacatcttgttggtacctttctagccttagacaaatgatcaccatgttagccttagaccaaaaagctggctagttcctttcgtgaaactaatacaatgggtctttcccgaccaatttaaggaaacactaaggctgcttcccaagattatcggattcctttaaaatatatggtccttagaacccgacctggctcctttttttaaatgctttcatttt

SEQ ID NO: 23232 - DNA, 491 bp, Macaca Mulatta
  misc_feature (1)...(491): n = A,T,C or G
caggagtgaagatcccctcaccctaggcaactggcacgagcttcgtgtatctcgcacagcaaagaatggcatcttacaggtggataagcagaaggtagtggagggaatggcagagnnnnnnnnnnnnnnnnnnnnnnnnnnnnnnnnnnnnnnnnnnnnnnnnnnnnnnnnnnnnnnnnnnnnnnnnnnnnnnnnnnnnnnnnnnnnnnnnnnnnnnnnnnnnnnnnnnnnnnnnnnnnnnnnnnnnnnnnnnnnnnnnnnnnnnnnnnnnnnnnnnnnnnnnnnnnnnnnnnnnnnnnnnnnnnnnnnnnnnnnnnnnnnnnnnnnnnnnnnnnnnnnnnnnnnnnnnnnnnnnnnnnnnnnnnnnnnnnnnnnnnnnnnnnnnnnnnnnnnnnnnnnnnnnnnnnnnngcgatcgtagaagccattgagatcccgcagtttattggccgcagttacctgacgtatgacaacccagatatcttgaagagg

SEQ ID NO: 23233 - DNA, 163 bp, Macaca Mulatta
gctggggcccagacctggagccccgaggaggaggatagggtgatcccaggtagcatctatgacgcagacctcaatgatgagtgggtacagcatgcccttcacttcgccatcagcgagtacaacaaggccaccgaagatgagtaatacagacgcccactgcggg

SEQ ID NO: 23234 - DNA, 766 bp, Macaca Mulatta
tgggctggagggcatgcgcatctggatctccatgccactgtgcttcatgtacctggtttccatcctgggcaactgcacaatgcttttcatcattaaaacagagtgctcactccatgaacctatgtatctcttcttggccatgctggctctgattgacctgggtctgtccctttgcactctccctacagtcctcagcatcttttgggttggggcacgagaaattagccacgatgcctgctttgctcagctctttttcattcactgcttatccttcctcgagtcctctgtgctactgtctatggcctttgaccgctttgtggctatctgctgccccttgcactatgcttccattctcaccaacacagtcattggcaggattggcctgatctctctgggtcgtagtgtagcacttatttttccattgccttttatgctcaaaagattcacctattgtggctccccagttctctcacattcttattgtctccaccaagaagtgatgaaattggcctgtgccaatatgaaggccaacagcatctatggcatgtttgtcatcgtctctacagtgggtatagactcactgctcatcctcttctcttacgctctgatcctgcacaccgtgctgtccgtcacctccagggctgagagactcaaggctcttaacacctgtgtttcccacatctgtgctgtgctactcttctacactcccatgaatggcctctctgtcatccatcgctttggaaagcaagcacccaccctggtccag

SEQ ID NO: 23235 - DNA, 998 bp, Macaca Mulatta
  misc_feature (1)...(998): n = A,T,C or G
caactatgtgcggaactcgcgggccgtgggcgtgatgtggggtacactcaccatctgcttctctgtgctggtcatggccctcttcatccagccntactggatcggcgacagcgtcaacacaccgcaggcaggttacttcggccttttctcctactgcgtgggtaacgtgctctcctccgagctcatctgcaagggcggtcccctagacttctcctccatcccctctagagccttcaagactgccatgttctttgtggccttgggcatgttcctcatcattggctccatcatctgcttcagcctgttcttcatctgcaacacggccacagtctacaagatctgtgcatggatgcagctggctgcgnnnnnnnnnnnnnnnnnnnnnnnnnnnnnnnnnnnnnnnnnnnnnnnnnnnnnnnnnnnnnnnnnnnnnnnnnnnnnnnnnnnnnnnnnnnnnnnnnnnnnnnnnnnnnnnnnnnnnnnnnnnnnnnnnnnnnnnnnnnnnnnnnnnnnnnnnnnnnnnnnnnnnnnnnnnnnnnnnnnnnnnnnnnnnnnnnnnnnnnnnnnnnnnnnnnnnnnnnnnnnnnnnnnnnnnnnnnnnnnnnnnnnnnnnnnnnnnnnnnnnnngtcatctatttcccagacaatggaaaactagggaatcaaattcttcagagataagaacttgttcttccaagtttccttgttcctggctgctataggcctgacgccttaagccttttattataacactaaaactggacagtctcttgagacaagacctcctactgtactctttccagggaagcagaactgcaattacccacttcaaagatattcagaggctgagcagtgcggggagtgctcacttgctggggatgagatccaagtcctcttcttagctccgcacagcagcaaatcgcttcaccttcctgaggcctcttctctgtaaagcgagagggctaaatgggtccatctctaggggccttcccttccag

SEQ ID NO: 23236 - DNA, 135 bp, Macaca Mulatta
gttctccaaatgtcaactgtcaaggagcagctaattgagaagctaattgaggatgataaaaactcccagtgtaaaattactattgttggaactggtgccgtaggcatggcttgtgctattagtatcttactgaag

SEQ ID NO: 23237 - DNA, 822 bp, Macaca Mulatta
ggggctctcgcgagatttggggctcttcctaagccggcgctcggcgagttctcccaggagaagaccatgttcagttcgagcgccaagatcgtgaagcccaatggcgagaagccggacgagttcgagtccggcatctcccaggctcttctggagctggagatgaactcggacctcaaggctcagctcagggagctgaatattacggcagccaaggaaattgaagttggtggtggtcggaaagctatcataatctttgttcctgttcctcaactgaaatctttccagaaaatccaagtccggctagtacgcgagttggagaaaaagttcagtgggaagcatgttgtctttatcgctcagaggagaattctgcctaagccaactcgaaaaagccgtacaaaaaataaacagaagcgtcccaggagccgtactctgacagctgtgcatgatgccatccttgaggacttggtcttcccaagcgaaattgtgggcaagagaatccgcgtgaaactagatggcagccggctcataaaggttcatttggacaaagcacagcagaacaatgtggaacacaaggttgaaactttttctggtgtctataagaagctcacaggcaaggatgttaattttgaattcccagagtttcaattgtaaacaaaagtgactaaataaaatatatattcacagtctttcaacgactaatgatttaatcattaataattactattgtcgggctggccttcggcccctcgaagaaacctttttcttaaacgcatttcgtcgttgtgggccgcggcggggcccccagtttaagggttaaagtga

SEQ ID NO: 23238 - DNA, 228 bp, Macaca Mulatta
aggggcactgctgggcctctcactcttgctgaatggccgggacattggcatcgccctggctgacgtgaccggcaaccacaagtggggcctgctgctgaccgtgtgcggggtggtgctgatggactttagtgccgactcagcagacaaccccagccacgcctacatgatggacgtgtgcagccccgcggaccaggaccgaggcctgaacatccacgccctaatggcagg

SEQ ID NO: 23239 - DNA, 627 bp, Macaca Mulatta
ggggacactttgtcgccaactgctgccgacgtcgccaccactgctttgtctctgaggtcagactgctcctggtgccatgaatggagacaacgcctttgcaaagagacccagggataatgctaaaacatcaaagaagagaagcaaggccttcgatgatattgccaagtacttctctaagaaagagtgggaaaagatgaaatactcggagaaaatcagctatgtgtacatgaagagaaactatgaggccatgactaaactaggtttcaatgtcactctcccacctttcatgcataataaacaggccacagacttccaggggaatgattctgataatgaccgtaaccacaggaatcaggttgaacgtcctcagatgacttttggcaagctccagagaatcatcccgaagatcatacccaagaagccagcagaggaaggaaatgattcaaagggagtgccagaaacatctgacccacaaaacgatgggaaacagctgtgccccccgggaaacgcaaatacctctgagaagattaacaagagatctggacccaaaagggggaaacatgcctggaccccagactgcgtgagaaaagccgctggtgattatgaagagatagcgaccctgagaga

SEQ ID NO: 23240 - DNA, 373 bp, Macaca Mulatta
gcctgtcaggaagggaccttggccagtgcctgctccttccttaacctcccgtctctcccccggcaggtggtaggcagctccctcctcttcgtgcacgaccacaccggcctggccaaggtctggatgatcgacttcggcaagacggtggccttgcccgaccaccagacgctcagccacaggctgccctgggctgagggcaaccgtgaggacggctacctctggggcctggacaacatgatctgcctcctgcaggggctggcacagagctgagctgctcagccaccgccaggtttaattggaaggtgccagtctggctggaggagccctgagatgccatggaaggcctgaggttggccatgggggagctggcctc

SEQ ID NO: 23241 - DNA, 225 bp, Macaca Mulatta
cactaatatgaataatagcatgcttttatctttcaagggttcaggttgcatgggatcatcttctctgatgttacatcgacagcctaatggtggggtctccttaaggccccgctacagaaatgaaaatgcatttcctgtctcaacatgctaaaatgactctgagggttctaccatagtccatgctgaaaagccccaaattatcatctttagcaaaatctggacttc

SEQ ID NO: 23242 - DNA, 369 bp, Macaca Mulatta
  misc_feature (1)...(369): n = A,T,C or G
aagcagtcctcccggcaccgtgggactcgcagttgcagcagcgtctgacaagcggcccgagccgccaccgacaaggagtccgggccccgccactggnnnnnnnnnnnnnnnnnnnnnnnnnnnnnnnnnnnnnnnnnnnnnnnnnnnnnnnnnnnnnnnnnnnnnnnnnnnnnnnnnnnnnnnnnnnnnnnnnnnnnnnnttgaagaagcacagaagaaaagactccgacactccccaggaactttcggagaaggccaaagagcagcaggcagaggcagagctccggaagctaaggcagcagttcaggaagatggtggaaagccggaagtcttttaacttccgaaaccagcagaagatcgcgagtcagt

SEQ ID NO: 23243 - DNA, 914 bp, Macaca Mulatta
  misc_feature (1)...(914): n = A,T,C or G
aggagcagggactgaaggccaacaactccaaagagttaagcatgtgcttcacagagnnnnnnnnnnnnnnnnnnnnnnnnnnnnnnnnnnnnnnnnnnnnnnnnnnnnnnnnnnnnnnnnnnnnnnnnnnnnnnnnnnnnnnnnnnnnnnnnnnnnnnnnnnnnnnnnnnnnnnnnnnnnnnnnnnnnnnnnnnnnnnnnnnnnnnnnnnnnnnnnnnnnnnnnnnnnnnnnnnnnnnnnnnnnnnnnnnnnnnnnnnnnnnnnnnnnnnnnnnnnnnnnnnnnnnnnnnnnnnnnnnnnnnnnnnnnnnnnnnnnnnnnnnnnnnnnnnnnnnnnnnnnnnnnnnnnnnnnnnnnnnnnnnnnnnnnnnnnnnnnnnctgagatctgtcccaggggtcccctgtcaggggaaactggtaccgaggagggcacgaggctctagaaatgcccttctctttctcctggtgtttctctctctggacccttctgaagcagagaccagacaagagcctgcagtggaagggactctgggctgtgcctgagtctggctgggggcaggatgacacagctgcttccccacgctgcccactctggtcactggctgggggctggcagagggcatcggttagcgggacagtggggctggccacgggggtccaccttcagccctttggcttcgaggatggaggtggttttgccctccctctctgccctcgggtggggctggtgggtctgcagctggtgtggggacttccccacggatggtggtggagggggttagcactgcgctgggctccccctgactagcacagagtggtggggctggggccagctccaggacggcttgggagctcagcctgcctgggagagccctttgtagggaggcagcaaaactcgggcatcaccttctttc

SEQ ID NO: 23244 - DNA, 687 bp, Macaca Mulatta
  misc_feature (1)...(687): n = A,T,C or G
ctgtggtcacctccactctttccagtggctatggaagcaaaggcggcattggaggtggaagcctgggcctcggtgggttaaaggggctactccttcaccaccagtgnnnnnnnnnnnnnnnnnnnnnnnnnnnnnnnnnnnnnnnnnnnnnnnnnnnnnnnnnnnnnnnnnnnnnnnnnnnnnnnnnnnnnnnnnnnnnnnnnnnnnnnnnnnnnnnnnnnnnnnnnnnnnnnnnnnnnnnnnnnnnnnnnnnnnnnnnnnnnnnnnnnnnnnnnnnnnnnnnnnnnnnnnnnnnnnnnnnnnnnnnnnnnnnnnnnnnnnnnnnnnnnnnnnnnnnnnnnnnnnnnnnnnnnnnnnnnnnnnnnnnnnnnnnnnnnnnnnnnnnnnnnnnnntctccctcctgacagtgcccagactgccggcagcacctggtctgctacacatgtaaaaccaaaacctgctctctcccgaggctctcattcagcctatcttgtgaggcccaggcagctggaaagnnnnnnnnnnnnnnnnnnnnnnnnnnnnnnnnngatgcagaggttggggagtctgtctcaacgctaggttgtcacccacctgtctcatcgtgtttataagcagcctgttgggagtgagcgctccttctgttccctccctggaatgtgcctattaaatgcatgtgtcacctg

SEQ ID NO: 23245 - DNA, 4446 bp, Macaca Mulatta
  misc_feature (1)...(4446): n = A,T,C or G
ctaaagccttgtatcttgcacctcttcttctgtctcctctttcagagcagcaatttggggctgagtcttgcacttgcttgagttccggtggggaaagagcttcaccctgtcggaggggctgatggcttgccggaagaggctcctctcattcagcagtttctggatggaatcatactgccgcactttgttctcttctatgaccaaaaattgttggcattccagcattgcttctatcctgtgttcacagaggattactgtgcagtcagcaaatgcttgttttagagttcttctaattatttggtatgttactggatccaaatgagcactgggttcatcaagcagcaagatcttcgccttactaagaacagatctagccaaacacatcaactgcttgtggccatggcttaggacacagcccccatccacaaggacaaagtcaagcttcccaggaaactgttctatcacagatctgagcccaacctcatctgcaactttccatatttcttgatcactccactgttcatagggatccaagttttttctaaatgttccagaaaaaataaatactttctgtggtatcactccaaaggctttcctccactgttgcaaagttattgaatcccaagacacaccatcgatctggatttctccttcagtgttcagtagtctcaaaaaagctgataacaaagtactcttccctgatccagttcttcccaagaggcccaccctctggccaggacttattgagaaggaaatgttctctaatatgggatttccaccttctgtgtattttgctgtgagatctttgacggtcatttggccccccgagggccagatgtcatctttcttcacgtgtgaattctcaataaccataactttcgagagttggccattcttgtatggtttggttgacctggtaggtttaccttcttctgttggcatgtcaatgaacttaaagactcggctcacagatcgcatcaagctatccacatctatgctggagtttacagcccactgcaatgtactcatgatattcatggctaaagtcaggataataccaactgttccttctccttctcctgttgttaaaatggaaatgaaggtaacagcaatgaagaagatgacaaaaatcatttctattctcatttggaaccagcgcagtgttgataggtacaagaaccagttggcagtatgtaaattcagagctttgtggaacagagtttcaaagtaaggctgccgtccgaaggcacgaagtgtccatagtccttttaagcttgtaacaagatgagtgaaaattggactcctgccttcagattccagttgtttgagttgctgtgaggtttggagaaaatatgctctcaacataataaaagccactatcactggcactgttgcaacaaagatgtagggttgtaaaaccgcgacaactgctatagctccaatcacaattaataacaactggatgaagtcaaatatggtaagaggcagaagatcatccaaaattgctatatctttggagaatctattaagaatcccacctgctttcaacgtgttgagggttgacataggtgcttgaagaacagaatgtaacattttgtggtgtaaaattttcgacactgtgattagagtatgcaccagtggtagacctctgaagaatcccatagcaagcaaagtgtcggctactcccacgtaaatgtaaaacacataatacgaactggttctggtgataatcactgcatagctgttatttctactataagtactattccctttgtcttgaggaggagtgtttccaaggaaccacagcacaaccaaagaagcagccacctcagccagaaaaattaccaagcaccaaattagcacaaaaattaagctcttgtggacagtaatatatcgaaggtatgtgttccatgtagtcactgctggtatgctctccatatcatcaaaaaggcactcctttaagtcttcttcattaatttcttcacttatttccaagccagtttcttgagataaccttcttgaatatatatccagttcagtcaagtttgcctgaggggccagtgacacttttcgtgtggatgctgctgtctttctgtgaatgctctgaccttggttaactgagtgtgtcatcaggttcagaacagactgcctcctccgtgcctgaagcgtggggccagtgctgatcacgctgatgcgagggagtatcacctctccctgctcagaatctggaactaaggacagccttctctctaaaggctcatcagaatcctcttcgatgccattcatttgtaagggagtcttttggacaatggaaaattttcgtatagagttgattggattgagaatagaattcttccttttttccccaaactctccagtctgtttaaaagattgtttttttgtttcggtccaggagacaggagcatctccttctaatgagaaacggcgtaaggtctcagttaggattgaatttcttctttctgcactaaattggtcgaaagaatcatatcccatgagttttgagctaaagtctggccgtagattttggagttctgaaaatgttccataaaaatagctgctaccttcatgtaaaattaatattttgtcagctttctttaaatgttccattttagaagtgaccagaatcctagttttgttagccatcagtttacagacacagcnnnnnnnnnnnnnnnnnnnnnttaaaacatctaggtatccaaaaggagagtctaataaatacaaatcagcatctttgtatactgctcttgctaaagaaattcttgctcgttgacctccactcagtgtgattccaccttctccaagaactatattgtctttctctgcaaacttggagatgtcctcttctagttggcatgcgttgatgacacttctgtatctatattcatcataggaaacaccaaagatgatattttctttaatggtgccaggcataatccaggaaaactgagaacagaatgaaattcttccactgtgcttaattttaccctctgaaggctccagttctcccataatcatcattagaagtgaagtcttgcctgctccagtggatccagcaaccgccaacaactgtcctctttctatcttgaaattaatatctttcaggacaggagtaccaagaagtgagaaattactgaagaagaggctgtcatcatcattagaagtttttctattgctattgttttgttttgctttctcaaataattccccaaatccctcctcccagaaggctgttacattctccatcactacttctgtagttgttaagttatattccaatgtcttatattcttgcttttgtaagaaatcctgtattttgtttattgctccaagagagtcataccatgtttgtacagcccagggaaattgccgagtgaccgccatgcgcagaacaatgcagaatgatatggtggtgaatattttccggaggacgattcctttgattagtgcatagggaagcacagataaaaacacgacaaagaaccctgagaagaagaaggctgagctattgaagtatctcacataggctgccttccgagtcagtttcagttctgtttgtcttaggttttcaatcattttttccattgcttcttcccagcagtatgccttcacagattggatattttcaatcatttctgaggtaatcacaagtctttcattgatcttcccagctctttgatccctgtacttcatcatcattctccctagcccagcctgaaaaagggcaaggactatcaggaaaccaagtccacagaaggcagacgcctgtaacaactcccagattagccccatgaggagtgccacttgcaaaggaacgatccacacgaaatgtgccaatgcaagtccttcatcaaatttgttcaggttgttggaaaggagactaacaagttgtccaatacttattttatctagaacacggcttgacagctttaaagtcttcttataaatcaaactaaacatagctattctcatctgcattccaatgtgatgaaggccaaaaatggctgggtgtaagagcagtgtcctcacgataaagagaaggcataagcctatgcctagataaatcgcaatagagcgttcctccttgttatccgggtcataggaagctatgattcttcccagtaagagaggctgtactgctttggtgacttcccctaaatataacaagattccatagaacataaatctccagaaaaagcatcgccgaagggcattaatgagtttgggatttttctttgaagccagctctctatcccattctctttccaatttttcagatagattgtcagcagaatcagcagaagggatttggtatatatctgacaattccaggcgctgtctgtatcctttcctcaaaattggtctggtccagctgaaaaaaagtttggagacaacgctggccttttccagaggcgacctctgcat

SEQ ID NO: 23246 - DNA, 217 bp, Macaca Mulatta
  misc_feature (1)...(217): n = A,T,C or G
agctagttctattgaaatgcaancctttctgtnccatgtattctttagtagtttaatcatcgggagaagatggctttttctttttgaagtgatatggctaatgtttaaactcttgtaatgcaattcggaatgggttaataagttcaggtcaaacaggaagtgaacgtgttttgctttagaataaccatggataagattaaagaagcagatttgggct

SEQ ID NO: 23247 - DNA, 492 bp, Macaca Mulatta
  misc_feature (1)...(492): n = A,T,C or G
gcagcgcattttgagatccaggaggaaaacctggtgcctgcgaccttggtcccaaccccacaccgggaaactgtgtggtcttggacgaggcagccgctcgagtacttgacggtanccttcgagaagcattccactttgtagctggccagagggacactgcaattgaaccaggcacacggccccaggggctgggcccctgctggccgccacgctctcggttcttctttcacaaagctggtggtggtgctgctgctggaagccaacagcgtccagccaccagccctgcccggggctcaacacacaggctgtggctctgggcatccggatattaaaaggaacgttgctggaagtctgcactgtctcgtggtctttgatggcagcaggcttgagggcaccctggcccaggttctgatccacagccctcatccgtggggaggaggatggagcctgctcccctggggcatagacaccatggatgaatttcctaagaca

SEQ ID NO: 23248 - DNA, 329 bp, Macaca Mulatta
attttttaaatgcaaattgagataaacaaggtgaaattacatattacttctctttaataaaagaaaattctgttttaaagttggccaaagtttttttctctaatggtaaagagagtatattttaaatcctccagaaggactcattctagtggaactacttatatagatgtaaatcaagaatttgacaggaattattttgtgacttcacaaactctttaccaactcttgagttaatttgcattagagctctaaaaggagtatctcaaacacttttttttttaactctcaacactacttgaacttctttaatgaattaagaaatctcaatg

SEQ ID NO: 23249 - DNA, 731 bp, Macaca Mulatta
atgtcacaggcaacaaacttgccaagaatgtgcaataccctgagtgccttgacatgcagccatacatgtctcagcagaacacaggacctcttgtctatgtcctctatgctgtgctggtccatgctgggtggagttgtcacaacggacattacctctcttatgtcaaagctccaggaggccagtggtataaaatggatgacgccgaggtcactgcctgtagcatcgcttctgtcctgagtcaacaggcctatgttctcttttacgtccagaagagtcaactggaaagatgcagtgagagtgtgtcaataggcagggaaccaggagcccttggtgctgaacacaaagacaggcgagcaacgcaaggagagctccagagagaaccctgcctccaggtacccgacttggaggagcacttggtggaaagagccactcgggaaagcaccttagaccactggaagttcctccaagagcaaaacaaaaccaagcctgacttcaacgtcagaaaagtcgaatgtaccctgcctcccaacgtgcttgtgattcatccatcaaaatacaagagtgggatgaacaaccgtcatcctgaacagcaaagctccctgctgaacctctcttcaaggaacctggcacctcaggagtccatgaacactggcacactcacttctctgcaagggaggaccaggagatccaaagggaggaacaaacacagcaagagggctctgtttgtgtgc

SEQ ID NO: 23250 - DNA, 132 bp, Macaca Mulatta
ggtgtctggccagaaggatctgatgggacagatatcaatgccctggtgcgatcccacaatagaaaggtgatagctgttgccgatgacttttgtaaagtccatctgtttcagtatccctgctccaaagcaaag

SEQ ID NO: 23251 - DNA, 434 bp, Macaca Mulatta
ggactgtggattggacgtcagagcatattgaaggttgcctgtgtgttccccgcccatcccttccgtaacgctctgccactcagctctggacaagcatgcaccaacagtccttagttttgttttgtgcactggcctctcggtgaaggtggtttccctcatcaccttcctgatggcgtttggtcagtcacctgtcagggtttgtgtgggttgggccccagaacagcatatgctgccctaagtctgctctctgcatgttttagaaacaaagtggcaagtctgccctgaacctgtaagcatcaaataagcatgagagagaaaaaaaaaacatgatatattgctttacttaataggttgaatatggtagatctttgaaactatgatgattcaattttctcaattttctttgaccaaaattctaaatgcagttttgcctc

SEQ ID NO: 23252 - DNA, 326 bp, Macaca Mulatta
gcctcagccagccctccggatgctggtgctgccatccccctgccctcagcctctggcattttcctccgttgagaccatggagggccctccccgtcggacatgccgctccccagaacctggaccttcctcctccatcggatctccccaggcttcatctcctccaaggcccaaccactacctgctcattgacactcagggtgtccttttttttttgctggtggacgaggagtctcagagggagccaggggccaatggggcttcaggccagaaaaagtgctacagctgccccgtgtgctcaagggtcttcgaatacatgtcctaccttc

SEQ ID NO: 23253 - DNA, 640 bp, Macaca Mulatta
  misc_feature (1)...(640): n = A,T,C or G
aggtttttaggcacaattcataccttgcaactcatcggcgaattcatacgggagagaaaccttacaagtgtaatgagtgtggcaaagcctttagtatgcattcaaacctaactacccataaggtcatccacactggagagaagccttacaaatgtaatgaatgtggcaaggtcttcactcaaaattcacaccttgcaaatcatcaaaggactcacaccggagagaaaccttaccgatgcaatgagtgtgggaaagccttcagtgttcgttcaagcctaaccacccatcaggcaatccatactgggaaaaaaccttacaaatgtaacgaatgtggcaaggtctttactcaaaatgcgcacctggcaaatcaccgaagaattcatactggagagaaaccttacaggtgtacagagtgtgggaaagcctttagggtaaggtcaagtctaactacccatatggcaatccacactggagaaaaacgttacaaatgtaatgagtgtggcaaggtcttcaggcagagttcaaatcttgcaagtcatcacagaatgcataccggagagaaaccttacaaatgagntgtggtgaggtcattaggtacaattcactcttttcacatcaattaattcattcttgacagaat

SEQ ID NO: 23254 - DNA, 161 bp, Macaca Mulatta
aggactacgagaaagccctgttcttcccctgcaaagccgcagagctcgtcaacgactatggcaaaggctggagcctgaagtaccgggccatgagccagtaccacatggccgtggcctatcgcctgctgggccacctgggcagtgccatggagtgttgcgag

SEQ ID NO: 23255 - DNA, 593 bp, Macaca Mulatta
  misc_feature (1)...(593): n = A,T,C or G
gttcatcacgacggtgaactcactgagcgtgcggcttggaagctacgtccagaacatcttcaccgcggccaagctggtgatcgtagccatcatcatcatcagcgggctcgtgctcctggcccaaggnaggaaacacaaagaattttgataattctttccagggcgcccagctgtctgtggnnnnnnnnnnnnnnnnnnnnnnnnnnnnnnnnnnnnnnnnnnnnnnnngaatcaactcaattatatcacagaagaacttagaaacccttacagnnnnnnnnnnnnnnnnnnnnnnnnnnnnnnnnnnnnnnnnnnnnnnnnnnnnnnnnnnnnnnnnnnnnnnnnnnnnnnnnnnnnnnnnnnnnnnnnnnnnnnnnnnnnnnnnnnnnnnnnnnnnnnnnnnnnnnnnnnnnnnnnnnnnnnnnnnnnnnnnnnnnnnnnnnnnnnnnnnnnnnnnnnnnnnnnnnnnnnnnnnnnnnnnnnnnnnnnnnnnnnnnncagactcatttatgtggcgggccgggagggccacatgctcaaagtgctttcttacatcagcgtcaagcgcctcactccagcccccgccatcatct

SEQ ID NO: 23256 - DNA, 109 bp, Macaca Mulatta
tttttatgcatcatctcttccatcttctaagaaagtttcttttcttaacttgataaagcagtctgtaacccattttgcaatattgtcttgtgaaaaccagagacagaca

SEQ ID NO: 23257 - DNA, 658 bp, Macaca Mulatta
  misc_feature (1)...(658): n = A,T,C or G
atggtggcccccggctccgtgaccagccggctgggctcggtgttccccttcctgctagtcctggtggatctgcagtacgaaggtgnnnnnnnnnnnnnnnnnnnnnnnnnnnnnnnnnnnnnnnnnnnnnnnnnnnnnnnnnnnnnnnnnnnnnnnnnnnnnnnnnnnnnnnnnnnnnnnnnnnnnnnnnnnnnnnnnnnnnnnnnnnnnnnnnnnnnnnnnnnnnnnnnnnnnnnnnnnnnnnnnnnnnnnnnnnnnnnnnnnnnnnnnnnnnnnnnnnnnnnnnnnnnnnnnnnnnnnnnnnnnnnnnnnnnnnnnnnnnnnnnnnnnnnnnnnnnnnnnnnnnnnnnnnnnnnnnnnnnnnnnnnnnnnnnnnnnnnnnnnnnnnnnnnggtgtttcctgtcacttctctgttgggactccagtgttctctcctagatgatctatacttgctattttgtttcttcctggtgaagaaggtgactttcagatacctcttgtcagccatctttgaatgcattcctcagtctttaaatttgatgaagttcaatttgttgatttttgtttttacttctgtagactgtgcttttggtgtcatgtctaagaagtattcactaagtcctaggatctaaaactttcctcattcttctaaaagtt

SEQ ID NO: 23258 - DNA, 506 bp, Macaca Mulatta
gtttcctctttaacctcagcagcatcccagagaacgaggtgatctcctctgcagagcttcggctcttccgggagcaggtggaccagggccctgattgggaacggggcttccaccgtataaacatttatgaggttatgaagcccccagcagaagtggtgcctgggcacctcatcacacgactactggacacgagactggtccaccacaatgtgacacggtgggaaacttttgatgtgagccctgcggtccttcgctggacccgggagaagcagccaaactatgggctggccattgaggtgactcacctccatcagactcggacccaccagggccagcatgtcaggattagccgatcgttacctcaagggagtgggaattgggcccagctccggcccctcctggtcacctttggccatgatggccggggccatgccttgacccgacgccggagggccaagcgtagtcctaagcatcacccacagcgggcccggaagaagaataagaac

SEQ ID NO: 23259 - DNA, 600 bp, Macaca Mulatta
ttgactgtggatggaagaaagtgtgcagtttttagggattttacttaggtttgtctttagtcatcctcagtaagatagttgttttttgatacctgagtttgggattcattcatatcaaattcagttatttgcatattactcttgatttttgtctgaaattcactttgctatgacagcttagtagttgggtcttcactccttaagtatatgtttttcccatggtgaaaatatatgaactttagctctagtagtgagcattcaaaggtccgtgatagggcttgtcacagagagagagaaatcatttatccctattgtgctggttatcatagaagagactgcctcaccaatttatagagccaatttgcaaactaaaacactgttttgagaaggtacagactacctttcaaaaaggctacaggaaacatttttatgagcagcaaatattaggaagagagcagatacagaatttagtgcctttgagaagaatataagtggaattaagagaggttagaaaaaaggcaatttagaaaaatattcttgtaaaattttattgtttctatatgtgaaacagaagattagacaaattccttactcttaagt

SEQ ID NO: 23260 - DNA, 1525 bp, Macaca Mulatta
  misc_feature (1)...(1525): n = A,T,C or G
cagccactccattccccactgactatgccaaaggccagctgtcagggcagcccctttgtatgaagcaatactatgggctcttctcctcctaccggctccccggccatacccaggacacgctggtggcccagaacagcagcatcatgccggagcctgagcacgtcatcgtagcctgctgcaatcagnnnnnnnnnnnnnnnnnnnnnnnnnnnnnnnnnnnnnnnnnnnnnnnnnnnnnnnnnnnnnnnnnnnnnnnnnnnnnnnnnnnnnnnnnnnnnnnnnnnnnnnnnnnnnnnnnnnnnnnnnnnnnnnnnnnnnnnnnnnnnnnnnnnnnnnnnnnnnnnnnnnnnnnnnnnnnnnnnnnnnnnnnnnnnnnnnnnnnnnnnnnnnnnnnnnnnnnnnnnnnnnnnnnnnnnnnnnnnnnnnnnnnnnnnnnnnnnnnnnnnnnnnnnnnnnnnnnnnnnnnnnnnnnnnnnnnnnnnnnnnnnnnnnnnnnnnnnnnnnnnnnnnnnnnnnnnnnnnnnnnnnnnnnnnnnnnnnnnnnnnnnnnnnnnnnnnnnnnnnnnnnnnnnnnnnnnnnnnnnnnnnnnnnnnnnnnnnnnnnnnnnnnnnnnnnnnnnnnnnnnnnnnnnnnnnnnnnnnnnnnnnnnnnnnnnnnnnnnnnnnnnnnnnnnnnnnnnnnnnnnnnnnnnnnnnnnnnnnnnnnnnnnnnnnnnnnnnnnnnnnnnnnnnnnnnnnnnnnnnnnnnnnnnnnnnnnnnnnnnnnnnnnnnnnnnnnnnnnnnnnnnnnnnnnnnnnnnnnnnnnnnnnnnnnnnnnnnnnnnnnnnnnnnnnnnnnnnnnnnnnnnnnnnnnnnnnnnnnnnnnnnnnnnnnnnnnnnnnnnnnnnnnnnnnnnnnnnnnnnnnnnnnnnnnnnnnnnnnnnnnnnnnnnnnnnnnnnnnnnnnnnnnnnnnnnnnnnnnnnnnnnnnnnnnnnnnnnnnnnnnnnnnnnnnnnnnnnnnnnnnnnnnnnnnnnnnnnnnnnnnnnnnnnnnnnnnnnnnnnnnnnnnnnnnnnnnnnnnnnnnnnnnnnnnnnnnnnnnnnnnnnnnnnnnnnnnnnnnnnnnnnnnnnnnnnnnnnnnnnnnnnnnnnnnnnnnnnnnnnnnnnnnnnnnnnnnnnnnnnnnnnnnnnnnnnnnnnnnnnnnnnnnnnnnnnnnnnnnnnnnnnnnnnnnnnnnnnnnnnnccaggtgcccacaaccatggagatgttctgctgctatggtcctgtggtcccaaatgggtatggtgcctgctacaacccccagccagagaccatccttttctgcatctccagctttcacagctgcaaagagacttcttctagcaagtttgcaaaagctgtggaagaaagtctcattgacatgagagacctctgcagtctgccgccacctgcgagagcaagccatgggcaacaaaagaaaaagcatgaggcccagccaggaacacaaaccttactcctggcactaagtttcaccttccaaac

SEQ ID NO: 23261 - DNA, 775 bp, Macaca Mulatta
acaagaagaaccacatggtggagaagacctacgaatgtaaagaatgcgggaaatcctttggcgacctcgtgtcccggaggaaacacatgagaactcacatcgtcaagaaacccgtggaatgtcggcagtgcgggaagaccttccgaaaccagtccatccttaagactcacatgaactctcacactggagagaaaccatacgggtgcgatctctgcgggaaagccttcagcgcgagttccaacctcacggcacacaggaagatacacacgcaggagagacgctacgaatgcgccgcctgcggcaaagtcttcggtgactatttatcccggcggaggcacatgagcattcacctggtaaagaaacgcgtggagtgtaggcagtgtggcaaggccttcaggaaccagtcaacgctgaagacgcacatgcgaagccacacgggggagaaaccgtacgaatgcgatcactgtgggaaggccttcagcataggctccaacctgaacgtgcacaggaggatccacactggggagaagccctacgaatgccttgtctgcgggaaagccttcagcgaccactcatccctcaggagccacgtgaagactcaccggggagagaagctctttgtgtcgtctgtgtggaaaaggctccagtgagcgcgcctgcttgaaagacacaggatgactcagaccggaaacagacctcgtgggtgcaagaggaagcctctgtgagctcgcaccttacagggcgcaaaagaatccacggaacctgggagaagtcc

SEQ ID NO: 23262 - DNA, 6773 bp, Macaca Mulatta
  misc_feature (1)...(6773): n = A,T,C or G
gtggtttcataaattatcgagatagcaagttaacacgaattctccagaattccttgggaggaaaaggaaagacacgtattatctgcacaattactncannnnnnnnnnnnnnnnnnnnnnnnnnntccagtttgccagtactgctaaatatatgaagaatactccttatgttaatgaggtatcaactgatgaagctctcctgaaaaggtatagaaaagaaataatggatcttaaaaaacaattagaggaggnnnnnnnnnnnnnnnnnnnnnnnnnnnnnnnnnnnnnnnnnnnnnnnnnnnnnnnnnnnnnnnnnnnnnnnnnnnnnnnnnnnnnnnnnnnnnnnnnnnnnnnnnnnnnnnnnnnnnnnnnnnnnnnnnnnnnnnnnnnnnnnnnnnnnnnnnnnnnnnnnnnnnnnnnnnnnnnnnnnnnnnnnnnnnnnnnnnnnnnnnnnnnnnnnnnnnnnnnnnnnnnnnnnnnnnnnnnnnnnnnnnnnnnnnnnnnnnnnnnnnnnnnnnnnnnnnnnnnnnnnnnnnnnnnnnnnnnnnnnnnnnnnnnnnnnnnnnnnnnnnnnnnnnnnnnnnnnnnnnnnnnnnnnnnnnnnnnnnnnnnnnnnnnnnnnnnnnnnnnnnnnnnnnnnnnnnnnnnnnnnnnnnnnnnnnnnnnnnnnnnnnnnnnnnnnnnnnnnnnnnnnnnnnnnnnnnnnnnnnnnnnnnnnnnnnnnnnnnnnnnnnnnnnnnnnnnnnnnnnnnnnnnnnnnnnnnnnnnnnnnnnnnnnnnnnnnnnnnnnnnnnnnnnnnnnnnnnnnnnnnnnnnnnnnnnnnnnnnnnnnnnnnnnnnnnnnnnnnnnnnnnnnnnnnnnnnnnnnnnnnnnnnnnnnnnnnnnnnnnnnnnnnnnnnnnnnnnnnnnnnnnnnnnnnnnnnnnnnnnnnnnnnnnnnnnnnnnnnnnnnnnnnnnnnnnnnnnnnnnnnnnnnnnnnnnnnnnnnnnnnnnnnnnnnnnnnnnnnnnnnnnnnnnnnnnnnnnnnnnnnnnnnnnnnnnnnnnnnnnnnnnnnnnnnnnnnnnnnnnnnnnnnnnnnnnnnnnnnnnnnnnnnnnnnnnnnnnnnnnnnnnnnnnnnnnnnnnnnnnnnnnnnnnnnnnnnnnnnnnnnnnnnnnnnnnnnnnnnnnnnnnnnnnnnnnnnnnnnnnnnnnnnnnnnnnnnnnnnnnnnnnnnnnnnnnnnnnnnnnnnnnnnnnnnnnnnnnnnnnnnnnnnnnnnnnnnnnnnnnnnnnnnnnnnnnnnnnnnnnnnnnnnnnnnnnnnnnnnnnnnnnnnnnnnnnnnnnnnnnnnnnnnnnnnnnnnnnnnnnnnnnnnnnnnnnnnnnnnnnnnnnnnnnnnnnnnnnnnnnnnnnnnnnnnnnnnnnnnnnnnnnnnnnnnnnnnnnnnnnnnnnnnnnnnnnnnnnnnnnnnnnnnnnnnnnnnnnnnnnnnnnnnnnnnnnnnnnnnnnnnnnnnnnnnnnnnnnnnnnnnnnnnnnnnnnnnnnnnnnnnnnnnnnnnnnnnnnnnnnnnnnnnnnnnnnnnnnnnnnnnnnnnnnnnnnnnnnnnnnnnnnnnnnnnnnnnnnnnnnnnnnnnnnnnnnnnnnnnnnnnnnnnnnnnnnnnnnnnnnnnnnnnnnnnnnntaagatggtccttgaggagaatgcgagaatgaatcaggaaatagttaatctctctaaagaagcacaaaaatttgattcaagtttggatgctttgaagacnnagctttcttacaagacccaagaacttcagaagaaaacatgtgaggttcaagaaagactaaatgagatgaaagagctgaaggaacaattagaaaatagagattctacactgcaaactgtagaaagggagaaaacactgattactgagaaactgcagcaaactttagaagaagtaaaaactttaactcaagaaaaagatgacctaaaacaactccaaaagagcttgcaaattgagagggaccaactcaaaagtgatattcacgatactgtaaacatgnnntagatactcaagaacaattacgaaatgctcttgaatctttgaaacaacatcaagaaacaattaatacactaaaattgaaaatttctgaggaagtttccaggnnnnnnnnnnnnnnnnnnnnnnnnnnnnnnnnnnnnnnnnnnnnnnnnnnnngatggttgacatagataaaaaacaggatttggaagctaaaaatacccaaacactaactgcagatgttaaggatgatgagataatcgagcaacagaggaagatattttctttaatacaggagaagaatgaactccaacaagtgttagagagtgttatagcagaaaaggaacaattgaagactgacctaaaggaaaatattgaaatgnnnnnnnnnnnnnnnnnnnnnnnnnnnnnnnnnnnnnnnnnnnnnnnnnnnnnnnnnnnnnnnnnnnnnnnnnnnnnnnnnnnnnnnnnnnnnnnnnnnnnnnnnnnnnnnnnnnnnnnnnnnnnnnnnnnnnnnnnnnnnnnnnnnnnnnnnnnnnnnnnnnnnnnnnnnnnnnnnnnnnnnnnnnnnnnnnnnnnnnnnnnnnnnnnnnnnnnnnnnnnnnnnnnnnnnnnnnnnnnnnnnnnnnnnnnnnnnnnnnnnnnnnnnnnnnnnnnnnnnnnnnnnnnnnnnnnnnnnnnnnnnnnnnnnnnnnnnnnnnnnnnnnnnnnnnnnnnnnnnnnnnnnnnnnnnnnnnnnnnnnnnnnnnnnnnnnnnnnnnnnnnnnnnnnnnnnnnnnnnnnnnnnnnnnnnnnnnnnnnnnnnnnnnnnnnnnnnnnnnnnnnnnnnnnnnnnnnnnnnnnnnnnnnnnnnnnnnnnnnnnnnnnnnnnnnnnnnnnnnnnnnnnnnnnnnnnnnnnnnnnnnnnnnnnnnnnnnnnnnnnnnnnnnnnnnnnnnnnnnnnnnnnnnnnnnnnnnnnnnnnnnnnnnnnnnnnnnnnnnnnnnnnnnnnnnnnnnnnnnnnnnnnnnnnnnnnnnnnnnnnnnnnnnnnnnnnnnnnnnnnnnnnnnnnnnnnnnnnnnnnnnnnnnnnnnnnnnnnnnnnnnnnnnnnnnnnnnnnnnnnnnnnnnnnnnnnnnnnnnnnnnnnnnnnnnnnnnnnnnnnnnnnnnnnnnnnnnnnnnnnnnnnnnnnnnnnnnnnnnnnnnnnnnnnnnnnnnnnnnnnnnnnnnnnnnnnnnnnnnnnnnnnnnnnnnnnnnnnnnnnnnnnnnnnnnnnnnnnnnnnnnnnnnnnnnnnnnnnnnnnnnnnnnnnnnnnnnnnnnnnnnnnnnnnnnnnnnnnnnnnnnnnnnnnnnnnnnnnnnnnnnnnnnnnnnnnnnnnnnnnnnnnnnnnnnnnnnnnnnnnnnnnnnnnnnnnnnnnnnnnnnnnnnnnnnnnnnnnnnnnnnnnnnnnnnnnnnnnnnnnnnnnnnnnnnnnnnnnnnnnnnnnnnnnnnnnnnnnnnnnnnnnnnnnnnnnnnnnnnnnnnnnnnnnnnnnnnnnnnnnnnnnnnnnnnnnnnnnnnnnnnnnnnnnnnnnnnnnnnnnnnnnnnnnnnnnnnnnnnnnnnnnnnnnnnnnnnnnnnnnnnnnnnnnnnnnnnnnnnnnnnnnnnnnnnnnnnnnnnnnnnnnnnnnnnnnnnnnnnnnnnnnnnnnnnnnnnnnnnnnnnnnnnnnnnnnnnnnnnnnnnnnnnnnnnnnnnnnnnnnnnnnnnnnnnnnnnnnnnnnnnnnnnnnnnnnnnnnnnnnnnnnnnnnnnnnnnnnnnnnnnnnnnnnnnnnnnnnnnnnnnnnnnnnnnnnnnnnnnnnnnnnnnnnnnnnnnnnnnnnnnnnnnnnnnnnnnnnnnnnnnnnnnnnnnnnnnnnnnnnnnnnnnnnnnnnnnnnnnnnnnnnnnnnnnnnnnnnnnnnnnnnnnnnnnnnnnnnnnnnnnnnnnnnnnnnnnnnnnnnnnnnnnnnnnnnnnnnnnnnnnnnnnnnnnnnnnnnnnnnnnnaagaatctcaagaaaaagaatatcagtttcttaagatgacagctgtcaatgagactcaggaaaaaatgtgtgaaatagaacacttgaaggagcaatttgagacccagaagttaaacctggaaaacacagaaacggagaatataaggttgactcagatactacatgaaaaccttgaagaaatgagatctgtaacaaaagaaagagatgaccttaggaatgtggaggagacgctcaaagtagagagagaccagctcaaggaaaaccttagagaaactataactagannnnnnnnnnnnnnnnnnnnnnnnnnnnnnnnnnnnnnnnnnnnnnnnnnnnnnnnnnnnnnnnnnnnnnnnnnnnnnnnnnnnnnnnnnnnnnnnnnnnnnnnnnnnnnnnnnnnnnnnnnnnnnnnnnnnnnnnnnnnnnnnnnnnnnnnnnnnnnnnnnnnnnnnnnnnnnnnnnnnnnnnnnnnnnnnnnnnnnnnnnnnnnnnnnnnnnnnnnnnnnnnnnnnnnnnnnnnnnnnnnnnnnnnnnnnnnnnnnnnnnnnnnnnnnnnnnnnnnnnnnnnnnnnnnnnnnnnnnnnnnnnnnnnnnnnnnnnnnnnnnnnnnnnnnnnnnnnnnnnnnnnnnnnnnnnnnnnnnnnnnnnnnnnnnnnnnnnnnnnnnnnnnnnnnnnnnnnnnnnnnnnnnnnnnnnnnnnnnnnnnnnnnnnnnnnnnnnnnnnnnnnnnnnnnnnnnnnnnnnnnnnnnnnnnnnnnnnnnnnnnnnnnnnnnnnnnnnnnnnnnnnnnnnnnnnnnnnnnnnnnnnnnnnnnnnnnnnnnnnnnnnnnnnnnnnnnnnnnnnnnnnnnnnnnnnnnnnnnnnnnnnnnnnnnnnnnnnnnnnnnnnnnnnnnnnnnnnnnnnnnnnnnnnnnnnnnnnnnnnnnnnnnnnnnnnnnnnnnnnnnnnnnnnnnnnnnnnnnnnnnnnnnnnnnnnnnnnnnnnnnnnnnnnnnnnnnnnnnnnnnnnnnnnnnnnnnnnnnnnnnnnnnnnnnnnnnnnnnnnnnnnagatccaagaacttcagaaaaaagaacttcatctgcttagaatgaaagaagatgtcaatatgagtcataaaaaaattaatgagatggaacagttgaagaagcaatttgaggcccaaaacttatctgtgcaaaatgtgagaatggataacttccagttgactaagaaacttcatgaaagccttgaagaaattagaattgtagctaaagaaagagatgagctaaggaggataaaagaatctctcaaaatggaaggggaccaattcgtagcaaccttaagggaaatgatagctagagnnnnnnnnnnnnnnnnnnnnnnnnnnnnnnnnnnnnnnnnnnnnnnnnnnnnnnnnnnnnnnnnnnnnnnnnnnnnnnnnnnnnnnnnnnnnnnnnnnnnnnnnnnnnnnnnnnnnnnnnnnnnnnnnnnnnnnnnnnnnnnnnnnnnnnnnnnnnnnnnnnnnnnnnnnnnnnnnnnnnnnnnnnnnnnnnnnnnnnnnnnnnnnnnnnnnnnnnnnnnnnnnnnnnnnnnnnnnnnnnnnnnnnnnnnnnnnnnnnnnnnnnnnnnnnnnnnnnnnnnnnnnnnnnnnnnnnnnnnnnnnnnnnnnnnnnnnnnnnnnnnnnnnnnnnnnnnnnnnnnnnnnnnnnnnnnnnnnnnnnnnnnnnnnnnnnnnnnnnnnnnnnnnnnnnnnnnnnnnnnnnnnnnnnnnnnnnnnnnnnnnnnnnnnnnnnnnnnnnnnnnnnnnnnnnnnnnnnnnnnnnnnnnnnnnnnnnnnnnnnnnnnnnnnnnnnnnnnnnnnnnnnnnnnnnnnnnnnnnnnnnnnnnnnnnnnnnnnnnnnnnnnnnnnnnnnnnnnnnnnnnnnnnnnnnnnnnnnnnnnnnnnnnnnnnnnnnnnnnnnnnnnnnnnnnnnnnnnnnnnnnnnnnnnnnnnnnnnnnnnnnnnnnnnnnnnnnnnnnnnnnnnnnnnnnnnnnnnnnnnnnnnnnnnnnnnnnnnnnnnnnnnnnnnnnnnnnnnnnnnnnnnnnnnnnnnnnnnnnnnnnnnnnnnnnnnnnnnnnnnnnnnnnnnnnnnnnnnnnnnnnnnnnnnnnnnnnnnnnnnnnnnnnnnnnnnnnnnnnnnnnnnnnnnnnnnnnnnnnnnnnnnnnnnnnnnnnnnnnnnnnnnnnnnnnnnnnnnnnnnnnnnnnnnnnnnnnnnnnnnnnnnnnnnnnnnnnnnnnnnnnnnnnnnnnnnnnnnnnnnnnnnnnnnnnnnnnnnnnnnnnnnnnnnnnnnnnnnnnnnnnnnnnnnnnnnnnnnnnnnnnnnnnnnnnnnnnnnnnnnnnnnnnnnnnnnnnnnnnnnnnnnnnnnnnnnnnnnnnnnnnnnnnnnnnnnnnnnnnnnnnnnnnnnnnnnnnnnnnnnnnnnnnnnnnnnnnnnnnnnnnnnnnnnnnnnnnnnnnnnnnnnnnnnnnnnnnnnnnnnnnnnnnnnnnnnnnnnnnnnnnnnnnnnnnnnnnnnnnnnnnnnnnnnnnnnnnnnnnnnncagtgatatcagaacatactgattctcagccttcaaataaacccttaacttgtggaggtggcagcggcattgtacaaaacacaaaagctcttattttgaaaagtgaacatataaggctagaaaaggaaatttctaagttaaagcagcaaaatgaacagctaataaagcaaaagaatgacttgttaa

SEQ ID NO: 23263 - DNA, 847 bp, Macaca Mulatta
ggggcttcctcgcgtcgccgccgggatgaagccgatcctactgcagggccatgagcggtccattacgcagattaagtataaccgcgaaggagacctcctctttactgtggccaaggaccctatcgtcaatgtatggtactctgtgaatggtgagaggctgggcacctacatgggccataccggagctgtgtggtgtgtggacgctgactgggacaccaagcatgtcctcactggctcagctgacaacagctgtcgtctctgggactgtgaaacagggaagcagctggcccttctcaagaccaattcggctgtccggacctgtggttttgactttgggggcaacatcatcatgttctccacagacaagcagatgggctaccagtgctttgtgagcttctttgacctgcgggatccgagccagattgacaacaatgagccctacatgaagatcccttgcaacgactctaaaatcaccagtgccgtttggggacccctgggggagtgcatcatcgctggccatgagagtggagagctcaaccagtatagtgccaagtctggagaggtgttggtgaatgttaaggagcactcccggcagatcaatgacatccagttatccagggacatgaccatgtttgtgaccgcatccaaagacaacacagccaagctttttgactccacaactcttgaacatcagaagactttccggacagaacgtccccgtcaactcagctgctctctcccccaactatgaccatgtggtcgctgggcggtggtcaggaagccatggatgtaaccacaacctccaccaggattggcaagtttgaggccaggttcttccatttggcct

SEQ ID NO: 23264 - DNA, 416 bp, Macaca Mulatta
cacccaccccaaacttccaggttccttccgccaccttgctaatggtgtagctgtcctctcagaacgcctgtgtgtggagggtacccgccctttccttgcctttttacttggcgtgctccttttctctttgggtttcttgtttaccaaagaagagtttacagacaataaaatggaaaggttctgctgtggaagcttacccagtcctgtctcgtggtcagcttctctctgcagctagcagctctgcttgacaaagggagggcctattctcacatgggtggaggagggtaatgggacccacctaagtggggcataggaccctcaagactctagggctttcactcaccattcattgcctgtctcttcaccaacctgagtcacttctttgtttcatgtttgtttctgtatctctgagatta

SEQ ID NO: 23265 - DNA, 1896 bp, Macaca Mulatta
  misc_feature (1)...(1896): n = A,T,C or G
tgtgcagtttatagattatggcaatgtttctgtggttcatactaacaaaataggtaggcttgaccttgttaatgcagtattgccaggattgtgcattcattgctccttgcagggatttggggttcctgacaataaaaactctaagaaaatgatgcattacttttcccaacggaccagcgagactgcaataagatgtgaatttgtaacatttcgagacagatgggaagttattcttgctgatgaacatgggatcatagcagatgacatgattagcaggtatgctgtcagtgaaaaatctcaaatagaactttctacccaagtaattaaaggtgccggttcaaactctgctaacaaatcagacgttgacacttcagtatttcttaactggtataatccagaaaaaaaaatggtaagagcttatgccactgtgatagatggacccgagtacttttggtgtcagtttgctgatacagagaaacttcagtatttagaagtagaagtacagactgctggagaacaggtagtagacaggagaaattgtatcacatgtccttatattggagatccttgtatagtaagatacagagaagatggacattattatagagcacttatcactaatatttgtgaagattatcttgtatctgtcaggcttgtggactttggaaacgttgaagannnnnnnnnnnnnnnnnnnnnnnnnnnnnnnnnnnnnnnnnnnnnnnnnnnnnnnnnnnnnnnnnnnnnnnnnnnnnnnnnnnnnnnnnnnnnnnnnnnnnnnnnnnnnnnnnnnnnnnnnnnnnnnnnnnnnnnnnnnnnnnnnnnnnnnnnnnnnnnnnnnnnnnnnnnnnnnnnnnnnnnnnnnnnnnnnnnnnnnnnnnnnnnnnnnnnnnnnnnnnnnnnnnnnnnnnnnnnnnnnnnnnnnnnnnnnnnnnnnnnnnnnnnnnnnnnnnnnnnnnnnnnnnnnnnnnnnnnnnnnnnnnnnnnnnnnnnnnnnnnnnnnnnnnnnnnnnnnnnnnnnnnnnnnnnnnnnnnnnnnnnnnnnnnnnnnnnnnnnnnnnnnnnnnnnnnnnnnnnnnnnnnnnnnnnnnnnnnnnnnnnnnnnnnnnnnnnnnnnnnnnnnnnnnnnnnnnnnnnnnnnnnnnnnnnnnnnnnnnnnnnnnnnnnnnnnnnnnnnnnnnnnnnnnnnnnnnnnnnnnnnnnnnnnnnnnnnnnnnnnnnnnnnnnnnnnnnnnnnnnnnnnnnnnnnnnnnnnnnnnnnnnnnnnnnnnnnnnnnnnnnnnnnnnnnnnnnnnnnnnnnnnnnnnnnnnnnnnnnnatgaaacaaaggagatactagaactgaattcacttgaggtgccactttctcctgatgatgaatcaaaagaattcttagagctggaatctattgagttacagaattctctggtggtggatgaagaaaaagaggagctaagcctggtgccaccaagtatgccactctcccaagagtgtgtcacaaaaggtgccctggagctatttacagggcagattcctctcacctgtgaagctgagaaacaaccagaactagagctacctacagcccagctgcctttagatgacaagatggatcctttgtctttaggagttagtcagaaagcacaagagtgcatgtgtactgaggacgtgagaaagtcaagttgtgtagaatcttttgatgaccagcacaggatgtcattgcatctacatggagcagattgtgatcctaaaacacagattgaaatgaatatatatgaagaagaatttatagagtataaaaacagggatgacatttcagcattgatgcctttgttccctgaggaagaaagcagtgatggaagcaagcacaataatggtttaccagatcatgtctcaggt

SEQ ID NO: 23266 - DNA, 164 bp, Macaca Mulatta
  misc_feature (1)...(164): n = A,T,C or G
nagatgtgcggcttttaatcctggaatatgcccgttggtctatgattgacaagtaccaggctntgatggatggcctttcccttgagtctctgctgagcttcgtcaaagaattcaaatcccagctctttgtggagggcctggtacaaggaaatgtcacaagcaca

SEQ ID NO: 23267 - DNA, 763 bp, Macaca Mulatta
aagaatgcagtgacaggctatgttgctgctgtgtactgcctaatataggcccttccaggttctctgtttaatattttatgttcaactgtaaagaggttctctaagtaaataaaaatcatcaacgaaggagagaatactgaaaatgtctttgttttatatgcacctcaggaaaatgaaagaaaagctcaggaatctcatattttccatagggaaatctttatgtgaatatatttttccccctaagatgacactgattttacctgtcaactctttacaaacagaagatcaaatgccttgcttactattttcctttgtaggatgacatgacttccttttacaacactcctcccctgggaaaaagaggaacatgcagctatttgacaaaggcggtgatgaatctgctgctggaaggagaagtcaagccaaacaatgatgatccgtgtctcattagctagtggggaaggtgtaggaagctctgttgagacatatgttctgaagtgtgttgtgtttcgtgttcaagcttaatcaaggcagccattaatgtacaaactgagcatgctggggagctgattgccacatccttggcagcattgtggacctcttgcatgtcatagccaatttaatggtaatggtaaatgcttttaatcaaacatgaaaaagttctcatgattatgccagctacaatagtaatcctcactaagtgataaaaatagtttatgaattgaaaatttgccactacatgttttgtgaacaaatagttcat

SEQ ID NO: 23268 - DNA, 282 bp, Macaca Mulatta
ctaattcatcaaatatagcatgcagtttagtttccgtgtttctcatttgtttatgacttctaagtagggatactttgtatttttgttattaatggcaattgactagagttacttgaattttttttttagagataggactctaggtggaaaaataaggattaggcacttgcttgtcagccttcaaataaaggacgaacataaaaccatcaatctacaaagtataggaaagtaagaaaataaacagatgcctgcttctgcagttctgttgaaaagaaaatgtgg

SEQ ID NO: 23269 - DNA, 1087 bp, Macaca Mulatta
  misc_feature (1)...(1087): n = A,T,C or G
gacactggcacaagcgctgaatacgggggcaagagaaagccctaccacaagaagcggaaatatgagttggggcgcccggctgccaacaccaagattggcccccgccgcatccacacagtccgtgtgcggggaggtaacaagaaataccgtgccctgaggctggacgtagggaatttctcctggggctcagagtgttgtactcgtaaaacaaggatcattgatgttgtctacaatgcatctaataatgagctggtccgtaccaagactctggtgaagaattgcatcgtgcttatcgacagcacaccgtaccgacagtggtacgagtcacactacgcgctgcccctgggccgcaagaagggagccaagctgactcctgaagaagaagagattttaaacaaaaaaagatctaaaaaaattcagaagaaatatgatgaaaggaaaaagaatgccaaaatcagcagtctcctggaggagcagttccagcagggcaagcttcttgcgtgcattgcttccaggccgggacagtgtggccgagcagatggttatgtgctagagggcaaagagttggagttctatcttaggaaaatcaaagcccggaaaggcaaataaatcctcgttttgtcttcacccgtgtaataaaggtgtttattgttctgttaaattagacggtaacgaaagaagaaatataaatggtcggccggcctcagctcctcgaaaaaactttcctaaaccattccttttggcaacacagggcctcagtgaggtaaacggaacatggggtctaagcctggttatcctaggaagaagacgtgggacatgaactaaatatttttggattcctccgccaataaaaaaaaatcccttgggagtcatacacttnnnnnnnnnnnnnnnnnnntccccagaatggtatttttacaagaggcttcctttaactgggaatttataccaaccagggaattccctaaactatgaccccgaagaaacgaaaatataagacgcccccgccctggcacaattactcgcagccaagaacatgttgttggtaatactcgattatagacctttatttgctcataaaatcggg

SEQ ID NO: 23270 - DNA, 1657 bp, Macaca Mulatta
  misc_feature (1)...(1657): n = A,T,C or G
cagagttcttttgtagatttatcctttggaatgatattttcataatgagtcaacaaggttacgtggctacacccccatattctcagcctcagcctggaataggcctttctccacctcattatgggcactatggggatccatcgcacacagcatctccaacaggtannnnnnnnnnnnnnnnnnnnnnnnnnnnnnnnnnnnnnnnnnnnnnnnnnnnnnnnnnnnnnnnnnnnnnnnnnnnnnnnnnnnnnnnnnnnnnnnnnnnnnnnnnnnnnnnnnnnnnnnnnnnnnnnnnnnnnnnnnnnnnnnnnnnnnnnnnnnnnnnnnnnnnnnnnnnnnnnnnnnnnnnnnnnnnnnnnnnnnnnnnnnnnnnnnnnnnnnnnnnnnnnnnnnnnnnnnnnnnnnnnnnnnnnnnnnnnnnnnnnnnnnnnnnnnnnnnnnnnnnnnnnnnnnnnnnnnnnnnnnnnnnnnnnnnnnnnnnnnnnnnnnnnnnnnnnnnnnnnnnnnnnnnnnnnnnnnnnnnnnnnnnnnnnnnnnnnnnnnnnnnnnnnnnnnnnnnnnnnnnnnnnnnnnnnnnnnnnnnnnnnnnnnnnnnnnnnnnnnnnnnnnnnnnnnnnnnnnnnnnnnnnnnnnnnnnnnnnnnnnnnnnnnnnnnnnnnnnnnnnnnnnnnnnnnnnnnnnnnnnnnnnnnnnnnnnnnnnnnnnnnnnnnnnnnnnnnnnnnnnnnnnnnnnnnnnnnnnnnnnnnnnnnnnnnnnnnnnnnnnnnnnnnnnnnnnnnnnnnnnnnnnnnnnnnnnnnnnnnnnnnnnnnnnnnnnnnnnnnnnnnnnnnnnnnnnnnnnnnnnnnnnnnnnnnnnnnnnnnnnnnnnnnnnnnnnnnnnnnnnnnnnnnnnnnnnnnnnnnnnnnnnnnnnnnnnnnnnnnnnnnnnnnnnnnnnnnnnnnnnnnnnnnnnnnnnnnnnnnnnnnnnnnnnnnnnnnnnnnnnnnnnnnnnnnnnnnnnnnnnnnnnnnnnnnnnnnnnnnnnnnnnnnnnnnnnnnnnnnnnnnnnnnnnnnnnnnnnnnnnnnnnnnnnnnnnnnnnnnnnnnnnnnnnnnnnnnnnnnnnnnnnnnnnnnnnnnnnnnnnnnnnnnnnnnnnnnnnnnnnnnnnnnnnnnnnnnnnnnnnnnnnnnnnnnnnnnnnnnnnnnnnnnnnnnnnnnnnnnnnnnnnnnnnnnnnnnnnnngttccaccattctatttccaacatctggaccacattggaagaagactggaccactatgagaaaccagagttatctctaggatcttatgaatatgttgccactttggattattgcagannnnnnnnnnnnnnnnnnnnnnnnnnnnnnnnnnnnnnnnnnnnnnnnnnnnnnnnnnnnnnnnnnnnnnnnnnnnnnnnnnnnnnnnnnnnnnnnnnnnnnnnnnnnnnnnnnnnnnnnnnnnnggaagagcaagaagagatgtctgcaattcgagtgggttttatcacgtataacaaagttctccatttctttaatgtgaagagtaatctggcccagcctcagatgatggtggtgactgatgttggagaagtctttgttcctttgttggatggtttccttgtcaactatcaagaatctcaatctgtgattcataa

SEQ ID NO: 23271 - DNA, 208 bp, Macaca Mulatta
  misc_feature (1)...(208): n = A,T,C or G
gatgtgactgtgggctttacccaggaggagtggcagcatctggnnnnnnnnnnnnnnnnnnnnnnnnnnnnnntgatgctggagaactacagcctcctcatctcagtgggngggtattgcattagcaagccaaacgtggtctttcagttggagccagggaggaggcatggatattagaggaagagtcctcaagtcaaagccactttgg

SEQ ID NO: 23272 - DNA, 913 bp, Macaca Mulatta
  misc_feature (1)...(913): n = A,T,C or G
gggggcttctacgtcatcttcgacagagcccggaagagggtgggcttcgcagcgagcccctgtgcagaaattgcaggtgctgcagtgtctgaagtttccgggcctttctcaacagaggacatagccagtaactgtgtccccgctcagtctttgagcgaacccattttgtggatcgtgtcctatgcgctcatgagcgtctgtggagccatcctccttgtcttaattgtcctgctgctgctgccgttccggtgtcagcgtcgcccccgtgaccctgaggtcgtcaatgatgagtcctctctggtcagacatcgctggaaatgaagagccaggcctgacctcaagcaaccatgaactcagcgattaagaaaatcacatttcaagggcagcagtctggatcgacagcggcacttcctcccgtgcccgcccgtcttcaatctctgttctgctcccagatgcctttcagattcactgtcttttgattcttgattttcaagctttcaaatcttccctacatccaagaaaaannnnnnnnnnnnnnnnnnttcattctaaaccaaaacagagtggattgggctgcaggctctatggggttggttataccagactgtctacatgtgccaccaacacaaaaccaagccttggctagttgtcttctctcttcaatctctggaaaaataagtgcatatagttgataacccctcttagcttacaggaagcttttttgtatttaatcacctttgagggtattttgcgccagacctcaacctgggtcaaagtggtacaagaaggtttgcagtatgatggcaggagaagcagcctggggcctggggatataacatgctgtacccttcagattggaaacacagccacagcccctcttctgggttgtgctctgaagggagcagattcacta

SEQ ID NO: 23273 - DNA, 500 bp, Macaca Mulatta
cacaccacagcagcctccatccgaaccaagaaagcctccaaagccaggaagataattgctaaggttataaatactgacactgagcatatacaggctgcaaatgtcactgagacagctaccaggcagattgaggcctcagtaatagctatcaggcccaaaaaatccaagggcaagaaggctgccagtaggggcccaaattctgtctctgagatttctgaggccctacttgccactcaaatggtcacaaaccaggccctggcagccaccctgcgggtcaagagagggtctagggctcggaaggcttccactaaggctcgggcaactgaaagccagactccaaatgctgaccaaggggcccaggccaagatggcctctgctcagaccaacgtaagtgcccttgagactcaggttgatgctgctgtccaggccctggcagatgactatctggctcagttgagtctggagcccacaaccaggacccggggcaagagaaaccgaaa

SEQ ID NO: 23274 - DNA, 1043 bp, Macaca Mulatta
  misc_feature (1)...(1043): n = A,T,C or G
ggggctccgcccctctctgtcttctctgcagtgggagaagctctcctgccacagcccctcaccccctgaaaatgttcgcctgctccaagttcgtctccactccctccttggtcaagagcacctcacagctgctgagccgtcccctatctgcagtggtgctgaaacgaccggagatactgacagatgagggcctcagcagcttggcagtctcacgtccccttacctcacttgtctctagccgcagcttccaaaccagcgccacttcaagggacattgacacagcagccaagttcattggagctggggctgccacagttggggtggctggctctggggctgggattgggactgtgtttgggagcctcatcattggttatgccaggaacccttctctgaagcaacagctcttctcctacgccattctgggctttgccctctcagaggccatggggctcttttgcctgatggtggcctttctcatcctcttcgccatgtgaaggagccgtctccacctcccatagttctttctcccgtgtctggtcggccctgtgtgttccttttcctatacctcccaggcggcctggggaacgtggttggctcagggtttgacagagaaaagacaaataaatactgtattaataagatcnnnnnnnnnnnnnnnnnntaaaaaacatgtcnncggccggccctcggcccctcgagaaaacctttctaaaaccaattcgttttggcgcccccggtggccccccccgccccccgtcnnnnnnnnnnnnnnnnnnnnnnttgggggcccggcggccccnatggggaaaagaaaaacaggggtcccaaactgnnnnnnnnnnnnnnnnnnnnggnnnnnnnnnnnnnnnnntgttttgattctcccccccnnnnnnnnnnnnnnnnnnnngcggggggaacaacaaaagagtgtttttgttagaaaaaacacccccaaagaggggtatctctgcgaggagggtttaatatggggggagttttctttacacaaccgagggggttcctccaccagatgccgt

SEQ ID NO: 23275 - DNA, 132 bp, Macaca Mulatta
gaaggggtgactgctactgtggacagtgtatctgccacttgtctccctatggaaacatttatgggccttattgccagtgtgacaatttttcctgcgtgagacacaaagggctgctctgcggaggtaggctat

SEQ ID NO: 23276 - DNA, 411 bp, Macaca Mulatta
ttggtgggatttgcagggacttttctgggagaacttagaggcccatagtaactgcaaatgaagcaatataccactaacctgcagaaaaacacaaacgaaaacagactcccactgtctccagaagtcgtggccttccagaacagtctgcccctcaaggaagggtgaggcaggcagtacccccaagcagtctgctcccagaggtggggaacccttcataggaaacccccacccccgtccaccccagagaccctgcccttccacccggaggccaaaggccaacagtactcccgaaggcatgggagaaagttggcgagaagacccctgactaccacatccttgtgtttgtgtgtagaggcaggggatagtgagaacctaagccccatcatagcacagtattacatgtggttggga

SEQ ID NO: 23277 - DNA, 801 bp, Macaca Mulatta
taaccacagaatgttttatcttggcatcaatggcatatgatcgctatgtagccatttgcaaacctttactttatccagtcattatgaccaatggactatgcatccggctgttagttttgtcgtttctaggtggccttcttcatgctttaatccatgaaatttttttattcagattaacattctgtaattccaacataatacaacacttttactgtgacattatcccattattaaagatttcctgtactgattcttctattaactttctgatggtttttatttttgcaggttcaattcaagtttttaccattggaactattcttatatcttatacacttgtcctccttataatcttaaaaaataagtctgtcaaagggatgcaaaaagctgtctccacctgtggagctcatctcttatctgtatctttatactatgggcccctcgccgtcatgtatgtgggctctgcttccccacaggctgatgaccaagatatgatggagtctctattttacactgtcatagttcctttattaaaccccatgatctacagcttgagaaacaatcaagtaatagattcattgacaaaaattttcaaaagaaatgtttagttctcatacaatctctcttctgtatttactaaagctgtcacaagattgtgcaagttagacgtgtgtatgtcttaccagcactcaaagattttgcaaaattctagtactttaatgacctaaggtttaatatatagtaaactaataaatatattcctaatatagcatttaagaaattttaatcatgttcacatca

SEQ ID NO: 23278 - DNA, 1379 bp, Macaca Mulatta
gagaggatactattaagtacgtttcacctagacaactgctccccactaaccctccccaccaaataatcccatattatttgggaaatatatggatttcagttgtccctacccagcctaaactaaggtaaatgataattagcatacactaccttaagattgtgatgagaatcagtaaagatagaatgttttctaagggttgaaaataatatatttattattgctggggaaagttcccaggttaaatataacttttttaaaatgtaacatttggacctagacctactttagtatatcatttgaagtttcagacaatttggtgctactttttgtgagtttttaaagtctcatagcctagttgacttcaccctatgctaatgccatattttcttgtgtctaacaagttgcatattttttcctagagagacattttcagtatatattttttagaaatttgtaattttatagttctttcataacaattattctaagttttaaaacaatgtatttcctatcttgacatggattttttcacaaaaacaaattatattttactgttgttttcaagacaaaatcagatcatttttctttgatatctatatcagaaagtgcaatattaacagtataaaactaaatgcttaaatttggaacttagccaattttgataatatttttctaagactaaagtcatgtcagcaattggctagccatgttattaaggtgtcttaattcagcatttttaggttttatattgaaatttgcatttctttaaatatttgaaaatggggaatggctttagtgatattttggattttgttagagaacctaaaatctttacactttcatctcaaagactataaaggaaagaggtagttaagatcatttagaattcaagttaaatttcagaaaattggggcagtcaggcatttttatctttggtagggcaacaagtaaaacatgtagagtgctcgctattccactttttaaagcttttaccaaatcttatttctaaaactctgtgcattctcagtgtcttctcattctgaagcagaaaataaggaagaacattcaacttagatttctaagatcagataacccttaacaaaaatgttagtcggggtccctaaaaaagaattgtgcatttatataaaatacaggcctttttgaaatttgactttttaaaaagcaaaaaaacttggaacaaaaatcattggggttttttaatggcgtttgccaaattttttataataaaccctttatgaaactcccgttaaaagtggcaaaatttttttgaaaaaggggttttttaattaaatggcccaggtaaaaaattttgaagggttttcagtaaaacctccagtggcaaatttggagaaaacccc

SEQ ID NO: 23279 - DNA, 493 bp, Macaca Mulatta
  misc_feature (1)...(493): n = A,T,C or G
ncagacagtgccgccctgcgagctgccggccaaagagtacgaggtggcccgcaacacaggcgcctacacgtcctccgggctggccaccgcaggcttccgcaccgccaagtacctgctggaggagtggttccagaactgctatgctcgctaccaccaggccttcgcggaccgcgaccagtcggagcggcagcggcatgagagccagcagctggcatcggagacccaggcgctggcgcagcgcacgcagcaagactccacgcgcagggttggcgagcgactgcaggacatgcacggctggaagtcggagctgcagcgcgaggtggaagcgctggctgcggagaccgacctgttgctggcccagaggcagaggctggagcgcgccctggacgccacggaggtgcccttctccatcgccactgacaacctgcagtgtcgtgagcgccgccagcaccccaacctcgtgcgcgactatgtggagacggaattgctgaag

SEQ ID NO: 23280 - DNA, 841 bp, Macaca Mulatta
  misc_feature (1)...(841): n = A,T,C or G
gtcccctccagggcaggtgactgaggccgtgaaggtggccattgacgtcgggtaccgccacatcgactgtgcccatgtgtaccagaatgagaatgaggtgggggtggccattcaggagaagctcagggagcaggtggtgaagcgtgaggagctcttcatcgtcagcaagnnnnnnnnnnnnnnnnnnnnnnnnnnnnnnnnnnnnnnnnnnnnnnnnnnnnnnnnnnnnnnnnnnnnnnnnnnnnnnnnnnnnnnnnnnnnnnnnnnnnnnnnnnnnnnnnnnnnnnnnnnnnnnnnnnnnnnnnnnnnnnnnnnnnnnnnnnnnnnnnnnnnnnnnnnnnnnnnnnnnnnnnnnnnnnnnnnnnnnnnnnnnnnnnnnnnnnnnnnnnnnnnnnnnnnnnnnnnnnnnnnnnnnnnnnnnnnnnnnnnnnnnnnnnnnnnnnnnnnnnnnnnnnnnnnnnnnnnnnnnnnnnnnnnnnnnnnnagattgagtgccacccgtacctcactcaggagaagttaatccagtactgccactccaaaggcatcgtggtgaccgcctacagccccctcggctctcctgacaggccctggnnnnnnnnnnnnnnnnnnnnnnnnnnnnnnnnnnnnnnnnnnnnnnnnnnnnnnnnnnnnnnnnnnnnnnnnnnnnnnnnnnnnnnnnnnnnnnnnnnnnnnnnnnnnnnnnnnnnnnnnnnnnnnnnnnnnnnnnnnnnnnnnnnnnnnnnnnnnnnnnnnnggnctttgactttgaactgagcaaccaggatatgaccaccttactcggctacaacaggatctggagggtctgtgccttgttgag

SEQ ID NO: 23281 - DNA, 587 bp, Macaca Mulatta
  misc_feature (1)...(587): n = A,T,C or G
tgtttcaggagccgtagagccagatcatcatcatgtctgcattgtggctgctgctgggcctccttgccctgannnnnnnnnnnnnnnnnnnnnnnnnnnnnnnnnnnnnnnnnnnnnnnnnnnnnnnnnnnnnnnnnnnnnnnnnnnnnnnnnnnnnnnnnnnnnnnnnnnnnnnnnnnnnnnnnnnnnnnnnnnnnnnnnnnnnnnnnnnnnnnnnnnnnnnnnnnnnnnnnnnnnnnnnnnnnnnnnnnnnnnnnnnnnnnnnnnnnnnnnnnnnnnnnnnnnnnnnnnnnnnnnnnnnnnnnnnnnnnnnnnnnnnnnnnnnnnnnnnnnnnnnnnnnnnnnnnnnnnnnnnnnnnnnnnnnnnnntggctctcacgctcccgcatactggattagtgagtctcaggtttcccagatgactgaagctctgactactagaatcaaagaaatccagaggaggtttccaacctggacccctgaccagtacctgagaggtnaggtggactctgtgcctacagtgggggtgctggctatgtccaaagcagccaggacctgagctgtgacttctgcaatgatgtccttgc

SEQ ID NO: 23282 - DNA, 1302 bp, Macaca Mulatta
  misc_feature (1)...(1302): n = A,T,C or G
atgcgcccgctgctcggcctccttatggtcttcgctggctgcaccttcgctttgtacttgctgtcgacgcgactgccccgcgggcggagactgggctccaccgaggaggctggaggcaggnnnnnnnnnnnnnnnnnnnnnnnnnnnnnnnnnnnnnnnnnnnnnnnnnnnnnnnnnnnnnnnnnnnnnnnnnnnnnnnnnnnnnnnnnnnnnnnnnnnnnnnnnnnnnnnnnnnnnnnnnnnnnnnnnnnnnnnnnnnnnnnnnnnnnnnaatgttttagctggtgccttgtttgggccgtggctggggcttctgctgtgttgtgtgttgacctcggtgggtgccacatgctgctacctgctctccagtatttttggcaaacagttggtggtgtcctactttcctgataaagtggccctgctgcagagaaaggtnaggtggaggagaaagtaacagcttgtgttttttcttattgtttttgagacttttccccatgacaccaaactggttcttgaacctctcggccccaattctgaacatccccatcgtacagttcttcttctcagttcttatcggtnggtttgatcccatacaatttcatctgtgtgcagacaggctccatcctgtcaaccctaacctctctggatgctcttttctcctgggacactgtcttgaagctattggccattgccatggtggcattaattcctggaaccctcattaaaaaatttagtcagaaacatctgcaattgaatgaaaccagcactgctaatcacatacacagtagaaaagacacnnnnnnnnnnnnnnnnnnnnnnnnnnnnnnnnnnnnnnnnnnnnnnnnnnnnnnnnnnnnnnnnnnnnnnnnnnnnnnnnnnnnnnnnnnnnnnnnnnnnnnnnnnnnnnnnnnnnnnnnnnnnnnnnnnnnnnnnnnnnnnnnnnnnnnnnnnnnnnnnnnnnnnnnnnnnnnnnnnnnnnnnnnnnnnnnnnnnnnnnnnnnnnnnnnnnnnnnnnnnnnnnnnnnnnnnnnnnnnnnnnnnnnnnnnnnnnnnnnnnnnnnnnnnnnnnnnnnnnnnnnnnnnnnnnnnnnnnnnnnnnnnnnnnnnnnnnnnnnnnnnnnnnnnnnnnnnnnnnnnnnnnnnnnnnnnnnnnnnnnnnnnnnnnnnnnnnnnnnnnnnnnnnnnnnnnnnnnnnnnnnnaatcccagctactcaggtggctgaggcaggagaattgcttgaacccaagagcgaaaggttgcagtgagccgaggtctcaccattgcactgcagcctgggtga

SEQ ID NO: 23283 - DNA, 157 bp, Macaca Mulatta
attttgttctcttttctagtaggaggaccattagcagttgtatttaaatgaagagctcatttagttgtaagcactaaaaacccaatctggtttaagcacagcaggtttcttggctgatgtagtggattgagccaaggctgtgttgtttcccttgacc

SEQ ID NO: 23284 - DNA, 1342 bp, Macaca Mulatta
  misc_feature (1)...(1342): n = A,T,C or G
tctcaagatggacaaccgggatgttgcaggnnnnnnnnnnnnnnnnnnnnnnnnnnnnnnnnnnnnnnnnnnnnnnnnnnnnnnnnnnnnnnnnnnnnnnnnnnnnnnnnnnnnnnnnnnnnnnnnnnnnnnnnnnnnnnnnnnnnnnnnnnnnnnnnnnnnnnnnnnnnnnnnnnnnnnnnnnnnnnnnnnnnnnnnnnnnnnnnnnnnnnnnnnnnnnnnnnnnnnnnnnnnnnnnnnnnnnnnnnnnnnnnnnnnnnnnnnnnnnnnnnnnnnnnnnnnnnnnnnnnnnnnnnnnnnnnnnnnnnnnnnnnnnnnnnnnnnnnnnnnnnnnnnnnnnnnnnnnnnnnnnnnnnnnnnnnnnnnnnnnnnnnnnnnnnnnnnnnnnnnnnnnnnnnnnnnnnnnnnnnnnnnnnnnnnnnnnnnnnnnnnnnnnnnnnnnnnnnnnnnnnnnnnnnnnnnnnnnnnnnnnnnnnnnnnnnnnnnnnnnnnnnnnnnnnnnnnnnnnnnnnnnnnnnnnnnnnnnnnnaaagtttcacccccagagggagccgagactcggaaagtgatagagaaattggcccgctttgtggcagaaggaggccccgagttagaaaaagtagctatggaggactacaaggataacccagcatttgnnnnnnnnnnnnnnnnnnnnnnnnnnnnnnnnnnnnnnnnnnnnnnnnnnnnnnnnnnnnnnnnnnnnnnnnnnnnnnnnnnnnnnnnnnnnnnnnnaagtttcacccccagaggacgaagaggtcaagaaccttgcagaaaagttggccaggttcatagcggacgggggtcccgaggtggaaaccattgccctccagaacaaccgtgagaaccaggcattcagnnnnnnnnnnnnnnnnnnnnnnnnnnnnnnnnnnnnnnnnnnnnnnnnnnnnnnnnnnnnnnnnnnnnnnnnnnnnnnnnnnnnnnnnnnnnnnnnnnnnnnnnnnnnnnnnnnnnnnnnnnnnnnnnnnnnnnnnnnnnnnnnnnnnnnnnnnnnnnnnnnnnnnnnnnnnnnnnnnnnnnnnnnnnnnnnnnnnnnnnnnnnnnnnnnnnnnnnnnnnnnnnnnnnnnnnnnnnnnnnnnnnnnnnnnnnnnnnnnnnnnnnnnnnnnnnnnnnnnnnnnnnnnnnnnnnnnnnnnnnnnnnnnnnnnnnnnnnnnnnnnnnnnnnnnnnnnnnnnnnnnnnnnnnnnnnncagttcaggacctcaaggggcttggctatgagaaggggaagcctgtgggtctagtgggtgtcacagagctgtcggatgcccagaagaagcagctgaaggagcagcagga

SEQ ID NO: 23285 - DNA, 750 bp, Macaca Mulatta
atctttcgccgcggggccagccgggtcctctgctcccggcctgtgtgcgaccctccggggccagccgacctggtcctggaggagggggactgcgtgcgcaagtgcgggctgctcaacctgacggtggcggcagaggcgtgccgcgagcgcagccacgtggccatcaagacggtgcgcgtgcccgaggtgaacgacctgcgcgccctggtggaagacccgcggttaaacctcaaggtcatccagctggtccgagacccccgcggcattctggcttcgcgcagcgagaccttccgggacacgtaccggctctggcggctctggtacggcacggggaggaaaccctacaacctggacgtgacgcagctgaccacggtgtgcgaggacttctccaactccgtgtccaccggcctcatgcggcccccgtggctcaagggcaagtacatgttggtgcgctacgaggacctggcccggaatcccatgaagaagaccgaggagatctacgggttcctgggcatcccgctggacagccacgtggcccgctggatccagaacaacacgcggggcgaccccaccctgggcaagcacaaatacggcaccgtgcgaaactcggctgccacggccgagaagtggcgcttccgcctctcctacgacatcgtggcctttgcccagaacgcctgccagcaggtgctggcccagctgggctacaagatcgccgcctcggaggaggagctgaagaacccctcggtcagc

SEQ ID NO: 23286 - DNA, 518 bp, Macaca Mulatta
  misc_feature (1)...(518): n = A,T,C or G
gcttcctctgcgctccggaaagctgcggcccagcgcagactagtgaggacttccacagctcctgacgttgctaggagtcctgtcggcgttttctcccaggctccgccatgccggcggtgctgggttttgaaggcagcgccaataagattggcgtgggtgtggtgcgggatggcaaggtgctggcgaacccgcggcggacttatgtcacgcctccgggcacagnnnnnnnnnnnnnnnnnnnnnnnnnnnnnnnnnnnnnnnnnnnnnnnnnnnnnnnnnnnnnnnnnnnnnnnnnnnnnnnnnnnnnnnnnnnnnnnnnnnnnnnnnnnnnnnnnnnnnnggccctggcatgggtgccccactggtttctgtggctgttgtggcccgtactgtggcccaactgtggaataagccattggtgggtgtgaaccactgtataggccacatcgagatgggccgcctcatcactggagccaccagcccaaccgtgttgtatgtcagtggaggaaatacacagg

SEQ ID NO: 23287 - DNA, 881 bp, Macaca Mulatta
  misc_feature (1)...(881): n = A,T,C or G
gggaaggcagccatctcgccgtgagacagcaggtgtcggagctggagctgcaggcgcagccgtgcgatgttgtcctccgtagccatgtattcggctcctggcagagacttggggatggagccgcacggagccgcgggccctttgcagctacgattttcgccctacgctttcaacggaggtactgtactggcaattgctggagaagattttgcaattgttgcttctgatactcgactgagtgaagggttttcaattcatacccgggatagccccaaatgttacaaattaacagacaaaacagtcattggatgcagtggttttcatggagactgccttaccctgacaaagattattgaagcaagactaaagatgtttaaagcctttccaaaaataagggcatgactaccgggggccaattgcctgccaatgcctgtctaacaaaacccggtatttcaagggggccttttttttcccataactatgggtttaacaaaactccctcccgggtgggacatttgnnnnnnnnnnnnnnnnnnnnggggggggctctttaataaccaagcccttttttaacccccaataaagggggtgcctttacaccgaaaaaaaaaacctcccctttaaggggggggggaggggcgccacaccaaaagggggcaagtgtgttaaaaaacccccctgtgttttggaaaacaccagggtgtggnnnnnnnnnnnnnnnnnnnnngggaaaacccggggagaaatattgccccccnnnnnnnnnnnnnnnnnnnnnnnnnnnctgcgggggggtgggaaaataaannnnnnnnnnnnnnnnnnngggtgagaaaaaaaacatttacaacgggggggagcccccccccggaattttataa

SEQ ID NO: 23288 - DNA, 302 bp, Macaca Mulatta
catcccagaatcctattttcctgggaagtccttaaagcccctaaccatcccacactcttcactttcctgtccaccttattcattctttgtacttatcacagtgttttgcacttgattacatatccttcactctcttctcttcatcccatcaccccctaatacgtcaggtgagggaggttggggagaggtggaagaggggcagacgtgaaggaagaataggaaggatgttacctcttctgttatttttttaaaaaacattgtttggtggcagcaatctccctgtccctatcactgttagaggc

SEQ ID NO: 23289 - DNA, 98 bp, Macaca Mulatta
atgtcgtggagagatttgccgagactaagactctggttgaagacagaggcaatcccaggagaggggcggaaagctgcaaaagttaatgcgggagtcgg

SEQ ID NO: 23290 - DNA, 109 bp, Macaca Mulatta
ctgggctggccgaaagattcggccactaccccctatgaagagttacgtgaagctgccttctgctgctgcccaaagctgatatccctgtactctaataaaatgcctcccc

SEQ ID NO: 23291 - DNA, 667 bp, Macaca Mulatta
atactgaaaccactagttgtagctcagaacgagctggaccagaagaaagtaaatatcccaaaatgacagacctcagcaagggcgtgatcgaggaacccaagtaacgcctgcgcttgtgtggtggacccagcaccacccctgcgtcgtgggacttgcctcagatcagcctgcgactgcaagattctcactgcagtagagaactctttttctcccttgtactattctgtgacctggcatcttatttatagggaaaaatggcctttgtaggcagtggaaaacttgcaaggaaagctgccgtctctttggcagtctgatgcagagcctgcactctggcactcgctgaagaatctggaaggctgcggtttgctcttccagcgttccggcggcctctgactgctgaaggatttggttggccacggagggctgtgctgttaggctgcatcccactcaaaatacaggaaaagcgcgaatcatgattctgctttctgtaagcttaggcagacattgggccttcacctacaagtttttccttaccccagtggtttctagtgtgtatactaacactaccataggaaagaatatatacattcgtaaatcctaattcaaagacggcgtgtgtgtgagggcattgagcttgatctgttttccctttggtctgggttgtgtg

SEQ ID NO: 23292 - DNA, 909 bp, Macaca Mulatta
gcgtgtgggagggaggagcccagctgggaagtggggactttgcacggcaggagctgcgcccctggcagagcccagctccaggggattcctctcccccagattctcacggctctggatcgagatgcctcttgtcggaagcataagttacggcagaaactggaacagatcatcaacctcgtgtccagtgacagctaagggtggtggaattggtgaggaggggcttctcagtcctgagccgtcctcccatccaggggagtggctggcttgagcgtgggtccccgggctgagccctggattgggtatcatggagcaggtcaccctggccaggatgcccccagcacacccaggcccccttcattagtgccttgctttgggccctgcagggggaggggtgacaggatgagcccccatcccagcagcagcaatacccccaccctcctgccctgtgcccaggtgttgggacagacccgccctccctgctatttatatccctctgcctatttattgaatcaaactccgcctccgtctccatctgtaaatatgtgtcccccacgggatgtcgccagcctcactcacctgcctgttcttgagctgtcctgggccctgccacccgtctgggctcctttgtgtagcattatcagccttggtctggcctctggcacctcaaccctgccatggctgaccccacccattccaaggcagggtcacagtaccagtggcacttggggtgaggtctccaaagcttcctcagaattgtggctgtgccacactgggccacagggtccctccccctcaagcaccttggggccctcttctcgctgagcatctggaggactggacccaggcttgtgccagggcctgacttaggcctaggggccccagaatgctgctcctcctgagcctactgcc

SEQ ID NO: 23293 - DNA, 463 bp, Macaca Mulatta
catgttttagcagaatgaatttgtttaatataataaagtttgctacttatctgtatgtaggttgctaaaaaggattttcttaactcagattttaagccaaataaccatttaacactagtatttgttaaatggggtatttttctgtatttgtatgtttcactataataagggaattaaggataatgtgcattgagaatattttgaaaaataattaattgactcaaattttatttcttggtcttttgctgttaaatgatgattttgaaagattaaacttgtactgttggtattgtgttagtgtatggaccaatactgcctgtaataaagattttatatatagatgcctttcatttttttcctgtggtcctttcccacaaagaattgttgaaactgggtacaaaaatcgagttgattttttcaaaaacattttcatttaagcagtgactgacagaatgctaattgt

SEQ ID NO: 23294 - DNA, 76 bp, Macaca Mulatta
aatgatgcccatgggtggaatgatgccacctggaccaggaataccacctctgatgcctggaatgccaccaggtatg

SEQ ID NO: 23295 - DNA, 687 bp, Macaca Mulatta
tgagccgtcagactgctacagcattacctaccggtacctcgaagtgtccaccatcccagagggtacctgccctgactggcacaactgcatccaacaatgacttggcgagtctttttgagtgtccagtctgctttgactatgtgttaccacccattcttcaatgtcagagtggccatcttgtttgtagcaactgtcgcccaaagctcacatgttgtccaacttgccggggccctttgggatccattcgcaacttggctatggagaaagtggctaattcagtacttttcccctgtaaatatgcctcttctggatgtgaaataactctgccacacacagaaaaagcagaccacgaagagctctgtgagtttaggccttattcctgtccgtgccctggtgcttcctgtaaatggcaaggctctttggatgctgtaatgccccatctgatgcatcagcataagtccattacaaccctacagggagaggatatagttttccttgctacagacattaatcttcctggtgctgttgactgggtgatgatgcagtcctgttttggctttcacttcatgttagtcttggagaaacaggaaaaatacgatggtcaccagcagttctttgcaattgtacagctgataggaacacgcaagcaagctgaaaattttgcttaccgacttgagctaaatggtc

SEQ ID NO: 23296 - DNA, 3108 bp, Macaca Mulatta
  misc_feature (1)...(3108): n = A,T,C or G
aggcaacagacagatttctaccagagggctaccctctccccttggatctggagcagcaggcagtagaatttatgtccaccagtgctgtggcttccaggtctcnnnnnnnnngaacctgagctggctggaggagaaagagaaggaagtggtcagtgccctgcgctactttaagaccattgtggacaaaatggcaattgataagaaggtactggagatgcttccagggtcagccagcaaggtgctggaggccatcttacccctggtgcagaacgatcctcgaattcagcacagnnnnnnnnnnnnnnnnnnnnnnnnnnnnnnnnnnnnnnnnnnnnnnnnnnnnnnnnnnnnnnnnnnnnnnnnnnnnnnnnnnnnnnnnnnnnnnnnnnnnnnnnnnnnnnnnnnnnnnnnnnnnnnnnnnnnnnnnnnnnnnnnnnnnnnnnnnnnnnnnnnnnnnnnnnnnnnnnnnnnnnnnnnnnnnnnnnnnnnnnnnnnnnnnnnnnnnnnnnnnnnnnnnnnnnnnnnnnnnnnnnnnncccagcagagctccccctgacagaccgcgaggtagaaatcctaaacaagacgaccgggatgtcacagtcaactgagctcctcccagatgccacagatgaagaggtcgcgccccccaagccccctctgcctggcattcgggtggttgataatagnnnnnnnnnnnnnnnnnnnnnnnnnnnnnnnnnnnnnnnnnnnnnnnnnnnnnnnnnnnnnnnnnnnnnnnnnnnnnnnnnnnnnnnnnnnnnnnnnnnnnnnnnnnnnnnnnnnnnnnnnnnnnnnnnnnnnnnnnnnnnnnnnnnnnnnnnnnnnnnnnnnnnnnnnnnnnnnnnnnnnnnnnnnnnnnnnnnnnnnnnnnnnnnnnnnnnnnnnnnnnnnnnnnnnnnnnnnnnnnnnnnnnnnnnnnnnnnnnnnnnnnnnnnnnnnnnnnnnnnnnnnnnnnnnnnnnnnnnnnnnnnnnnnnnnnnnnnnnnnnnnnnnnnnnnnnnnnnnnnnnnnnnnnnnnnnnnnnnnnnnnnnnnnnnnnnnnnnnnnnnnnnnnnnnnnnnnnnnnnnnnnnnnnnnnnnnnnnnnnnnnnnnnnnnnnnnnnnnnnnnnnnnnnnnnnnnnnnnnnnnnnnnnnnnnnnnnnnnnnnnnnnnnnnnnnnnnnnnnnnnnnnnnnnnnnnnnnnnnnnnnnnnnnnnnnnnnnnnnnnnnnnnnnnnnnnnnnnnnnnnnnnnnnnnnnnnnnnnnnnnnnnnnnnnnnnnnnnnnnnnnnnnnnnnnnnnnnnnnnnnnnnnnnnnnnnnnnnnnnnnnnnnnnnnnnnnnnnnnnnnnnnnnnnnnnnnnnnnnnnnnnnnnnnnnnnnnnnnnnnnnnnnnnnnnnnnnnnnnnnnnnnnnnnnnnnnnnnnnnnnnnnnnnnnnnnnnnnnnnnnnnnnnnnnnnnnnnnnnnnnnnnnnnnnnnnnnnnnnnnnnnnnnnnnnnnnnnnnnnnnnnnnnnnnnnnnnnnnnnnnnnnnnnnnnnnnnnnnnnnnnnnnnnnnnnnnnnnnnnnnnnnnnnnnnnnnnnnnnnnnnnnnnnnnnnnnnnnnnnnnnnnnnnnnnnnnnnnnnnnnnnnnnnnnnnnnnnnnnnngtgcaggagctggccccgccgcccgccctaccccccaagcagcggcagctggnnnnnnnnnnnnnnnnnnnnnnnnnnnnnnnnnnnnnnnnnnnnnnnnnnnnnnnnnnnnnnnnnnnnnnnnnnnnnnnnnnnnnnnnnnnnnnnnnnnnnnnnnnnnnnnnnnnnnnnnnnnnnnnnnnnnnnnnnnnnnnnnnnnnnnnnnnnnnnnnnnnnnnnnnnnnnnnnnnnnnnnnnnnnnnnnnnnnnnnnnnnnnnnnnnnnnnnnnnnnnnnnnnnnnnnnnnnnnnnnnnnnnnnnnnnnnnnnnnnnnnnnnnnnnnnnnnnnnnnnnnnnnnnnnnnnnnnnnnnnnnnnnnnnnnnnnnnnnnnnnnnnnnnnnnnnnnnnnnnnnnnnnnnnnnnnnnnnnnnnnnnnnnnnnnnnnnnnnnnnnnnnnnnnnnnnnnnnnnnnnnnnnnnnnnnnnnnnnnnnnnnnnnnnnnnnnnnnnnnnnnnnnnnnnnnnnnnnnnnnnnnnnnnnnnnnnnnnnnnnnnnnnnnnnnnnnnnnnnnnnnnnnnnnnnnnnnnnnnnnnnnnnnnnnnnnnnnnnnnnnnnnnnnnnnnnnnnnnnnnnnnnnnnnnnnnnnnnnnnnnnnnnnnnnnnnnnnnnnnnnnnnnnnnnnnnnnnnnnnnnnnnnnnnnnnnnnnnnnnnnnnnnnnnnnnnnnnnnnnnnnnnnnnnnnnnnnnnnnnnnnnnnnnnnnnnnnnnnnnnnnnnnnnnnnnnnnnnnnnnnnnnnnnnnnnnnnnnnnnnnnnnnnnnnnnnnnnnnnnnnnnnnnnnnnnnnnnnnnnnnnnnnnnnnnnnnnnnnnnnnnnnnnnnnnnnnnnnnnnnnnnnnnnnnnnnnnnnnnnnnnnnnnnnnnnnnnnnnnnnnnnnnnnnnnnnnnnnnnnnnnnnnnnnnnnnnnnnnnnnnnnnnnnnnnnnnnnnnnnnnnnnnnnnnnnnnnnnnnnnnnnnnnnnnnnnnnnnnnnnnnnnnnnnnnnnnnnnnnnnnnnnnnnnnnnnnnnnnnnnnnnnnnnnnnnnnnnnnnnnnnnnnnnnngggcctggccgagtactgcacgctgattgacagctcatcctccttccgagcctaccgggccgccctctcggaggtggaaccgccgtgcatcccgtacctgnnnnnnnnnnnnnnnnnnnnnnnnnnnnnnnnnnnnnnnnnnnnnnnnnnnnnnnnnnnnnnnnnnnnnnnnnnnnnnnnnnnnnnnnnnnnnnnnnnnnnnnnnnnnnnnnnnnnnnnnnnnnnnnnnnnnnnnnnnnnnnnnngaacgacgacattataaacttcttcaatgacttcagtgaccacctggctgaggaggccctatgggaactctctctgaaaattaaacccaggaacataacaaggagaaaaacagaccgggaagagaagacctag

SEQ ID NO: 23297 - DNA, 1592 bp, Macaca Mulatta
  misc_feature (1)...(1592): n = A,T,C or G
ttgcagagtgaccgactcctcatcaaaggtggacggatcatcaacgatgaccagtccctttatgctgacgtctacctggaggatggacttatcannnnnnnnnnnnnnnnnnnnnnnnnnnnnnnnnnnnnnnnnnnnnnnnnnnnnnnnnnnnnnnnnnnnnnnnnnnnnnnnnnnnnnnnnnnnnnnnnnnnnnnnnnnnnnnnnnnnnnnnnnnnnnnnnnnnnnnnnnnnnnnnnnnnnnnnnnnnnnnnnnnnnnnnnnnnnnnnnnnnnnnnnnnnnnnnnnnnnnnnnnnnnnnnnnnnnnnnnnnnnnnnnnnnnnnnnnnnnnnnnnnnnnnnnnnnnnnnnnnnnnnnnnnnnnnnnnnnnnnnnnnnnnnnnnnnnnnnnnnnnnnnnnnnnnnnnnnnnnnnnnnnnnnnnnnnnnnnnnnnnnnnnnnnnnnnnnnnnnnnnnnnnnnnnnnnnnnnnnnnnnnnnnnnnnnnnnnnnnnnnnnnnnnnnnnnnnnnnnnnnnnnnnnnnnnnnnnnnnnnnnnnnnnnnnnnnnnnnnnnnnnnnnnnnnnnnnnnnnnnnnnnnnnnnnnnnnnnnnnnnnnnnnnnnnnnnnnnnnnnnnnnnnnnnnnnnnnnnnnnnnnnnnnnnnnnnnnnnnnnnnnnnnnnnnnnnnnnnnnnnnnnnnnnnnnnnnnnnnnnnnnnnnnnnnnnnnnnnnnnnnnnnnnnnnnnnnnnnnnnnnnnnnnnnnnnnnnnnnnnnnnnnnnnnnnnnnnnnnnnaagggcccctagtgtttggcgagcccattgccgccagcctggggaccgatggcacccattactggagcaagaactgggccaaggctgcggaatatgtgacctcccctcccctgagcccggaccccaccacgccggactacttgacctccctgctggcctnnnnnnnnnnnnnnnnnnnnnnnnnnnnnnnnnnnnnnnnnnnnnnnnnnnnnnnnnnnnnnnnnnnnnnnnnnnnnnnnnnnnnnnnnnnnnnnnnnnnnnnnnnnnnnnnnnnnnnnnnnnnnnnnnnnnnnnnnnnnnggctactggcaaaatggatgagaaccagtttgttgctgtcaccagcaccaatgcagccaagatctttaacttgtacccaaggaaagggcggattgctgtgggctcggacgctgacgtggtcatctgggaccccgacaaggtgaagaccataacagccaaaagtcacaagtcgnnnnnnnnnnnnnnnnnnnnnnnnnnnnnnnnnnnnnnnnnnnnnnnnnnnnnnnnnnnnnnnnnnnnnnnnnnnnnnnnnnnnnnnnnnnnnnnnnnnnnnnnnnnnnnnnnnnnnnnnnnnnnnnnnnnnnnnnnnnnnnnnnnnnnnnnnnnnnnnnnnnnnnnnnnnnnnnnnaggtttttggattgcaaggggtttccaggggcatgtatgacggtcctgtgtacgaggtgccagctacacccaaatatgcaactcccgctccttcagccaaatcttcgccttccaaacaccagcccccgcccatcagaaacctccaccagtccaacttcagcttatcagg

SEQ ID NO: 23298 - DNA, 705 bp, Macaca Mulatta
  misc_feature (1)...(705): n = A,T,C or G
ttagagaagagcttcagnaagcagagatgaaagaaattctggaacaacagcagcaagaacgaaatgataccaattttcatggcatttgtatgttttgcaatgaagaatccttggaaacagatctgttattttgaaccacatggccagagaacatgctttcaacattggattgccagacaacattgtaaactgcaatgaatttttgtgtacattacagaaaaagcttgacaatttacagtgcttgtactgtgagaagaccttcagggacaaaaatacacttaaagatcacatgaggaaaaaacagcatcgtaagattaatcctaagaacagagaatatgaccgattttatgtcatcaattatttggaacttggaaaatcatgggaagaagttcagttggaagacgatcgtgagttgctggaccatcaggaagacgactggtctgattgggaagaacaccctgcctctgccgtctgcttgttttgtgaaaagcaagcagaaacaattgagaaattgtatgtccacatggaggatgcacacgaatttgatcttctcaagataaagtcagaacttggattaaatttctatcagcaagtgaaactggtcaattttattcggaggcaagttcaccaatgcaggtgttatggctgccatgtgaagttcaaatccaaagcagacttaagaactcacatggaagaaaataaaca

SEQ ID NO: 23299 - DNA, 5018 bp, Macaca Mulatta
  misc_feature (1)...(5018): n = A,T,C or G
gcaccctgacccgggcatggaggggggcaaggggcccaagctcagagacttcctgagtgggagtctctctacctgggnnnnnnnnnnnnnnnnnnnnnnnnnnnnnnnnnnnnnnnnnnnnnnnnnnnnnnnnnnnnnnnnnnnnnnnnnnnnnnnnnnnnnnnnnnnnnnnnnnnnnnnnnnnnnnnnnnnnnnnnnnnnnnnnnnnnnnnnnnnnnnnnnnnnnnnnnnnnnnnnnnnnnnnnnnnnnnnnnnnnnnnnnnnnnnnnnnnnnnnnnnnnnnnnnnnnnnnnnnnnnnnnnnnnnnnnnnnnnnnnnnnnnnnnnnnnnnnnnnnnnnnnnnnnnnnnnnnnnnnnnnnnnnnnnnnnnnnnnnnnnnnnnnnnnnnnnnnnnnnnnnnnnnnnnnnnnnnnnnnnnnnnnnnnnnnnnnnnnnnnnnnnnnnnnnnnnnnnnnnnnnnnnnnnnnnnnnnnnnnnnnnnnnnnnnnnnnnnnnnnnnnnnnnnnnnnnnnnnnnnnnnnnnnnnnnnnnnnnnnnnnnnnnnnaggtgacccagccagggaccggcgtggtgctggcactctctgggccagagcctggggagctgacacctgccgagctggagatgctgtcccggagcctgatggggacactgtcgaggctggcgcgggagcgtgacctgggggcccannnnnnnnnnnnnnnnnnnnnnnnnnnnnnnnnnnnnnnnnnnnnnnnnnnnnnnnnnnnnnnnnnnnnnnnnnnnnnnnnnnnnnnnnnnnnnnnnnnnnnnnnnnnnnnnnnnnnnnnnnnnnnnnnnnnnnnnnnnnnnnnnnnnnngagaaggccgagttgctgctagactcccaggccgaggtgcagggtttggaggtcgaaataagaaggctccgccaggagnnnnnnnnnnnnnnnnnnnnnnnnnnnnnnnnnnnnnnnnnnnnnnnnnnnnnnnnnnnnnnnnnnnnnnnnnnnnnnnnnnnnnnnnnnnnnnnnnnnnnnnnnnnnnnnnnnnnnnnnnnnnnnnnnnnnnnnnnnnnnnnnnnnnnnnnnnnnnnnnnnnnnnnnnnnnnnnnnnnnnnnnnnnnnnnnnnnnnnnnnnnnnnnnnnnnnnnnnnnnnnnnnnnnnnnnnnnnnnnnnnnnnnnnnnnnnnnnnnnnnnnnnnnnnnnnnnnnnnnnnnnnnnnnnnnnnnnnnnnnnnnnnnnnnnnnnnnnnnnnnnnnnnnnnnnnnnnnnnnnnnnnnnnnnnnnnnnnnnnnnnnnnnnnnnnnnnnnnnnnnnnnnnnnnnnnnnnnnnnnnnnnnnnnnnnnnnnnnnnnnnnnnnnnnnnnnnnnnnnnnnnnnnnnnnnnnnnnnnnnnnnnnnnnnnnnnnnnnnnnnnnnnnnnnnnnnnnnnnnnnnnnnnnnnnnnnnnnnnnnnnnnnnnnnnnnnnnnnnnnnnnnnnnncagcaccccctgctggaggcaccgagagaggaccctgtgcttccggtgctggaggaggctccccagactcctgtggcctccgaccacagtccccagggcttggctcagaaggcaagggatggaggcccccaggccttgaacttggcttccccagcatcagactcagtgctcaaggggtcagctgagtgtccccaggcacctgattgggaaacacaggaggcagagagtccccttcaggcagctactgtggacccccaggcctcagactggtccccccaagagtcagactgtcctgtggagacacaggagtccccggagaaggctggctgtagatcctctctccagagccctgcctctgtggccccacctcagggtccagggaccaaaattcaggccccgcagttgctgggaggagagactgagggaagagaggctccccaaggtgagttggtgcctgaggcccgggggtaagacaggaggaccctgagcacaagnnnnnnnnnnnnnnnnnnnnnnnnnnnnnnnnnnnnnnnnnnnnnnnnnnnnnnnnnnnnnnnnnnnnnnnnnnnnnnnnnnnnnnnnnnnnnnnnnnnnnnnnnnnnnnnnnnnnnnnnnnnnnnnnnnnnnnnnnnnnnnnnnnnnnnnnnnnnnnnnnnnnnnnnnnnnnnnnnnnnnnnnnnnnnnnnnnnnnnnnnnnnnnnnnnnnnnnnnnnnnnnnnnnnnnnnnnnnnnnnnnnnnnnnnnnnnnnnnnnnnnnnnnnnnnnnnnnnnnnnnnnnnnnnnnnnnnnnnnnnnnnnnnnnnnnnnnnnnnnnnnnnnnnnnnnnnnnnnnnnnnnnnnnnnnnnnnnnnnnnnnnnnnnnnnnnnnnnnnnnnnnnnnnnnnnnnnnnnnnnnnnnnnnnnnnnnnnnnnnnnnnnnnnnnnnnnnnnnnnnnnnnnnnnnnnnnnnnnnnnnnnnnnnnnnnnnnnnnnnnnacgggaggcgctggtggaggcgctggcatcagcgggccgggagcggaggcagtgggaacgtgaggggtccaggctgcgggcccagtcggaggccgccgaggaacggatgcaggcgctggagagcgagggccgccagcacctggaggaggctgagagggagcgccgggagaaggaggccctccaggcgnnnnnnnnnnnnnnnnnnnnnnnnnnnnnnnnnnnnnnnnnnnnnnnnnnnnnnnnnnnnnnnnnnnnnnnnnnnnnnnnnnnnnnnnnnnnnnnnnnnnnnnnnnnnnnnnnnnnnnnnnnnnnaggtaccagggcttggagcagcggctggaagctgagctgcaggcggcggcgaccagcaaggaggaggcgctgatggagctcaagaccagggccctgcagctggaagaggagctgttccannnnnnnnnnnnnnnnnnnnnnnnnnnnnnnnnnnnnnnnnnnnnnnnnnnnnnnnnnnnnnnnnnnnnnnnnnnnnnnnnnnnnnnnnnnnnnnnnnnnnnnnnnnnnnnnnnnnnnnnnnnnnnnnnnnnnnnnnnnnnnnnnnnnnnnnnnnnnnnnnnnnnnnnnnnnnnnnnnnnnnnnnnnnnnnnnnnnnnnnnnnnnnnnnnnnnnnnnnnnnnnnnnnnnnnnnnnnnnnnnnnnnnnnnnnnnnnnnnnnnnnnnnnnnnnnnnnnnnnnnnnnnnnnnnnnnnnnnnnnnnnnnnnnnnnnnnnnnnnnnnnnnnnnnnnnnnnnnnnnnnnnnnnnnnnnnnnnnnnnnnnnnnnnnnnnnnnnnnnnnnnnnnnnnnnnnnnnnnnnnnnnnnnnnnnnnnnnnnnnnnnnnnnnnnnnnnnnnnnnnnnnnnnnnnnnnnnnaggccgagaagtctgtgctggagattaagggccaggagctgcatcggaagctggaggtgctggaggaggaggtgcggtcggcgcggcggtcccaggaggagacccgcgggcagcagcaggccctgcttcgggaccacgaggccctggcacagctgcagcggcggcaggaggccgagctagagggactgctggtgcggcaccgagacctcaaggccaacatgcgggcactggagttggctcaccgggagctgcagggnnnnnnnnnnnnnnnnnnnnnnnnnnnnnnnnnnnnnnnnnnnnnnnnnnnnnnnnnnnnnnnnnnnnnnnnnnnnnnnnnnnnnnnnnnnnnnnnnnnnnnnnnnnnnnnnnnnnnnnnnnnnnnnnnnnnnnnnnnnnnnnnnnnnnnnnnnnnnnnnnnnnnnnnnnnnnnnnnnnnnnnnnnnnnnnnnnnnnnnnnnnnnnnnnnnnnnnnnnnnnnnnnnnnnnnnnnnnnnnnnnnnnnnnnnnnnnnnnnnnnnnnnnnnnnnnnnnnnnnnnnnnnnnnnnnnnnnnnnnnnnnnnnnnnnnnnnnnnnnnnnnnnnnnnnnnnnnnnnnnnnnnnnnnnnnnnnnnnnnnnnnnnnnnnnnnnnnnnnnnnnnnnnnnnnnnnnnnnnnnnnnnnnnnnnnnnnnnnnnnnnnnnnnnnnnnnnnnnnnnnnnnnnnnnnnnnnnnnnnnnnnnnnnnnnnnnnnnnnnnnnnnnnnnnnnnnnnnnnnnnnnnnnnnnnnnnnnnnnnnnnnnnnnnnnnnnnnnnnnnnnnnnnnnnnnnnnnnnnnnnnnnnnnnnnnnnnnnnnnnnnnnnnnnnnnnnnnnnnnnnnnnnnnnnnnnnnnnnnnnnnnnnnnnnnnnnnnnnnnnnnnnnnnnnnnnnnnnnnnnnnnnnnnnnnnnnnnnnnnnnnnnnnnnnnnnnnnnnnnnnnnnnnnnnnnnnnnnnnnnnnnnnnnnnnnnnnnnnnnnnnnnnnnnnnnnnnnnnnnnnnnnnnnnnnnnnnnnnnnnnnnnnnnnnnnnnnnnnnnnnnnnnnnnnnnnnnnnnnnnnnnnnnnnnnnnnnnnnnnnnnnnnnnnnnnnnnnnnnnnnnnnnnnnnnnnnnnnnnnnnnnnnnnnnnnnnnnnnnnnnnnnnnnnnnnnnnnnnnnnnnnnnnnnnnnnnnnnnnnnnnnnnnnnnnnnnnnnnnnnnnnnnnnnnnnnnnnnnnnnnnnnnnnnnnnnnnnnnnnnnnnnnnnnnnnnnnnnnnnngccccgaggtacaggaaccggagaaacgtcccctcaccccgtccctcagccagtgacaccatggggacagcaggatcgggagtgcagccctcttgccgctggagtgtcagcgggggccttttgtagcccaagagctcagggagccagcgcccccaaggggagtccttggacaaggatgcctgggcctggagatcctccatggtcggtgccggggcccggaggtggagctgggacacgtgtgtggacaggggggacagctggtccacacgagtgggtctaggccgggattctggatcttccaggtggctcccgctcaggcagtggtctctgggggatcccccagctgaaagaggctggcaggagtaggcaagagagccccctgcccagtccaggcagggagctgagtcccagtgc

SEQ ID NO: 23300 - DNA, 476 bp, Macaca Mulatta
tgtgtgagaatatgtgtgtgtgagtttgccatcaaaggaagacttttattttggctgctaaaattcagaaacatttaaagaacaaactatcttttgaaaaacatcgaaggttcagaaaacaagacaagaaacaaattgttgtaaaatttcaactcccctaaatttatctatgaacttagaactaatctaataaaaatagtatgatgtttcaatggtgtgttgttgttgtctagtattttttggcattgttatttaaaaaccagtcaaaatttatccagctaaatattacattacttgtacagatttatgataatggcttagagaaatgaactttattgttttccatgtttctattcatgtccagtttttatgatagtttaaataatagtgaaccttttatttaaatcaaaatacaatatgtatgtatataattttagagggtccaatgatttggaaataatgtattcataagagct

SEQ ID NO: 23301 - DNA, 499 bp, Macaca Mulatta
agggtcaggcacaggactgcaggtagcccagggtgttgtgggtggcagcacttgcttgctggctgctttctggctcgaaataaaggaatcgtgcttgtgtcggggtagacgtttctttccttttcaggttccagccctggggaagggagctctgctctaacccgcttctctgaccctcatcccaaaatctcattgccttggcaaagctctgcttctaaacatcccggggccagcagagggagggcaggagggaggaagcggcttccacccttggcctcctgtgcggtgatttgcaagtggtctgccgcactctctgaacttcctaccagaggagtaggaggtagggcctctccccgcagagctggacaccaggagggggtcaccttccaggaccagccctgtgtcccgctcccctgaccccaccctgcagagggcttgggcaccactggggctgtttccccagggaagttcctttttatttattctccttttaaagtct

SEQ ID NO: 23302 - DNA, 139 bp, Macaca Mulatta
  misc_feature (1)...(139): n = A,T,C or G
caggaacagaggcagtgtcactgcaggcaggaagctaccaatgtcaccagagtcatccgcgacaactatgatcagntcagctggaggtccgctctgctgccgtgaaatccctaggagagctcgacatctttctagcctg

SEQ ID NO: 23303 - DNA, 691 bp, Macaca Mulatta
ggggtacgaagccattgccctgcaggcatccggctccaattcgaggattttggattgtccctgacattctgggccccacgatgctctgcgtcaccagtacctatgaatgcctcgtcaggcctttactaagtacagtccatccagcgtctcctccccttctttgtactcgagaagatgttgaagtggcagagtctcccctccgtgttctggctgaaaccccagattcctttgaaaagcatattagaagcattttgcaacgtagtgttgccaatccagcatttttgaaagcttctgaaaaggacctagcccctcctcctgaagaatgccttcagctcctcagcagagccacccaggtgttcagagagcagtacattctcaaacaggacttggccaaggaggagattcagcggagggtgaaattattatgtgaccaaaaaaagaaacaactagaagatctcaattattgtcgagaggagaggaaaagtctgcgggaaatggctgagcgtttagctgacaaatatgagggagctaaagaaaaacagaggatatcatgaacaggatgaaaaagtactcacagtttcactctgactcccagtctctctgaatggcgagactgagaaagatacactgaacctgacactccaattggcatgcatcacagtacttgaaagaatcccccagatgaaggttg

SEQ ID NO: 23304 - DNA, 614 bp, Macaca Mulatta
  misc_feature (1)...(614): n = A,T,C or G
ggaagccctggacttcattaagagacaggcacggcaccaccctttcttcctctactgggctgtggacgccacacacgcacccgtctacgcctccaaacccttcttgggcaccagtcagcgagggcggtnggtatggagatgccgtccgggagattgatgacagcgttgggaagatgctggagcttctccacgacctgcacgtcgcggacaacacctttgtcttcttcacatcggacaacggcgctgccctcatttccgcccccgaacaanntggcagcaacggcccctttctgtgtgggaagcagaccacgtttgaaggagggatgagggagcctgccctcgcatggtggccggggcacatcgccgcaggccaggtgagnnnnnnnnnnnnnnnnnnnnnnnnnnnnnnnnnnnnnnnnnnnnnnnnnnnnnnnnnnnnnnnnnnnnnnnnnnnnnnnnnnnnnnnnnnnnnnnnnnnnnnnnnnnnnnnnnnnnnnnnnnnnnnngacaggcccgtcttctattaccgcggtgacacgctgatggcgaccaccctcgggcagcacaaggctcacttctggacctggaccaactcctgggagaacttcagacag

SEQ ID NO: 23305 - DNA, 400 bp, Macaca Mulatta
  misc_feature (1)...(400): n = A,T,C or G
ggagagcagacaggaaggcccagtgggtaccacccggggaccgcggctcccacctgtgctgcccccacccatggccacggccaccgggaacagcaggacctggagtctccgagggactcagcaaggcgggcacggaccagtggggtccaggcaacagagggccagctcccagcctcttgcttcctgggctggggacatggggatccaaggccagtgggtctgcagggcccggccgggctgtctgataggccgagctcctccctgcgtggctacaaagatgcccacctgccttattggacccccatggggagagacccaccaggcagcccccgtgtctcactctgtcagcaggnnnnagggacctgctgccaagggccagtttctggaggctgggggcact

SEQ ID NO: 23306 - DNA, 555 bp, Macaca Mulatta
  misc_feature (1)...(555): n = A,T,C or G
gagcaggtcggggctgcgcagcgcgaaggctcgcctagtcggtccgcatccgtgtcgaccacctgtctggacaccacgaagatgccacccgttgggggcaaaaaggccaagaagnnnnnnnnnnnnnnnnnnnnnnnnnnnnnnnnnnnnnnnnnnnnnnnnnnnnnnnnnnnnnnnnnnnnnnnnnnnnnnnnnnnnnnnnnnnnnnnnnnnnnnnnnnnnnnnnnnnnnnnnnnnnnnnnncagttcgccagcttcatcgagagttcctcagagctggctcaaacgtcatgcagaccttcaccttctatgcgagtgaagacaagctggagaacaggggaaactatgnnnnnnnnnnnnnnnngggcagaaagtcaatgaagctgcttgcgacattgcccgacaagtggctgatgaaggagatgctttggtagcaggaggagtgagtcagacaccttcataccttagctgcaagagtgaaactgaagtcaaaaaagtatttctgcaacagttagaggtctttatgaagaagaacgtggacttcttgattgcaga

SEQ ID NO: 23307 - DNA, 1324 bp, Macaca Mulatta
  misc_feature (1)...(1324): n = A,T,C or G
gggtgatgatcttcagcaagagctactgtccccacagtactcgggtnnnnnnnnnnnnnnnnnnnnnnnnnnnnnnnnnnnnnnnnnnnnnnnnnnnnnnnnnnnnnnnnnnnnnnnnnnnnnnnnnnnnnnnnnnnnnnnnnnnnnnnnnnnnnnnnnnnnnnnnnnnnnnnnnnnnnnnnnnnnnnnnnnnnnnnnnnnnnnnnnnnnnnnnnnnnnnnnnnnnnnnnnnnnnnnnnnnnnnnnnnnnnnnnnnnnnnnnnnnnnnnnnnnnnnnnnnnnnnnnnnnnnnnnnnnnnnnnnnnnnnnnnnnnnnnnnnnnnnnnnnnnnnnnnnnnnnnnnnnnnnnnnnnnnnnnnnnnnnnnnnnnnnnnnnnnnnnnnnnnnnnnnnnnnnnnnnnnnnnnnnnnnnnnnnnnnnnnnnnnnnnnnnnnnnnnnnnnnnnnnnnnnnnnnnnnnnnnnnnnnnnnnnnnnnnnnnnnnnnnnnnnnnnnnnnnnnnnnnnnnnnnnnnnnnnnnnnnnnnnnnnnnnnnnnnnnnnnnnnnnnnnnnnnnnnnnnnnnnnnnnnnnnnnnnnnnnnnnnnnnnnnnnnnnnnnnnnnnnnnnnnnnnnnnnnnnnnnnnnnnnnnnnnnnnnnnnnnnnnnnnnnnnnnnnnnnnnnnnnnnnnnnnnnnnnnnnnnnnnnnnnnnnnnnnnnnnnnnnnnnnnnnnnnnnnnnnnnnnnnnnnnnnnnnnnnnnnnnnnnnnnnnnnnnnnnnnnnnnnnnnnnnnnnnnnnnnnnnnnnnnnnnnnnnnnnnnnnnnnnnnnnnnnnnnnnnnnnnnnnnnnnnnnnnnnnnnnnnnnnnnnnnnnnnnnnnnnnnnnnnnnnnnnnnnnnnnnnnnnnnnnnnnnnnnnnnnnnnnnnnnnnnnnnnnnnnnnnnnnnnnnnnnnnnnnnnnnnnnnnnnnnnnnnnnnnnnnnnnnnnnnnnnnnnnnnnnnnnnnnnnnnnnnnnnnnnnnnnnnnnnnnnnnnnnnnnnnnnnnnnnnnnnnnnnnnnnnnnnnnnnnnnnnnnnnnnnnnnnnnnnnnnnnnnnnnnnnnnnnnnnnnnnnnnnnnnnnnnnnnnnnnnnnnnnnnnnnnnnnnnnnnnnnnnnnnnnnnnnnnnnnnnnnnnnnnnnnnnnnnnngagtggaaaaatacctgtaaatgatgtggaacagaccagtgtgccatatgtctatgctgttggggatgtttcggagggtaagccagagctcactcctgtcgccatacagtcaggcaagctgctagctcggagactttttggggcctctttagaaaa

SEQ ID NO: 23308 - DNA, 1755 bp, Macaca Mulatta
  misc_feature (1)...(1755): n = A,T,C or G
atcttgtagaaaatttcagctgtaccccttggactagaagctgaaataatagaagctgtatatgatgcattagggtattgaagaaaattagcttttgaattaaatatttggaatataaggaaataaggaaaggtgactgaaaatggggcggaagaaaatacaaatcacacgcataatggatgaaaggaaccgacaggnnnnnnnnnnnnnnnnnnnnnnnnnnnnnnnnnnnnnnnnnnnnnnnnnnnnnnnnnnnnnnnnnnnnnnnnnnnnnnnnnnnnnnnnnnnnnnnnnnnnnnnnnnnnnnnnnnnnnnnnnnnnnnnnnnnnnnnnnnnnnnnnnnnnnnnnnnnnnnnnnnnnnnnnnnnnnnnnnnnnnnnnnnnnnnnnnnnnnnnnnnnnnnnnnnnnnnnnnnnnnnnnnnnnnnnnnnnnnnnnnnnnnnnnnnnnnnnnnnnnnnnnnnnnnnnnnnnnnnnnnnnnnnnnnnnnnnnnnnnnnnnnnnnnnnnnnnnnnnnnnnnnnnnnnnnnnnnnnnnnctggtttgccacctcagaacttttcaatgtctgtcacagttccagtgaccagccccaatgctttgtcctacactaacccagggagttcattggtgtccccatctttggcagccagctcaacgttaacggactcaagcatgctgtctccacctcaaaccacgttacatagaaatgtgtctcctnnnnnnnnnnnnnnnnnnnnnnnnnnnnnnnnnnnaggtgggatgttgagcactacagacctctcagtgccaaatggagccggaagcagcccagtggnnnnnnnnnnnnnnnnnnnnnnnnnnnnnnnnnnnnnnnnnnnnnnnnnnnnnnnnnnnnnnnnnnnnnnnnnnnnnnnnnnnnnnnnnnnnnnnnnnnnnnnnnnnnnnnnnnnnnnnnnnnnnnnnnnnnnnnnnnnnnnnnnnnnnnnnnnnnnnnnnnnnnnnnnnnnnnnnnnnnnnnnnnnnnnnnnnnnnnnnnnnnnnnnnnnnnnnnnnnnnnnnnnnnnnnnnnnnnnnnnnnnnnnnnnnnnnnnnnnnnnnnnnnnnnnnnnnnnnnnnnnnnnnnnnnnnnnnnnnnnnnnnnnnnnnnnnnnnnnnnnnnnnnnnnnnnnnnnnnnnnnnnnattattcactgaccagcgctgacctgtcagctctgcaaggcttcaactcgccaggaatgttgtcactgggacaggtgtcggcctggcagcagcaccacctaggacaagcagccctcagctctcttgtnnnnnnnnnnnnnnnnnnnnnnnnnnnnnnnnnnnnnnnnnnnnnnnnnnnnnnnnnnnnnnnnnnnnnnnnnnnnnnnnnnnnnnnnnnnnnnnnnnnnnnnnnnnnnnnnnnnnnnnnnnnnnnnnnnnnnnnnnnnnnnnnnnnnnnnnnnnnnnnnnnnnnnnnnnnnnnnnnnnnnnnnnnnnnnnnnnnnnnnnnnnnaaatggggcgctcccctgtggacagtctgagcagctctagtagctcctatgatggcagtgatcgggaggatccacggggcgacttccattctccannnnnnnnnnnnnnnnnnnnnnnnnnnnnnnnnnnnnnnnnnnnnnnnnnnnnnnnnnnnnnnnnnnngcgtgggtgacctaaggcttccaggctgatgtttgtacttttgtgttactgcagtgaactgccctacatatctaaatcggtaaataaggacatgagtta

SEQ ID NO: 23309 - DNA, 261 bp, Macaca Mulatta
gggtcgataggcttttgtggtaataggcagagatgaattgcatcccagctttccaccaaccaaatccaaacattcactgcttatttgccacagactgtaattattaaagtccctgagagctgttttctcccattcctttttcgcatgcttggcctcctgtctgtttccatgaaccacagaccacctaagcaagctgctgagtaagggctcacaggaaacttttgcagtcacaggatgtccaatctttggcagtccgagctc

SEQ ID NO: 23310 - DNA, 218 bp, Macaca Mulatta
  misc_feature (1)...(218): n = A,T,C or G
tgtggtgttgttagttttgttgaatgtgacactgtttctgaagctgtcaaagatagaacatgctgctcagtccttttaccgtctccgcctccaagaagagaaatctttaaantttagcctctcatatggtgtcaagagcagaaaatattcagaagaataaagatcaggcccatcgtttaaagggagtgctccgagactccatagtgatgcttgaacag

SEQ ID NO: 23311 - DNA, 261 bp, Macaca Mulatta
cctgacctttcccggctgcctcccctgccctcagaaggaaaggagaggggctcacttatcacgtgtgccatagtacctggtctcagaatcctaaaagctttcctctccaacaatgccttgctccacaaggtccgctttcctgggtcctgtgctgtgcctttccttgtctgcgtcctgctgcttctgtaactgcagaccccaggcccagcggcaagccctcggttcagctgcttctccattggaataaactcttgtttctct

SEQ ID NO: 23312 - DNA, 637 bp, Macaca Mulatta
  misc_feature (1)...(637): n = A,T,C or G
atcagaagcatacagtatgaatggtatctgcgacttgtcctagcacccctcttcagaagagatggtgggagcaccttcaaagatgtcacatggggtgcagtggctcataccttgtgaggttgaggctggaggaatgcttgagctcacgagttcaagactagcttggacaatatggcaaaaccccgtctttggaaaaaatatgaaaaaattagccaggcgtggtagcnnnnnnnnnnnnnnnnnnnaaggtgggaggatggcttgagccttgggtgtggaannnnnnnnnnnnnnnnnnnacaccactgaaatccagcctgggtaacagagccagaccttgtctcaaaacaaagaaagaaaaaagaacaatgccacatgagcaacagtgcttacatttcctgcttgcctatcactaaggttaactgctgatgtgctttttcttgtgtccaggtattatgctaggtgctgtagttgcctctgcagtcctgaaagaaaccttctgaaataaacattgccttgcttctcagatggggaacccagcctcagagaagttagacttgtctaaaacctcatggttagaaagtggctatgcagaatttgaactagcctgatgtcagagtgctctacccttccagta

SEQ ID NO: 23313 - DNA, 827 bp, Macaca Mulatta
  misc_feature (1)...(827): n = A,T,C or G
gacggacatcgtgcaagtgtgccacgacttcatcaaggctgcactggacatcagcatcaagtcggacgcctcagacgagcttgcggagtttgagatcggtgcctcgtccagcagcagcacggaagctctcatctcggccgtgatggccgggaggagcatctccccatggctggcacggcgaacgagtcctgccaattcttccggagactcggccatcgccagctgtcacgacggagggagcagctacggcaaagaggatcaggagcccaaggccgacggccccgatgacgtttcttcgcagtctctgtggcccggagacgtgggctacgggcctctgcgcatcaaggaagaacaggtttcaccgtctcagtacggagggagtgagctgccttctgccaaggacggggcagtgcagaacttctcggagcagagtgctggcgatgcctggcagcccacgggccgaaggaagaatcggaaaaacaaagagaccgtccggcacatcacacagcaggtggaagatgacagccgggccggctccccggtgccgtccttcctgccgacgtcggggtggccgttcagcagccgagactcaagtaagcctttcgcttgttacaggggctcagctgcccccgtgtgtccaggcctcacggctgtgtgctgtggcgatgcagtgacacatgtccaggctcacattggtggcttcctagggtcacttccttttacaggaaattgttgtgaccacagggaatgcagccaatgcatctcanaggccaggacatcgccagggtcctcggagacccagtgtatctgtcctcatcagcacggcc

SEQ ID NO: 23314 - DNA, 118 bp, Macaca Mulatta
tgttgagtatcctgctgtggcccctggtggtttatcatgagctgatccagaggatgtacactcgcctggagcccctgctcatgcagctggactacagcatgaaggcagaagccaatgc

SEQ ID NO: 23315 - DNA, 187 bp, Macaca Mulatta
gaacacgatgatgaacgcgttaatttccctcaaagaaagaaaaaaggccggggtcccttccggtggaaatatggtgaaggaaaccgtaggtctggaagaggcggttctggtattcggtcttcccgcctggaggaagatgatggagatgtggcaatgagtgatgcccaggatggtccccgagtacgat

SEQ ID NO: 23316 - DNA, 170 bp, Macaca Mulatta
ggttatcgtgcttttactgaagccagtgatggcagtctgtgtcttgctatggaatatggaggtgaaaagtctctaaatgacttaatagaagaacgatataaagccagccgagatccttttccagcagccataattttaaaagttgctttgaatatggcaagagggttaaa

SEQ ID NO: 23317 - DNA, 652 bp, Macaca Mulatta
  misc_feature (1)...(652): n = A,T,C or G
aggccagcgatctgtacgtgagacccaggaattatttccaaagcaagattcatatgctgaaggagaaacagacagaacctcaaacactaaacttgagtgttccagtttcagagaaaattgggattctgactgtgtgnnnnnnnnnnnnnnnnnnnnnnnnnnnnnnnnnnnnnnnnnnnnnnnnnnnnnnnnnnnnnnnnnnnnnnnnnnnnnnnnnnnnnnnnnnnnnnnnnnnnnnnnnnnnnnnnnnnnnnnnnnnnnnnnnnnnnnnnnnnnnnnnnnnnnnnnnnnnnnnnnnnnnnnnnnnnnnnnnnnnnnnnnnnnnnnnnnnnnnnnnnnnnnnnnnnnnnnnnnnnnnnnnnnnnnnnnnnnnnnnnnnnnnnnnnnnaggattcatactggggagaagccttttgaatgtggggagtgtggaaaatctttcagcatcagttctcagcttgccactcatcagagaatccatactggagagaagccctatgaatgtaaggtttgtagtaaagcgttcacccagaaggctcaccttgcacagcatcagaaaacccatacaggagagaaaccatatgagtgcaaggaatgcggtaaagccttcagccagaccacacacctcattcaacatcagagagttcacact

SEQ ID NO: 23318 - DNA, 1158 bp, Macaca Mulatta
  misc_feature (1)...(1158): n = A,T,C or G
gggaagcaagatggcggaggagccgcagtccatgttgcagcttcctccctcaagtgctgcgggaggggaaggacctacggaggtctccccagaaacaaccaccccggagcccccgtcttccgctgcagtttccccgggaacagaggaacctgctggcgacaccaagaaaaaaattgacattttgctaaaggctgtgggagatactcctattatgaaaacaaagaactgggcggtagagcgaactcgaaccatccaaggactcattgacttcgtcaaaaagtttctaaaacttgtggcctccgaacagttgtttatttatgtgaaacaatcctttgctccttccccaaaccaaaaagttggaaactctgtaagaatgtttttggcagtgatgcgcaaactgggttttacattaacctggcatttctcaaggcctcgtggggatgcaacctccagaggaaaaaatcacaccttgccttacctaaaccatgggaattttctccccaggaacaaaagaacaatccttccttaaaaaataattttttggacttcggcgtttggctgagacaaaaacaaagatctttttagaacaaggaaatggctgggaatcctttaaattatccacattaaatggatggcttgtatgtaaccaacccctagaataacatctgataaataggccccccgctcngagagtacaaaaaacacaaccaactccctccccccatttggagtacctaattcaggaaaaaaaaagggtgctgcccctttcacaaaaaacaaaaacaacaacgggcggacaatcactctttgcgggcaaaacttcaaacacgtgaccaaaccctacagaggaccgcaatgacactagagcatacagaccacaaacgggctcttccatgtcctaactatacggttaaaccacacgctcccattttaggggactagccctatcaacagattgtaacaataaccgcgagctcaaatttaggcgctcggtcgtcatatatttttgtacctctttcgccaaaaaacgtgttcgcggaacacaaaccacgaancccttaacacctacaccggccaataaaaaaccacatcatgtactctttagccacacttgtttatttacaaaagaaaagtaagcagaaagaatctggcatttcn

SEQ ID NO: 23319 - DNA, 410 bp, Macaca Mulatta
caagttttgggcttaaacttttttatcagataaatgaatatttatttttaaaagataatccattctttatatacataactcacctcctttagagagggtcatcaaacttcagcttagtatcgtgacatttggagtgtgtttctagattaaattccatctaaacttttggcaaatggagtgggaggcatctggtccaccagtattatccactctgttttaactgtccataccaggaactagcatcccattccctctgccttggtttccaggatcacttttccccttatgccagggctcagcctaattgtccagttaagaaacatattcttgacaactagagcaagtcatttgacaaaagaatcagatatgtgattaatcattataattgccctcatgagcaagaaacttgc

SEQ ID NO: 23320 - DNA, 543 bp, Macaca Mulatta
atatgcagcggatccttgggtgcaagaccaaatgcagagaaagcttacattagagagattccaaaaagaaaatcctggttttgacttcagtggagcagaaatctcaggaaactacactaaaggtggaccagatttctcaaaccttgagaaataactgcttttttttcctgaattctgtggatcctagcagatattgccaacttaatcagagaaacagattatgtaatggaagaaaaatgtggatgcctacagttaacagattgcaaaatatattttaaaatggttctaaaaattgcattcaaacatgatttacgtaggaaatgtactgtgggaactattctatggatacatggtaaagttgttttggacttgtttttgctcagcatgaagttttatatgctgcattttactaattccatatttaaccatatttttaatacaaaataacattagagtatagatcatgtgaaatgaagggtgcctttggggaaaattaactttttcttttgataagtatgatattcaataaagttttctaaatag

SEQ ID NO: 23321 - DNA, 599 bp, Macaca Mulatta
  misc_feature (1)...(599): n = A,T,C or G
ggctggagggaaaaacactcaggcagcccctgtgaagagtaagtatcacattgttagacttgaaagtatgtttgacagatggaaggaatttagaagagagtatttcccaacagcgaagtgacgttatatttaaatagaagcacaggtgtttttgtcatcaatcatctgaattcatttgagagttttataataattgaaaaatgacttcttgtgtttgtgtttataggcattcagctcagtgagtacttaccggaggtgaaagacctgctgcaagcagatcagcttggaagcttaaagtccaatccttacttcgagtttgttttgaaagcaaattatgaatattatgttcagggacaaatataactttttctaaaaatggccattgttgatgaaatttatataagtgtgtccttataaaaattttaggccataaacaagtataagtttgtacaatttcagaacatgtatagctgagtttttacactttatatgtaggaagctaatataaaatagttatgtaactgtgattttggttttcagttacgtgacttgttttttccacnnnnnnnnnnnnnnnnnnnnnnnnnnnnnnccntgtc

SEQ ID NO: 23322 - DNA, 264 bp, Macaca Mulatta
aggaagatcccagtgtctgagtgaactaacagtcctgctttcagccaccatttgcacaagacacccagcactgaaagtcctgctgccagggatcctttggaagcacccgccctttgtgccttgttgggggaaaccagtgacgcagaagcgaatgtggatacaccagagtttgcattggaaggaacgagtgtcacgtggggagggaaggggccagtggaccttttgtaagctttccactcaataaaacgaacctgtatggcaaat

SEQ ID NO: 23323 - DNA, 527 bp, Macaca Mulatta
gttaaagtcgatttcaaattaatttggggaaaacagtgaacaattggggaaaaacatcatcaaagactccgaacaggtggaaagatcaacttagcgttccctgcacccccttacagatgcctggactttggcctgtggatgagccccggggggctggggcagtaggggtttccactggacagacgtggggtagcaggaagtctcagccccagaggacttggcaggagccgccgtctcctctgagttctttccagtgggtgtgcgtcggtggctggcggggatctcccccaggaagtaggtctcagacaggctgtggaaagggagctgccccagggcccaggagggctggctctgcatcccgcatgttcccagagtgaaagagaatgagaaggagacacacgactactgttatgacctgggttgttggttggcaaatgcagcgtctaatacaaactttcttccatcccagaataccctctaccatctgctttggtcagggtgctgctcgaggattaaaagcaacaaga

SEQ ID NO: 23324 - DNA, 647 bp, Macaca Mulatta
ggtgggtgccctggctcctgtcgggctctgtcctgatctccttcatcatagcccttctgttgttttgggtgaactactctgcatatcaacaatttttaattagaacattttctgggaacatgacctacgagtggaatgcaatgacagaaatttactatttcccgttcgtgcaactggtcatctggtcaattccttgttctgtttttctggtctcaattatgctgctcattaattctctgaggaggcatacttggagaatgcagcacaacagccacagcctgcaggaccccagcacccaggctcacaccagagctctgaagttcctcatctccttcctcattctttatgttctgtcctttctgtccctgatcattgatgccacaaaatttatctccatgcagaacgacttttactggccatggcaaattgcagtctacctgagcgtgtctgtccatcccttcattctcatcttcaacaacctcaagcttcaaagtgtgttctggcaactcctgctgttggcaaggggcttctgggtggcctagatggcatggtctccttatctagacccccggaaaagaaaggtgaggatggcagagctgtggcccaccgacatggaggtgttttcataggtagatgaatactgggtc

SEQ ID NO: 23325 - DNA, 803 bp, Macaca Mulatta
  misc_feature (1)...(803): n = A,T,C or G
gtttatatgtgggggtgggggggggaaaatttccccaaaacgcgccctctattttttcctctgggcccccacggggtatttttccccttaggggaaaacccaggtttatggacccccatggtttccacctttaccccaaaaggggcccccgggcgcggccaaaaaggaattggtttttagaaagggttttttggaaaggcccgaaggccggcccaacnnnnnnnnnnnnnnnnnnnnnntttttttagnaccgggctaagaaaatttttatttggctcgggagtttcaaggaagttcacacacatgttcagccacgtacacacacacacttaacatgcacacacacagctaatactgcttaaggcatggcttctgggcacagagttctggggccagaattctgctttgggccttcctcattctatcatctcttgcactgcagtccagggtccagatagatttccgggatgcagcaccttcacacctccaggccaggacccttgcttagtcccagtgcctgcaccaggtcatctccgagcccactctttaacgtccgtctcaaagacttgcggttgccgcgggaacgcttgcgttccctagcagctaaggcacgaggactgctcttggtcactgactgcaccagaaggtccatgatctcatctgatgtatcactgggtaaactggagcctgggggttcttctgggggtacagtggagggccccactgtgggcatgactggggagctgctctggaccatgcctctgctgcggcgattgtgtgtggtgtcctcaggtctgctgacc

SEQ ID NO: 23326 - DNA, 2625 bp, Macaca Mulatta
  misc_feature (1)...(2625): n = A,T,C or G
atgagatgctctacccgagattattttgcagagcaggtttactggtctcctctcctcaataaagaattcaaagaaatggagaacaggaggaagaaacagctgctcagggatctctctggacttcagggcatgaacggaagtattcaggccaagtgtattcaagtcttaccctcacatgagcttgtgnnnnnnnnnnnnnnnnnnnnnnnnnnnnnnnnnnnnnnnnnnnnnnnnnnnnnnnnnnnnnnnnnnnnnnnnnnnnnnnnnnnnnnnnnnnnnnnnnnnnnnnnnnnnnnnnnnnnnnnnnnnnnnnnnnnnnnnnnnnnnnnnnnnnnnnnnnnnnnnnnnnnnnnnnnnnnnnnnnnnnnnnnnnnnnnnnnnnnnnnnnnnnnnnnnnnnaggtggactgtctgaatcccattaaccaccagagactgtgtgtgctcttcagcagctcttctgcccagtccagcaatgctcccagtgcctgtgtcagtccttgnnnnnnnnnnnnnnnnnnnnnnnnnnnnnnnnnnnnnnnnnnnnnnnnnnnnnnnnnnnnnnnnnnnnnnnnnnnnnnnnnnnnnnnnnnnnnnnnnnnnnnnnnnnnnnnnnnnnnnnnnnnnnnnnnnnnnnnnnnnnnnnnnnnnnnnnnnnnnnnnnnnnnnnnnnnnnnnnnnnnnnnnnnnnnnnnnnnnnnnnnnnnnnnnnnnnnnnnnnnnnnnnnnnnnnnnnnnnnnnnnnnnnnnnnnnnnnnnnnnnnnnnnnnnnnnnnnnnnnnnnnnnnnnnnnnnnnnnnnnnnnnnnnnnnnnnnnnnnnnnnnnnnnnnnnnnnnnnnnnnnnnnnnnnnnnnnnnnnnnnnnnnnnnnnnnnnnnnnnnnnnnnnnnnnnnnnnnnnnnnnnnnnnnnnnnnnnnnnnnnnnnnnnnnnnnnnnnnnnnnnnnnnnnnnnnnnnnnnnnnnnnnnnnnnnnnnnnnnnnnnnnnnnnnnnnnnnnnnnnnnnnnnnnnnnnnnnnnnnnnnnnnnnnnnnnnnnnnnnnnnnnnnnnnnnnnnnnnnnnnnnnnnnnnnnnnnnnnnnnnnnnnnnnnnnnnnnnnnnnnnnnnnnnnnnnnnnnnnnnnnnnnnnnnnnnnnnnnnnnnnnnnnnnnnnnnnnnnnnnnnnnnnnnnnnnnnnnnnnnnnnnnnnnnnnnnnnnnnnnnnnnnnnnnnnnnnnnnnnnnnnnnnnnnnnnnnnnnnnnnnnnnnnnnnnnnnnnnnnnnnnnnnnnnnnnnnnnnnnnnnnnnnnnnnnnnnnnnnnnnnnnnnnnnnnnnnnnnnnnnnnnnnnnnnnnnnnnnnnnnnnnnnnnnnnnnnnnnnnnnnnnnnnnnnnnnnnnnnnnnnnnnnnnnnnnnnnnnnnnnnnnnnnnnnnnnnnnnnnnnnnnnnnnnnnnnnnnnnnnnnnnnnnnnnnagaggatcgcttcttaacaactttgtccagccagagctccaccagttctactcatctccagttgcctacgccacctgaagtcatgtctgagcagtcagtaggagggccccctgagctagatacagccagcagttctgaannnnnnnnnnnnnnnnnnnnnnnnnnnnnnnnnnnnnnnnnnnnnnnnnnnnnnnnnnnnnnnnnnnnnnnnnnnnnnnnnnnnnnnnnnnnnnnnnnnnnnnnnnnnnnnnnnnnnnnnnnnnnnnnnnnnnnnnnnnnnnnnnnnnnnnnnnnnnnnnnnnnnnnnnnnnnnnnnnnnnnnnnnnnnnnnnnnnnnnnnnnnnnnnnnnnnnnnnnnnnnnnnnnnnnnnnnnnnnnnnnnnnnnnnnnnnnnnnnnnnnnnnnnnnnnnnnnnnnnnnnnnnnnnnnnnnnnnnnnnnnnnnnnnnnnnnnnnnnnnnnnnnnnnnnnnnnnnnnnnnnnnnnnnnnnnnnnnnnnnnnnnnnnnnnnnnnnnnnnnnnnnnnnnnnnnnnnnnnnnnnnnnnnnnnnnnnnnnnnnnnnnnnnnnnnnnnnnnnnnnnnnnnnnnnnnnnnnnnnnnnnnnnnnnnnnnnnnnnnnnnnnnnnnnnnnnnnnnnnnnnnnnnnnnnnnnnnnnnnnnnnnnnnnnnnnnnnnnnnnnnnnnnnnnnnnnnnnnnnnnnagatgaagtagatggaggagatacacaaaagaaacaactcataaatcctcatgtggaacttnnnnnnnnnnnnnnnnnnnnnnnnnnnnnnnnnnnnnnnnnnnnnnnnnnnnnnnnnnnnnnnnnnnnnnnnnnnnnnnnnnnnnnnnnnnnnnnnnnnnnnnnnnnnnnnnnnnnnnnnnnnnnnnnnnnnnnnnnnnnnnnnnnnnnnnnnnnnnnnnnnnnnnnnnnnnnnnnnnnnnnnnnnnnnnnnnnnnnnnnnnnnnnnnnnnnnnnnnnnnnnnnnnnnnnnnnnnnnnnnnnnnnnnnnnnnnnnnnnnnnnnnnnnnnnnnnnnnnnngaggcccacggcattggccaaaattcttggagtttacagaattggttataagaactctcagaacaacactgagaagaagttagatctccttgtcatggaaaatcttttctatgggagaaagatggcacaggt

SEQ ID NO: 23327 - DNA, 526 bp, Macaca Mulatta
tgcagaataaaacaggaggcatcatggttacttccattcagaaagccacaagccccaacaccaaagggacttggtcctaaaattcacatcctcctgccccactgacccctgtcagaccttcgtggaagttctgtccacggagtgcacatgtgggtgtctgaatctttgtgtatcatccagctccctttcttgcctggcaggtgctggatgtgtctggggcagacatgttggccaagtcaattgccaactgccaggtggagcttctggaaaactgtgggcactcggtagtgatggagagacccaggaagacagccaagctcataatcgactttttagcttctgtgcataacacagacaacaacaagaagctggactgaggccctgactgcagcctgcattctgcacacagcacccgctcccatcccccaagtctgacgcggccaccactctcagggatcctgccccaaatgcggtcggagcgccagtgaccctgaggaagccagttccttatccctggtatccacgg

SEQ ID NO: 23328 - DNA, 2180 bp, Macaca Mulatta
  misc_feature (1)...(2180): n = A,T,C or G
aggtgctctcccgttctctgctggctcccttcttgttcacatgaacctggagaaaatctggaatggaccccgagatcagttttctctcccacagaactttgctaatgtctgtctggctgctgcagtgacccagaccctctcctttccctttgagaccgtgaagagaaagatgcagnnnnnnnnnnnnnnnnnnnnnnnnnnnnnnnnnnnnnnnnnnnnnnnnnnnnnnnnnnnnnnnnnnnnnnnnnnnnnnnnnnnnnnnnnnnnnnnnnnnnnnnnnnnnnnnnnnnnnnnnnnnnnnnnnnnnnnnnnnnnnnnnnnnnnnnnnnnnnnnnnnnnnnnnnnnnnnnnnnnnnnnnnnnnnnnnnnnnnnnnnnnnnnnnnnnnnnnnnnnnnnnnnnnnnnnnnnnnnnnnnnnnnnnnnnnnnnnnnnnnnnnnnnnnnnnnnnnnnnnnnnnnnnnnnnnnnnnnnnnnnnnnnnnnnnnnnnnnnnnnnnnnnnnnnnnnnnnnnnnnnnnnnnnnnnnnnnnnnnnnnnnnnnnnnnnnnnnnnnnnnnnnnnnnnnnnnnnnnnnnnnnnnnnnnnnnnnnnnnnnnnnnnnnnnnnnnnnnnnnnnnnnnnnnnnnnnnnnnnnnnnnnnnnnnnnnnnnnnnnnnnnnnnnnnnnnnnnnnnnnnnnnnnnnnnnnnnnnnnnnnnnnnnnnnnnnnnnnnnnnnnnnnnnnnnnnnnnnnnnnnnnnnnnnnnnnnnnnnnnnnnnnnnnnnnnnnnnnnnactgactgacagcgtgttgcatcacagataaatgtagcctcataactgtacacctgaggagggatgagaagctactgttatctgctgctctgggaaatgagacggtttggccatgcaccacctcaaatctccaaactgatgtccctgtgaacacccgcaccatgagaaggtttcccaacaagagtgtatcatgatagcattccacgagattttataaccagagtctagcagtgacaaaatgtacaatttatgctctgaatagaaacgtgacaccaaagaaagggcattgccatgacatctcaaagcaacaggtaattgaagtggctgagtggataccacgttgtgaggtcagccactgggtcacttgtagtccatgcaaagcttgcacaaaccaacgtcagcctagtttcactcagtttgaccagagacttcccaatacannnnnnnnnnnnnnnnnnnnnnnagagatagggtcttgctctgtcacccaggctggagtacaatgacacaatcatagctcactgcagcctcgaactcctgggctcaagacatcctcctgcttcagcctcctgagagttgggaccataggtgcacaccaccacacctagctaattttnnnnnnnnnnnnnnnnnnnnnnnnnnnnnnnggtcttgctatgttgcccagactggtcttgaactcctgggctcatgcagtcctcctgccttggcctcccaaagccctaggattacagggtgtgagccactgcaccctgccccagtacaatctttcttgaactcaaatttttgctgacttctgagtacacacaccacagtgtaaattatgccttatcagaaactaaatggaaatagcaaacatttaaaagcgatcaccattgtagtagagtcatccttattttttgaaatttgaagcatcccaggcttataaatcttgtgtttcacaaagacagtttataccatgactgcttaattatccccccgaaaaactttctgatggaagtcatgtacagttcagtggcctaaattctctgcctttttaacttgctttgcaagcctaccctgaaaataaattatttagtcaagttattctcaaagatgtcccagttgcctagaaaggatcaaatggaacatttgacacacatacccaaaaaaatgtaactgactataaacactttaacctaatcatctgtatcaaacttcctaaaaatcaaatttcaggattgttccaccttagcgattctatgtaaagtttaaataacaatatttttcaaatagcacctatctatgcacttaaaaatgcattaatatccaacattaaattgttaatttatacacagacatacactcctacacagagattttcagtatgttgcaagtattttttctgattaaatgtattttccaaag

SEQ ID NO: 23329 - DNA, 581 bp, Macaca Mulatta
  misc_feature (1)...(581): n = A,T,C or G
ggaccaacttcctctagcgctcaggagcccggagggtcttctcccactcttaactccagtgtcagctggcatgggctccttcctgagtgcaaaggtcaagggccccctctgtgaaggctcagcagaggtgggatcccacaccccctcctggcccctccctgccctccattcagggagaaacctctccttcccgtgttagaagggccagagggtccaggcaccccgagtccagcgtgaagggccacagcccctcttggctgccaagcacccagatcccacggacatttgaggaaagggctccttgggttgccggtgaacttcctgtggacaccgcactcctgctcctgannnnnnnnnnnnnnnnnnnnnnnnnnnnnnntggcccttccagtcttataaattggtttccaaaaaatagtgccctgacttctgtctgccagatgaggagggaggccctgcctgttagggagggtggttactgtggatggaatagtggggtcttcaactgattagacaaggcctgcccacatcttggagggcatctgccttgctgattaaaatgtcaatgtaatctaatgcaa

SEQ ID NO: 23330 - DNA, 708 bp, Macaca Mulatta
tgtcgcgccctcccagccgggcttttgactttagtgactagccgccacccagcgctgtctcctgtctatctgggtctgctaacagactggggtcagcgtttgcactatgaccttcagaaaggcatttgggttggaactgagtcccaagatgtgccctgggaggagttgcacaataggtttcaaagcctctgtcaggcccctccacctctgaaagataaagttctaactgccctggagacctgtaaagcgcaggatggagatttcgaagtacctggtcttagcatctggacagatctcttattagctcttcggagtggtgcatttaggaaaagacaagttttgggtctcagcccaggcctcagttctgtataggcaatgctgtgttattattacttgagtatagaatatatagtttacaaaatgaaaattacaatgttctcaccaaatatatgccttcgtgtgtccaaagtgtaattattttagatgctaattttgaatagtttattaaacaattataaatgtgcaaagtaactggcatgtagtatcatggatttgctggatagaggaagtgattggaagtactcaaagccatggaattagcaatagtttgcttgttaatagaaggcccatttgtaagaatgttgaaaatatatgtaccgtttgaagaaaaaggagctttaaggtgacaaacgaaataccctttttctt

SEQ ID NO: 23331 - DNA, 2350 bp, Macaca Mulatta
  misc_feature (1)...(2350): n = A,T,C or G
ggaatgtagcaaacctcgagaagcctttggatttgaacaagctgtacgagagtatacacttcagagctttggagagatggcagataattttaagtctgattattttaatatgccagtccatnnnnnnnnnnnnnnnnnnnnnnnnnnnnnnnnnnnnnnnnnnnnnnnnnnnnnnnnnnnnnnnnnnnnnnnnnnnnnnnnnnnnnnnnnnnnnnnnnnnnnnnnnnnnnnnnnnnnnnnnnnnnnnnnnnnnnnnnnnnnnnnnnnnnnnnnnnnnnnnnnnnnnnnnnnnnnnnnnnnnnnnnnnnnnnnnnnnnnnnnnnnnnnnnnnnnnnnnnnnnnnnnnnnnnnnnnnnnnnnnnnnnnnnnnnnnnnnnnnnnnnnnnnnnnnnnnnnnnnnnnnnnnnnnnnnnnnnnnnnnnnnnnnnnnnnnnnnnnnnnnnnnnnnnnnnnnnnnnnnnnnnnnnnnnnnnnnnnnnnnnnnnnnnnnnnnnnnnnnnnnnnnnnnnnnnnnnnnnnnnnnnnnnnnnnnnnnnnnnnnnnnnnnnnnnnnnnnnnnnnnnnnnnnnnnnnnnnnnnnnnnnnnnnnnnnnnnnnnnnnnnnnnnnnnnnnnnnnnnnnnnnnnnnnnnnnnnnnnnnnnnnnnnnnnnnnnnnnnnnnnnnnnnnnnnnnnnnnnnnnnnnnnnnnnnnnnnnnnnnnnnnnnnnnnnnnnnnnnnnnnnnnnnnnnnnnnnnnnnnnnnnnnnnnnnnnnnnnnnnnnnnnnnnnnnnnnnnnnnnnnnnnnnnnnnnnnnnnnnnnnnnnnnnnnnnnnnnnnnnnnnnnnnnnnnnnnnnnnnnnnnnnnnnnnnnnnnnnnnnnnnnnnnnnnnnnnnnnnnnnnnnnnnnnnnnnnnnnnnnnnnnnnnnnnnnnnnnnnnnnnnnnnnnnnnnnnnnnnnnnnnnnnnnnnnnnnnnnnnnnnnnnnnnnnnnnnnnnnnnnnnnnnnnnnnnnnnnnnnnnnnnnnnnnnnnnnnnnnnnnnnnnnnnnnnnnnnnnnnnnnnnnnnnnnnnnnnnnnnnnnnnnnnnnnnnnnnnnnnnnnnnnnnnnnnnnnnnnnnnnnnnnnnnnnnnnnnnnnnnnnnnnnnnnnnnnnnnnnnnnnnnnnnnnnnnnnnnnnnnnnnnnnnnnnnnnnnnnnnnnnnnnnnnnnnnnnnnnnnnnnnnnnnnnnnnnnnnnnnnnnnnnnnnnnnnnnnnnnnnnnnnnnnnnnnnnnnnnnnnnnnnnnnnnnnnnnnnnnnnnnnnnnnnnnnnnnnnnnnnnnnnnnnnnnnnnnnnnnnnnnnnnnnnnnnnnnnnnnnnnnnnnnnnnnnnnnnnnnnnnnnnnnnnnnnnnnnnnnnnnnnnnnnnnnnnnnnnnnnnnnnnnnnnnnnnnnnnnnnnnnnnnnnnnnnnnnnnnnnnnnnnnnnnnnnnnnnnnnnnnnnnnnnnnnnnnnnnnnnnnnnnnnnnnnnnnnnnnnnnnnnnnnnnnnnnnnnnnnnnnnnnnnnnnnnnnnnnnnnnnnnnnnnnnnnnnnnnnnnnnnnnnnnnnnnnnnnnnnnnnnnnnnnnnnnnnnnnnnnnnnnnnnnnnnnnnnnnnnnnnnnnnnnnnnnnnnnnnnnnnnnnnnnnnnnnnnnnnnnnnnnnnnnnnnnnnnnnnnnnnnnnnnnnnnnnnnnnnnnnnnnnnnnnnnnnnnnnnnnnnnnnnnnnnnnnnnnnnnnnnnnnnnnnnnnnnnnnnnnnnnnnnnnnnnnnnnnnnnnnnnnnnnnnnnnnnnnnnnnnnnnnnnnnnnnnnnnnnnnnnnnnnnnnnnnnnnnnnnnnnnnnnnnnnnnnnnnnnnnnnnnnnnnnnnnnnnnnnnnnnnnnnnnnnnnnnnnnnnnnnnnnnnnnnnnnnnnnnnnnnnnnnnnnnnnnnnnnnnnnnnnnnnnnnnnnnnnnnnnnnnnnnnnnnnnnnnnnnnnnnnnnnnnnnnnnnnnnnnnnnnnnnnnnnnnnnnnnnnnnnnnnnnnnnnnnnnnnnnnnnnnnnnnnnnnnnnnnnnnnnnnnnnnnnnnnnnnnnnnnnnnnnnnnnnnnnnnnnnnnnnnnnnnnnnnnnnnnnnnnnnnnnnnnnnnnnnnnnnnnnnnnnnnnnnnnnnnnnnnnnnnnnnnnnnnnnnnnnnnnnnnnnnaggtgctgagcccccggactgacattggtgtatatgggagnnnnnnnnnnnnnnnnnnnnnnnnnnnnnnnnnnnnnnnnnnnnnnnnnnnnnnnatctggacctcgagcctctgagtgatctggaggagggattggaggaaaccagagatacagctgtggtgg

SEQ ID NO: 23332 - DNA, 1548 bp, Macaca Mulatta
  misc_feature (1)...(1548): n = A,T,C or G
aggtcaagacaaaacttgagccaaattcttcggaaaacacagtgactaaaaagcagtaaggtacttcattgatgaagtctcataatcaagaaatcaccgttttctcgagttctcatcttccccatcccagcaggcatcaagaaatctggtctatcctagagaatgtttggattacaatatatcagaacannnnnnnnnnnnnnnnnnnnnnnnnnnnnnnnnnnnnnnnnnnnnnnnnnnnnnnnnnnnnnnnnnnnnnnnnnnnnnnnnnnnnnnnnnnnnnnnnnnnnnnnnnnnnnnnnnnnnnnnnnnnnnnnnnnnnnnnnnnnnnnnnnnnnnnnnnnnnnnnnnnnnnnnnnnnnnnnnnnnnnnnnnnnnnnnnnnnnnnnnnnnnnnnnnnnnnnnnnnnnnnnnnnnnnnnnnnnnnnnnnnnnnnnnnnnnnnnnnnnnnnnnnnnnnnnnnnnnnnnnnnnnnnnnnnnnnnnnnnnnnnnnnnnnnnnnnnnnnnnnnnnnnnnnnnnnnnnnnnnnnnnnnnnnnnnnnnnnnnnnnnnnnnnnnnnnnnnnnnnnnnnnnnnnnnnnnnnnnnnnnnnnnnnnnnnnnnnnnnnnnnnnnnnnnnnnnnnnnnnnnnnnnnnnnnnnnnnnnnnnnnnnnnnnnnnnnnnnnnnnnnnnnnnnnnnnnnnnnnnnnnnnnnnnnnnnnnnnnnnnnnnnnnnnnnnnnnnnnnnnnnnnnnnnnnnnnnnnnnnnnnnnnnnnnnnnnnnnnnnnnnnnnnnnnnnnnnnnnnntcttctggagttcgcaatgcctccctacctctactcttgatagtgagccagtatctctaaggaaaggagagacgtatttttagtcatcctagggcaagagccactgtggcacctgaggaagacccagagtacagtattagcatttctgtcaaacctaggtatgggcatgtgaccagagacactgccaaaccctaagaaatcattaggacgtgatcatgctcactgtattccacaaatgaaatcttactgtgggccgttttttgtgatcaaactgtcatccatgttgacctggtgaaaataacaccctccttcacctccctcaaggtattgaaatagaaatttgacttaagctcctacttccttatacagcctttccttctgtgggcttgtcacttttcagtgcatttctagtggggaagagcagggtgacccctctgctgagtttctccttaaatgtgaagcataatagatttatgtaatagaatttggtggcagtgactgatatttgcctctagctaaaaccaactgttaagttgactttttagttatgggataagttggaaatccttgtttactggaatatattatgcttttgttaacacattagattaaatcgaatttggtattctattataaatgtttattttttaaagcaataaataacttatttttggtaagatttggctttttacttccaaattgtttctgatatgtatgtaaggtgtgattataaaagtgactctctccaataaaagagaa

SEQ ID NO: 23333 - DNA, 672 bp, Macaca Mulatta
  misc_feature (1)...(672): n = A,T,C or G
cttagtnnnnnnnnnnnnnnnnnnacaggtgccacacgcctggctgatttttctatttttggtagagatgagattttgccgtgttggttaggatggtctcggtctcttggccttgtgatccnnnnnnnnnnnnnnnnnnnnnnnnnnnncnnnnnnnnnnnnnnnnnngtgcccagccaggaattttttttctatcagttcaaaagatgaagatcaagctcagaaaaacattttttaataatctcaagtaccagtttattaatatatacattgagagaaatctgactgtctcagactggtgtggttgagcatcctnnnnnnnnnnnnnnnnnnnnnnngaccgtgtctcaaaaataatagaattttaaaagactaatgtcctttattctttgccacagtatgtaattctagaatttgcaccccaccaaagaatagtattttcttgtacagttattcttgcaatatggtgtttattctgtgcatttgtcttcatgtactatctttttcattatacctctgctttttcattgtacctttctgctttgactgaatgccatttaaagaaatcnnnnnnnnnnnnnnnnnnnnnnnngagtaagacagtaactcttatgtatcagttgaagggaataggattccctttattcataatacttcttttccattcatttt

SEQ ID NO: 23334 - DNA, 411 bp, Macaca Mulatta
  misc_feature (1)...(411): n = A,T,C or G
gggatagatttggctgtctccgctcgtagctgcttttggcgcgaaagatgccgggtctggtcgactcaaaccctgccccgcctgagcctcaggagaagaagccgctgaagccttgctgcgcttgtccggagaccaagaaggcgcgcgatgcgtgtatcatcgagaaaggagaagaacactgtggacatctaattgaggcccacaaggaatgtatgagagctctgggatttaaaatatgaaatggtggtctgctgtgtgaataaataattcctgaagaatgaagaagattaattttgggagttctttgatgaactttgatatgtggaaaaagtatttatnnnnnnnnnnnnnnnnnnngtaaaatattactagcntnnnnnannnnnnnnnnnnnnnnnnnnnnnncttgtc

SEQ ID NO: 23335 - DNA, 173 bp, Macaca Mulatta
  misc_feature (1)...(173): n = A,T,C or G
caaggctgaacggagggtgttggaagaggagctgacggttcacctctctgttcctggggacactatcctcatcaacaaccgcccaggtcctagagagccacccccctaccaggagccccggcctcgtgggaatccgccccactccgctccctgtgtccccaatggctctggtn

SEQ ID NO: 23336 - DNA, 1305 bp, Macaca Mulatta
ggcactatatatttgttcaagggtaaatctataaaatatatatactttattttgtggttttgctatttataaatttaatgttttaactgttgctcttttatggtttgttttgggtggtggtgttcatctgtatatcaccatgttaatttgtaatataagtgcacttcatagtatatattgttactgatattaaaatactttatagcatttgcctctgagcaaaagctagtatttaattgtacaaatgaataagcaagttacatgttattgtttgctcttgaaagggtaggcctcttaaaaggaaaaaatacaacttgttttttccttatcccctatgccaaacacataccttccatgcatgacatgagatctgcaaactgaattttagccactgtatttatttagtcaaaaaaattgtccattgtagcagacctgagaacctttttgctgtgacatggaaccatgttattcttatcttctaaaaacacagcctgggatggaacgaccatggcatttttttcagagaacatcctttatctgctatgactgaatctttaggacataaccctttgattttcaagaactaccgaataagtgtatgaagaggttgtttgtttttaaagcctcaagttggaattttttatgagggtcactgtgtaaatttgaagggattgtattgagatggtttatggatataaaatttccctttttaaggactgataaatagaatgaaaagtttccaggtagtttaaaactccacaggtcagtttccttttcattcctgcttcactgtggtttgtaagcctacgggagagcaccattgctcagatgctgctgtgagcttcctgtcaggtgttagaaagtaactagttaaaagatcattttagaatatatggtttttggggatgaactaagaattagttattagttccaaaggactgagaaccaattttaatattttcacatttataggaaagaaattcatatgtccctgaaacttctaagacaaaaccaaacaagaagggaactgttgcaaagccatttcatcgagaaagggacagaaggagaaatacacacatgtatacacaaacagaatggttgagaaaacgttttaatagaatgtgagggttgtatgtatgtgtgtatatatttacactttaactctaaaattctctttctcagtacctcatttattgatataatgggaaaagcaccccttttggcgcgtgagaatatttgtttaaaaaaaatttgagaaaaatggaaattttgtgaggccctggataatttccaggtcaacacctt

SEQ ID NO: 23337 - DNA, 776 bp, Macaca Mulatta
  misc_feature (1)...(776): n = A,T,C or G
ggatactgaaggaaaacacnnnnnnnnnnnnnnnnnnnnnnnnnnnnnnnntctatctcaatcctaatttctcctcccttccttttccctgcttccaggaaactccacatctgccttaaaaccaaagagggcttcctctagaagccaagggaaaggggtgctcttatagaggctagcttctgcttttctgccctggctgctgcccccaccccggggaccccgtgacatggtgcctgagaggcaggcatggaggcttctccgccagcctcctctggacagcaggctcactgccaggccagcctcccagagggagagagagaaagagagaggacggcttgagctgggcccctgggcttggcctcccgtgattccactacacctggttgaggttcctctgcctgccccacccccagtccccacccctgcccccagccccggggttaagccattctcccaagtaccagctgcgctggcgttttcggatttagattaaagaaaagaagggaatgaagggggaagggggagaacggaaaaaagaagggaagtttaaacggccttgcccaaacgttaggaacctggggagcggcccaaaagagaaaagaagaggggagaaaagcagaaaagggcacacaagagaagaacaaacaaaggagaacggccgacannnnnnnnnnnnnnnnnnncaaaagaggagagagagacgggagggaggaagaaaggaagtagaaaaagggaaggaaaaagggaaaaggaagacagcggacgggagaaagaaa

SEQ ID NO: 23338 - DNA, 674 bp, Macaca Mulatta
tgttgtgcaatgcaggcatcatcagagctctccagaaaagactccgggagcctgagaaacagcccaagattcggcgggcccaggcactggtcaccgtggtggtggtgctgtttactctatgctttctgccctgcttcctgaccagagtcctgatgcacatcttccagaatctggggagcttcagggccctgtgcgcagtggctcatacctcggaagtcacgggcagcctcacctacctgcacagtgtgctcaaccccgttgtgtactgcttctccagccccaccttcaggagctcctatcggagggtcttccacaccctccgaggcaaagggcaggcagcagagcccccaggtttcaaccccagagactcctattcctgacaacagccagcgtcctcaacgcccgtgtttatgaaactacctgagacctaaatcataatcacccctactttgggattctggaagaagaggaaatcttgagactgcaatacaaggatcagagcataaacatgggcacagttgctgcaggtgtggtcttatactttgttgaccgggatggtcctctgtgattttaccttgtagagtgacaaatcaaaatgaacaagccagaacctcctcctacccaactatgtgcagatgcagtcgctgaactgaaaagtcgggcagctactgcat

SEQ ID NO: 23339 - DNA, 423 bp, Macaca Mulatta
aataaatacatagtcattataaaaaaagagaaaaagaagagtgaatgtgtcagcttcacatcttaaaagtttctcctgtttgtgtctgtgtaaataggtgcagacactaaggatagtgaggatggaggttgggatgaggaaagggttcatcagaattcacatgtctgaattcagaaggagcccttctgaagcaaacagttgtaaaatcactgcaaggtttttattaataagagacatgtatatgattttcagtctatagcatctttgttaacatctgcctgttgcaggaaatgtaaaagttacttaacactacaagaattttaacaatagttgctctatttttgaatatgtattaaatatggagttcatatacctgctaatatcaacgatggtgctcttactattaggtcattgcattttggt

SEQ ID NO: 23340 - DNA, 1743 bp, Macaca Mulatta
  misc_feature (1)...(1743): n = A,T,C or G
ggtgttttggatgaaaaatctcaaattcaggagccatgttgttcagacctcttcctgtttcctgatgagagtgggaatgtatcccaggagcccggccccaactatgcctcattctctcaccatttcatcagtgatgcaatgacaggcatacctactgagaatgatgacttttgcattctttttgcaccaaaagcagccatgcaggnaggagaaggaagaggaaccagttataaaaatcatggttgatgatgcaattgtgataagagacaattatttcagtctgcctgttaagaagaccgatacgagcaaagcccccttacactttcccattcctgtggttcgctatgtggtgaaggaggtctctcttgtctggcatctttatggaggaaaggattttggaacagtccctcccacttctccggctaaaagttatatntagtccgcacagttcgccttctcacacacccacaagacatggacgtaatacagtatgtgggggaaagggaagaaaccatgactttttaatggaaatacagctcagcaaggtnaaggtgaagtttcagcatgaagtctaccccccatgcaaacctgactgtgattccagcctctcggaacacccagtctcccggcaggtgttcattgttcaggatcttgagattcgagatcgtttggcaacatcacaaatgaataaatttttatacctgtattgtagtaaagaaatgcctcgaaaagctcactccaacatgnttgacagtgaaagccttacatgtgtgtccagaatctggcaggtccccacaggagtgctgcttgagagtgtcgctgatgccgctccgcctcaatattgaccaggnaggatgccttgtctttcctgaaggatttcttcacaagtctttctacagaagtagagcttcaaaatgactcccagatccagaagnagttaaaaagtctcctggagctgatgtcacctgcagtttgccaaggcatttgagtacctcaaaggagccaaatctagttatttctttccctgggccaaaacaaccttcccagaatgatagtgccaattcagtggaagtggtgaatggcacggaagagaagaacttctctgctgaagaagcatcttttagggatcagcctgtgttttttagnagagaatttagattcacgtcagaagttcccattcgacttgattatcatggcaaacatgtatcaatggatcaggnagggtacgctagctgggattttgattggtctggctcagttaaactgctctgaactaaagctcaagaggctttcctatcgacatggngtttactaggtgttgacaaattattctcatatgcaatcactgagtggcttaatgacattaagaagaaccagctgcctggaatcctgggaggtgttgggccttatgcattcactnnnnnnnnnnnnnnnaggcctaaaggactttgggtctggctcccaatagagcagtaccggaaggacggccgcattgtcagagggtttcagagaggcgctgcttcctttggtacctcgacagcaatggctgctctagaactcacaaacagaatggttcaaaccatacaggncaggcagctgcagagactgcttatgatatggtgtctcctggtaccctttctatcgagcccaagaagaccaaaaggtttcctcatcaccggttagcccaccagccagtagacctgagggaaggtgtggccaaggcctacagtgttgtgaaagagg

SEQ ID NO: 23341 - DNA, 777 bp, Macaca Mulatta
ggggcctccggaactaaacggggtgaggtgacattcggttatctctaacgttggaaaacgatggcgctaacacccattatggagattaaccacttttcatcgggtttttaactctaagtcttgaggaatacaacggtgaatgcaagattcattttattttcatcaccatggggcgtaccctgttgttgagttctctgggtcagacctctacagacttctcagatggatcctaggtctctgggcttgccgtgaaattactcgctgctcagggagagagttgaaatggtggcatcctccccctctgttgttccggctgtgtcccctaactctgttgctccggctgtgtcccctatctctgttgctccggctgtgtccctcactctgttgctctggctgcagctcattctgttggagctcctcattcagctggtcactgtggtcagagggtgttggcctgctcccttcctcaagtcttcttaaagccacgtatttttgtggagcatttttcttcctggctctcctcaagttgttttcctttcttcgctgtcttgggagtcttcttcgtgcttccggacgtcggttgagagaaggacttcttcttccttgtcttgttggtgttggctggtggttgctcttcaacaactgtaacggaagctctcaatttttctcttcatcttcaacaagtcaatctatctcaaggaatctcacgttggcaaccattctttaacaaaagggccattggggccctggaagttcccagtttcccagttgtcctgg

SEQ ID NO: 23342 - DNA, 244 bp, Macaca Mulatta
gcagagggtgggcaagatggggagcaggcacccccactgcccatcaaagctcccctcccatctgctagcacgtctctagcccccactactgaccccgaagccccagggccactgccctcactgcctctagagccatcgctattgtctggagtggtgcaggccctgcgaggccgtctcctgcccagcctggggcccccaggaccaacccggagccccgctggaccccacacaggaggcctggccc

SEQ ID NO: 23343 - DNA, 76 bp, Macaca Mulatta
caggtttctgaaggattgtcattcttgcatagcagtgtgaaaatggtacatggaaatattactcctgaaaatataa

SEQ ID NO: 23344 - DNA, 937 bp, Macaca Mulatta
gggattccagcggcggacagcacccgggccgagatgtctcgctcagtggccttagccgtgctggcgctactctctctttctggcctggaggctatccagcgtactccaaagattcaggtttactcacgccatccaccagagaatggaaagccaaatttcctgaattgctatgtgtccggatttcatccatctgatattgaagttgacttactgaacaatggagagaaaatgggaaaagtggagcattcagacttgtccttcagcaaagactggtctttctatctcttgtactacactgttttcatcccccatgaaaaagatgaggtatgcctgccgaggtgaaccatgctgactttgtcagggacccaggatagtttaaatggggaacgagtacatgtaaagcagcctcagggaaggtatgcaacatagcggcacttcgagattgcgaggaaagaaaagaggtcaggggggctcttgcattgggggggggttgcataatgctaatgtaatgctaaatgggcatgtagatgtcaccacctgataaataaagtggttataactaaagctgatagaactatccgtatcaaaatgttgctgcgttatgaagttggctcatcctcccacctttgtagaagggaataatggggacaaccttcgccttatcaaagaagggactaggaataaccctttacgaaaggtggggagtaagcaggagaggcaggggtgaggtgaggcgggggggggggtgcaacacaccttgggatttataatttctataacctacccaccaagtaactccacaagaacgaggtcgctagaatacctagggtgagaggctcaggctcttagtcggaaatcgaaggacactatggtagattacgggatggttgcgaagatagtaggggtgccaatagtttcatgatcttttgactggtgg

SEQ ID NO: 23345 - DNA, 2238 bp, Macaca Mulatta
  misc_feature (1)...(2238): n = A,T,C or G
aggctgcatggtgtatgaaaagctcggggaacaagtctttggcaccaccgggaagttcgtaatctttggagccacctctctacagaacactggannnnnnnnnnnnnnnnnnnnnnnnnnnnnnnnnnnnnnnnnnnnnnnnnnnnnnnnnnnnnnnnnnnnnnnnnnnnnnnnnnnnnnnnnnnnnnnnnnnnnnnnnnnnnnnnnnnnnnnnnnnnnnnnnnnnnnnnnnnnnnnnnnnnnnnnnnnnnnnnnnnnnnnnnnnnnnnnnnnnnnnnnnnnnnnnnnnnnnnnnnnnnnnnnnnnnnnnnnnnnnnnnnnnnnnnnnnnnnnnnnnnnnnnnnnnnnnnnnnnnnnnnnnnnnnnnnnnnnnnnnnnnnnnnnnnnnnnnnnnnnnnnnnnnnnnnnnnnnnnnnnnnnnnnnnnnnnnnnnnnnnnnnnnnnnnnnnnnnnnnnnnnnnnnnnnnnnnnnnnnnnnnnnnnnnnnnnnnnnnnnnnnnnnnnnnnnnnnnnnnnnnnnnnnnnnnnnnnngcagatggtttcaaacatctcctttttcgccatgtttgttatgtacttcctgactgccatttttggctacttgacattctatgacaacgtgcagtcagacctccttcacaagtatcagagtaaagatgacattcttatcctgacagtgcggctggctgtcattgttgctgtgatcctcacagtgccggtgttatttttcacggtngttcgttcatctttatttgaactggctaagaaaacaaagtttaatttatgtcgtcatatcgtggttacctgcatactcttggttgttannnnnnnnnnnnnnnnnnnnnnnnnnnnnnnnnnnnnnnnnnnnnnnnnnnnnnnnnnnnnnnnnnnnnnnnnnnnnnnnnnnnnnnnnnnnnnnnnnnnnnnnnnnnnnnnnnnnnnnnnnnnnnnnnnnnnnnnnnnnnnnnnnnggctgcccttttcttgggcctgggggtgttgttctccttggtcagcattcccttggtcatctatgactgggcctgctcatcgagtggcgacgaaggccactgagacccgccaagaaaaagaaacagccctgttgtctactcagtcaagtccccacacatcagcaatctctcaccacttattctgcaagtttacagaagcaaacagaaatgtacagaatacttannnnnnnnnnnnnnnnnnnnnnnnnnnnnnnnnnnnnnnnnnnnnnnnnnnnnnnnnnnnnnnnnnnnnnnnnnnnnnnnnnnnnnnnnnnnnnnnnnnnnnnnnttcatacaatcatatttcccagtacttttcgcagtcattttttacccgtctaactctatgttttgtggcttcccagtctcttagaactttggaaacatgatatgcaatcatgtttatttattatacatccagattctgaaataattttcctactgatgttcagctcacactatctgtacctttttagaagagaaaagaatcttgaattgtatatatttattttgctttacagaaaaaaaatggtttcgtaaataatttgcctattttggttaacatagcacacagagataatgatctgaaagttatagggcactgccactgctgaatcagagcatgcccaatatttgaggtggctctgatcacctggcagctgagctcgggtagtccagtggactagctggtaccacatccattcccatccagagacattctctggcaagtgttctcagctgaaaagtcattggggatgattcttaccttggtaattaaatgaagctacacatttgggtaatctagcaaatgaagtattgtttccctcttggcaacttgtgtcagagttactctggtctgagtcaactttcgcngggaaaacctatagaacctactgcaaaatgattgtccaaaatgcctaagaaaatactactctgatgcatttagccttcaaccctgtctcgctgaagggagaaaaatgttttagtacattacaggcccagcagcttttattcatgtccaccagctagttgcacagagaatcatgtgtacctaagtaaggatgatctaggataagtaactcctgttttatattgagtactttagggaagtctttaaaagacttgttttatatctataaatctaggttattacaaatacaagatttttgtaccttaaataagcctcatttccatttcttcttcattaattctccatctagtcttgtg

SEQ ID NO: 23346 - DNA, 564 bp, Macaca Mulatta
cagattggtgttctgaacaccagatgtgccctctgtaactgtggcaaggagtgcaattcttacacagagttcaaagcccatctgaccagccacatccataaccatcttcctacccagggccatagcggcagccatgggccaagtcacagcaaagaaaggaagtggaagtgctcaatgtgcccgcaagcttttatctctccttccaaacttcatgtccactttatgggtcacatgggtatgaagccccacaagtgtgatttctgtagcaaggcttttagtgatcccagcaatctgcggacccacctcaagatacatacaggtcagaagaactacaggtgtactttgtgtgacaagtctttcacccagaaggctcacctggagtcccacatggttatccacactggggagaagaatcttaagtgtgattactgtgacaagttgtatatgcggaggcaggacctcaagcagcatgtgctcatccacactcaagaacgccagatcaagtgtcccaagtgtgataagctagtacttgagaacaaatcacttaaagaagcatctcaattc

SEQ ID NO: 23347 - DNA, 2184 bp, Macaca Mulatta
  misc_feature (1)...(2184): n = A,T,C or G
cctgatcccggactctgtacagcaatacatgagttcttcctctagaaaaccaagctttctctggctgttagaaaggaggctaaagaggccaagaacccaaggtgttgtgtttgaatctcctgaggaaagtgctgatcaatctcaagctgacagagactcgaagaagacccagaaagagaaactttctccctggcctgcataccttgaaaagcagccttcccaccatcctttgcggaccaagaagcagttgttcccagacctctatagcaaagaatggaatgaggcagtgcctttctgtgagtcccaaaagagggtgactatgttaactgccccattgggattttcagtgcccttaaggtctacagatgaagagtttctctctctaaaaaccagggaggaaattggtttagggtcccccttggtacccttgggagatgatgatggaggtccagaagccacagagaatcagagtgcctggatgggccatggttctcccccgtcccacagcagcaagggcacccctcatcttgctagtgaattcagggatctagcactcaaataccttctgactccagtgaacttattccaggcagggtattcttccaggagctttgaccagcaagtggaaaaataccataaaccctgctgaagacagagtacagaaggacaacgttgagcccacactgccatttggaagatagtaactgatggctggtgggaaagagtttgttttgggggcctgcttttctatctttacaagactcttacgggcccactgtggagnnnnnnnnnnnnnnnnnnnnnnnnnnnnnnnnnnnnnnnnnnnnnnnnnnnnnnnnnnnnnnnnnnnnnnnnnnnnnnnnnnnnnnnnnnnnnnnnnnnnnnnnnnnnnnnnnnnnnnnnnnnnnnnnnnnnnnnnnnnnnnnnnnnnnnnnnnnnnnnnnnnnnnnnnnnnnnnnnnnnnnnnnnnnnnnnnnnnnnnnnnnnnnnnnnnnnnnnnnnnnnnnnnnnnnnnnnnnnnnnnnnnnnnnnnnnnnnnnnnnnnnnnnnnnnnnnnnnnnnnnnnnnnnnnnnnnnnnnnnnnnnnnnnnnnnnnnnnnnnnnnnnnnnnnnnnnnnnnnnnnnnnnnnnnnnnnnnnnnnnnnnnnnnnnnnnnnnnnnnnnnnnnnnnnnnnnnnnnnnnnnnnnnnnnnnnnnnnnnnnnnnnnnnnnnnnnnnnnnnnnnnnnnnnnnnnnnnnnnnnnnnnnnnnnnnnnnnnnnnnnnnnnnnnnnnnnnnnnnnnnnnnnnnnnnnnnnnnnnnnnnnnnnnnnnnnnnnnnnnnnnnnnnnnnnnnnnnnnnnnnnnnnnnnnnnnnnnnnnnnngcagtacctagaacccagctgacagcaaaggctttgggtgtgatggactcccaggcctggaggccctatttgactgaagcagagttacaaaagatcaaatgtgttgtcagatattcctccaattgttcacatagctgggatatttgttgctccccccaccccttggattgagtagggagccagagcacacagcctgtttgttttagtatccaaggaagagaccaaggagccagctggctggaaggggtggggtgtacagtctgccctgtccttctgctcataacctgacaaaatgccaaactagtaagcaggatagctgataccacggctagagggaataggctctgagaggccacagacttgtggagctgggcatctggatcaaaactgcttcgggatggaacctctagccctatcaatgaaaaaggttccgtttcttgtccaggggatttaaaagagttttctgctttgagagagaaatacagagtttagaaagcagttgctcttgggaaagctgtacacagctctgttttgtcagtgacctttgttgtaagtaccagtgttctgttaggagccacagcaggtgaggcatttggtgcagcaggaaacatgggcactgcctaggctcaaatctgtgtaaccctgagaaattgcttaaattgtggagcctagttcctcatctgtaaaatggatttgggatgcctacctctcatgattactttggagatcaaataattggtaaaattcccctaggtcaatgtctgccacaggatgggtctttcagatgttggtttactttagcttctggttcgagaaagaa

SEQ ID NO: 23348 - DNA, 3352 bp, Macaca Mulatta
  misc_feature (1)...(3352): n = A,T,C or G
attctcagagagagttcaacagcaggccaggtacaggatacgtacctgtggagttttggaagaaaacagnagaagaagctgtgaataaggtgaaaattcaggccatgtcagaagtacagaaggctgtcgctgaggcagagcagaaagcctttgaagtaattgcaacagagagagcacgaatggagcaaaccatagcggacgtcaagcggcaggccgcggaggacgctttcctcgtcatcaacgagcaagaggagtccacggannnnnnnnnnnnnnnnnnnnnnnnnnnnnnnnnnnnnnnnnnnnnnnnnnnnnnnnnnnnnnnnnnnnnnnnnnnnnnnnnnnnnnnnnnnnnnnnnnnnnnnnnnnnnnnnnnnnnnnnnnnnnnnnnnnnnnnnnnnnnnnnnnnnnnnnnnnnnnnnnnnnnnnnnnnnnnnnnnnnnnnnnnnnnnnnnnnnnnnnnnnnnnnnnnnnnnnnnnnnnnnnnnnnnnnnnnnnnnnnnnnnnnnnnnnnnnnnnnnnnnnnnnnnnnnnnnnnnnnnnnnnnnnnnnnnnnnnnnnnnnnnnnnnnnnnnnnnnnnnnnnnnnnnnnnnnnnnnnnnnnnnnnnnnnnnnnnnnnnnnnnnnnnnnnnnnnnnnnnnnnnnnnnnnnnnnnnnnnnnnnnnnnnnnnnnnnnnnnnnnnnnnnnnnnnnnnnnnnnnnnnnnnnnnnnnnnnnnnnnnnnnnnnnnnnnnnnnnnnnnnnnnnnnnnnnnnnnnnnnnnnnnnnnnnnnnnnnnnnnnnnnnnnnnnnnnnnnnnnnnnnnnnnnnnnnnnnnnnnnnnnnnnnnnnnnnnnnnnnnnnnnnnnnnnnnnnnnnnnnnnnnnnnnnnnnnnnnnnnnnnnnnnnnnnnnnnnnnnnnnnnnnnnnnnnnnnnnnnnnnnnnnnnnnnnnnnnnnnnnnnnnnnnnnnnnnnnnnnnnnnnnnnnnnnnnnnnnnnnnnnnnnnnnnnnnnnnnnnnnnnnnnnnnnnnnnnnnnnnnnnnnnnnnnnnnnnnnnnnnnnnnnnnnnnnnnnnnnnnnnnnnnnnnnnnnnnnnnnnnnnnnnnnnnnnnnnnnnnnnnnnnnnnnnnnnnnnnnnnnnnnnnnnnnnnnnnnnnnnnnnnnnnnnnnnnnnnnnnnnnnnnnnnnnnnnnnnnnnnnnnnnnnnnnnnnnnnnnnnnnnnnnnnnnnnnnnnnnnnnnnnnnnnnnnnnnnnnnnnnnnnnnnnnnnnnnnnnnnnnnnnnnnnnnnnnnnnnnnnnnnnnnnnnnnnnnnnnnnnnnnnnnnnnnnnnnnnnnnnnnnnnnnnnnnnnnnnnnnnnnnnnnnnnnnnnnnnnnnnnnnnnnnnnnnnnnnnnnnnnnnnnnnnnnnnnnnnnnnnnnnnnnnnnnnnnnnnnnnnnnnnnnnnnnnnnnnnnnnnnnnnnnnnnnnnnnnnnnnnnnnnnnnnnnnnnnnnnnnnnnnnnnnnnnnnnnnnnnnnnnnnnnnnnnnnnnnnnnnnnnnnnnnnnnnnnnnnnnnnnnnnnnnnnnnnnnnnnnnnnnnnnnnnnnnnnnnnnnnnnnnnnnnnnnnnnnnnnnnnnnnnnnnnnnnnnnnnnnnnnnnnnnnnnnnnnnnnnnnnnnnnnnnnnnnnnnnnnnnnnnnnnnnnnnnnnnnnnnnnnnnnnnnnnnnnnnnnnnnnnnnnnnnnnnnnnnnnnnnnnnnnnnnnnnnnnnnnnnnnnnnnnnnnnnnnnnnnnnnnnnnnnnnnnnnnnnnnnnnnnnnnnnnnnnnnnnnnnnnnnnnnnnnnnnnnnnnnnnnnnnnnnnnnnnnnnnnnnnnnnnnnnnnnnnnnnnnnnnnnnnnnnnnnnnnnnnnnnnnnnnnnnnnnnnnnnnnnnnnnnnnnnnnnnnnnnnnnnnnnnnnnnnnnnnnnnnnnnnnnnnnnnnnnnnnnnnnnnnnnnnnnnnnnnnnnnnnnnnnnnnnnnnnnnnnnnnnnnnnnnnnnnnnnnnnnnnnnnnnnnnnnnnnnnnnnnnnnnnnnnnnnnnnnnnnnnnnnnnnnnnnnnnnnnnnnnnnnnnnnnnnnnnnnnnnnnnnnnnnnnnnnnnnnnnnnnnnnnnnnnnnnnnnnnnnnnnnnnnnnnnnnnnnnnnnnnnnnnnnnnnnnnnnnnnnnnnnnnnnnnnnnnnnnnnnnnnnnnnnnnnnnnnnnnnnnnnnnnnnnnnnnnnnnnnnnnnnnnnnnnnnnnnnnnnnnnnnnnnnnnnnnnnnnnnnnnnnnnnnnnnnnnnnnnnnnnnnnnnnnnnnnnnnnnnnnnnnnnnnnnnnnnnnnnnnnnnnnnnnnnnnnnnnnnnnnnnnnnnnnnnnnnnnnnnnnnnnnnnnnnnnnnnnnnnnnnnnnnnnnnnnnnnnnnnnnnnnnnnnnnnnnnnnnnnnnnnnnnnnnnnnnnnnnnnnnnnnnnnnnnnnnnnnnnnnnnnnnnncctctgcctcccaggttcaagcgagtctcctgcctcagcctcccgagtagctgggattacaggcacccgccaccacgcccagctaattttgtatttttagtagagatggggtttctccatgttggtcaggctggtctcaaactcccgacctcaggtgatctgcccacctcagcctcccaaagtgccaggattacaggcatgaaccactgtgtccggccttaagcaggtttttaaaatctccagtggccataaaacaagccagggtagctcatgcttttactggttggaataaggagccaaaaccaacaaaataatatttattagggctcaatgcccatttctatggctaaggcttaggtttggtgtgcagaacctggcctacttttgtgggctgtggttcctgtgacagtttcgttttctgaatctttgtaatgcttttccacgtgctgcccagaggctgatctgcaaacctgcgcagtattccacactgaagctcagtttgcagaccttttgctgtgttaattctggtcggtttcacacagaagtcacgagggcctctgcccaggacctcctattcacatttcaagaatccctttctgaaattatccaagtctctggtcaggaggaggagcaccagtggggtagggtgggcagcggctagaggggcaggagcgaatccaggttccttgtgtggtttccagcctctgctgacagcacctcagctaccaggtggggagtggaaattcaggctgcttagaggactgacctctacagttaatatctgcagtgacataaaaggcaaagaggggctggcatggtggtacagaaggtatcagtcaagcgcaggctcctcagaaacctagaaaccaaaaa

SEQ ID NO: 23349 - DNA, 803 bp, Macaca Mulatta
  misc_feature (1)...(803): n = A,T,C or G
ggggaaattcgtgatgttagtaaccttggcatctttatttaccaactttgcaacaacagaaagtccttccgccttcgtcgcagagacctcttgctgggtttcaacaaacgtgccattgataaatgctggaagattagacacttccccaacgaatttattgttgagaccaagatctgtcaagagtaagaggcaacagatagagtatccttggtaataagaagtcagagatttacaatatgactttaacattaaagtttatgggatactcaagatatttactcatgcatttactcgattgcttatgcttttagnnnnnnnnnnnnnnnnnnnnnnnnnnnnnctactaaccactgcaagctcttgtcaaattttagtttaattggcattgcttgctgtttgaaactgaaattatatgattttcattttttctttgaaatttatagggtttagatttctgaaagcagcatgaatatgtcacctaacatcctgacaataaattccatccgttnnnnnnnnnnnnnnnnnnnnnnnnnnnnnnctttaagtaagctctttattcatcttatgggggagcaattttaaaatttgaaaatatttaaattgttttttgaacttttttgtgtaaaatatatcagatctcttaacattgttgggttttttttggttttcaatttggacaactttcctgaatttagaaattacctttttggcagttcttgttaagggctctgtaaattaacctgaacttatattgtgaaaaatttttttatgaaaacagctcattttttaacctaaaggcgggg

SEQ ID NO: 23350 - DNA, 655 bp, Macaca Mulatta
ccctcgtgaccagacacctgatgagaatgaccaagtggttgtcaaaataactggtcacttctatgcttgccaggcaagtgggctctaaaatggaaaagcttttgtatctttctcaattggaagcgattttcccacagatgctcctacctgatagaattagttaagattgtttgatgattaagacttttcatctcccttttagcaggtgatttcagagactactagcaaactgactagtatgtatctttaatcatcaaatggatttctatttgaaattgttgaaatgaggggttacaataacttttagtagcttttgatcaagtagaatttcaaagctctgtccttttccaggttgcccagagaaaaattcaggaaattctgactcaggtaaagcagcaccaacaacagaaggctctgcaaagtggaccacctcagtcaagacggaagtaaaggctcaggaaacagcccaccacagaggcagatgccaaaccaaagacagattgcttaaccaacagacgggcgctgaccccctatccagaatcacatgcacaagtttttacctagccagttgtttctgaggaccaggcaacttttgaactcctgtctctgtgagaatgtatactttatgctctctgaaatgtatgacacccagctt

SEQ ID NO: 23351 - DNA, 310 bp, Macaca Mulatta
  misc_feature (1)...(310): n = A,T,C or G
ntggcncacgtggaggcctatatcgattttggcgaggatgacaacctggaggagggggtcctggagcaaggtgggtctacctagtggtgggggaggaagacacctgtatcagccctcaaaggctcccctcactgtctctctttgcctgccttctctcacccacagcggacattgaagtacgggcactggaggtggccctgggtgcacatctacgagatgccaggcgcgggcagagactccgctcaggggcacacgtagtggtcactggaccccccaatgccggcaagagcagcctagtgaacctgctcag

SEQ ID NO: 23352 - DNA, 850 bp, Macaca Mulatta
  misc_feature (1)...(850): n = A,T,C or G
ggattctagaggccgaaggttgtttcaaacttggtggtgaatgtgttgcgggtcctgttgggctgctttctgtattgtctcctaaccctctggttttaattggacatttctttgctgttgcagtctatgccatatatttttgctttaagtcggaaccttggattacaaaacctcgagctcttctcagtagtggtgctgttttgtacaaagcgtgttctataagatttcctctcatttactcagaaatgaagtatatggttcatttagcttaaggggaacgattggtgaatgaatatttggaacttaccaagtccttagagacttcttgaatcaggaagtgtattgcataattacataccactttttaaggtgaaaatctttgacccaaatttggatttaattttgtttttgaagttttttggatattaaattttgaaaattcatgggttttaaattttgcaaaaaggagggggaaaaaacaggttttaatnnnnnnnnnnnnnnnnnnnnnnnnnnnnnnnnnnnnnnnngggttataaccggggggaggaaatacacggtttttttctttttgaattttggnnnnnnnnnnnnnnnnnnnnnnnnggggctctccaaaaatttaaggggggaaannnnnnnnnnnnnnnnnnnnnnattgtatgttcataaaaaancccttgtgttttgggcccccttttttgccctcttcgnnnnnnnnnnnnnnnnnnnnnnnnnnnnnnnnnnnnnggccccggggggcccccntgtggggggggagggagaacaaattgggcaaaaagagtgttgtttttctctcaaaaaaaaaacacggcggtctcgtaaaaaa

SEQ ID NO: 23353 - DNA, 774 bp, Macaca Mulatta
  misc_feature (1)...(774): n = A,T,C or G
ggggatgttgatgtcctgcgtctaacgcggtgtaacgcctgaaaccgagcgagctccggaggggtccggaggaatttcagtatctgctacggtaaccttatcagcccgccaagatggcgatgcaagcggccaagagggcgaacattcgacttccacctgaagtaaatcggatattgtatataagaaatttgccatacaaaatcacagctgaagaaatgtatgatatatttgggaaatacggacctattcgtcaaatcagagtggggaacacacctgaaactagaggaacagcttatgtggtctatgaggacatctttgatgccaagaatgcatgtgatcacctatcgggattcaatgtttgtaacagataccttgtggttttgtactataatgccaacagggcatttcagaagatggacacaaagaaaaaggaggaacagttgaagcttctcaaggagaaatatggcatcaacacagatccaccaaaataaatgttttctacattttcattttggactanatcccatgaatgacaattttccacttttttttcctttttaattaatactaaatattgtgatttctaatttgaggttccacatgacctacttgaaactttgatacatattagaatacattggtgtaaataaacttacagcttttttgtgaaacaaattnnnnnaaannnnnnnnnnnnnnnnnnnnnnnntggtcgggcggccttcggccccttcaaaaggcctttttaagaccatttcggttttgggcgcgcgg

SEQ ID NO: 23354 - DNA, 326 bp, Macaca Mulatta
  misc_feature (1)...(326): n = A,T,C or G
acgcnnnnnnnnnnnnnnnnnnnnnnnnnnnnnnnnnnnnnnnnnnnnnnnnnnnnnnnnnnnnnnnnnnnnnntntgggtannnnnnnnnnnnnnnnnnnnnnnnnnnnnnnnnnnnnnnnnnnngtgcttaaagtaaagagcccatcctttgcaagtcatccatgttgttacttaggcattttatctttgctcaaattgttgagaatggtggcttgtttcatggtttttgtatttgtgtctaatgcacgttttactgatagacgcatgcactggtagctagttttctggaaagtcatctttaggattgttttcagtctcaataa

SEQ ID NO: 23355 - DNA, 1848 bp, Macaca Mulatta
  misc_feature (1)...(1848): n = A,T,C or G
aagagcggtcagcagagcggggaggcgaactgcagcagagttcttgctttccggcaggtgatggcgccccccgcggcctagaggtccagcgcccgccgcgagcagcggacagtcctgttgtgtccgaccgagagtcctggtgactttgaacatgttggtgccgctaaccaagctgtcctgccnnnnnnnnnnnnnnnnnnnnnnnnnnnnnnnnnnnnnnnnnnnnnnnnnnnnnnnnnnnnnnnnnnnnnnnnnnnnnnnnnnnnnnnnnnnnnnnnnnnnnnnnnnnnnnnnnnnnnnnnnnnnnnnnnnnnnnnnnnnnnnggagtgaacatggaaaggtttgcagaagaagcggatgttgtaatagttggtgcaggccctgcagggctctctgcagctgttcgtctaaaacagttggctgcggcacatgaaaaggatatccgtgtgtgtctagtggagaaagctgcccagataggagctcatactctctcaggngcttgccttgatccagctgcttttaaagaactcttcccagactggaaagagaagnnnnnnnnnnnnnnnnnnnnnnnnnnnnnnnnnnnnnnnnnnnnnnnnnnnnnnnnnnnnnnnnnnnnnnnnnnnnnnnnnnnnnnnnnnnnnnnnnnnnnnnnnnnnnnnnnnnnnnnnnnnnnnnnnnnnnnnnnnnnnnnnnnnnnnnnnnnnnnnnnnnnnnnnnnnnnnnnnnnnnnnnnnnnnnnnnnnnnnnnnnnnnnnnnnnnnnnnnnnnnnnnnnnnnnnnnnnnnnnnnnnnnnnnnnnnnnnnnnnnnnnnnnnnnnnnnnnnnnnnnnnnnnnnnnnnnnnnnnnnnnnnnnnnnnnnnnnnnnnnnnnnnnnnnnnnnnnnnnnnnnnnnnnnnnnnnnnnnnnnnnnnnnnnnnnnnnnnnnnnnnnnnnnnnnnnnnnnnnnnnnnnnnnnnnnnnnnnnnnnnnnnnnnnnnnnnnnnnnnnnnnnnnnnnnnnnnnnnnnnnnnnnnnnnnnnnnnnnnnnnnnnnnnnnnnnnnnnnnnnnnnnnnnnnnnnnnnnnnnnnnnnnnnnnnnnnnnnnnnnnnnnnnnnnnnnnnnnnnnnnnnnnnnnnnnnnnnnnnnnnnnnnnnnnnnnnnnnnnnnnnnnnnnnnnnnnnnnnnnnnnnnnnnnnnnnnnnnnnnnnnnnnnnnnnnnnnnnnnnnnnnnnnnnnnnnnnnnnnnnnnnnnnnnnnnnnnnnnnnnnnnnnnnnnnnnnnnnnnnnnnnnnnnnnnnnnnnnnnnnnnnnnnnnnnnnnnnnnnnnnnnnnnnnnnnnnnnnnnnnnnnnnnnnnnnnnnnnnnnnnnnnnnnnnnnnnnnnnnnnnnnnnnnnnnnnnnnnnnnnnnnnnnnnnnnnnnnnnnnnnnnnnnnnnnnnnnnnnnnnnggactccatgtaactgaatatgaagacaatttgaagaactcctgggtatggaaagagctatattctgttagaaatataagaccgtcttgccatggagtactgggtgtatatggagggatgatttacactggaatcttttactggatattgagaggaatggagccatggactctgaaacataaaggtnnnnaggttctgactttgaacggctcaagccagccaaggattgtacacctattgagtatccaaaacccgatggacagatcagttttgacctcttgtcctctgtggctctgagtggtactaatcatgaacatgaccagccggcacatttaaccttaagggatgacagtatacctgtaaagagaaatctgtcgatatatgatgggcccgagcagcgattctgtcctgcagg

SEQ ID NO: 23356 - DNA, 671 bp, Macaca Mulatta
  misc_feature (1)...(671): n = A,T,C or G
ggaagtcagtttttaaagtaagcaaaggtacatgttgtaatggtggggcatctgtgaaaaagatgtccctttcataatatatgcaatatattccagatgttttgagagattacagaagaggaggcctgcttcatttgcagataagtttattataattctccacaaatgtgcaggatgtgcattagcaaattgcactgtacttttnnnnnnnnnnnnnnnnnnnaagcgagactccgtctcnnnnnnnnnnnnnnnnnnnngctatatctaaatgaatctctgtaattgggcccagatgtgggtttgctcagtattagtagacaaggtctttgttcagacgattaggtgcctaactggcaaatgtcttagcttcttaaagctaggtatttctgatgcggctttacttttcaaaagttaacttgattaaacctgagaaaactgatttaaaaactagtttaaaaattacttaaatttgccagcagggaagtaaaataattatgagaagaacgtcttaagcctaatactaaatcatttgtaagggaactcatatgtactcactgtgaaatgtaacagtattggcacatatgcaattattacgtaatcnnnnnnnnnnnnnnnnnnnnnnnnnnnannnngnaaacagngattggccaatatataatacgtataaa

SEQ ID NO: 23357 - DNA, 850 bp, Macaca Mulatta
  misc_feature (1)...(850): n = A,T,C or G
gggctctttcccatcttgcaagatggcgggtgaaaaagttgagaagccagatactaaagagaagaaacccgaagccaagaaggctgatgctggtggcaaggtgaaaaagggtaacctcaaggctaagaagcccaagaaggggaagccccattgcagccgcaaccctgtccttgtcagaggaattggcaggtattcccgatctgccatgtattccagaaaggccatgtacaagaggaagtactcagccgctaaatccaagnnnnnnnnnnnnnnnnnnnngaaggttcttgcaactcttacaaaaccagttggtggtgacaagaacggcggtacccgggtggttaaacttcgcaaaatgcctagatattatcctactgaagatgtacctcgaaagctgttgagccacggcaaaaaaacccttcagtcagcacgtgagaaaactgcgagccagcattacccccgggaccattctgatcatcctcactggacgccacaggggcaagagggtggttttcctgaagcagctggctagtggcttgttacttgtgactggacctctggtcctcaatcgagttcctctacgaagaacacacccagaaatttgtcatttgccacctcaacccaaaatcgatatcagcagtgtcaaaattcccaaaacatccttaccgaatggcttacttccaagaagaaagaagactggcggaaagcccagaaaccccaggaagggtgagaatctttccacccccgaaaaaagagagataactccaaattttattatcccccggccagaagtgcttataaaaaggccgtgggaactccacacatttctccccgaaagatccgtgcattc

SEQ ID NO: 23358 - DNA, 568 bp, Macaca Mulatta
gcagcccctggccagccccagccacatcacggctaacttgccaccacagatcagcagcagcatccagggccagctggtccagcagcagcaggtgctgcaggggccgctgctgtcctggcccctgggcttcgagaggacgcccggcgtgctgctccccggggctgggggcgcagcagggtttgggatgatggcccccccgccacccaccagcccttccaggactgccgtgcccccaggcctttccagcctcccactcacatctgtggggaacacgggagtgaagaaggctcccaagaagttagaggagattcccccagcctctctggagatggtgcagatgaggaagcagtgcctggactatcattaccaggagatgcaggctctgaaggaggtcttcaaggagtatttgattgaactgtttttcttgcaacactttcaagggaacatgatggatttcttagctttcaaggagagactgtatggaccattacaagcatatcttaggcagaatgatttggacattgaagaggaggaggaggagcactttgaagtcattaatgatgaggta

SEQ ID NO: 23359 - DNA, 765 bp, Macaca Mulatta
gtttcttgtagtcttgtttgttaaaaattgatatcattgatgttttaatacgtaggggtgaaagattccattcaaaatggaatcagctgagtctcaactaatgtggtcattgagatctttaaggtttacatgtgtgttatcaggataaatgattttagttcaaatggacttattcgtataaatgttgaaaaaaatatatagacataaatgtgtccctttagaggaattgatcctttgtaaattgaattcaggtagtagtatcatccaccaatccatttgttactttgttggtcttctgaagggggaatttgaaactctgaaacaatctgagcaccttgagagaaatcagaagcaaggcaattatttgcagtgctgtcattacaagtcagaagcagaaaatcaaggtagagtgtcctgctttccagttgccttaggatagcagactgcagcctcagacttgctcctgtcattctcctctatctcctacatctgaattgatcattgctgcaaaatatcattagcctacacttcatccatcagggttcttggattcttagaccacgacttgctgtgcaaggtgtttattgcatcttcaaagtgaaactttaaattattatgcaaacatttattttccttttgttttcaaaagaatccctacagtgatcacttctaagattttattttaccttcccctctgcagcacacacagctattcaacaatgatttctaaaattaatatttcaaatttatatctctccattttga

SEQ ID NO: 23360 - DNA, 1850 bp, Macaca Mulatta
  misc_feature (1)...(1850): n = A,T,C or G
ctgagttcagctagcaggagctgaagcagtggtacaagggctttctgaaggactgccccagcggcatcctcaacctggaggagttccagcagctctacatcaagnnnnnnnnnnnnnnnnnnnnnnnnnnnnnnnnnnnnnnnnnnnnnnnnnnnnnnnnnnnnnnnnnnnnnnnnnnnnnnnnnnnnnnnnnnnnnnnnnnnnnnnnnnnnnnnnnnnnnnnnnnnnnnnnnnnnnnnnnnnnnnnnnnnnnnnnnnnnnnnnnnnnnnnnnnnnnnnnnnnnnnnnnnnnnnnnnnnnnnnnnnnnnnnnnnnnnnnnnnnnnnnnnnnnnnnnnnnnnnnnnnnnnnnnnnnnnnnnnnnnnnnnnnnnnnnnnnnnnnnnnnnnnnnnnnnnnnnnnnnnnnnnnnnnnnnnnnnnnnnnnnnnnnnnnnnnnnnnnnnnnnnnnnnnnnnnnnnnnnnnnnnnnnnnnnnnnnnnnnnnnnnnnnnnnnnnnnnnnnnnnnnnnnnnnnnnnnnnnnnnnnnnnnnnnnnnnnnnnnnnnnnnnnnnnnnnnnnnnnnnnnnnnnnnnnnnnnnnnnnnnnnnnnnnnnnnnnnnnnnnnnnnnnnnnnnnnnnnnnnnnnnnnnnnnnnnnnncctctgcccaagcccctcctcccctccatcaagatccctgagggaccaccttaccctgcaaaagagacaggtcctccggtatcctgtcttctagccccacctcacacttggcacagaaccagcgtccattgggcataggggagttggcttttgccccaggagctgaggttaaggagttgggggcttggggttctggttcaaattctcttgatcctgggattatgcgttatagaatgtggtcccnnnnnnnnnnnnnnnnnnnnnnnnnnnnnnnnnnnnnnnnnnnnnnnnnnnnnnnnnnnnnnnnnnnnnnnnnnnnnnnnnnnnnnnnnnnnnnnnnnnnnnnnnnnnnnnnnnnnnnnnnnnnnnnnnnnnnnnnnnnnnnnnnnnnnnnnnnnnnnnnnnnnnnnnnnnnnnnnnnnnnnnnnnnnnnnnnnnnnnnnnnnnnnnnnnnnnnnnnnnnnnnnnnnnnnnnnnnnnntccagctgtcagggtctcagctgagcagagggtgctggaaagctggttagtctgggaggagctatntcatcttccagctcagctccacacaaagctgcagaaggacgaaatgaaaagcatttggaagttgagccacgtgagtgaaagttttaagaaaaatgaaatttatgtaatacttatttttttagtaccctttaaaggagctacagtcattttattatttcaggaggttaaaatatactctatattacttggtttcttataaaatgattaaatgaatagagaaaatattaatttttaaggggaaaaaaactgagaaaaaagggagaaaagaccatgaaatttaccagataacactttttcagactaagtcctgagctgccacgctcagcagtttttgctgcttcagctcttcctttttattacctttttcaattcgacaagcaactttctattacatacttactcaggttggatgctgacttcagagacaggaaaaaacaaggtttgcaaagagtgagacaagtgtatatcccgaatcttggtagttcgtttctgaatttggtttagtttcagaactggacttgttccttcactgccacagaatcagaaggagctcgaagaaaaggctcacctggccactgtttaggcacccagacagaatttatggaccaaatgcctaaaaatgtgccaggcatgctccgttggaaaggctttttctaaccccaaa

SEQ ID NO: 23361 - DNA, 1006 bp, Macaca Mulatta
caggtatcctccacctcgtcctggcatgatgcgcccacctttggtggcctccccttggacctgccccccctgggcttttcccaccagctcccttgccgaaccctggggttttaagtgccccacccaacttgattcagcgacccaaggcggatgatacgagtgcagccaccattgagaagaaagccacagcaaccatcagtgccaagccacagatcactaatcccaaggcagagattactcgatttgtgcccactgcactgagagtacgtcgggagaataaaggggctacggctgctccccagagaaagtcagaggatgattctgctgtgcctcttgccaaagcagcacccaaatctggtccttctgttcctgtctcagtacaaactaaggatgatgtctatgaggatttcatgaaagagatggaagggctactgtgacagcttttgatgccagaacaggcttctgttcacaacagtggcccatggagaaagaagctcttattaaacttagatgaaagagctgcttccattgtcagggtattttctaatttcagttcaaggaatatcctaaaatttagccttgttcagaatttactgcacataaaagagggtatttcatccagaatagatcagttattgaagcagtgctgctaacatccattccctttcacaccaccattttcatcctgtttcttcccctcctccagttctttggaaatttgtgatcacagggggatcttagttgcttacttgttttgactctcttgtgtgctgtgggcactggagtagagatttttgaaaacagtttatttcatcttgccttttgtggttgagttatttttaatattttcctgtaaatattttgtaatattttacttgtaatgaaatggatcacaatgtcatttcctaatacaaggcaggatatgtgggaaagaaaatgtataattattttgattaaaaattattttccccacttgacctaaaacttttccagtgaattcgttgga

SEQ ID NO: 23362 - DNA, 792 bp, Macaca Mulatta
gggaatccggagtgcccaacatggcggcggccgtaaggtgcatgggtagagccttgatacatcatcaaaggcatagcctttccaagatggtttatcagacatcagtttgttcttgttctgtaaacattcaagtgcccaacagacattttgctgctgctacaaagtctgcaaagaaaacaaaaaatgttgctaaagaaaaaacaccagatgagaaaaaagatgaaatagaaaaaataaaagcgtatccctatatggaaggcgaacctgaggatgatgtctatttaaaacggttatacccgaggcagatatatgatgtggagaaagctgttcacttacttaagaaatttcaagttcttgactttactggtccaaagcaaagtgtttatcttgatttgacactggatatgacacagggaaggaagaaaaacgtggcgccatttaccagtgttcttagtttgccatacccatttgcttcggaaatcaataaagttgctgtatttacagagaatgcatcagaggtcaaaatagcagaagaaaatggagctgcatttgcaggaggcactagtctgatacagaaaatttgggatgatgaaattgttgtagacttttatgtagctgttccagaaataatgcctggaacttaatcgaataaggaaagaagctgggctaaaagatttcccaggggttttctcgaaaattcccattggggcggggaccttcccccaaaaatgcgttggagactcccttcaaaaaaatgggacccttgagaaattcacaggcggaatatggaag

SEQ ID NO: 23363 - DNA, 283 bp, Macaca Mulatta
gctcggcactcacagctctgatggctccgatggcactgacggccatggcgcgttcgagcctcccgctggcgctgggcctggccctggtcgcattctgcctcctggcgctgccccgcgacgcccgggcctggccgcaggagcgcatggtcggagaacgccaggacctgtcgcccgacgacccgcaggtgcagaaggcggcgcaggcggccgtggccagttacaacatgggcagcaacagcctctactacttccgagacacgcacatcatcaaggcgcagagcca

SEQ ID NO: 23364 - DNA, 910 bp, Macaca Mulatta
ggcagcggatcctgggtggacacctggatgccaaaggcagctttccctggcaggctaagatggtttcccgccataatctcaccacaggggccacgctgatcaatgaacaatggctgctgaccacggctaaaaatctcttcctgatccattcagaaaatgcaacagtgaaagacattgcccctactttaacactctatgtggggaaaaagcagcttgtagagattgagaaggtggttctacaccctaactactcccaggtagatattgggctcatcaaactcaaacagaaggtgcctgttaatgagagagtgatgcccatctgcctaccttcaaaggattatgcagaagtagggcgtgtgggttacgtgtctggctgggggcgaaatgccaattttaaatttactgaccatctgaagtatgtcatgctgcctgtggctgaccaatacaattgcataaagcactatgaaggcagcaaatgccccaaaaggaaggcaccgaagagccctgtaggggagcagcccatactgaatgaacacaccttctgtgccggcatgtctaagtaccaggaagacacctgctatggcgatgcgggcactgcctcgacatggaggaggatacctggtatgcggctgggatcctaagctttgataagagctgtggtgtggctaagtatggtgtgtatgtaaaggtgacttccatccaggactgggttcagaaaaccatagccgagaactaatgcaagcctggccggaagcccttgcctgaaagcaagattccagcctggaagaggacaaagtggacgggaatggacaagagtggatgggataagatgtggtttgaagctgatgggtgccagccctgcgttgctgagtcaatcaataaagagctttcttttgactcatttctgtgt

SEQ ID NO: 23365 - DNA, 86 bp, Macaca Mulatta
agaaacgccatcatttttgcggcctctgttggaccgaacggtaaccaagggagaaacggccgtcctacagtgcattgctggaggaa

SEQ ID NO: 23366 - DNA, 236 bp, Macaca Mulatta
  misc_feature (1)...(236): n = A,T,C or G
aagatcaggcgcaagatgccagcagaggaaggaaataatgggaagggaatgtcagaagcatgtggctcacaaatcaagggaaaacagtagtgcccctcgggaaaaccaagtacctaagagaagattaannnnnnnnnggaccaaaaaggggaaaacatgcctggacccacagactgctgagagaaagcaggtggtgatttataaagagatcagcgaccctgaggaagatgacgagt

SEQ ID NO: 23367 - DNA, 365 bp, Macaca Mulatta
tgtctggtagaggcaaaggtggtaaaggtttgggaaagggaggcgccaagcgccaccgcaaagtgttgcgtgacaacatccagggcatcacgaaacctgccatccgtcgtttggcccgacgcggcggcgtgaaacgcatctcgggcctcatttatgaggagacccgaggtgtgcttaaggtgtttctggagaatgtgatcagagatgctgtaacctacacggagcacgccaagcgtaagacagtcaccgccatggatgtggtctacgcgctcaagcgccagggtcgcactctgtacggctttggtggctgagcctcaccccggctttatttaacagcttacccataaaaggcccttttcagggcc

SEQ ID NO: 23368 - DNA, 3974 bp, Macaca Mulatta
  misc_feature (1)...(3974): n = A,T,C or G
aggaagaagaaatgtttcgtccaaacatgtttttcctcctcctgcttccccctattatctttgagtctggatattcattacacaagnnnnnnnnnnnnnnnnnnnnnnnnnnnnnnnnnnnnnnnnnnnnnnnnnnnnnnnnnnnnnnnnnnnnnnnnnnnnnnnnnnnnnnnnnnnnnnnnnnnnnnnnnnnnnnnnnnnnnnnnnnnnnnnnnnnnnnnnnnnnnnnnnnnnnnnnnnnnnnnnnnnnnnnnnnnnnnnnnnnnnnnnnnnnnnnnnnnnnnnnnnnnnnnnnnnnnnnnnnnnnnnnnnnnnnnnnnnnnnnnnnnnnnnnnnnnnnnnnnnnnnnnnnnnnnnnnnnnnnnnnnnnnnnnnnnnnnnnnnnnnnnnnnnnnnnnnnnnnnnnnnnnnnnnnnnnnnnnnnnnnnnnnnnnnnnnnnnnnnnnnnnnnnnnnnnnnnnnnnnnnnnnnnnnnnnnnnnnnnnnnnnnnnnnnnnnnnnnnnnnnnnnnnnnnnnnnnnnnnnnnnnnnnnnnnnnnnnnnnnnnnnnnnnnnnnnnnnnnnnnnnnnnnnnnnnnnnnnnnnnnnnnnnnnnnnnnnnnnnnnnnnnnnnnnnnnnnnnnnnnnnnnnnnnnnnnnnnnnnnnnnnnnnnnnnnnnnnnnnnnnnnnnnnnnnnnnnnnnnnnnnnnnnnnnnnnnnnnnnnnnnnnnnnnnnnnnnnnnnnnnnnnnnnnnnnnnnnnnnnnnnnnnnnnnnnnnnnnnnnnnnnnnnnnnnnnnnnnnnnnnnnnnnnnnnnnnnnnnnnnnnnnnnnnnnnnnnnnnnnnnnnnnnnnnnnnnnnnnnnnnnnnnnnnnnnnnnnnnnnnnnnnnnnnnnnnnnnnnnnnnnnnnnnnnnnnnnnnnnnnnnnnnnnnnnnnnnnnnnnnnnnnnnnnnnnnnnnnnnnnnnnnnnnnnnnnnnnnnnnnnnnnnnnnnnnnnnnnnnnnnnnnnnnnnnnnnnnnnnnnnnnnnnnnnnnnnnnnnnnnnnnnnnnnnnnnnnnnnnnnnnnnnnnnnnnnnnnnnnnnnnnnnnnnnnnnnnnnnnnnnnnnnnnnnnnnnnnnnnnnnnnnnnnnnnnnnnnnnnnnnnnnnnnnnnnnnnnnnnnnnnnnnnnnnnnnnnnnnnnnnnnnnnnnnnnnnnnnnnnnnnnnnnnnnnnnnnnnnnnnnnnnnnnnnnnnnnnnnnnnnnnnnnnnnnnnnnnnnnnnnnnnnnnnnnnnnnnnnnnnnnnnnnnnnnnnnnnnnnnnnnnnnnnnnnnnnnnnnnnnnnnnnnnnnnnnnnnnnnnnnnnnnnnnnnnnnnnnnnnnnnnnnnnnnnnnnnnnnnnnnnnnnnnnnnnnnnnnnnnnnnnnnnnnnnnnnnnnnnnnnnnnnnnnnnnnnnnnnnnnnnnnnnnnnnnnnnnnnnnnnnnnnnnnnnnnnnnnnnnnnnnnnnnnnnnnnnnnnnnnnnnnnnnnnnnnnnnnnnnnnnnnnnnnnnnnnnnnnnnnnnnnnnnnnnnnnnnnnnnnnnnnnnnnnnnnnnnnnnnnnnnnnnnnnnnnnnnnnnnnnnnnnnnnnnnnnnnnnnnnnnnnnnnnnnnnnnnnnnnnnnnnnnnnnnnnnnnnnnnnnnnnnnnnnnnnnnnnnnnnnnnnnnnnnnnnnnnnnnnnnnnnnnnnnnnnnnnnnnnnnnnnnnnnnnnnnnnnnnnnnnnnnnnnnnnnnnnnnnnnnnnnnnnnnnnnnnnnnnnnnnnnnnnnnnnnnnnnnnnnnnnnnnnnnnnnnnnnnnnnnnnnnnnnnnnnnnnnnnnnnnnnnnnnnnnnnnnnnnnnnnnnttgagtcatcaagctgtctccgcagccacaattctgacctaagtggcagggcccagatatcttgaaaacctcccgctgccctttgtggcacttcctgtgctccctcagagagagggagagaaaccgagtgacctttttccctttgtctgattggcacttctcagcctgtctccctggacagcaggtggctgctgcctttctctgggcatcttctgaatgtttacactggtaccttctggtatcttctttagagccccctgcaagctgcaacccaaggcttttatcttgcagggtcagagcgccctctagagggaaaagctagaggcacagggttcctgctggctcacaactgctgtcttnnnngcattttacagcaaagtgctgagagcctcgtagtcacctcctgccatctgatctccctccccaccattcccatactcagttgttcttttgtctaaccggaggccactgtgccgaggccctgcagtgtctgctcactgctgccatcttcgctgctaatcagggttccatcctctttcccctctcccagttccccaccacgttggatcccatttgtcacccatgctagggtccccaaagcactggggcaggggccagagcagcagcacccagtgctcccnnnnnnnnnnnnnnnnnnnnnnnnnnnnnnnnnnnnnnnnnctccacgcacacacaccccagccctgtcccaggggcccggcctcctcagccatctcagggtgaggagctgtcagtcatgtccagacggaatggagtcactgactcgcatcctctcctcacctcccctttgacaagcctcaaactgctcagctcatcgaagggccattnnnnnnnnnnnnnnnnnnnnnnnnnnnnnnnnnnnnnnnnnnnnnnnnnnnnnnnnnnnnnnnnnnnnnnnnnnnnnnnnnnnnnnnnnnnnnnnnnnnnnnnnnnnnnnnnnnnnnnnnnnnnnnnnnnnnnnnnnnnnnnnnnnnnnnnnnnnnnnnnnnnnnnnnnnnnnnnnnnnnnnnnnnnnnnnnnnnnnnnnnnnnnnnnnnnnnnnnnnnnnnnnnnnnnnnnnnnnnnnnnnnnnnnnnnnnnnnnnnnnnnnnnnnnnnnnnnnnnnnnnnnnnnnnnnnnnnnnnnnnnnnnnnnnnnnnnnnnnnnnnnnnnnnnnnnnnnnnnnnnnnnnnnnnnnnnnnnnnnnnnnnnnnnnnnnnnnnnnnnnnnnnnnnnnnnnnnnnnnnnnnnnnnnnnnnnnnnnnnnnnnnnnnnnnnnnnnnnnnnnnnnnnnnnnnnnnnnnnnnnnnnnnnnnnnnnnnnnnnnnnnnnnnnnnnnnnnnnnnnnnnnnnnnnnngaagagaggaagtcagagggtggggacctttgcctgcccctgggcgagtgggggcagggatctgagaccagattgttcttgcgcccctgccagaactcactctcgcctgaagtttagggtcccgtctcccagatgtcagttgctttgcaatcagttgtttgccaggatttctttctttcctaatcttaaattcacagataaagcaatgaaaagagtcagatcccatttccgtctgccccctcgccgccaggtctgatagccccaaccacgccacacctggcctcatgctttcagctgagacctgaaaaggatgctgtggcggaagagcatgtggggcttggnnnnnnnnnnnnnnnnnnnnnnnnnnnnnagggggtggcgggacctttcccaggaggtaccagcacctgcctcgatctcctgtgagccttgtctgcccccaggcggccaggtgaggtcagcagcctgggagagtgcccccaagagatgagggcaccccgtgttccttggcagtcttgactcgccttggtaacaaaagccatagaagtctgtttttctgggtcannnnntttgcctgagaataacaaattgctgctgtctacctttagcacacccgataattctatttggggcagtgaatgcgcagaagatagaaaaatatgcagcttaactgtatcttcctgcatgtgtatttattatcttctgggtctaggccgtgggacaggagaactgtggcatataggaggaatacttcagggtgagggaa

SEQ ID NO: 23369 - DNA, 708 bp, Macaca Mulatta
ctgccctatgaggaggtcttggagcaaatccctggtattgcggagatcctcctagaggataacccttgggactgcacctgtgatctgctctccctgaaagaatggctggaaaacattcccaagaatgccctgatcggccgagtggtctgcgaagcccccaccagactgcagggtaaagacctcaatgaaaccaccgaacaggacttgtgtcctttgaaaaaccgagtggattctagtctcccggcaccccctgcccaagaagagacctttgctcctggccccctgccaacccctttcaagacaaatgggcaagaagatcatgccaccccagggtctgctccaaacggaggtacaaagatcccaggcaactggcagatcaaaatcagaccgacagcagcgatagcgacgggtagcgccagaaacaaacccttagctaacagtttgccctgccctgggggctgcagctgcgaccacatcccagggtcgggtttaaagatgaactgcaacaaccggaacgtgagcagcttggctgatttgaagcccaagctctctaacgtgcaggagcttttcctacgagataacaagatccacagcatccgaaaatcgcactttgtggattacaagaacctcattctgttggatctgggcaacaataacatcgctactgtagagaacaacactttcaagaaccttttggacctcaggtgg

SEQ ID NO: 23370 - DNA, 381 bp, Macaca Mulatta
gttaacatttcattttgtttaggttgaggatatacattcaaactaattttatcacaaggaaaactgcaatacccacttccctgacagagagttactcctttcagaagctaaataaagtatataacttattagatgttatataaatacagggggactttgagtttcacatcttaaagcagttgagctacttcgaatttaagcagttgtactaatcttaaattgcatagcatttgttttgatagaacttgctgctcaagtatgagaataatttttaatgtcttaatgattggtgctgctaacttgcatgatttcagaaggcataattgtgaatacacgctgtcagaattaggggattggtttttaccctagacttcactctta

SEQ ID NO: 23371 - DNA, 424 bp, Macaca Mulatta
tgagcttctactacctgtgcagttgtcacttcctttcactccctgaataaagtatctttgcataatatttgtgaatggatcttttgtttctttttcaaatctgctttattagcaatgtgatatgatcatttgtatttattcctacctttctgtgatcctcagggaagatcttacaattgttgctatatgaattttgggtcatagcaagtattatttctgtatcattttataccccttttatttttcttagtgtttgattgatttgcagaacatattattctacttctccaaatgtctatttttttactgcaaagtgaaccaaacaatatttacatcataaagtagtctaagtcataaaatctaatttctatctgaaatttggttggcacaatgcctgacacataatagcagtcatttaattgag

SEQ ID NO: 23372 - DNA, 448 bp, Macaca Mulatta
  misc_feature (1)...(448): n = A,T,C or G
agcccgtgttcctggccttccgaatcatgcccggggcaggtaaacctcatgcccgtgtgcacaagtgttgtgtcgtgcagtgacgtggtggngggaagagatgccagcgccacgagaggacccttcgtgagccctccctgtagccgtgtactgaatacgcaccttcaaagctgcatcgagaacccacccaagcgccacctgctagacggccagccccacacttcgcttcagcctccggaccattccggaacagcctcacatacctcactgtctcgtctgttcatgtgacattaagtagaaatattggnnnnnnnnnnnnnnnnnnaaataagtcacagtcctgttgtcaaaactctaatagacagcaaagagggtctgtaccgtagacttcacagttttcagtttttaatgattgtcagtggaggggcttctccagcacagagacccc

SEQ ID NO: 23373 - DNA, 580 bp, Macaca Mulatta
tgctgcacctggagcaggtatcccactggaggtggctggcaggaccaagtgggtggcctaatgcctggcatcaaggtggggcgctcccgggctcagctgccgctgaaggtggaggtagaagaggtcacggtgcctgagggctttgtccagaagctcaatgaccacctgctcttggtgtacactggcaagacccgcctggctcggaatctgctgcaggatgtgctgaggagctggtacgcccgactgcctgctgtggtgcagaatgcccacagcctagtgcagcaaactgaggagtgtgctgaagccttccgccaaggaagcctgcctctgctgggccagtgcctgacctcatactgggagcagaagaagctcatggctccaggctgtgagcccctggctgtgcggcgtatgatggatgtcctggacccccacgtgcatggccagagcctggctggggcaggcggtggaggctttctctatctgttgaccaaggagccacagcaaaaggaggccttggaggcggtgctggccaagaccgagggccttgggaattacaggatacacctggttgaagtggaca

SEQ ID NO: 23374 - DNA, 416 bp, Macaca Mulatta
atgacttagatgggcagatatcaacaaagatgaaaccacctgaggacatatttaacaagtaacatgtcaagggatatatgaaggaagtaccacaaattggctaggaggagcttaccaccagtgaggaagaccagtataacgttcaacagttattttgacaatcttattttgtgattcctacagtgaaaacatttttgatgatgctgtctgcctgggaaatctctcttcctaaagtatttgcatatgggagtccttgtttgtgaatgtttcctgggttagggaggtgtcaacataaatgtatattaaccatgaagctgctttctatatttttggcataataaaataatatttactgtggataataattctagtgggaaaataatgtgacaggaagttctctttatatatgctaccaa

SEQ ID NO: 23375 - DNA, 1231 bp, Macaca Mulatta
  misc_feature (1)...(1231): n = A,T,C or G
tggagcaaggcagcggccgcttggaggacttccctgtcaatgtgttttccgtcactccttacacacccagcaccgctgacatccaggtgtccgatgacgacaaggctggggccaccttgctcttctcaggcatctttctggggctggtggggatcacattcactgtcatgggctggatcaaataccaaggtgtctcccactttgaatggacccagctccttgggcctgtcctactgtcggttggggtgacattcatcctgatatctgtgtgcaagttcaaaatgctctcctgccagtnnnnnnnnnnnnnnnnnnnnnnnnnnnnnnnnnnnnnnnnnnnnnnnnnnnnnnnnnnnnnnnnnnnnnnnnnnnnnnnnnnnnnnnnnnnnnnnnnnnnnnnnnnnnnnnnnnnnnnnnnnnnnnnnnnnnnnnnnnnnnnnnnnnnnnnnnnnnnnnnnnnnnnnnnnnnnnnnnnnnnnnnnnnnnnnnnnnnnnnnnnnnnnnnnnnnnnnnnnnnnnnnnnnnnnnnnnnnnnnnnnnnnnnnnnnnnnnnnnnnnnnnnnnnnnnnnnnnnnnnnnnnnnnnnnnnnnnnnnnnnnnnnnnnnnnnnnnnnnnnnnnnncaggcccagtcctgatgctgaccaggtagaagagacacagctggaagaggaggcctgtgcctgcttctctcctccaccttacgaagaaatatactctctccctcgctagagactattctgatataataatacaatgctcagctcagggagcaagcgtttccgtcattgttacctgacaaccgtggtgttctatgttgcgaccttcagaagcaacagcagtgcccaggcagcctgacagagatcattcaaagggggaaaggggaagtgggagcaatgtctcagactggtaaaaattagactggcccgaggcaattttcctctggaacagtttcagattccctcgggtaagaaatctcctgtgtaaggctcaggagcaggaatttcactttttcatcccccaccttcccccttccctgtaggaaggcattggtggctcaattttaaccccagcagccaatgaaaaaatcatgacttctgagacttgggagtttccacagaggtgagagttggtgggaaggaagcagggaagagaaagcaggcccagctggagacttcccggtggctgtccttggcagcaaagcagactcactaatcccaaacaactcagct

SEQ ID NO: 23376 - DNA, 3780 bp, Macaca Mulatta
  misc_feature (1)...(3780): n = A,T,C or G
cgccgccgcccggggaccggcatgaggaccgccgcggggggacgtctgcggcccgcgtcggctctggggacaaannnnnnnnnnnnnnnnnnnnnnnnnnnnnnnnnnnnnnnnnnnnnnnnnnnnnnnnnnnnnnnnnnnnnnnnnnnnnnnnnnnnnnnnnnnnnnnnnnnnnnnnnnnnnnnnnnnnnnnnnnnnnnnnnnnnnnnnnnnnnnnnnnnnnnnnnnnnnnnnnnnnnnnnnnnnnnnnnnnnnnnnnnnnnnnnnnnnnnnnnnnnnnnnnnnnnnnnnnnnnnnnnnnnnnnnnnnnnnnnnnnnnnnnnnnnnnnnnnnnnnnnnnnnnnnnnnnnnnnnnnnnnnnnnnnnnnnnnnnnnnnnnnnnnnnnnnnnnnnnnnnnnnnnnnnnnnnnnnnnnnnnnnnnnnnnnnnnnnnnnnnnnnnnnnnnnnnnnnnnnnnnnnnnnnnnnnnnnnnnnnnnnnnnnnnnnnnnnnnnnnnnnnnnnnnnnnnnnnnnnnnnnnnnnnnnnnnnnnnnnnnnnnnnnngtatgatgagcttgttcctgcttctttgactacgnnnnnnnnnnnnnnnnnnnnnnnnnnnnnnnnnnnnnnnnnnnnnnnnnnnnnnnnnnnnnnnnnnnnnnnnnnnnnnnnnnnnnnnnnnnnnnnnnnnnnnnnnnnnnnnnnnnnnnnnnnnnnnnnnnnnnnnnnnnnnnnnnnnnnnnnnnnnnnnnnnnnnnnnnnnnnnnnnnnnnnnnnnnnnnnnnnnnnnnnnnnngcttcacagccctcaatgccagtaaggagaagaagaagaagaaatattctgggaggttaagcgttaaagagatgctaaagaaatttcagaaggagaaagaggctcannnnnnnnnnnnnnnnnnnnnnnnnnnnnnnnnnnnnnnnnnnnnnnnnnnnnnnnnnnnnnnnnnnnnnnnnnnnnnnnnnnnnnnnnnnnnnnnnnnnnnnnnnnnnnnnnnnnnnnnnnnnnnnnnnnnnnnnnnnnnnnnnnnnnnnnnnnnnnnnnnnnnnnnnnnnnnnnnnnnnnnnnnnnnnnnnnnnnnnnnnnnnnnnnnnnnnnnnnnnnnnnnnnnnnnnnnnnnnnnnnnnnnnnnnnnnnnnnnnnnnnnnnnnnnnnnnnnnnnnnnnnnnnnnnnnnnnnnnnnnnnnnnnnnnnnnnnnnnnnnnnnnnnnnnnnnnnnnnnnnnnnnnnnnnnnnnnnnnnnnnnnnnnnnnnnnnnnnnnnnnnnnnnnnnnnnnnnnnnnnnnnnnnnnnnnnnnnnnnnnnnnnnnnnnnnnnnnnnnnnnnnnnnnnnnnnnnnnnnnnnnnnnnnnnnnnnnnnnnnnnnnnnnnnnnnnnnnnnnnnnnnnnnnnnnnnnnnnnnnnnnnnnnnnnnnnnnnnnnnnnnnnnnnnnnnnnnnnnnnnnnnnnnnnnnnnnnnnnnnnnnnnnnnnnnnnnnnnnnnnnnnnnnnnnnnnnnnnnnnnnnnnnnnnnnnnnnnnnnnnnnnnnnnnnnnnnnnnnnnnnnnnnnnnnnnnnnnnnnnnnnnnnnnnnnnnnnnnnnnnnnnnnnnnnnnnnnnnnnnnnnnnnnnnnnnnnnnnnnnnnnnnnnnnnnnnnnnnnnnnnnnnnnnnnnnnnnnnnnnnnnnnnnnnnnnnnnnnnnnnnnnnnnnnnnnnnnnnnnnnnnnnnnnnnnnnnnnnnnnnnnnnnnnnnnnnnnnnnnnnnnnnnnnnnnnnnnnnnnnnnnnnnnnnnnnnnnnnnnnnnnnnnnnnnnnnnnnnnnnnnnnnnnnnnnnnnnnnnnnnnnnnnnnnnnnnnnnnnnnnnnnnnnnnnnnnnnnnnnnnnnnnnnnnnnnnnnnnnnnnnnnnnnnnnnnnnnnnnnnnnnnnnnnnnnnnnnnnnnnnnnnnnnnnnnnnnnnnnnnnnnnnnnnnnnnnnnnnnnnnnnnnnnnnnnnnnnnnnnnnnnnnnnnnnnnnnnnnnnnnnnnnnnnnnnnnnnnnnnnnnnnnnnnnnnnnnnnnnnnnnnnnnnnnnnnnnnnnnnnnnnnnnnnnnnnnnnnnnnnnnnnnnnnnnnnnnnnnnnnnnnnnnnnnnnnnnnnnnnnnnnnnnnnnnnnnnnnnnnnnnnnnnnnnnnnnnnnnnnnnnnnnnnnnnnnnnnnnnnnnnnnnnnnnnnnnnnnnnnnnnnnnnnnnnnnnnnnnnnnnnnnnnnnnnnnnnnnnnnnnnnnnnnnnnnnnnnnnnnnnnnnnnnnnnnnnnnnnnnnnnnnnnnnnnnnnnnnnnnnnnnnnnnnnnnnnnnnnnnnnnnnnnnnnnnnnnnnnnnnnnnnnnnnnnnnnnnnnnnnnnnnnnnnnnnnnnnnnnnnnnnnnnnnnnnnnnnnnnnnnnnnnnnnnnnnnnnnnnnnnnnnnnnnnnnnnnnnnnnnnnnnnnnnnnnnnnnnnnnnnnnnnnnnnnnnnnnnnnnnnnnnnnnnnnnnnnnnnnnnnnnnnnnnnnnnnnnnnnnnnnnnnnnnnnnnnnnnnnnnnnnnnnnnnnnnnnnnnnnnnnnnnnnnnnnnnnnnnnnnnnnnnnnnnnnnnnnnnnnnnnnnnnnnnnnnnnnnnnnnnnnnnnnnnnnnnnnnnnnnnnnnnnnnnnnnnnnnnnnnnnnnnnnnnnnnnnnnnnnnnnnnnnnnnnnnnnnnnnnnnnnnnnnnnnnnnnnnnnnnnnnnnnnnnnnnnnnnnnnnnnnnnnnnnnnnnnnnnnnnnnnnnnnnnnnnnnnnnnnnnnnnnnnnnnnnnnnnnnnnnnnnnnnnnnnnnnnnnnnnnnnnnnnnnnnnnnnnnnnnnnnnnnnnnnnnnnnnnnnnnnnnnnnnnnnnnnnnnnnnnnnnnnnnnnnnnnnnnnnnnnnnnnnnnnnnnnnnnnnnnnnnnnnnnnnnnnnnnnnnnnnnnnnnnnnnnnnnnnnnnnnnnnnnnnnnnnnnnnnnnnnnnnnnnnnnnnnnnnnnnnnnnnnnnnnnnnnnnnnnnnnnnnnnnnnnnnnnnnnnnnnnnnnnnnnnnnnnnnnnnnnnnnnnnnnnnnnnnnnnnnnnnnnnnnnnnnnnnnnnnnnnnnnnnnnnnnnnnnnnnnnnnnnnnnnnnnnnnnnnnnnnnnnnnnnnnnnnnnnnnnnnnnnnnnnnnnnnnnnnnnnnnnnnnnnnnnnnnnnnnnnnnnnnnnnnnnnnnnnnnnnnnnnnnnnnnnnnnnnnnnnnnnnnnnnnnnnnnnnnnnnnnnnnnnnnnnnnnnnnnnnnnnnnnnnnnnnnnnnnnnnnnnnnnnnnnnnnnnnnnnnnnnnnnnnnnnnnnnnnnnnnnnnnnnnnnnnnnnnnnnnnnnnnnnnnnnnnnnnnnnnnnnnnnnnnnnnnnnnnnnnnnnnnnnnnnnnnnnnnnnnnnnnnnnnnnnnnnnnnnnnnnnnnnnnnnncaggtgcttctcagcttcacgggaaagggcctgctgtaccacggaaattgtgaccgcttcagaggcaaggcttgccacttggatctgggtggaatcagaacgtgcaggtctcccaggatggacactcactgcgccctttctgctgcttggtgttcttctggaggagcgtgagttctcagtggagcgcttcttggcacttctgacgtgcctcccacggagggagccgggcccttgctgctcaggaggtgcagactgtcctgtgctctgggccttgcggctctgttgctagacggttgttagaggggcagctctaggctg

SEQ ID NO: 23377 - DNA, 1345 bp, Macaca Mulatta
  misc_feature (1)...(1345): n = A,T,C or G
ggctcgagggaccgtctgtcgcgggacgggctggccagctggggcgcggagcctggaggaggannnnnnnnnnnnnnnnnnnnnnnnnnnnnnnnnnnnnnnnnnnnnnnnnnnnaaacaagtaccagccacacagcggctcctctggcccaagcagccacagtcccccggccgcgatggcgctgcaaagccaggcgagcgaggaagcaaaggggccctggcaggaggcagaccaggaacggccggagccggtgggtagcccagaaccggagcctgagcccgagcctnnnnnnnnnnnnnnnnnnnnnnnnnnnnnnnnnnnnnnnnnnnnnnnnnnnnnnnnnnnnnaccggaccccgcacctctgccggagctggagtttgagtccgagcgggtgcacgaacccgagcccacgcctacggtggagacccgcggcaccgcgcgcggcttccagcctcccgaaggtggcttcggctgggtggtggtgttcgctgccacctggtgcaacggctccatcttcggcatccataactctgtcgggatcctctactccatgctgctagaggaggaaaaggaaaaaaatcgccaagtggagttccaagcannnnnnnnnnnnnnnnnnnnnnnnnnnnnnnnnnnnnnnnnnnnnnnnnnnnnnnnnnnnnnnnnnnnnnnnnnnnnnnnnnnnnnnnnnnnnnnnnnnnnnnnnnnnnnnnnnnnnnnnnnnnnnnnnnnnnnnnnnnnnnnnnnnnnnnnnnnnnnnnnnnnnnnnnnnnnnnnnnnnnnnnnnnnnnnnnnnnnnnnnnnnnnnnnnnnnnnnnnnnnnnnnnnnnnnnnnnnnnnnnnnnnnnnnnnnnnnnnnnnnnnnnnnnnnnnnnnnnnnnnnnnnnnnnnnnnnnnnnnnnnnnnnnnnnnnnnnnnnnnnnnnnnnnnnnnnnnnnnnnnnnnnnnnnnnnnnnnnnnnnnnnnnnnnnnnnnnnnnnnnnnnnnnnnnnnnnnnnnnnnnnnnnnnnnnnnnnnnnnnnnnnnnnnnnnnnnnnnnnnnnnnnnnnnnnnnnnnnnnnnnnnnnnnnnnnnnnnnnnnnnnnnnnnnnnnnnnnnnnnnnnnnnnnnnnnnnnnnnnnnnnnnnnnnnnnnnnnnnnnnnnnnnnnnnnnnnnnnnnnnnnnnnnnnnnnnnnnnnnnnnnnnnnnnnnnnnngatgaagtacgtggaagaggagttctcagaaatcaaggagacctgggtgctcttgatgtgtattggggctacctcaggccttgggcgtcttgtgtcaggccacatcagtgactccatccctggacttaagaagatctacttgcagg

SEQ ID NO: 23378 - DNA, 179 bp, Macaca Mulatta
ctcctaccaggttaggtgtcccgagagtctggctcagtctttcaaatgaggtggattgattgtcttacgcttcatttgggcacagtaagaaaacgatcaaatcccaaacctgtccccagacttccacatctcagtaagtggcccattcactccagcaatcactccagaatcatcaacag

SEQ ID NO: 23379 - DNA, 141 bp, Macaca Mulatta
gaaatccaaggagaatcctcggaacttttcggacaaccagctgcaagagggcaagaacgtgatcgggttacagatgggcaccaaccgcggggcatctcaggcaggcatgactggctacgggatgccacgccagatcctctg

SEQ ID NO: 23380 - DNA, 127 bp, Macaca Mulatta
ttttaaaaggcagtggtagggtagagggtggcaggggagacagctggagagcactgaggacgtggactcacagatactgtgtgagttgggaagcccgcttgggagaccccactgccagccaggcatg

SEQ ID NO: 23381 - DNA, 707 bp, Macaca Mulatta
ggctgcgggaagaagataacggcagcgtgaggaaaccttggctttgaccacttctcgtgttgtcatcgttggctttgctcaccgcccgggcttaccagatggaactcttctgtaaagcagcttggaccctccagccagtcccattcgggaaagaggaaaccggaggccgggctcgcggttttgctggagttcttggatgactcagccctgggacctgcacagggacctgtgacttgtgttcgtcgggggccggtgtcactttccgttttgatccaggccctttcactgtaaaattatttattggattcctttagagtaatgggaaaattctaatgttttatgtaggaaaatgccttgccattctagttgaatatgttcaaggaaattgtttttgttgttgttctgtgttctcgagtttcaggagttaaatcattcttcctcccagataaaacattttctcttttaggacgtggatattctctctaggcagttatttttgtttgtatttcgacagtatcaagcataggccctgaacatgacctgttagccatatcctgacgtgtaaaattatctgaaaactcagacactcttccattctaatctaattgtaaaatttctagcagtgggcgctgtgtgcctgccctcaggttcttttccagtggcagttgaatgtgctcatataccctatggagagcactgttttagca

SEQ ID NO: 23382 - DNA, 782 bp, Macaca Mulatta
caggataagctggatctccttgagccgtctaaatttcccagtgtcttcaggtttcccaagaccacttccctgtgggcttccaaaatggcctttatcatttctccagtctgtcaccctcctttcctgctcccatacacccaaggcttgtttcttcccctgtaaaaaccgtcactgcgtcaatctctggttcactcaactagtcaccatgtcttgaggcatgaagcctcagctcttggaattgctggcaaggggtgactgcctctgtcattgtgtttttcaaagtgatttctgtagttttttgacctgagatctgagcaatttgaacactaacccctcccctcctggctcaagaattaatcccaagtcagtatgcagaaaataaatatttaatatgacatgacacttctcccatttcctttctccttcctcctgaaggccttaaggtggccccatctctagagtgacctttcctttctgactgcttcctgggcttatatcccttatggcgggtgtaacctctaacctctagctacttccaggccagaggaggaaggtggcccctggctaaagtagatgctgcaagggctgagaaccaggccgcgcagccccagacactatctcgagggctcccttgggacaagcccaagctgactctggaatccctcctctgtagcagctccgtagctcctctggttgtggctgtcacagtcccttgcctcctgggctgcagcagccaacccacacccacaccgctggggcaggggtagacgaggcaaaattca

SEQ ID NO: 23383 - DNA, 716 bp, Macaca Mulatta
gtgggcggggcctggtggtaagagcgcgctaccgaaaggaggtgggcggggcatgtaaataggagggcgtatctgttgatgtggacccgcccgcaggggacttcgcggccttgctgcaggcggggctttccgtgcgccaagcgctggtgctgaacctggcctctgcgctcacggccttcgcgggtctctacgtggcactcgcggttggagtcggcgaggagagcgaggtctggatcctggcagtggccaccggcctgttcctctacgtggcactctgcgacatggtcaggatggtgaggggaggggctgctctgggccgggaactgagcagcggagctgagcaggggcgctgacctggtacccacttgctcctcagctcccggccatcttgaaagtacgggacccacggccctggctcctctttctgctgcacaacgtgggcctgctgggcggctggaccgtcctgctgctgctgtccttgtacgaggatgatatcaccctctgataccctgccctagtctcccacctttgacccaagatcccacaccccacaaacctacagcccagaaaccagaagcccctatagaggccccagtcctaactccaataaagacactcttgtccttgcagcatggctgtgctctccttgttgggtgggaaaggtcctcagctgagaaaggacaattgcggcactgccttctccccatcggggtgcc

SEQ ID NO: 23384 - DNA, 777 bp, Macaca Mulatta
  misc_feature (1)...(777): n = A,T,C or G
gggactagggacaataaaaggttaaatatctcctaattttttgtattgattacatgttgaaatgttaacattggaaatgttgggttaaagaaaaatatacaattaaaatgaatcttagctgggcgtgnnnnnnnnnnnnnnnnnnnnnnnnnnnnnnagaggccaagatgggtgggtcatnnnnnnnnnnnnnnnnnnnnnnnnnnnnnnnngcatggcgaaaccctgtttctactgnnnnnnnnnnnnnnnnnnnnncgtggtggtgtacacctgtggtcccagctgctcggagggctgaggcagannnnnnnnnnnnnnnnnnnnnnnggaggctgcagtgggctgagattgnnnnnnnnnnnnnnnnnnnnnnnnnnngagtgagattcttatctcaggaaaaaaaagaatcgtctgtttccagttttttttaatgtgcttactagaaaagataaaatcacacatggttcacgttttatttctactaagacagcaccgttaagaacatagagctttgaggcattgtggtattagaaccaaatctgtttaccacagtaagcttacagggagttacttgagatcttaataaaaaattataatctttgtcagccttcattatgattttgtgttcttattattccagtaattctagactacatatgggaaaagctaagagccacagtggtgaagatgggnttgctcacctttacgtgcactttttagcaggtaatttttcagtttgaaaaggacaaaaatataatgaaatccatagtt

SEQ ID NO: 23385 - DNA, 414 bp, Macaca Mulatta
aaatgacagttctttgtaggtcaaatggtgtttctgtgcttcctttgcagaggcagcaggctccaggaaggcatccagacaacagcgtgagagggaagggcatggactgcgccaccctcacctgcatggtgcagctggctcagatcctagtcggaggtggcctgggctttctggtcaacacagctgggagcgtcgtccttgtggtgatcacagcatctgcggtggcactgataggctgttgctttgtggctctctttgttagatacgtgaattaggtcaataaagagacaatgaccctaacctcagacacagagaagcacatggcaggaagttaacatttcctgcagctctgaatcttagggtctgcccattggatgcccagtattgtgatttcagccatagaatctgcccacc

SEQ ID NO: 23386 - DNA, 757 bp, Macaca Mulatta
tggcttttggaggttaggaagggatagggatcccagacagggggtttgcaaataagaaagtaggggcattttctttggtgcactccatagttccaacggcagtcttgagctgattccagtaaggaactaagggtggactttcttctttggttctttggcccgtttgatttcttcagctggggcagggtgaggatggtgaaagaaaccagcctcaggtgtgtctcctcatttctgtctcatctaaacttcagcttccaggcatcgcacggtagttttgcttggactcttgggctcttctgggttgttatccgttttctttgattcttcattagggttgatatcatcggccttctcctcctttactactttggtttcaatcatttccttctgctgattcttgtttgtaaaagggaaggccttcacataccttttgacatagcaaaatccaagaccagctgcagcaccaaaaaagaggagagcaagcactagcagagccgtggggacacctccaaacccagcagcttcattcttgaatgctgctttattttcaacaaatggttcagtttctgtagacatggtgctagtttccataaaaacttctgtaatgcaaatcaatttttttctccgtggaatagaagtggaagctggagcaggagtagtagtaggggcaggtgctgtagagtaaggggacgccaccgagtaggtactgtcactgacaataaattctgttgtgtgtgttgcagtttgagtgttgacc

SEQ ID NO: 23387 - DNA, 789 bp, Macaca Mulatta
ttttttatatacaaaattgtagtatacgccaagtgtggagttatattgtttgttgtaataagataaaaataaaagaaaatatgaagtgttcttgtttgcgggaaggataaattgtttggtcatgttttcataaccttgaaggccgcgagaaaacaaaataatttttttaagatattttttgggtggggcaagagaggtcaaaaaagttttatttttttggagtgtttattggatctaaaacagatgaatattcgaattaaaaatacatttattggacccggctggggggaggctggatgttgagggttgggattaaaaacttcccagagcccaatccttgcaaggcctttgggactcaaaacacaggatctgactggttggggcacaataccatcttgaacgcccacaaaaaagtttgggttttgttgctgaagggcaggtggctccaggcagggctgatggtggcagggtggggaggggacaggacaagagatccgggtgtggaaggatgacagggagtgtggaaggatgacagggattccgcagcagcaggggggaagggtgggagcacacaggcacagaacactgtgagcaggactgccaggccagggtcgcaagcgctaccatctgggtgtacacaggggtcctgagctgatgaagctgggggagcagggccaacggctgtcaacacaagctcaggggctcggggtttaccccgagggcacagggcagccatgtaggatggagttggcatgagttgagcctgggctggctgtgtggtctcaaccc

SEQ ID NO: 23388 - DNA, 491 bp, Macaca Mulatta
  misc_feature (1)...(491): n = A,T,C or G
agttatataagtttggagagacagtttctattgttttttggacagacacttggagaccagaaagcttctttgacaaagtgaagaagaacagacaaaatggcatgcacacattatgtttactnnnnnnnnnnnnnnnnnnnnnnnnnnnnnnnnnnnnnnnnnnnnnnnnnnnnnnnnnnnnnnnnnnnnnnnnnnnnnnnnnnnnnnnnnnnnnnnnnnnnnnnnnnnnnnnnnnnnnnnnnnnnnnnnnnnnnnnnnnnnnnnnnnnnnnnaccgaggagacactttgtgttggcttagccagggttggagcagacgaccagaaaattgcagcaggcactttacagcaaatgtgtactgtggacttgggagaaccattgcattccttgatcatcacaggaggcagcatacatccaatagagatggagatgctaaatctcttttccataccagaaaatagctcagaatctcaaagcatagatggactttga

SEQ ID NO: 23389 - DNA, 820 bp, Macaca Mulatta
  misc_feature (1)...(820): n = A,T,C or G
gggccattactggaggaaaaggtcccgcagagctgagcagtcagcgatgtgtgacttcaccgaagaccagaccgcagagttcaaggaggccttccagctgtttgaccgaacaggtgatggcaagatcctgtacagccagtgtggggacgtgatgagggccctgggccagaaccctaccaacgccgaggtgctcaaggtcctggggaacccccaagagtgatgagatgaacgtgaaggtgctggactttgagcactttctgcccatgctgcagacagtggccaagaacaaggaccagggcacctatgaggattatgtcgaaggacttcgggtgtttgacaaggaaggaaatggcactgtcatgggtgctgaaatccggcatgttcttgtcacactgggtgagaagatgacagaggaagaagtagagatgctggtggcagggcacgaggacagcaatggttgtatcaactatgaagcgtttgtgaggcatatcctgtcggggtgacgggcccatgggggcggagctcgtccgcatggtgctgaatggctgaggaccctcccagtctcccgactccgtgcctttccctgtgtgaattttgtatctagcctggagtttccctagggctctcttgtctcagcaccttttcccatccttgtctcttgggatgatggtttgtccgtcagcatttcacaataattgactttgcctctccccgaagcggcgcgggacagtattcgcaagagatcgagaggtcggccgccttcgggcccttagagcctttaatgtnnnnnnnntttagttttgggcgcgccgcggccccc

SEQ ID NO: 23390 - DNA, 619 bp, Macaca Mulatta
aagaaagggggtatttcctccgctaaatttctgaaggtcttcattccatctcatcttcctttctcatgttttggctttgggactaggcatctatattggaaagcgactgagcacaccctctgccagcacctactgagggaaaggaaaagcccctggaaatgcgtgtgacctgtgaagtggtgtattgtcacagtagcttatttgaacttgagaccattgtaagcatgacccaaactaccaccctgtgtttacatatccaattccagtaactctcaaatccagtattttattcaaactctgttgaggcattttactaaccttataccctttttggcctgtaagacattttagaatttcctaacagagtttactgttgtttagaaatttgcaagggcttcttttccgcaaatgccaacagcagattataatgtcgtcaacaaggctattatccctaattagtaccaccagagtagacctgtatcattcatggtataaatttaactcttgcaacataactagcatctctctcttaaaacgagatcaggttagcaaatgatgtaaaagaagcttattgtctagtagaaaattacccccaagacaaaggcgagctttcctaagg

SEQ ID NO: 23391 - DNA, 1633 bp, Macaca Mulatta
  misc_feature (1)...(1633): n = A,T,C or G
actttcctcagcttggctgtttatgacaattatatattctggtcagactggggaagaagagctatcctgcggtccaacaagtacacaggaggagatacaaaaattcttcgttccgatattccacatcagccaatgggaatcatagctgttgccaatgacaccaatagctgtngtgaactttctccatgtgcattattgaatggaggctgccatgacttgtgccttttaactcccaatgggagagtgaattgttcctgcaaaggggaccgaatattgctagaggaaaacannnnnnnnnnnnnnnnnnnnnnnnnnnnnnnnnnnnnnnnnnnnnnnnnnnnnnnnnnnnnnnnnnnnnnnnnnnnnnnnnnnnnnnnnnnnnnnnnnnnnnnnnnnnnnnnnnnnnnnnnnnnnnnnnnnnnnnnngaaaacagaagctgtcgaagaggcttcaaaccttgctataatcgccgctgcattcctcatggcaagttatgtgatggagaaaatgactgcggagataactctgatgaattagattgtaaaggtaaatacttgttccatcagtctcnnnnnnnnnnnnnnnnnnnnnnnnnnnnnnnnnnnnnnnnnnnnnnnnnnnnnnnnnnnnnnnnnnnnnnnnnnnnnnnnnnnnnnnnnnnnnnnnnnnnnnnnnnnnnnnnnnnnnnnnnnnggttcataagatgtaattctacttcactgtgtgttctgccaacctggatatgcgatgggtctaatgactgtggagactattcagatgaattaaagtgcccagncagttcaaaacaaacacaaatgtgaagaaaattattttagttgtcctagtggaagatgcattttgactacctggatatgcgatggtcagcaagattgtgaggatggacttgatgaattccactgtgngattcttcctgctcttggaaccaatttgcttgttctgcacaaaaatgtatttctaagcattggatttgtgatggagaggatgattgtggggatggattagatgaaagtgatagcatttgtggtgnnnnnnnnnnnnnnnnnnnnnnnnnnnnnnnnnnnnnnnnnnnnnnnnnnnnnnnnnnnnnnnnnnnnnnnnnnnnnnnnnnnnnnnnnnnnnnnnnnnnnnnnnnnnnnnnnnnnnnnnnnnnngctcccaataatacatgtgatgaaaatgctttcatgtgccataataaagtatgcattcccaagcaatttgtttgtgaccatgatgacgactgtggagatggctctgatgagtcatcacagtgtggnggataccgacagtgtggtacagaagaatttagttgtgctgatgggcggtgtcttctaaatactcaatggcagtgtgatggagactttgactgtcctgaccattctgatgaagcacctttaaatccaaagtgtaaaagtgcagncagaacagtcatgcaacagttcattttttatgtgcaaaaatggcaggtgcattcccagtggaggtctttgcaacaataaggatgactgtggcgatggttcagatgagagaaactgccatataaatgaatgtttgagtaagaaagtcagtggatgttctcaagactgtcaagaccttccaatcagttataag

SEQ ID NO: 23392 - DNA, 747 bp, Macaca Mulatta
  misc_feature (1)...(747): n = A,T,C or G
gcaccgtgcttacgcatgcgcacactgtcgcacgcgcagcgtttacgcacacaccgagactcgcgcatgcgcatatcctgcatacagcagcgcaataccgttatntccgtctccgtagaaacactcggactatggcggagtcgactggactgttggagatgtctgagctccccggagacagcagtgtcccacaggtgggcacagcgagtggcgtcagcgacatactgcagggggcagtcggcggcggggttcgggtgcaggagtcccgggaaggcctagtggccgaagctacgcggtccatggcgcgggtgccgagccctgtgcccgagcccatccccagcagcgtcccgggcctggcgtccgcgccagacccccatcagcagctcgctttcttagaaattaaccggcagctcttgttccgcgagtatctggatggtagctccatgattccggtcagattactacgggatttcgaggaacgccgcaggctgttcgtggaaggctgcagggcgagggaagcagcctttgacgcggatccaccgcagatggacttcgctgctgtcgcgtttactgtagcgctgactgcctccgaggccctcagtcctctggccgactgagtcggctgtgatgatgggactggtggcaaagaatagccaagtgacccttttcggatcaaaaaaagaggcaggctgtgccagtttagttaactctgtcgttataggggatgcaaactggaagggaatacgg

SEQ ID NO: 23393 - DNA, 219 bp, Macaca Mulatta
  misc_feature (1)...(219): n = A,T,C or G
agagatgccaaaaatggggacatgacttctggacagaggacatgggccacgccnccatgcatccccaccnccgcccctccagacggcttacttacctcatacgcagctcatcttaaaccaatagaatcgctcggtggacgagagtgtctgactcagatatctacctcggagggagtttctgctactttagggaattattgactgggctttggggttgaa

SEQ ID NO: 23394 - DNA, 383 bp, Macaca Mulatta
gcctctgagagccagaatgggaatggactgagtgccccaacaggtcctggtggtggcccacatccccctcatactccctcccacccgcccagcacccgaatcactcgaagccagcccaaccacacacctgcatgtccacctggcccttccagcaaacctggtagtaacggcaaagaaacccggaggagcagcaaaagatagcatgacattctttcttcctgccaccaaccacatcccaagtgtctcctggagagcaagatagccttccactggctggctggtgtaccagtgttttagccactgaacttcagtggaggggtggcgagcagtgttcttatccaccctaatctcatactccctcgttgtccagctgaactagctgt

SEQ ID NO: 23395 - DNA, 355 bp, Macaca Mulatta
acagcctccacatccctatccataagtcgccagctaacacccagtaaagaggttcaaaaggaagaaattctacaaggtgatgaaacaaagtacccatcaacctctcatgtgacttcttaacttcattcatttggcttcacatcacatatcccttagaacagatccaatgggcaactcttaatatcagcttgcaactgttgatgtccctggttccagaaccacttttatttccaagaggagggcgttctttggagggggttcatagggcctggccttgcaatcccctccttggtcccatcttatctggtgaccaccatcattgttttccccatcatcttcctcaacacacatacat

SEQ ID NO: 23396 - DNA, 777 bp, Macaca Mulatta
ggggcctagggggtgaggcgcgatggcaggtgtgcgggctgggcttctgcgggcgatggggcggcaagtactgctgcttctcgcgctgtgcgccacaggcgcccgggggctctacttccacatcggcgagaccgagaagcgctgtttcatcgaggaaatccccgacgagaccatggtcatcggcaactatcgtacccagatgtgggataagcagaaggaggtcttcctgccctcgacccctggcctgggcatgcatgtggaagtgaaggaccccgacggcaaagtggtgctgtcacggcagtacggctcggagggccgcttcacgttcacctcccacacgcccggtgaccatcaaatctgtctgcactccaactctaccaggatggctctcttcgctggtggcaaactgcgtgtgcatctcgacatccaggttggggagcatgccaacaactaccctgagattgctgcaaaagataagctgacggagttacagctccgcgcccgccagttgcttgatcaagtggaacagattcagaaggagcaggattaccaaaggtatcgtgaagagcgcttccgactgacaagcgagagcaccaaccagagggtcctatggtggtccattgctcagactgtcatcctcatcctcactggcatctggcagatgcgtcacctcaagagcttctttgaagccaaaaacctggtgtagtgccctctttgtatgaccccttccttttttacctcaatttattttggtacctttcccccacaaagttcctt

SEQ ID NO: 23397 - DNA, 790 bp, Macaca Mulatta
cttaagttcctgatcatctaaaactccccctagataaaaacactacaaatagccatcttttgccttcatctcttgagcaaagcgttaagtatatggaagaaaatagacaaatacataccttacctggcctgactcatgcttgcaacttagcaagaccacgctgaacactgtggagccagaatgtgtggacttgtctttatagctttaatatatttagtacatgacctatttaacatcgtaaataagttgagcccttttacaaagcagtttgttttatttatgggggtttattgagtgggtcttcagcagtgttagcaaagcttaatggacttgcactaactatccttcctcccttttcctttgtaggatgctatgcaaagaactttgggcccaagggatttggctatggccaaggagcaggggctcttgttcatgcccagtaaggtgtaaaccctgaactaaacatcacacactgagaatctcttcataacctaggcacagataatctttaacactaaactactgtgaaattctaccagcattaagtactgtatattgccctgtacttggataggctggctaacttgtaggaagagagcactgtatcgtatccttttgctttattcaccagcattttgggggaacatttcttttacattttaaataaaacttcagcttgatttgggtgttcattgtcttttaattaatcttttggaggagaggctctgatttcagttagtggaaaatcatttgggtccctacctttgttaccccattacccagttgactc

SEQ ID NO: 23398 - DNA, 131 bp, Macaca Mulatta
aataggattgtacaaaaaggcacacagtattcgctttgcatttttcgaactagcaatggacgtggctggggtgtgaagacccttgtgaagattaaaagaatgagttttgtcatggaatatgttggagaggt

SEQ ID NO: 23399 - DNA, 711 bp, Macaca Mulatta
agaaacacagatttcagggactttcttaacacaagattccagacagatgtgaatagtgttatgcatagatattagacttgaatatatgtgacaatatagtagagtacaggagaaaatatgtaggataatatttctggaagaatggattataagttcaaacatcatatagaagagaaaatctagaatcaaaatgaagcgttagcaaaccagtggatttattatacttttgataatttccctaccctattttttgctctcagagtgccggggtaatcttggctcaacggtggaaaagacagagcttttagtatttttaatagcattaaaatgaagattaggaggccagaatgcatgtggccttctgctccgtggggggcccgggcattagccagagtgcacctgttagcacctcctggcagctctgagtgaccccgccatccttctgtgctttccagggttctctttcttcgtgagacaggctatgagggaagccctgattcacaggacccagacaaacgaagctgcgtttctgacacaccatgagaatctgcggcactgacgggcaagtgacttttgcaagcctgtggctggttccaatgccctgaatcatctatctcatggaggaaccaattaacaccaatgaatcaaccattaacgctgaggttgagttttcctttctgaaaatatctgcgttgttaagaacaaaaacca

SEQ ID NO: 23400 - DNA, 579 bp, Macaca Mulatta
gaaacagcccgagaacattctaaaggccaatctgcctgtgtccacttcagacccaatgaaggcagtgatggaaacaggcatccaggagctccctctgttgagaagtccagaggtgagacagctggtgatcagcggtgtgcaaaggggaaaggcttcgtgaagcagccctcctgtatcagggtggctgggcctgatgagaaaggagaggactccaggcgggcagctgcaagccttccaccacacgatagccactggaagcccagcaggcggcatgacccagaacccaaggccaaatgtgccccccagaaaaggcgcactcaagagctcaaaggaggaaggtgctccccggctggttctagccggcctggcagtgcccggggggaggcagtccatgctgggcagaatcctccccaccatcgtacaccaagaaacaaagtgacacaaaccaagctcgcaggagggctctattcagatttgccacagagcacagaggagttgaggtcaggagccaggaggctggagacatccaccctgtccgaggactttcaggtatctaaggagactgatccagtacctggt

SEQ ID NO: 23401 - DNA, 2206 bp, Macaca Mulatta
  misc_feature (1)...(2206): n = A,T,C or G
ccggcgctgcctggaggcggccgcactcgggngggatcatggcccaagttgcaatgtccaccctgcccgttgaagatgaggagtcctcggagagcaggatggtggtgacattcctcatgtcagctctcgagtccatnnnnnnnnnnnnnnnnnnnnnnnnnnnnnnnnnnnnnnnnnnnnnnnnnnnnnnnnnnnnnnnnnnnnnnnnnnnnnnnnnnnnnnnnnnnnnnnnnnnnnnnnnnnnnnnnnnnnnnnnnnnnnnnnnnnnnnnnnnnnnnnnnnnnnnnnnnnnnnnnnnnnnnnnnnnnnnnnnnnnnnnnnnnnnnnnnnnnnnnnnnnnnnnnnnnnnnnnnnnnnnnnnnnnnnnnnnnnnnnnnnnnnnnnnnnnnnnnnnnnnnnnnnnnnnnnnggaaagctttaggcaaatccacagtggtacctgtaccatatgagaagatgctgcgagaccagtcggctgtggtagtacaggggcttccggaaggcgttgcctttaaacaccccgagaactatgatcttgcaaccctganatggattttggagaacaaagcagggatttcattcatcattaagagnnnnnnnnnnnnnnnnnnnnnnnnnnnnnnnnnnnnnnnnnnnnnnnnnnnnnnnnnnnnnnnnnnnnnnnnnnnnnnnnnnnnnnnnnnnnnnnnnnnnnnnnnnnnnnnnnnnnnnnnnnnnnnnnnnnnnnnnnnnnnnnnnnnnnnnnnnnnnnnnnnnnnnnnnnnnnnnnnnnnnnnnnnnnnnnnnnnnnnnnnnnnnnnnnnnnnnnnnnnnnnnnnnnnnnnnnnnnnnnnnnnnnnnnnnnnnnnnnnnnnnnnnnnnnnnnnnnnnnnnnnnnnnnnnnnnnnnnnnnnnnnnnnnnnnnnnnnnnnnnnnnnnnnnnnnnnnnnnnnnnnnnnnnnnnnnnnnnnnnnnnnnnnnnnnnnnnnnnnnnnnnnnnnnnnnnnnnnnnnnnnnnnnnnnnnnnnnnnnnnnnnnnnnnnnnnnnnnnnnnnnnnnnnnnnnnnnnnnnnnnnnnnnnnnnnnnnnnnnnnnnnnnnnnnnnnnnnnnnnnnnnnnnnnnnnnnnnnnnnnnnnnnnnnnnnnnnnnnnnnnnnnnnnnnnnnnnnnnnnnnnnnnnnnnnnnnnnnnnnnnnnnnnnnnnnnnnnnnnnnnnnnnnnnnnnnnnnnnnnnnnnnnnnnnnnnnnnnnnnnnnnnnnnnnnnnnnnnnnnnnnnnnnnnnnnnnnnnnnnnnnnnnnnnnnnnnnnnnnnnnnnnnnnnnnnnnnnnnnnnnnnnnnnnnnnnnnnnnnnnnnnnnnnnnnnnnnnnnnnnnnnnnnnnnnnnnnnnnnnnnnnnnnnnnnnnnnnnnnnnnnnnnnnnnnnnnnnnnnnnnnnnnnnnnnnnnnnnnnnnnnnnnnnnnnnnnnnnnnnnnnnnnnnnnnnnnnnnnnnnnnnnnnnnnnnnnnnnnnnnnnnnnnnnnnnnnnnnnnnnnnnnnnnnnnnnnnnnnnnnnnnnnnnnnnnnnnnnnnnnnnnnnnnnnnnnnnnnnnnnnnnnnnnnnnnnnnnnnnnnnnnnnnnnnnnnnnnnnnnnnnnnnnnnnnnnnnnnnnnnnnnnnnnnnnnnnnnnnnnnnnnnnnnnnnnnnnnnnnnnnnnnnnnnnnnnnnnnnnnnnnnnnnnnnnnnnnnnnnnnnnnnnnnnnnnnnnnnnnnnnnnnnnnnnnnnnnnnnnnnnnnnnnnnnnnnnnnnnnnnnnnnnnnnnnnnnnnnnnnnnnnnnnnnnnnnnnnnnnnnnnnnnnnnnnnnnnnnnnnnnnnnnnnnnnnnnnnnnnnnnnnnnnnnnnnnnnnnnnnnnnnnnnnnnnnnnnnnnnnnnnnnnnnnnnnnnnnnnnnnnnnnnnnnnnnnnnnnnnnnnnnnnnnnnnnnnnnnnnnnnnnnnnnnnnnnnnnnnnnnnnnnnnnnnnnnnnnnnnnnnnnnnnnnnnnnnnnnnnnnnnnnnnnnnnnnnnnnnnnnnnnnnnnnnnnnnnnnnnnnnnnnnnnnnnnnnnnnnnnnnnnnnnnnnnnnnnnnnnnnnnnnnnnnnaggccctaataacaacaatcctcaaacctcagctgttcgaacccctacccagactaatggttctaacgttcccttcaagccacgagggagagagttttcctttg

SEQ ID NO: 23402 - DNA, 648 bp, Macaca Mulatta
cccctccctcactcatcatttccctctctccaggactctgatgaaccagaccctcaggaggtgacatacgcacagttggatcaccgcgttttcacacagagaaaaatcgctcgcccttctcagaggcccaagagacccccaacagataccagcgtgtacatagaacttccaaatgctgagcccagatcattgtctcctgcccgtgagcaccagagtcaggccttgagggggtcctccagggagacaacagccctgtctcaaacccagcttgccagttccaatgtaccagcagcaggaatctgaaggtgtgagtctgcatcttagggcatcgctcttcctcacaccacgaatctgaacgtgcctctctcttgcttgccaatgtctaaggtcctcactgcctgctggaaagaaaacacactcccttgcttagcccacaattctccacttcacttgatccctgcccacctctccaacctactggcttacttcctagtcctactggaggctgcagtcacaccaaggaactcacaattccaaacatacgagaggctccctcttaacacggcacttagacacgtgctgttccaccttccctcatgctgttccacctccccccagactatctttcagcctctgtcagcagtgaaa

SEQ ID NO: 23403 - DNA, 605 bp, Macaca Mulatta
gcatccccgtatcaaaaatatcaagaagcacctagcatctgatagaggcttttaagagcagattgacaggtgaatgtcacaggtccacaagaaggacaaatagatttaagttggtacaaaagtttccatttgttggttctcccttttaagaagataatgtgcccctgcacttgagtaccttacttgaaacttaaagaaatgtaattggttatggtgctgggagaaaggggtgtacctgtgaggacattgagaaagataaacaaaggggaaggaagagaggacaacctgtaacttttagcaaaggctaccacttttaactgttagagaaaatgctattgctagaactcacaatgtcaatatacattatcagaacttaagtcctggagatcagagactgtttcacctgaaattgctagcacctagaatggcccctggttgcggtaggcaatcaataacactctttgaataataacgaggccttcaaagattctgcaagtcagactggcctctggctttgtgatattgtgctatggtcccatgaacccacaattgttgatgaggagtagcagtagaatatcaaggacggaagtgagacaacaagtcta

SEQ ID NO: 23404 - DNA, 667 bp, Macaca Mulatta
acacggagtactaccaaggcaaacttgaacaaaattaaataaaggacggagtggattcattatcctcaattgtcagtgcataattcccaggaaatagtggcttctctgatgggctttatggatgtgacttcataaggtcattctttggaatgtccacaaggtctgggactgcggctggtgaacgggtccagcagatgtgagggccgagttgaggtttaccacgccaacacctggggcaccgtgtgcgatgacagctggtctatagaggatgctcacgtggtctgcaggcagctgggctgtggcctggccgtgtctgccctcccaggagccagcttcagccctgggtcaggcagcatcctcctcgatgatgtcaactgcacgggaagggagtcctctctggggcagtgccctcacggcggttggttcactcacaactgtgggcaccgtgaagatgctggcgtcatctgctcaggtgagtgaaggttcccctgggccagtcttgcagctgcctggaccaagcccgagatcctcagacagagtctgaaaatgcctctgtgcctaaaacttttccccatgtgcaggacagtggatttctgctcagactctggaaaatatgcccagctgttcaatatatggaagggtcccattcaacttgagtacctgcaaa

SEQ ID NO: 23405 - DNA, 1231 bp, Macaca Mulatta
  misc_feature (1)...(1231): n = A,T,C or G
agagcccaggacaaggcagctatgcagctgagtgagttggaagaggaaatggatcagaggattcaggctgcagaacatcagacacggaaagacnnnnnnnnnnnnnnnnnnnnnnnnnnnnnnnnnnnnnnnnnnnnnnnnnnnnnnnnnnnnnnnnnnnnnnnnnnnnnnnnnnnnnnnnnnnnnnnnnnnnnnnnnnnnnnnnnnnnnnnnnnnnnnnnnnnnnnnnnnnnnnnnnnnnnnnnnnnnnnnnnnnnnnnnnnnnnnnnnnnnnnnnnnnnnnnnnnnnnnnnnnnnnnnnnnnnnnnnnnnnnnnnnnnnnnnnnnnnnnnnnnnnnnnnnnnnnnnnnnnnnnnnnnnnnnnnnnnnnnnnnnnnnnnnnnnnnnnnnnnnnnnnnnnnnnnnnnnnnnnnnnnnnnnnnnnnnnnnnnnnnnnnnnnnnnnnnnnnnnnnnnnnnnnnnnnnnnnnnnnnnnnnnnnnnnnnnnnnnnnnnnnnnnnnnnnnnnnnnnnnnnnnnnnnnnnnnnnnnnnnnnnnnnnnnnnnnnnnnnnnnnnnnnnnnnnnnnnnnnnnnnnnnnnnnnnnnnnnnnnnnnnnnnnnnnnnnnnnnnnnnnnnnnnnnnnnnnnnnnnnnnnnnnnnnnnnnnnnnnnnnnnnnnnnnnnnnnnnnnnnnnnnnnnnnnnnnnnnnnnnnnnnnnnnnnnnnnnnnnnnnnnnnnnnnnnnnnnnnnnnnnnnnnnnnnnnnnnnnnnnnnnnnnnnnnnnnnnnnnnnnnnnnnnnnnnnnnnnnnnnnnnnnnnnnnnnnnnnnnnnnnnnnnnnnnnnnnnnnnnnnnnnnnnnnnnnnnnnnnnnnnnnnnnnnnnnnnnnnnnnnnnnnnnnnnnnnnnnnnnnnnnnnnnnnnnnnnnnnnnnnnnnnnnnnnnnnnnnnnnnnnnnnnnnnnnnnnnnnnnnnnnnnnnnnnnnnnnnnnnnnnnnnnnnnnnnnnnnnnnnnnnnnnnnnnnnnnnnnnnnnnnnnnnnnnnnnnnnnnnnnnnnnnnnnnnnnnnnnnnnnnnnnnnnnnnnnnnnnnnnnnnnnnnnnnnnnnnnnnnnnnnnnnnnnnnnnnnnnnnnnnnnnnnnnnnnnnnnnnnnnnnnnnnnnnnnnnnnnnnnnnnnnaatgaaaaccctcattgttgctggagaacggacagttctgcagctctgggacacagctggtcaggaaaggcaa

SEQ ID NO: 23406 - DNA, 345 bp, Macaca Mulatta
  misc_feature (1)...(345): n = A,T,C or G
tgaagggtgtccccgcgctgctgtcccccgagctgctctacgcgctggcgcgcatggggcacggggacgagatcgnnnnnnnnnnnnnnnnnnnnnnnnnnnnnnnnnnnnnnnnnnnnnnnnnnnnnnnnnnnnnnnnnnnnnnnnnnnnnnnnnnnnnnnnnnnnnnnnnnnnnnnnnnnnnnnnnnnnnnnnnnnnnnnnnnnnnnnnnnngggctggcccatgagggtttctggacagggtttcctccaacccagccattttgtcttccagagagccctggcaaagttagagaggttcgagttttatgagcgggctaagaaggcttttgctgttgtggcaa

SEQ ID NO: 23407 - DNA, 650 bp, Macaca Mulatta
tcccgggatggagaatggagaccaaacctgtgataacctgtctcaaaaccctcctcatcatctactccttcgtcttctggatcactggggtgatcctgctggctgttggagtctggggcaaacttactctgggcacctatatctcccttattgccgagaactccacaaatgctccctatgtactcatcggaactggcaccactattgttgtctttggcctgtttggatgctttgctacatgtcgtggtagcccatggatgctgaaactgtatgccatgtttctgtccctggtgttcctggctgagctcgtagctggcatttcagggtttgtgtttcgtcatgagatcaaggacaccttcctgaggacttacacggacgctatgcagaattacaatggcaatgatgagaggagccgggcagtggaccatgtgcagcgcagtctgagctgctgtggcgtgcagaactacaccaactggagcaccagcccctacttcctggatcatggcatcccccccagttgctgcatgaacgaaactgattgtaatccccaggatctacacaatctgactgtggccgccactaaagttaaccagaagggttgttatgatctggtaactagtttcatggagactaacatgggaatcatcgct

SEQ ID NO: 23408 - DNA, 499 bp, Macaca Mulatta
  misc_feature (1)...(499): n = A,T,C or G
ccgccaccaccactgcctccactaccgctgccacccttgaagaagaggggaaaccacagcacaggcctttgtctccttgtgatgtttttcatggttctggttgccttggtaggattgggactggggatgtttcagctcttccacttacagaaagagctggcagaactccgagannnnnnnnnnnnnnnnnnnnnnnnnnnnnnnnnnnnnnnnnnnnnnnnnnnnnnnnnnnnnnnnnnnnnnnnnnnnnnnnnnnnnnnnnnnnnnnnnnnnaggccagcccaactcaaggtccatgcctctgtaatgggaagacacctatggaattgtcctgctttctggagtgaaatatcacaagggtgaccttgtgatcaatgaaactgggctgtactttgcatattccaaagtcttcttccggggtcaaacttgtagcaacctggccctgagctacaaggtcttcctgacgaaatctaattctccccaggcatctgttgatgat

SEQ ID NO: 23409 - DNA, 740 bp, Macaca Mulatta
agcacacctgtttacctgtcttggtttcaccggttttataggagttgcaacagagggtggcattttacacttacttctgtgcctttcctgttgtaattggtcctgtttgcctgaactgtttttgtgctatggttgtgtgtgaaggtgtctgacaccgaaacattttgcgggaagctttgcctgctttcctgagagcggtcctgtccagctcacctgtggctcccaaggctccgccttgcttcttcctggtgggagcagccaggcgcctggtttccctctcgaattcgctttgagatgtgtgtgctgtgctgcggccacccctggcctgtctgtgcccactgaccctctgcctctgcctctgcccccaggcgcggggacctgccgtttgtcatgccccgccgaatggcccggaaaggcgctggcgatggttccgacgaggaggtggatggcaaagcggatggggctgaggccaaacctgccgaataagcctcttctcctgcagcctgagatggatggacagacggacaccacagcctccccttcccagaccctgcagcaggcctctccccaccttcttgggactgctgtgaacgcgcctccccctgccctcagccctgtgcccccatcctgtttccctccaggtgttgttgagggcatttggcttcctctgctgcatccccttccagctccctcccccgctcagaatctgataccaaagagacagggcccgggcccaggca

SEQ ID NO: 23410 - DNA, 189 bp, Macaca Mulatta
gagagtctgcgttcttctttctcccgcggccgccgtgcccgccgctagctccgagggcgcgcactggagcccaggctcctccgagagcgtggcgaccccggggctccgccggcaccggaggtggctctgagggcagggacgtgttggacacgctgacttttgaggctctgccaagcggcgccgctggag

SEQ ID NO: 23411 - DNA, 196 bp, Macaca Mulatta
cagatctcatgcaggcgacaccgaggacacagatgagacctccgttttggaggcgctggagagttcagagccgtcttctaccttcttcccaaaaagctgcaagatgcagtttcgaaactggaaggacagaaagtgttattgagcagagcatgaaagggtggagccctgtgctgcacgtacgtgcccgagccttcca

SEQ ID NO: 23412 - DNA, 2229 bp, Macaca Mulatta
  misc_feature (1)...(2229): n = A,T,C or G
catcaccctccccccagtcacctcacgtaccacaacctcacctaacctcnnnnnnnnntccgatacccccagccccgggatggcagcgcccgccagccttcccggccggaccggcggtcgccagtgccggctttagcctgtgggactaggccctgccgaggcctgacccctggagccaggacccactgtgcagccagcagccgggccgggactgaggggctgctcccccctcgcggcccgtcgggaggacgctgtcgtcccggggactgggggccggtgggtgnnnnnnnnnnnnnnnnnnnnnnnnnnnnnnnnnnnnnnnnnnnnnnnnnnnnnnnnnnnnnnnnnnnnnnnnnnnnnnnnnnnnnnnnnnnnnnnnnnnnnnnnnnnnnnnnnnnnnnnnnnnnnnnnnnnnnnnnnnnnnnnnnnnnnnnnnnnnnnnnnnnnnnnnnnnnnnnnnnnnnnnnnnnnnnnnnnnnnnnnnnnnnnnnnnnnnnnnnnnnnnnnnnnnnnnnnnnnnnnnnnnnnnnnnnnnnnnnnnnnnnnnnnnnnnnnnnnnnnnnnnnnnnnnnnnnnnnnnnnnnnnnnnnnnnnnnnnnnnnnnnnnnnnnnnnnnnnnnnnnnnnnnnnnnnnnnnnnnnnnnnnnnnnnnnnnnnnnnnnnnnnnnnnnnnnnnnnnnnnnnnnnnnnnnnnnnnnnnnnnnnnnnnnnnnnnnnnnnnnnnnnnnnnnnnnnnnnnnnnnnnnnnnnnnnnnnnnnnnnnnnnnnnnnnnnnnnnnnnnnnnnnnnnnnnnnnnnnnnnnnnnnnnnnnnnnnnnnnnnnnnnnnnnnnnnnnnnnnnnnnnnnnnnnnnnnnnnnnnnnnnnnnnnnnnnnnnnnnnnnnnnnnnnnnnnnnnnnnnnnnnnnnnnnnnnnnnnnnnnnnnnnnnnnnnnnnnnnnnnnnnnnnnnnnnnnnnnnnnnnnnnnnnnnnnnnnnnnnnnnnnnnnnnnnnnnnnnnnnnnnnnnnnnnnnnnnnnnnnnnnnnnnnnnnnnnnnnnnnnnnnnnnnnnnnnnnnnnnnnnnnnnnnnnnnnnnnnnnnnnnnnnnnnnnnnnnnnnnnnnnnnnnnnnnnnnnnnnnnnnnnnnnnnnnnnnnnnnnnnnnnnnnnnnnnnnnnnnnnnnnnnnnnnnnnnnnnnnnnnnnnnnnnnnnnnnnnnnnnnnnnnnnnnnnnnnnnnnnnnnnnnnnnnnnnnnnnnnnnnnnnnnnnnnnnnnnnnnnnnnnnnnnnnnnnnnnnnnnnnnnnnnnnnnnnnnnnnnnnnnnnnnnnnnnnnnnnnnnnnnnnnnnnnnnnnnnnnnnnnnnnnnnnnnnnnnnnnnnnnnnnnnnnnnnnnnnnnnnnnnnnnnnnnnnnnnnnnnnnnnnnnnnnnnnnnnnnnnnnnnnnnnnnnnnnnnnnnnnnnnnnnnnnnnnnnnnnnnnnnnnnnnnnnnnnnnnnnnnnnnnnnnnnnnnnnnnnnnnnnnnnnnnnnnnnnnnnnnnnnnnnnnnnnnnnnnnnnnnnnnnnnnnnnnnnnnnnnaggttcccgatgctataaaatctcagtaccagtttccaccccctctcattgcacccgcggccattcgggacggggagctgatctgcaatgggatccctgaggaatcacagatgcaccttttgaactctgagcacttagccacccaagcagagcagcaaganagtggctctgtagtgttgttgcgctccagtgcagcatattgaaacatttatctgctaagcagatgccttcgcattgggactctgaacagacagagaaggctgatattaagcctgttattgtgactgacggctcaatcaccacctccttgcaaacagctgacaagacacctacaccttcccactaccccttgtcctgcccctcagggattagcacccagaattccttgagctgctctccaccccaccagcccccagccctagaggacatcggctgcagttcttgtgcagaaaaatccaagaaaaccccttgtgggactgccaatgggccagtgaacacagaggtgaaagctaatggcccacacctctacagcagcccggaggattccacggacccccggcgacttccaggcgctaacacccccctaccaggcctctcacaccggcaaggctgaagccggcccctcacgccaccagcggctgggggccttcaaaacgacaccgtcggcatca

SEQ ID NO: 23413 - DNA, 3841 bp, Macaca Mulatta
  misc_feature (1)...(3841): n = A,T,C or G
gaatgaagaagcagtacgacgtctcatctgggaaaagaatctaaagtttgtgatgcttcataacctggagcattcaatgggaatgcactcatatgatctgggcatgaaccacctgggagacatgnnnnnnnnnnnnnnnnnnnnnnnnnnnnnnnnnnnnnnnnnnnnnnnnnnnnnnnnnnnnnnnnnnnnnnnnnnnnnnnnnnnnnnnnnnnnnnnnnnnnnnnnnnnnnnnnnnnnnnnnnnnnnnnnnnnnnnnnnnnnnnnnnnnnnnggttcttgtggtgcttgctgggctttcagtgctgtgggggccctggaagcacagctgaagctgaaaacaggaaagctggtgtctctcagtgcccagaacctggtggattgctcaactgaaaaatatggaaacaaaggctgcaatggtggcttcatgaaaggggctttccagtacatcattgataacaacggcatcgactcagacgcttcctatccctacaaagccnnnnnnnnnnnnnnnnnnnnnnnnnnnnnnnnnnnnnnnnnnnnnnnnnnnnnnnnnnnnnnnnnnnnnnnnnnnnnnnnnnnnnnnnnnnnnnnnnnnnnnnnnnnnnnnnnnnnnnnnnnnnnnnnnnnnnnnnnnnnnnnnnnnnnnnnnnnnnnnnnnnnnnnnnnnnnnnnnnnnnnnnnnnnnnnnnnnnnnnnnnnnnnnnnnnnnnnnnnnnnnnnnnnnnnnnnnnnnnnnnnnnnnnnnnnnnnnnnnnnnnnnnnnnnnnnnnnnnnnnnnnnnnnnnnnnnnnnnnnnnnnnnnnnnnnnnnnnnnnnnnnnnnnnnnnnnnnnnnnnnnnnnnnnnnnnnnnnnnnnnnnnnnnnnnnnnnnnnnnnnnnnnnnnnnnnnnnnnnnnnnnnnnnnnnnnnnnnnnnnnnnnnnnnnnnnnnnnnnnnnnnnnnnnnnnnnnnnnnnnnnnnnnnnnnnnnnnnnnnnnnnnnnnnnnnnnnnnnnnnnnnnnnnnnnnnnnnnnnnnnnnnnnnnnnnnnnnnnnnnnnnnnnnnnnnnnnnnnnnnnnnnnnnnnnnnnnnnnnnnnnnnnnnnnnnnnnnnnnnnnnnnnnnnnnnnnnnnnnnnnnnnnnnnnnnnnnnnnnnnnnnnnnnnnnnnnnnnnnnnnnnnnnnnnnnnnnnnnnnnnnnnnnnnnnnnnnnnnnnnnnnnnnnnnnnnnnnnnnnnnnnnnnnnnnnnnnnnnnnnnnnnnnnnnnnnnnnnnnnnnnnnnnnnnnnnnnnnnnnnnnnnnnnnnnnnnnnnnnnnnnnnnnnnnnnnnnnnnnnnnnnnnnnnnnnnnnnnnnnnnnnnnnnnnnnnnnnnnnnnnnnnnnnnnnnnnnnnnnnnnnnnnnnnnnnnnnnnnnnnnnnnnnnnnnnnnnnnnnnnnnnnnnnnnnnnnnnnnnnnnnnnnnnnnnnnnnnnnnnnnnnnnnnnnnnnnnnnnnnnnnnnnnnnnnnnnnnnnnnnnnnnnnnnnnnnnnnnnnnnnnnnnnnnnnnnnnnnnnnnnnnnnnnnnnnnnnnnnnnnnnnnnnnnnnnnnnnnnnnnnnnnnnnnnnnnnnnnnnnnnnnnnnnnnnnnnnnnnnnnnnnnnnnnnnnnnnnnnnnnnnnnnnnnnnnnnnnnnnnnnnnnnnnnnnnnnnnnnnnnnnnnnnnnnnnnnnnnnnnnnnnnnnnnnnnnnnnnnnnnnnnnnnnnnnnnnnnnnnnnnnnnnnnnnnnnnnnnnnnnnnnnnnnnnnnnnnnnnnnnnnnnnnnnnnnnnnnnnnnnnnnnnnnnnnnnnnnnnnnnnnnnnnnnnnnnnnnnnnnnnnnnnnnnnnnnnnnnnnnnnnnnnnnnnnnnnnnnnnnnnnnnnnnnnnnnnnnnnnnnnnnnnnnnnnnnnnnnnnnnnnnnnnnnnnnnnnnnnnnnnnnnnnnnnnnnnnnnnnnnnnnnnnnnnnnnnnnnnnnnnnnnnnnnnnnnnnnnnnnnnnnnnnnnnnnnnnnnnnnnnnnnnnnnnnnnnnnnnnnnnnnnnnnnnnnnnnnnnnnnnnnnnnnnnnnnnnnnnnnnnnnnnnnnnnnnnnnnnnnnnnnnnnnnnnnnnnnnnnnnnnnnnnnnnnnnnnnnnnnnnnnnnnnnnnnnnnnnnnnnnnnnnnnnnnnnnnnnnnnnnnnnnnnnnnnnnnnnnnnnnnnnnnnnnnnnnnnnnnnnnnnnnnnnnnnnnnnnnnnnnnnnnnnnnnnnnnnnnnnnnnnnnnnnnnnnnnnnnnnnnnnnnnnnnnnnnnnnnnnnnnnnnnnnnnnnnnnnnnnnnnnnnnnnnnnnnnnnnnnnnnnnnnnnnnnnnnnnnnnnnnnnnnnnnnnnnnnnnnnnnnnnnnnnnnnnnnnnnnnnnnnnnnnnnnnnnnnnnnnnnnnnnnnnnnnnnnnnnnnnnnnnnnnnnnnnnnnnnnnnnnnnnnnnnnnnnnnnnnnnnnnnnnnnnnnnnnnnnnnnnnnnnnnnnnnnnnnnnnnnnnnnnnnnnnnnnnnnnnnnnnnnnnnnnnnnnnnnnnnnnnnnnnnnnnnnnnnnnnnnnnnnnnnnnnnnnnnnnnnnnnnnnnnnnnnnnnnnnnnnnnnnnnnnnnnnnnnnnnnnnnnnnnnnnnnnnnnnnnnnnnnnnnnnnnnnnnnnnnnnnnnnnnnnnnnnnnnnnnnnnnnnnnnnnnnnnnnnnnnnnnnnnnnnnnnnnnnnnnnnnnnnnnnnnnnnnnnnnnnnnnnnnnnnnnnnnnnnnnnnnnnnnnnnnnnnnnnnnnnnnnnnnnnnnnnnnnnnnnnnnnnnnnnnnnnnnnnnnnnnnnnnnnnnnnnnnnnnnnnnnnnnnnnnnnnnnnnnnnnnnnnnnnnnnnnnnnnnnnnnnnnnnnnnnnnnnnnnnnnnnnnnnnnnnnnnnnnnnnnnnnnnnnnnnnnnnnnnnnnnnnnnnnnnnnnnnnnnnnnnnnnnnnnnnnnnnnnnnnnnnnnnnnnnnnnnnnnnnnnnnnnnnnnnnnnnnnnnnnnnnnnnnnnnnnnnnnnnnnnnnnnnnnnnnnnnnnnnnnnnnnnnnnnnnnnnnnnnnnnnnnnnnnnnnnnnnnnnnnnnnnnnnnnnnnnnnnnnnnnnnnnnnnnnnnnnnnnnnnnnnnnnnnnnnnnnnnnnnnnnnnnnnnnnnnnnnnnnnnnnnnnnnnnnnnnnnnnnnnnnnnnnnnnnnnnnnnnnnnnnnnnnnnnnnnnnnnnnnnnnnnnnnnnnnnnnnnnnnnnnnnnnnnnncatattgaatattttaagctgaaggcatttgaggaaattgcagaagcaggaaggtgactctgaccttctgcctgcccttctccctggaagcagccattaaacctgggaatgattttctgatcttcccctgaagtacatcataagaccctcatgtaagaggtgctctcacggcacccagagaaaaggagcatccttacctccaaaagcacagggacacaaagaggaatctaaacaaccaggcctgctcagtttcccccagtgtattacatttagcttgttcacactttgccctatgacatttctccatcactggctgctcttcatcgaagctactataaaaaacattcaagttcaactgtttctttgggcctttatttccttatggagtctctcatgtcatgcaaaacttatgttaaataaatgtgcatgcttttttcttgctactatctcttttgttatagggatctcagccctaaacctaggatggatagaaggaaagatatgttctcccctacattagtaaaaataaaaatggaattttttacccatacaaa

SEQ ID NO: 23414 - DNA, 780 bp, Macaca Mulatta
  misc_feature (1)...(780): n = A,T,C or G
ggtcaccttccctgccgccggaaccgctctgtgtgcgccgcccaacgaaggaaggggctgccccacgcagatccggcttctgggggtccctggaaacccagccggccacggtgtggcggggcagtgatggtcacttttcctgctgggtgcgcctgagcagaggggcagcccgttacagtaggcgaggccagggcaaacctggggtctctatccgcgctgcgaggctgggattcaaggtcctttcagccgggcctctcacccaccccgctggccgcagccggaggctgccacgcggacaccatctcaagcctctgagcattgctcttgagttcctccgcctgctgtgtccttctctgtcatctctaggcctcggctcaagccaggacctagcctttctgccccttcctaccccaagctggcgccaccgcccggggctgaactccgacctcccaccgcaggctccgcggtaccctggctgtggccctcggcgctttcttcctagggtcacagaacccataggagtgggagctccctgggagcagaactgccccttgtatcacctggcgcggtgaacgtgggggttgaatcgctccacgcggaanagactcagagaagccgcggccgtccccggaaccctcggagcggcgccctcaggctccagccaaaaagctccgcaaaccgaggaccatctactccagcctgcagctgcagcacctaaaccagcgtttccagcacacgcagtacctggcgctgcccgagagggcccagctggcagcgcag

SEQ ID NO: 23415 - DNA, 660 bp, Macaca Mulatta
tggactgaggctgcgctgcctttgcggccttactgcttggtgtccgactgcccagctcagagtgcccgtcagggcctgtgcatctgcacacggagccgtctgtcaggagcttccagagcgttctctggacactgccagccccgcgttagcgcctgggcctcagtcccacttgctcccaggcgccggttctgtggttggtttggaattaaagtcctgtttgaagttgtcagacacagacatggatttctggggcgcctcctgagtcagtctcagaagacctgtgcaggccggcgtgagaggagcagcagccacgctgcggccccacgcccaaggaccgggctgctctcgaagggggcgcccatggctgtgtcctctgcccagcctggttaccaagggcgacctcagtgggagatgaggtcggaggaacaaaggcaaaggttgctttggggagagcagtattcaggaagtgggtgtgtgggaaacctgaagatggcgtgcagaggacacggcgtgggcagcctgggcagaagggcggctggctgtcctggggctgttgctagagtgcctgtcctcagagtgtccctttccagggctgtggcattctgtggtggcttccccaggtgtggcgaggggtggggcggggcctccacctgtgacagt

SEQ ID NO: 23416 - DNA, 726 bp, Macaca Mulatta
  misc_feature (1)...(726): n = A,T,C or G
agctgggaagacacttcagatctttaatattgagatgaagagtaaaatgaaggctcattctatggcagaagaggtgattttctggaaatgggtttctgtgaacactgttgccttggtgaccgagactgcagtctaccactggagcatggaaggtgactcccagcccatgaagatgtttgatagacataccagtctggcgggctgccaggtgattcactaccggactgatgagtaccagaagtggctgctcctcataggcatctcggctcagnnnnnnnnnnnnnnnnnnnnnnnnnnnnnnnnnnnnnnnnnnnnnnnnnnnnnnnnnnnnnnnnnnnnnnnnnnnnnnnnnnnnnnnnnnnnnnnnnnnnnnnnnnnnnnnnnnnnnnnnnnnnnnnnnnnnnnnnnnnnnnnnnnnnnnnnnnnnnnnnagttgcacatcattgaagttggacagcctgcagcgggaaaccaaccttttgtaaagaaagcagtagatgtgtttttccctccagaggcacagactgattttccagtggctatgcagnagattggagctaaacatggtgttatttacttgatcacaaagtatggctatcttcatctgtacgacctagagtctggcgtgtgcatctacatgaaccgtattagtgctgacacaatatttgtcactgctccacacagaccgacctctggaattattggtgtcaacaaaaagggacaggt

SEQ ID NO: 23417 - DNA, 6082 bp, Macaca Mulatta
  misc_feature (1)...(6082): n = A,T,C or G
tgtcccagccgctccttcccgggcgcctcccgaagtgttccgaaggcccctgtgggagcccaggctcccccggaagtaacatcgagggcttcgtgtgcaaattcagcttcaaaggcatgtgccggcctctggccctggggggcccaggtcaggtgacctacaccacccccttccagaccaccagttcctccttggaggctgtgccctttgcctctgccgccaatgtggcctgtggggaaggggacaaagacgacagtcagagtcattatttcctgtgcaaggagaaggcccccgatgtgttcgactggggcagctcgggccccctctgtgtcagccccaagtatggctgcaacttcaacaatgggggctgccaccaggactgctttgaaggcggggatggctccttcctctgcggctgccggccagggttccggctgctggacgacctggtgacctgtgcctcacgaaacccttgcagctctagcccatgtcgtgggggggccacatgcatcccgggaccccatgggaaaaactacacgtgccgctgcccccaagggtaccagctggactcaagtcagctggactgtgtgnnnnnnnnnnnnnnnnnnnnnnnnnnnnnnnnnnnnnnnnnnnnnnnnnnnnnnnnnnnnnnnnnnnnnnnnnnnnnnnnnnnnnnnnnnnnnnnnnnnnnnnnnnnnnnnnnnnnnnnnnnnnnnnnnnnnnnnnnnnnnnnnnnnnnnnnnnnnnnnnnnnnnnnnnnnnnnnnnnnnnnnnnnnnnnnnnnnnnnnnnnnnnnnnnnnnnnnnnnnnnnnnnnnnnnnnnnnnnnnnnnnnnnnnnnnnnnnnnnnnnnnnnnnnnnnnnnnnnnnnnnnnnnnnnnnnnnnnnnnnnnnnnnnnnnnnnnnnnnnnnnnnnnnnnnnnnnnnnnnnnnnnnnnnnnnnnnnnnnnnnnnnnnnnnnnnnnnnnnnnnnnnnnnnnnnnnnnnnnnnnnnnnnnnnnnnnnnnnnnnnnnnnnnnnnnnnnnnnnnnnnnnnnnnnnnnnnnnnnnnnnnnnnnnnnnnnnnnnnnnnnnnnnnnnnnnnnnnnnnnnnnnnnnnnnnnnnnnnnnnnnnnnnnnnnnnnnnnnnnnnnnnnnnnnnnnnnnnnnnnnnnnnnnnnnnnnnnnnnnnnnnnnnnnnnnnnnnnnnnnnnnnnnnnnnnnnnnnnnnnnnnnnnnnnnnnnnnnnnnnnnnnnnnnnnnnnnnnnnnnnnnnnnnnnnnnnnnnnnnnnnnnnnnnnnnnnnnnnnnnnnnnnnnnnnnnnnnnnnnnnnnnnnnnnnnnnnnnnnnnnnnnnnnnnnnnnnnnnnnnnnnnnnnnnnnnnnnnnnnnnnnnnnnnnnnnnnnnnnnnnnnnnnnnnnnnnnnnnnnnnnnnnnnnnnnnnnnnnnnnnnnnnnnnnnnnnnnnnnnnnnnnnnnnnnnnnnnnnnnnnnnnnnnnnnnnnnnnnnnnnnnnnnnnnnnnnnnnnnnnnnnnnnnnnnnnnnnnnnnnnnnnnnnnnnnnnnnnnnnnnnnnnnnnnnnnnnnnnnnnnnnnnnnnnnnnnnnnnnnnnnnnnnnnnnnnnnnnnnnnnnnnnnnnnnnnnnnnnnnnnnnnnnnnnnnnnnnnnnnnnnnnnnnnnnnnnnnnnnnnnnnnnnnnnnnnnnnnnnnnnnnnnnnnnnnnnnnnnnnnnnnnnnnnnnnnnnnnnnnnnnnnnnnnnnnnnnnnnnnnnnnnnnnnnnnnnnnnnnnnnnnnnnnnnnnnnnnnnnnnnnnnnnnnnnnnnnnnnnnnnnnnnnnnnnnnnnnnnnnnnnnnnnnnnnnnnnnnnnnnnnnnnnnnnnnnnnnnnnnnnnnnnnnnnnnnnnnnnnnnnnnnnnnnnnnnnnnnnnnnnnnnnnnnnnnnnnnnnnnnnnnnnnnnnnnnnnnnnnnnnnnnnnnnnnnnnnnnnnnnnnnnnnnnnnnnnnnnnnnnnnnnnnnnnnnnnnnnnnnnnnnnnnnnnnnnnnnnnnnnnnnnnnnnnnnnnnnnnnnnnnnnnngtcttgctaaatgtgaaattgttgacatcctccagaacggccagaatcgcaattaacctcttaggtggcaaggaggcaggaagtgcctctttagttcttacatttctaatagtcttgggtttatttgcaaagagaagcttgaaaagtatgagaaaagttgcttgaagtgagttacaggtatttgtgaagtcacataatctacagggctagggcgagagaggccagggatttgttcaaagaaacttgaattaattcatctaaatgtactgaggttatcacacacttgactacggatatgatccacactaacaaggaaacaaaatcaaggacaacctgtctttgagccagggcaggcctcagacaccctgcttgtggccccgcctccacttcatgctgctgggaatgccagtgctccgagctcagacggaggaagccatggcggaaacttccatcgggctgttttctaaaggatgtgtgaacgggagatgatgcactgtgttttgaaagctgtccttttaaagcattttagcacagttcatagttcacagttgatgcagcatcctgagattttaaatcctgaagtgtggctggggcacacaccaagtagggagctagtcaggcagtttgcttaaggaacttttgttctgtgtctctcttttccttaaattgggggtnnnnnnnnnnnnnnnnnnnnnnnnnnnnnnnnnnnnnnnnnnnnnnnnnnnnnnnnnnnnnnnnnnnnnnnnnnnnnnnnnnnnnnnnnnnnnnnnnnnnnnnnnnnnnnnnnnnnnnnnnnnnnnnnnnnnnnnnnnnnnnnnnnnnnnnnnnnnnnnnnnnnnnnnnnnnnnnnnnnnnnnnnnnnnnnnnnnnnnnnnnnnnnnnnnnnnnnnnnnnnnnnnnnnnnnnnnnnnnnnnnnnnnnnnnnnnnnnnnnnnnnnnnnnnnnnnnnnnnnnnnnnnnnnnnnnnnnnnnnnnnnnnnnnnnnnnnnnnnnnnnnnnnnnnnnnnnnnnnnnnnnnnnnnnnnnnnnnnnnnnnnnnnnnnnnnnnnnnnnnnnnnnnnnnnnnnnnnnnnnnnnnnnnnnnnnnnnnnnnnnnnnnnnnnnnnnnnnnnnnnnnnnnnnnnnnnnnnnnnnnnnnnnnnnnnnnnnnnnnnnnnnnnnnnnnnnnnnnnnnnnnnnnnnnnnnnnnnnnnnnnnnnnnnnnnnnnnnnnnnnnnnnnnnnnnnnnnnnnnnnnnnnnnnnnnnnnnnnnnnnnnnnnnnnnnnnnnnnnnnnnnnnnnnnnnnnnnnnnnnnnnnnnnnnnnnnnnnnnnnnnnnnnnnnnnnnnnnnnnnnnnnnnnnnnnnnnnnnnnnnnnnnnnnnnnnnnnnnnnnnnnnnnnnnnnnnnnnnnnnnnnnnnnnnnnnnnnnnnnnnnnnnnnnnnnnnnnnnnnnnnnnnnnnnnnnnnnnnnnnnnnnnnnnnnnnnnnnnnnnnnnnnnnnnnnnnnnnnnnnnnnnnnnnnnnnnnnnnnnnnnnnnnnnnnnnnnnnnnnnnnnnnnnnnnnnnnnnnnnnnnnnnnnnnnnnnnnnnnnnnnnnnnnnnnnnnnnnnnnnnnnnnnnnnnnnnnnnnnnnnnnnnnnnnnnnnnnnnnnnnnnnnnnnnnnnnnnnnnnnnnnnnnnnnnnnnnnnnnnnnnnnnnnnnnnnnnnnnnnnnnnnnnnnnnnnnnnnnnnnnnnnnnnnnnnnnnnnnnnnnnnnnnnnnnnnnnnnnnnnnnnnnnnnnnnnnnnnnnnnnnnnnnnnnnnnnnnnnnnnnnnnnnnnnnnnnnnnnnnnnnnnnnnnnnnnnnnnnnnnnnnnnnnnnnnnnnnnnnnnnnnnnnnnnnnnnnnnnnnnnnnnnnnnnnnnnnnnnnnnnnnnnnnnnnnnnnnnnnnnnnnnnnnnnnnnnnnnnnnnnnnnnnnnnnnnnnnnnnnnnnnnnnnnnnnnnnnnnnnnnnnnnnnnnnnnnnnnnnnnnnnnnnnnnnnnnnnnnnnnnnnnnnnnnnnnnnnnnnnnnnnnnnnnnnnnnnnnnnnnnnnnnnnnnnnnnnnnnnnnnnnnnnnnnnnnnnnnnnnnnnnnnnnnnnnnnnnnnnnnnnnnnnnnnnnnnnnnnnnnnnnnnnnnnnnnnnnnnnnnnnnnnnnnnnnnnnnnnnnnnnnnnnnnnnnnnnnnnnnnnnnnnnnnnnnnnnnnnnnnnnnnnnnnnnnnnnnnnnnnnnnnnnnnnnnnnnnnnnnnnnnnncaatgaagacttgtcatccaaataggtcaataattctgggagactcttggaaaaaactgaatatattgaggaccaactctctccctcccctcatcctatgtctcaaagcagacaatgtaaagagagaacatgtcacacatgcagctcaccatacccactcgttcctgaatttcaggtgctgtcactgatctttctttcttcttcgtcatttgggaagggtgatgcaggaggacaattcctacagataatctgaggaaggcagaaaaaccagggcaggacagttatcgacaatgcattaagaggaacttggtgagcatcctctgtagagggactccacccataatcaacagcttggcttccaggcaagaccagccacatctggtctctgccttcggtggcccacacttcagcatcatcgtcattgccacagcatcacgatgcaacacatctgtgtgtagcactatgacgttatgtttgggtaatgtggggatgaactgcacgaggttctgattaaggatgtggggaagtgggctgtagtccctgccgaccttgtaaggccacagcaaggcctgtttgttggtcagtggcggaggagcaaagcttcaggaagggccagcctcatgtcatcttnnnnnnnnnnnnnnnnnnnnnnnnnnnnnnnnnnnnnnnnnnnnnnnnnnnnnnnnnnnnnnnnnnnnnnnnnnnnnnnnnnnnnnnnnnnnnnnnnnnnnnnnnnnnnnnnnnnnnnnnnnnnnnnnnnnnnnnnnnnnnnnnnnnnnnnnnnnnnnnnnnnnnnnnnnnnnnnnnnnnnnnnnnnnnnnnnnnnnnnnnnnnnnnnnnnnnnnnnnnnnnnnnnnnnnnnnnnnnnnnnnnnnnnnnnnnnnnnnnnnnnnnnnnnnnnnnnnnnnnnnnnnnnnnnnnnnnnnnnnnnnnnnnnnnnnnnnnnnnnnnnnnnnnnnnnnnnnnnnnnnnnnnnnnnnnnnnnnnnnnnnnnnnnnnnnnnnnnnnnnnnnnnnnnnntctagcagctgcaaaatggtttaatgccccctacataatttccatcaccttgaacaatagctttagcatgggaatctgagatatgatcccagaaaacatctgtccctactttggctgcaaaacccatggcttaaatctatatggtttgtgcattttctcaaccaaaaatggaggatgataatctgaattctccatatactcactaatcaaagacactattttcataatagatttctgagacaaatactcactgaagggctttaaaaataaatcgtgttttggtctgttcttgtagataaatgcccttctatttgaagtagaagctctggaatccctttattgcgctgtcgctcttatctgcaaggtggcaagcagttcttttcagcagattttgcccactattcccctgggctgaagttctttgcgtagatttgacttaaacttgaatttgatcccggaaaagccttgctctgtgatgtcagatgtgattgtaaatgtcagtaatcacttcatgaacgcaaaatgagaatgtaagtatttttaaatgtgtgtattttaaatgtgtttgactaattctgaaattataagatttctatgcaggatttatcttcatcctgtgcatgtttcccagactgtgaggagggaaggctcagagatcgagcttttcctccaagttctaacaaaatggtgctttgagtgccatcatgggtcaacctttaggaaggtgcagctttgtcgtcctttgag

SEQ ID NO: 23418 - DNA, 717 bp, Macaca Mulatta
tgcattggaaaaccaattggaacaacttcgtccagtcactgtgttgtgacccccccatggttcaagtgacagtgggtgaccttgtctgccaagatctttcttttgaatgttttgaacccaactacttttcatagatgtttgaccgtgtcaaaagctgtgagcagcaaaatataatccatatgaccttttctcttgcacttcacttgtatgttttactgtggtggaaaaaatacttcaactgattatcacacttgaaatggtaattatcagtggaatttgtctcctattcttaagtacttctgcaaggtattagatgctgctccttaccaaaaatcagtcttctagcaaataaaaataacttagagcattatttatttaaagaatttatgttttatataaaaccttataaccaggtaccttcaggatgcttgtaaccaagtactttcaggatgctttttgtatgtatatcacatacagtaggttggtttcctgagtaattgggaattccaactagataatcattggtgtgaccataataaaacaaaaataaaagcatcagatttagactggcgctgtgccctctaccactatatgccaaaaaaattgcttctctagtgccattttgatattctatctagctataaataatacatgactattgttttctattgaatgtcaaagacttactgggtctatagacctctgtaaagggaggtt

SEQ ID NO: 23419 - DNA, 641 bp, Macaca Mulatta
  misc_feature (1)...(641): n = A,T,C or G
agagttcccgaccctaaagaagctgcagtcacgccttgtggcagaacagagagtgggtgtgcccccacatcaggggtgacccagacaaatggagacaacacaggtgaggcagaaaacgaagagctgggcctactgatcantaaggatatttccaaaagaaaaaaccaagaatcttcctttgaagcagttgaggatccatgctttcctgcaaaaagaagaaaaacgtcccccgaatgttccccagatcaagaggaaacagaaataaactttacccagaaactgatagatctggagcatctgctgtttgagagacataaacaagaagaacaggacaggttattggcgttacaacttcagaaggaggtggataaagagcagatggtgccaaaccgacagaaaggatccccagatgggtatgacctccgcgctccgtcctcccctccagacagagtgccaaatggacagaggaagaatcccaaagacaggaactccaaaaggcaaactcatacagagcatccaaaaccgcagagaggctccagggacgaaaataggcacctgtctttaaagatgcagttgaagcattcagtgaatggaagaaagatgccaaattcttctagagatcagtgtaatgtatccaaaag

SEQ ID NO: 23420 - DNA, 379 bp, Macaca Mulatta
tgttgtgcaatgcaggcatcatcagagctctccagaaaagactccgggagcctgagaaacagcccaagattcggcgggcccaggcactggtcaccgtggtggtggtgctgtttactctatgctttctgccctgcttcctgaccagagtcctgatgcacatcttccagaatctggggagcttcagggccctgtgcgcagtggctcatacctcggaagtcacgggcagcctcacctacctgcacagtgtgctcaaccccgttgtgtactgcttctccagccccaccttcaggagctcctatcggagggtcttccacaccctccgaggcaaagggcaggcagcagagcccccaggtttcaaccccagagactcctattcctg

SEQ ID NO: 23421 - DNA, 741 bp, Macaca Mulatta
gggcccctgctcggggtcagctcctgtccgctctgctacgctgccggctccaggaggacggcaggcaggatgacccaaaacacggtgattgtgaatggagttgctgtggcctctacgccatcccagccctcccacatcaacgtccacatccaccaggagtcaactttgacacaactgctgaaagctggaagttctctgaagaaatttctttttcaccctggcgacactgtgccttccacagccaggattggttatgagcagctggctctaggggtgactcagatattgctgggggttgtgagttgtgctcttggagtgtgtttctgcttggggccctggactgtgctgcgtgcctcaggctgtgccttctgggcggggtctgtggcgatcgcagcaggagctggggccgttgtccatgagaagcacccaggcaaacttgctggctatgtatccatcctgctcaccctggcagcctttgctacagctatggctgctgttgtcctctgcgtgaatagcttcatctggcaaactgaaccctttttatacattgacaccgtgtgtgatccctcagacgtcgtcatccctaccactgggtacagatggcaaagtcaagagaaccaatggcagaaagaggagtgtagagcttacatgcagatgctgaaggagttgttcacagcaaatccgtgccctgtttctgggctgtctgtgtcctgaaaagtcatttgtgtccttggggcttcc

SEQ ID NO: 23422 - DNA, 173 bp, Macaca Mulatta
acgcacaattacgggatgggcgctgtcgcctgagtgtacttgggcatagcggcctccctggtcaagatggggcggccggagggctgggagatgtttgcaaaacccaaggtgtgagccctgtgccagccgggacctccagcctgcagaatgcgtccagaaataaattctgtgtc

SEQ ID NO: 23423 - DNA, 499 bp, Macaca Mulatta
  misc_feature (1)...(499): n = A,T,C or G
gatgatgtcagttcatacagactgtattgtgtcagtgcagattttaagtacactgatggaaataactattagaaatnnnnnnnnnnnnnnnnnnnnnnnnnnnnnnnnnnnnnnnnnnnnnnnnnnnnnnnnnnnnnnnnnnnnnnnnnnnnnnnnnnnnnnnnnnnnnnnnnnnnnnnnnnnnnnnnnnnnnnnnnnnnnnnnnnnnnnnnnnnnnnnnnnnnnnnnnnnnnnnnnnnnnnnnnnnnnnnnnnnnnnnnnnnnnnnnnnnnnnnnnnnnnnnnnnnnnnnnnnnnnnnnnnnnnnnnnnnnnnnnnnnnnnnnnnnnnnnnnnnnnnnnnnnnnnnnnnnnnnnnnnnnnnnntcgtgaaataatgttgctgattttaatgttatttaaaatgagtttggaaaaacagctgaaacagattcctctagtagactttcaaagcctcctgataaacctgatgaaaaacatcagagattggaacacaaaggt

SEQ ID NO: 23424 - DNA, 580 bp, Macaca Mulatta
  misc_feature (1)...(580): n = A,T,C or G
gggttgaaaagaaatatttcctttttccttttaagcccaacattacaaagatagtttttaaaagaaaaatgttaagactttattcaagatgtgtatcaggcattataacaaaacagcagaacttcaacctttggaatactgtaattttacatccctttgatgcacagtccagtatactattttattacagatcgttctatagggactacagaaatgaactagaggaaatgtgcacagtcacaatccagattatcacctctgggagtgtaccctgttaaagaatgaacccctccctttgccattcaaatactgtgcccggggaaaaactaagaaagctcaaaaatggtcctggttaaaaaccctctttatcaaaacccccgagnnnnnnnnnnnnnnnnnnnnnnnaaggccccaaatggggcaagcttttcccaaaagcgggggggattgggaaaaaaccccccgtttaaaaccaagtcccctttcccccccaaaaagggggccaggggattaaaaaaattttaggggaaattaaattttcccccattttttaaaaacccggggtgtaaaaacaaaaaaa

SEQ ID NO: 23425 - DNA, 2531 bp, Macaca Mulatta
  misc_feature (1)...(2531): n = A,T,C or G
cagccgagattcgggccctccaccctctacagtaagtgaagccgaatttgaagatatcatgaagcgaaacagagcaatttccagcagtgccatttccaaagcggtatctggagccagtgcagnnncaggggattatagtgacgctattgagacgctgctcacagccattgcggttatcaaacagtcccgggttgccaatgatgagcgttgccgtgtcctcatctcctctcttaaggactgtcttcatggcatcgaagccaagtcctacagtgtgggtgccagtgggagctcttccagnnaggaaaagacatcggtcccgggaaagatcacctagccggtcccgggagagcagcaggaggcaccgggatctgcttcataatgaagatcggcatgatgattatttccaagaaaggaaccgggagcacgagagacaccgggatagagaacgggaccggcaccactgagaaagnnnnnnnnnnnnnnnnnnnnnnnnnnnnnnnnnnnnnnnnnnnnnnnnnnnnnnnnnnnnnnnnnnnnnnnnnnnnnnnnnnccccctttcctttcctccaaacccctaactccctccagacacccagggaataccctctgccccacaggattgaagactgcttggcagccctcccaatcccacagctcctgtttgccaggggaaagaacctaaagacttcgtgtgattgggaggggtggcagacaggaagaaaagaacatgtccaggcccctggtctccatagagaatggtgctttgtccaagaaaacgtatgagtttctgattctccgggagcagttcaatggtgaggttgatgggaagacttccttcccaaagaaaatagatcctccatgcaggatctaggagagtgactgggtgtgccaaaatatgcccagggtcctgccctcagcactagatttaatggggccaagagggtccaaacccccttgctaacataccacttctttgtttaactcctttaccttcccagccctttgaggagggaccatgagaacagaaattaccttatgcaaagctacttctgttcctgctttccctctcacatattgacggtttatttccttgacctcccagagggctgaactctttcaactctgcgctgcccagccttctcagtggacttgcccctcctaagcagagaaggcctatgaggttgctttctgctgggaagcctggcagagccaattaccaccctctgctgcttagtgcttgggtacctcttgcaataaccagctcttagttgttccctttccctggggcttttccatttaacacatggagcccttcccccagaaggctacttccttgttttagaggaaggtactgcccattgggagatggggacattgggacctcagcaatgaagaacccttgtgaagtaaccaggaggaatggggaaagaagcaagttgggcaggatatggcctactttcataggcttttcttctttcaggtttgatgtaagcatgggcttgcatcgcccaggtacatacttttacttattgtgggataacctggcactagtaggcaggtaaagtcacaaatttggtgtcttttcaccttttgactgttgacttaatagctcctctcactctgcctggagatacttcctgcctcagatgaggagccagnnnnnnnnnnnnnnnnnnnnnnnnnnnnnnnnnnnnnnnnnnnnnnnnnnnnnnnnnnnnnnnnnnnnnnnnnnnnnnnnnnnnnnnnnnnnnnnnnnnnnnnnnnnnnnnnnnnnnnnnnnnnnnnnnnnnnnnnnnnnnnnnnnnnnnnnnnnnnnnnnnnnnnnnnnnnnnnnnnnnnnnnnnnnnnnnnnnnnnnnnnnnnnnnnnnnnnnnnnnnnnnnnnnnnnnnnnnnnnnnnnnnnnnnnnnnnnnnnnnnnnnnnnnnnnnnnnnnnnnnnnnnnnnnnnnnnnnnnnnnnnnnnnnnnnnnnnnnnnnnnnnnnnnnnnnnnnnnnnnnnnnnnnnnnnnnnnnnnnnnnnnnnnnnnnnnnnnnnnnnnnnnnnnnnnnnnnnnnnnnnnnnnnnnnnnnnnnnnnnnnnnnnnnnnnnnnnnnnnnnnnnnnnnnnnnnnnnnnnnnnnnnnnnnnnnnnnnnnnnnnnnnnnnnnnnnnnnnnnnnnnnnnnnnnnnnnnnnnnnnnnnnnnnnnnnnnnnnnnnnnnnnnnnnnnnnnnnnnnnnnnnnnnnnnnnnnnnnnnnnnnnnnnnnnnnnnnnnnnnnnnnnnnnnnnnnnnnnnnnnttgttttgtttttactctcaatgacacaatttttagttttatttcctgatagcaaaaggaaaaaaaaacacccatccctcaaaaaggccaaggtcccgtccccctgttgtcggtgatttgtttgtctttctgataggttgaaaattgtgtaataaacttgatgacgctgtcaatcttttatactgcattgtatttttttccttttgtaacaaaatatttttaaataataaatggggtgtgagctgttttatg

SEQ ID NO: 23426 - DNA, 2343 bp, Macaca Mulatta
  misc_feature (1)...(2343): n = A,T,C or G
ggcacacgccactcccacccatccgtgggccgccagcaccacgcgggcccnccatccacatcgcggccaccaagtccctgggacacgcgttgtcccctggtgtacgccgagaccaagcacttcctctactcctcaggcgacaaggagcagctgcggccctccttcctactcaactccctgcggcccagcctgactggcgcccggaggctcgtggagaccatctttctgggttccaggccttggatgccagggactccccgcaggccgccccgcctgccccagcgctactggcaaatgcggcccctgtttctggagctgcttgggaaccacgcgcagtgcccctacggggcgctcctcaagacgcactgcccgctgcgggctgcggtcaccccagcagccggtgtctgtgcccgggagaagccccagggctcagtggcggcccccgaggaggaggacacagaccgccgtcgcctggtgcagctgcttcgccagcacagcagcccctggcaggtgtacggcttcgtgcgggcctgcctgcgccggctggtgccccccggcctctggggctccaggcacaaccaacgccgcttcctcaggaacaccaagaagttcatatctctggggaagcacgccaagctctccctgcgggagctgacgtggaagatgagcgagcgggactgtgcttggctnnnnnnnnnnnnnnnnnnnnnnnnnnnnnnnnnnnnnnnnnnnnnnnnnnnnnnnnnnnnnnnnnnnnnnnnnnnnnnnnnnnnnnnnnnnnnnnnnnnnnnnnnnnnnnnnnnnnnnnnnnnnnnnnnnnnnnnnnnnnnnnnnnnnnnnnnnnnnnnnnnnnnnnnnnnnnnnnnnnnnnnnnnnnnnnnnnnnnnnnnnnnnnnnnnnnnnnnnnnnnnnnnnnnnnnnnnnnnnnnnnnnnnnnnnnnnnnnnnnnnnnnnnnnnnnnnnnnnnnnnnnnnnnnnnnnnnnnnnnnnnnnnnnnnnnnnnnnnnnnnnnnnnnnnnnnnnnnnnnnnnnnnnnnnnnnnnnnnnnnnnnnnnnnnnnnnnnnnnnnnnnnnnnnnnnnnnnnnnnnnnnnnnnnnnnnnnnnnnnnnnnnnnnnnnnnnnnnnnnnnnnnnnnnnnnnnnnnnnnnnnnnnnnnnnnnnnnnnnnnnnnnnnnnnnnnnnnnnnnnnnnnnnnnnnnnnnnnnnnnnnnnnnnnnnnnnnnnnnnnnnnnnnnnnnnnnnnnnnnnnnnnnnnnnnnnnnnnnnnnnnnnnnnnnnnnnnnnnnnnnnnnnnnnnnnnnnnnnnnnnnnnnnnnnnnnnnnnnnnnnnnnnnnnnnnnnnnnnnnnnnnnnnnnnnnnnnnnnnnnnnnnnnnnnnnnnnnnnnnnnnnnnnnnnnnnnnnnnnnnnnnnnnnnnnnnnnnnnnnnnnnnnnnnnnnnnnnnnnnnnnnnnnnnnnnnnnnnnnnnnnnnnnnnnnnnnnnnnnnnnnnnnnnnnnnnnnnnnnnnnnnnnnnnnnnnnnnnnnnnnnnnnnnnnnnnnnnnnnnnnnnnnnnnnnnnnnnnnnnnnnnnnnnnnnnnnnnnnnnnnnnnnnnnnnnnnnnnnnnnnnnnnnnnnnnnnnnnnnnnnnnnnnnnnnnnnnnnnnnnnnnnnnnnnnnnnnnnnnnnnnnnnnnnnnnnnnnnnnnnnnnnnnnnnnnnnnnnnnnnnnnnnnnnnnnnnnnnnnnnnnnnnnnnnnnnnnnnnnnnnnnnnnnnnnnnnnnnnnnnnnnnnnnnnnnnnnnnnnnnnnnnnnnnnnnnnnnnnnnnnnnnnnnnnnnnnnnnnnnnnnnnnnnnnnnnnnnnnnnnnnnnnnnnnnnnnnnnnnnnnnnnnnnnnnnnnnnnnnnnnnnnnnnnnnnnnnnnnnnnnnnnnnnnnnnnnnnnnnnnnnnnnnnnnnnnnnnnnnnnnnnnnnnnnnnnnnnnnnnnaggttccacgcgtgtgtgctgcagctcccatttcatcagcaagtctggaagaaccccgcgtttttcctgcgtgtcatctctgacacggcctccctctgctactccatcctgaaagccaagaacgcaggnnnnnnnnnnnnnnnnnnnnnnnnnnnnnnnnnnnnnnnnnnnnnnnnnnnnnnnnnnnnnnnnnnnnnnnnnnnnnnnnnnnnnnnnnnnnnnnnnnnnnnnnnnnnnnnnnnnnnnnnnnnnnnnnnnnnnnnnnnnnnnncccagacgcagctgagtcggaagctcccggggacgacgctggctgccctggaggccgcagccaacccggcactgccctcagacttcaagaccatcctggactg

SEQ ID NO: 23427 - DNA, 764 bp, Macaca Mulatta
  misc_feature (1)...(764): n = A,T,C or G
gggctttctctcttcctcggcgctgcctacggaggtggcagccatctcctcctcgaaggcatcatggccgccctcagaccccttgtgaagcccaagatcgtcaaaaaaagaaccaagaagttcatccggcaccagtcagaccgatatgtcaaaattaagcgtaactggcggaaacccagaggcattgacaacagggttcgtagaagattcaagggccagatcttgatgcccaacattggttatgggagcaacaaaaaaacaaagcacatgctgcccagtggcttccggaagttcctggtccacaacgtcaaggagttggaagtgctgctgatgtgcaacaaatcttactgtgccgagattgctcacaatgtttcttccaagaaccgcaaagccatcgtggaaagagctgcccagctggccatcagagtcaccaaccccaacgccaagctgcgcagtgaaaaaaatgagtagacaggtcatgtgcacgttttctggttaaataaatggaaaaactggcnnnnnnnnnnnnnnnnnnnnnnnnnnnnnnnnnggcggccgcccgcggcccgcgaaaaacgtttcaaaacctttcgtttgggcgccgggggcccccgtgagggggaggggaaaaatgggcccaaagcgtgggttgcccaagaagaaaacccgggcggaaggaaactaagggccttggggagatcccccccccgagtggaaaacacgccgccgggggggagaaaccacaaaaggacgatgctagaaac

SEQ ID NO: 23428 - DNA, 1474 bp, Macaca Mulatta
  misc_feature (1)...(1474): n = A,T,C or G
ggcgtctcccagtgggaagggaccccgggcgccggaggctcctgggtgcgggccccggccgctcgcccgggacctggtggactctgtggacgacgcggaggggctgtacgtggctgtggagcgctgtccgctgtgcaacactacccgccggcggctgacctgcgccaaatgcgttcagagcggcgatttcgtctacttcgacggccgcgacagggagaggnnnnnnnnnnnnnnnnnnnnnnnnnnnnnnnnnnnnnnnnnnnnnnnnnnnnnnnnnnnnnnnnnnnnnnnnnnnnnnnnnnnnnnnnnnnnnnnnnnnnnnngagatggaaaataatgtcctgcaagatgaggattgaacagttaaaacaaacaatatgtaaaggaaacgaagaaatggagaaannnnnnnnnnnnnnnnnnnnnnnnnnnnnnnnnnnnnnnnnnnnnnnnnnnnnnnnnnnnnnnnnnnnnnnnnnnnnnnnnnnnnnnnnnnnnnnnnnnnnnnnnnnnnnnnnnnnnnnnnnnnnnnnnnnnnnnnnnnnnnnnnnnnnnnnnnnnnnnnnnnnnnnnnnnnnnnnnnnnnnnnnnnnnnnnnnnnnnnnnnnnnnnnnnnnnnnnnnnnnnnnnnnnnnnnnnnnnnnnnnnnnnnnnnnnnnnnnnnnnnnnnnnnnnnnnnnnnnnnnnnnnnnnnnnnnnnnnnnnnnnnnnnnnnnnnnnnnnnnnnnnnnnnnnnnnnnnnnnnnnnnnnnnnnnnnnnnnnnnnnnnnnnnnnnnnnnnnnnnnnnnnnnnnnnnnnnnnnnnnnnnnnnnnnnnnnnnnnnnnnnnnnnnnnnnnnnnnnnnnnnnnnnnnnnnnnnnnnnnnnnnnnnacatggagcagagtaaccctgcctacaccatcagtgctgcgctgtgctatgcaactcagctggtcaacattctgtctcatatacttgatgtaaatcttcccaaaaagctgtgcaacagnnnnnnnnnnnnnnnnnnnnnnnnnnnnnnnnnnnnnnnnnnnnnnnnnnnnnnnnnnnnnnnnnnnnnnnnnnnnnnnnnnnnnnnnnnnnnnnnnnnnnnnnnnnnnnnnnnnnnnnnnnnnnnnnnnnnnnnnnnnnnnnnnnnnnnnnnnnnnnnnnnnnnnnnnnnnngcaggtcagggccctttgaagtacgagcaggccttgaggagtccatggaatttgtggatcccggagttgctggagaatcagatgagagcggagacgagcgcgtcagcgatgaagaaaccgacctgggcacagactgggagaacctgcctagtccccggttttgtgatatcccgtcccagtccgaggaagtctcccagagtcagagcacccaggcatccccacccatcgcgagcagcagtgcaggtgggatgatctcctctgcagcagcctcggtgacctcctggtttaaagcttacactggacaccgttaa

SEQ ID NO: 23429 - DNA, 2390 bp, Macaca Mulatta
  misc_feature (1)...(2390): n = A,T,C or G
gctccccggtgggacggcctgaggccgagtgcaccctgagggcggaagagnnnnnnnnnnnnnnnnnnnnnnnnnnnnnnnngactgactcctagaggctgcggcggaggggagaagcctggtggtacattccatggcccagtgcctcggccactggaaaatcccacaggggtatatcgagtagagtaccgtgggctccgctgcagaagtgatcacccttccaagatggcggctcccgtagagacactcccaaggggacagccatgttccttgcctgacagtcgctgcaggaaattggaaagcccgcctctccttcnnnnnnnnnnnnnnnnnnnnnnnnnnnnnnnnnnnnnnnnnnnnnnnnnnnnnnnnnnnnnnnnnnnnnnnnnnnnnnnnnnnnnnnnnnnnnnnnnnnnnnnnnnnnnnnnnnnnnnnnnnnnnnnnnnnnnnnnnnnnnnnnnnnnnnnnnnnnnnnnnnnnnnnnnnnnnnnnnnnnnnnnnnnnnnnnnnnnnnnnnnnnnnnnnnnnnnnnnnnnnnnnnnnnnnnnnnnnnnnnnnnnnnnnnnnnnnnnnnnnnnnnnnnnnnnnnnnnnnnnnnnnnnnnnnnnnnnnnnnnnnnnnnnnnnnnnnnnnnnnnnnnnnnnnnnnnnnnnnnnnnnnnnnnnnnnnnnnnnnnnnnnnnnnnnnnnnnnnnnnnnnnnnnnntcagtgtcatttgaggatatgactgtggacttcagcagggaggagtggcagcacttggaccctgctcagagatgcctgtactgggatgtgacactagagaactacagccacctgctctcagtggnnnnnnnnnnnnnnnnnnnnnnnnnnnnnnnnnnnnnnnnnnnnnnnnnnnnnnnnnnnnnnnnnnnnnnnnnnnnnnnnnnnnnnnnnnnnnggtgaggctattgagaaaatgcagcaacagggaattcctggagaaattttcttccactgtgagagatttgatcaacccataggagaagattcattgtgttctattttagaagcactgtggcaagataatgaccagttagagcgatgtcaggaaaaccagaataaccttttaagtcatgtgaaagtattgattaaggagaggggctatgaacgtaaaaacattgaaaaaataattcatgtgactaccaagtttgttccttcaattaaaagactccgtaactgnnnnnnnnnnnnnnnnnnnnnnnnnnnnnnnnnnnnnnnnnnnnnnnnnnnnnnnnnnnnnnnnnnnnnnnnnnnnnnnnnnnnnnnnnnnnnnnnnnnnnnnnnnnnnnnnnnnnnnnnnnnnnnnnnnnnnnnnnnnnnnnnnnnnnnnnnnnnnnnnnnnnnnnnnnnnnnnnnnnnnnnnnnnnnnnnnnnnnnnnnnnnnnnnnnnnnnnnnnnnnnnnnnnnnnnnnnnnnnnnnnnnnnnnnnnnnnnnnnnnnnnnnnnnnnnnnnnnnnnnnnnnnnnnnnnnnnnnnnnnnnnnnnnnnnnnnnnnnnnnnnnnnnnnnnnnnnnnnnnnnnnnnnnnnnnnnnnnnnnnnnnnnnnnnnnnnnnnnnnnnnnnnnnnnnnnnnnnnnnnnnnnnnnnnnnnnnnnnnnnnnnnnnnnnnnnnnnnnnnnnnnnnnnnnnnnnnnnnnatcaaaaaattcataccggccagaaaccctacaaatgcagtgaatgtggaaaagcctttatccagagatcagacctctttagacatctgagaattcatacaggagaaaaaccttatgaatgcagtgaatgtggaaaaggcttctcccagaactcagacctcagtatacatcagaaaactcataccggagagaaacactatgaatgcaatgaatgtgggaaggctttcacaagaaaatcagcactcaggatgcatcagagaatccacacaggagagaaaccttatgtatgcgctgactgcgggaaggccttcatccagaaatcacatttcaacacacatcagagaattcacactggagaaaagccatatgaatgcagcgactgcaggaaatccttcactaagaagtcacaactccatgtgcatcaaagaattcacaccggagagaaaccctatatatgtacagaatgtggaaaggtcttcactcacaggacaaacctcaccacacatcagaaaactcatactggggagaaaccctatatgtgtgctgaatgtggaaaggcttttactgaccagtcaaatctcattaaacaccagaaaactcacactggagagaaaccctataagtgcaatggctgtggaaaagccttcatatggaagtcacgcctcaaaatacatcagaaatctcatattggagagagacactatgaaagcaaggactgcgggaaagcct

SEQ ID NO: 23430 - DNA, 1674 bp, Macaca Mulatta
  misc_feature (1)...(1674): n = A,T,C or G
gagcaaactctctgctgtgcccggaattagcagtgtacatgaagtgcacatctgggaacttgtaagtggaaagattattgccaccctgcacatcannnnnnnnnnnnnnnnnnnnnnnnnnnnnnnnnnnnnnnnnnnnnnnnnnnnnnnnnnnnnnnnnnnnnnnnnnnnnnnnnnnnnnnnnnnnnnnnnnnnnnnnnnnnnnnnnnnnnnnnnnnnnnnnnnnnnnnnnnnnnnnnnnnnnnnnnnnnnnnnnnnnnnnnnnnnnnnnnnnnnnnnnnnnnnnnnnnnnnnnnnnnnnnnnnnnnnnnnnnnnnnnnnnnnnnnnnnnnnnnnnnnnnnnnnnnnnnnnnnnnnnnnnnnnnnnnnnnnnnnnnnnnnnnnnnnnnnnnnnnnnnnnnnnnnnnnnnnnnnnnnnnnnnnnnnnnnnnnnnnnnnnnnnnnnnnnnnnnnnnnnnnnnnnnnnnnnnnnnnnnnnnnnnnnnnnnnnnnnnnnnnnnnnnnnnnnnnnnnnnnnnnnnnnnnnnnnnnnnnnnnnnnnnnnnnnnnnnnnnnnnnnnnnnnnnnnnnnnnnnnnnnnnnnnnnnnnnnnnnnnnnnnnnnnnnnnnnnnnnnnnnnnnnnnnnnnnnnnnnnnnnnnnnnnnnnnnnnnnnnnnnnnnnnnnnnnnnnnnnnnnnnnnnnnnnnnnnnnnnnnnnnnnnnnnnnnnnnnnnnnnnnnnnnnnnnnnnnnnnnnnnnnnnnnnnnnnnnnnnnnnnnnnnnnnnnnnnnnnnnnnnnnnnnnnnnnnnnnngactggggctcaatagctgtggatacagtgttcaaagaagttcttgtttctaaactgattagaacttctagctaatgctcaggtgagatcatagcttaaatacattcaaaaaactaaagtaccacaataagtgtatttttccctttccccttaatgatcataaaagagacaagttaagtatttctgacactgaagaagtatcttttttctttgattcatttttggataaatataaaatgaataactattacggtagaaaatattctcagaacattctagaggaggtaaagattagtaggggggttttggccatctctacatttttgtgaggtgagagaaaactaatgtttactttctgctgtgaaatgaattgtggctatagaatgtttcaaatgcttaaatatataatacatgtttttcacatggaagtgagggaatatttcagctttcttaagtatgacacaaatactcagctgtcttttagagtcagtatagttggagctgtttccatttagtgctttggtaatgatttacttattcttccaaacatcctttgacttttctttcatacgattgcattgatctatgcagcatttaccagaaaaaagcattcctgggatagcagaatccttaacattgagtgttaattcttgtgaaataaataagctagactgccttctctttaattagacatattttaaaatatttattatagttgtcaactagtaactcagtggaaaagttgatgtccaaggaagaaatgagaattagcttagttgctgcctttaatgtgtttttgagaaacttaaaattttctttcatgtctctgatccatattagcaagttcaaatagaaatttttgtaatcggattcagacccat

SEQ ID NO: 23431 - DNA, 178 bp, Macaca Mulatta
  misc_feature (1)...(178): n = A,T,C or G
tgtacagtgagctcaagtggcaagagaagaatnaccttggaggagatcgctgagctgcaggaggacatccggcacctggaggaggatctgcgcacaaagttcctgagcctgaagctgtcccatacccggctagaggccagaacctaccggcccaatgtggaactctgccgggaccagg

SEQ ID NO: 23432 - DNA, 774 bp, Macaca Mulatta
gggaaacagaccattctaacacccaaggcttaattgtttataaaatacttcagagaattacattaatgtggaatcaacaaatggataagaatataacataatttttaaaagctttcataaataccagcagcaattgtaagcaaatctacaaaggttcttgaacctttctattatatacaaaactgaagtcattaaggagttcaactaatcaggaattaaatggtcatttatttcatgcagtatgatttaaggtatttgttgggattctggtcaaatgtcataatcagcaaacgggattaaaaatacctctaaaatcaacaggtgagcactaaataattatctaaataatggtattggagaacttgtttcctgctatttggaagaaattgcttcattgctagtttgtatttctaacttctacagttatagactccactgtgctttgtatctgaatttctcagtatagacattttgtttactgtatgcttgcatatttattttcaactttgcctgtctttaaaattgcttgaggaaaaatggttgtaattaatttctgctacagaaaaagcacccggtacgttttgtctcatcaagattgttttaaattctaaactataactttgttcagaagggcttttgcaatgatagcagaaaactgtacaaatgtacgggttagttaatagaggtttcttgtttgaaatgaaacttaccatttggaggatatgtaatggtacaggctggtaaacttcaagtcccccttttagttttaactta

SEQ ID NO: 23433 - DNA, 713 bp, Macaca Mulatta
  misc_feature (1)...(713): n = A,T,C or G
nnnnnnnnnnnnnnnnnnnnnnnnnnnnnnnnnnnnnnnnnnnnnnnnnnnnnnnnnnnnnnnnnnnnnnnnnnnnnnnnnnnnnnnnnnnnnnnnnnnnnnnnnnnnnnnnnnnnnnnnnnnnnnnnnnnnnnnnnnnnnnnnnnnnnnnnnnnnnnnnnnnnnnnnnnnnnnnnnnnnnnnnnnnnnnnnnnnnnnnnnnnnnnnnnnnnnnnnnnnnnnnnnnnnnnnnnnnnnnnnnnnnnnnnnnnnnnnnnnnnnnnnnnnnnnnnnnnnnnnnnnnnnnnnnnnnnnnnnnnnnnnnnnnnnnnnnnnnnnnnnnnnnnnnnnnnnnnnnnnnnnnnnnnnnnnnnnnnnnnnnnnnnnnnnnnnnnnnnnnnnnnnnnnnnnnnnnnnnnnnnnnnnnnnnnnnnnnnnnnnnnnnnnnnnnnnnnnnnnnnnnnnnnnnnnnnnnnnnnnnnnnnnnnnnnnnnnnnnnnnnnnnnnnnnnnnnnnnnnnnnnnnnnnnnnnnnnnnnnnnnnnnnnnnnnnnnnnnnnnnnnnnnnnnnnnnnattgtcttttttaatcgaaggtcccttactggtcctgcttccatgagtagcagtgaccaggggaaaagggagaggaaccagccggcacagggaggggtcatctccacaacattccatttatacacagaactaaacagacaagcacaggtcactattgcgg

SEQ ID NO: 23434 - DNA, 214 bp, Macaca Mulatta
acccatcccccttcctctagccctccctgcgtttagattcagttgcaccttttattattttaactcttctccataggacacgcagcccccaatctgtccctccggcctgggcggcccctggtcccgcgcgccaggatgggagagcgagggacctgcccgcggcccgccggcgtgtgcaaggaggtccagccgccgcgcccgctgcccggagtct

SEQ ID NO: 23435 - DNA, 664 bp, Macaca Mulatta
ctggaaacaactctagctcagccttctccaccatgagcctcagacttgataccatgccttcctgtaacagtgccagaccacttcatgccctgcaggtgctgctgcttctgtcactgctgctgactgctctggcttcctccaccaaaggacaaactaagagaaacttggcgaaaggcaaagaggaaagtctagacagtgagttgtacactgaactgcgctgcttgtgtatgaagacaacctctggaattcatcccaaaaacatccaaagtttggaagtgatcgggaaaggaatccattgcaaccaagtcgaagtgatagccacattgaaggatgggaggaaaatctgcctggacccagatgctcccagaattaagaaaattgtacagaaaaaattggcaggtgatgaatctgctgattaatttgttccgtttctaccaaacttctttaactcccagaaagggtagaattttgaaaccttgattttctagagttctcatttattcgggataccctattcttactgcattaaaattcggatatgtgtatcattctgtcttaaaaatcacattttattctgagaaggttggtcaaacgatggcagaaggaagatgaacctaaataagcctggtttcaactctctaattattggctaacattggcactg

SEQ ID NO: 23436 - DNA, 175 bp, Macaca Mulatta
aggtcatgttggcagaactcaagggcaaagatgaagtatatgctgtgaaggtcttaaagaaggatgtcatccttcaggatgatgacgtggactgcacaatgacagagaagaggattttggctctggcacggaaacacccttaccttacccaactctactgctgcttccagaccaa

SEQ ID NO: 23437 - DNA, 800 bp, Macaca Mulatta
ggtggctactcatgtgtgcctgtggctttagcagaaggcctagacattaaactgaatacagcagtgcgacaggttcgctacacggcttcaggatgtgaagtgatagctgtgaatacccgctccacgagtcaaacctttatttataaatgcgatgcagttctctgtacccttcccctgggtgtgctgaagcagcagccaccagccgttcagtttgtgccacctctccctgagtggaaaacatctgcagtccaaaggatgggatttggcaaccttaacaaggtggtgttgtgttttgaccgggtgttctgggatccaagtgtcaatttgttcgggcatgttggcagtacgactgccagcaggggtgagctcttcctcttctggaacctctataaagctccaatactgttggcactagtggcaggagaagctgctggtatcatggaaaacataagtgacgatgtgattgttggccgatgcctggccattctcaaagggatttttggtagcagtgcagtaccccagcccaaggaaactgtggtgtctcgttggcgagctgatccctgggcccggggctcttattcctatgttgctgcaggatcatctggaaaatgactatgaatttaagggctcagcccaatcactccaggccccctcgatttccagggggccccacaagccgaattccacgaactctttcttttgccggggaaaaacatacaatccgttaaactacccccaccccccaatggacatgggggcctcctgcctgaaatggggcctgcccaaaaaacccaggaaaa

SEQ ID NO: 23438 - DNA, 154 bp, Macaca Mulatta
taaaggaaaccaggaaagcaatgagagattctgacagtggactagaaaaaatggctattggtcatcatatccatgaccgagctcatgtcattaaaaagtcaaagaacaggaagactggagatgaagagggtcaccaggagttcataaatatgaa

SEQ ID NO: 23439 - DNA, 819 bp, Macaca Mulatta
  misc_feature (1)...(819): n = A,T,C or G
ggggaaaggtggtggtggcaggcaccataataattcagaatattggagctatgtcatcttatcttttaattattaaaacagagtttcctgctgctattgcagaatttttgactggagactatagtagatattggtatcttgatggacaaacactgctaataatcatatgtgttggcatcgtgttccctcttgcacttcttcccaaaataggctttcttggctacacaagtagtttatcatttttctttatgatgttctttgctcttgtgatttcaaatgctacagatgattgtaagccaaaactctttcatttctccaaagagagtgcatatgccttaccaaccatggctttttcatttctctgccatacctcaatattgcccatatactgtgaacttcaaagtccttcaaagaaaagaatgcagaatgttaccaatacagcaattgctttaagttttcctcatttattttatatctgcactctttggctacctcactttttatgacaagcgggagtcagaattactaaaagggtatactaaatactttacacatgcatgcttccttttcttcacctccccaagtacctccatggctaattcgcgccggggcttttttacaagcgaccgttttacattccactttccccccgntccctaaaacgcgcgtgcaccggattgagtcgcctttgtctgcaaagtttctgcccattcctctgcgggaatctccccccatctttttttttgggaccacactcttacggcgtgctctggatacgttttatctgcccccgttttcttcacgcttcgcgatcacaac

SEQ ID NO: 23440 - DNA, 724 bp, Macaca Mulatta
  misc_feature (1)...(724): n = A,T,C or G
ccgaagttgctaagtgcccgagcgctgcgcgttaagtagagaagtcttggtagtaagcgaacccgacccggctctcggggcactactgatggaaagcagcacacgcacatccttgcgggaagaatctagagtcaccctgggatagatccatctccttctgccactgaatttcacacttgaaaaagataaggtcatgggggcgaattaatgatatcccccactcattctaaccattctcattattnnnnnnnnnnnnngcttgttaattatgaagatatgtcccagatattacatgaagagcatgcaaactacttgaaatttgaatccggacatgaccgtaaggaaactctttcataaagcacttttgtggcccagttcccacacgcacacaaaagtattaggtctttaaaacttttgtaagtatgtaagtgagactccctcctactatctaggaatacacaatagagatgagacactgccccaatcctaaagaggccagaactgaagtgctacattgtgatagttgggggatgctgcttttatccagctcttttttcctagaatcctcattacagctaacgctggtaataaaggtaggaaacaatagaactcataaaacttagaaatggcaataaatcttggctcctgtctctagcccagttccttcttacatgagattcaaagtttttcagtatgcaatgctgaacatttacactatgcttgc

SEQ ID NO: 23441 - DNA, 674 bp, Macaca Mulatta
  misc_feature (1)...(674): n = A,T,C or G
cgagaggcagatccattgatatgaacacatgtcttcagngtctcacntgatctccnttaaaactggatttagcatgttcatgaaggtaatcgtgctgtccactcgactcctgaagccatttaatattcctgagctgttatttgcaactgaccgactgcatccagaccttggcttctgagcatccgctaagaagataagacctactcatgctggaaatgctgatacaattttctgccagcactccaaatactcctccacaaccaacatccctgtcagtaattgcaagcatgacagaattctgcctgaagggtcttgataccttcgcagtgaggtactttgcttgaattgctgtgatnnnnnnnnnnnnnnnnnnnnnncttattttcctgaaggcgataatctgtcttttggctagtccaattagtgattgtttccatttatccttaaccctctgtgagcttcctgattccacctacaagttcattaattctaaagagaagcctgttggcaagtgttggtaggttacaactcttttaatttgaagttgctcgagaagttagacatgctttagaattatgagtgtgaggaaagtttgatttatataaacttaggattatataactgaggagagaacattgcaaatagggtctgaggctttgttcctcctcttgctc

SEQ ID NO: 23442 - DNA, 271 bp, Macaca Mulatta
aagatgatgaccacacatggattttggatatgtaaatattgcatgtccagctggattctggcctgccaaagaagatgatgattaaaaacatagatattgcttgtatattatgcagttgactgcatgcacaatttacatttatttataatctctattctataataaaagagtatgatttttgttacgcaaggcaatgtaatatttgaagaatcagggtccaacctgccaatgttggcatgacaaattaaatctcaggctgagtatgtatatc

SEQ ID NO: 23443 - DNA, 730 bp, Macaca Mulatta
tatggggcgtgatcatggcattttccctaatggccttgtgattttctgctctgataattgtgtttgggagaaacacttaaagttaattggtgcctttcagcacaggaactttaccgtgaaggtcccatgaggctgacctctctcccagcctctcactcacagatcttctcttctttctccatcctgcaaatcagaatcactgcccagaagagagcctgtgacactgccacctgtgtgactcatcggctggcaggcttgctgagcagatcagggggtgtggtgaagaacaactttgtgcccaccaatgtgggttccaaagccttcggcaggcgccgcagggaccttcaagactgggcagctgaatgactcaagaaggtgactgcccttgtatgatgggatgggaagatgaatgactggcttttacaggggtatatttcaccctctgagcctccctgagaccatgttgtttaaaaaaatcggtaagggaaggtacccacaccagtgtctgagttccaatagctaaaaccctagaattttgattaatctctgttttttcagtctctccttgtaaccctgagatcatcagaccaagaaatatagatcctgtttatttaaaacactgctctttgacacttataattttgacaattctagaatttgagtttgaaagataatggcactatcattttagagtatacattactatatcgtgtacctccaaattaagtgc

SEQ ID NO: 23444 - DNA, 662 bp, Macaca Mulatta
  misc_feature (1)...(662): n = A,T,C or G
gaagggaaggtagacatcaggttctccctggagacttttcgttttcatttacgctgcggaaactgacgtttttgcctaacaccccatgtaatgtaaacgtataggcttgagtacgtgtccggccgcatgtgtagtgaaccctaaagctttcctaattgtagttagcatcgtcccctaagcggaacgaatttccgtgaannnnnnnnnnnnnnnnnnnnnnnnnnnnnnnnnnnnnnnnnnnnnnnnnnnnnnnnnnnnnnnnnnnnnnnnnnnnnnnnnnnnnnnnnnnnnnnnnnnnnnnnnnnnnnnnnnnnnnnnnnnnnnnnnnnnnnnnnnnnnnnnnnnnnnnnnnnnnnnnnnnnnnnnnnnnnnnnnnnnnnnnnnnnnnnnnnnnnnnnnnnnnnnnnnnnnnnnnnnnnnnnnnnnnnnnnnnnnnnnnnnnnnnnnnnnnnnnnnnnnnnnnnnnnnnnnnnnnnnnnnnnnnnnnnnnnnnnnnnnnnnnnnnnnnnnnnnnnnnnnnnnnnnnnnnnnnnnnnnnnnnnnnnnnnnnnnnnnnnnnnnnnnnnnnnnnnnnnnnnnnnnnntcaaagaacttttttcttcatccagtcctagcaagatatatgggagagccttagaaaaatgcagatcacatcccgagg

SEQ ID NO: 23445 - DNA, 772 bp, Macaca Mulatta
ctggacgactccgtctctccgcctgtttgctgctgttacctggatgggcgagcacctctgaggctctttgttacctgggcaataagggactagcagttcagcccttctctgtgcctgctggattgtttgtatttgttcccagcctctgctcatgtaatgcactcccttaaccaggaaattaaagcattctcccggaataatctcaggaagcaatgcaccagggtgacaacgctaactggaaagaaaattatagaaacatggaaagatgccagaattcatgttgtggaagaagtagagccgagcagtgggggtggttgtggttatgtgcaggaccttagctcggacctgcaggttggcgttattaagccatggttgctcctagggtcacaagacgctgctcatgatttggatacactgaaaaagaacaaggtgactcatattcttaatgttgcatatggagttgaaaatgctttcctcagtgactttacatataagagcatttctatattggatctgcctgaaaccaacatcctgtcttattttccagaatgttttgaatttattgaagaagcaaaaagaaaggatggagtggttcttgttcattgtaatgcaggagtttccagggctgctgcaattgtaataggcttcctgatgaattctgaacaaacctcatttaccagtgctttttctttggtgaaaaatgccagaacttccatatgtccaaattctggcttcatggagcaacttcgtacatatccagagggcaagaaag

SEQ ID NO: 23446 - DNA, 97 bp, Macaca Mulatta
tggtacctccggatgctgcaatgttaccggtgcagacagtggttccacgaggcctgcacccagtgcctcaatgagcccatgatgtttggagaccggt

SEQ ID NO: 23447 - DNA, 3877 bp, Macaca Mulatta
  misc_feature (1)...(3877): n = A,T,C or G
ccccagatcggaagtgacggagacgagctagcgcgtcgaaggtacctctatggttttcctcgcgttcttgagtcgggaaatggccgctgtgtggttgcaacggagataaatccccggaaccgcgattcggcgtgtcaggnnnnnnnnnnnnnnnnnnnnnnnnnnnnnnnnnnnnnnnnnnnnnnnnnnnnnnnnnnnnnnnnnnnnnnnnnnnnnnnnnnnnnnnnnnnnnnnnnnnnnnnnnnnnnnnnnnnnnnnnnnnnnnnnnnnnnnnnnnnnnnnnnnnnnnnnnnnnnnnnnnnnnnnnnnnnnnnnnnnnnnnnnnnnnnnnnnnnnnnnnnnnnnnnnnnnnnnnnnnnnnnnnnnnnnnnnnnnnnnnnnnnnnnnnnnnnnnnnnnnnnnnnnnnnnnnnnnnnnnnnnnnnnnnnnnnnnnnnnnnnnnnnnnnnnnnnnnnnnnnnnnnnnnnnnnnnnnnnnnnnnnnnnnnnnnnnnnnnnnnnnnnnnnnnnnnnnnnnnnnnnnnnnnnnnnnnnnnnnnnnnnnnnnnnnnnnnnnnnnnnnnnnnnnnnnnnnnnnnnnnnnnnnnnnnnnnnnnnnnnnnnnnnnnnnnnnnnnnnnnnnnnnnnnnnnnnnnnnnnnnnnnnnnnnnnnnnnnnnnnnnnnnnnnnnnnnnnnnnnnnnnnnnnnnnnnnnnnnnnnnnnnnnnnnnnnnnnnnnnnnnnnnnnnnnnnnnnnnnnnnnnnnnnnnnnnnnnnnnnnnnnnnnnnnnnnnnnnnnnnnnnnnnnnnnnnnnnnnnnnnnnnnnnnnnnnnnnnnnnnnnnnnnnnnnnnnnnnnnnnnnnnnnnnnnnnnnnnnnnnnnnnnnnnnnnnnnnnnnnnnnnnnnnnnnnnnnnnnnnnnnnnnnnnnnnnnnnnnnnnnnnnnnnnnnnnnnnnnnnnnnnnnnnnnnnnnnnnnnnnnnnnnnnnnnnnnnnnnnnnnnnnnnnnnnnnnnnnnnnnnnnnnnnnnnnnnnnnnnnnnnnnnnnnnnnnnnnnnnnnnnnnnnnnnnnnnnnnnnnnnnnnnnnnnnnnnnnnnnnnnnnnnnnnnnnnnnnnnnnnnnnnnnnnnnnnnnnnnnnnnnnnnnnnnnnnnnnnnnnnnnnnnnnnnnnnnnnnnnnnnnnnnnnnnnnnnnnnnnnnnnnnnnnnnnnnnnnnnnnnnnnnnnnnnnnnnnnnnnnnnnnnnnnnnnnnnnnnnnnnnnnnnnnnnnnnnnnnnnnnnnnnnnnnnnnnnnnnnnnnnnnnnnnnnnnnnnnnnnnnnnnnnnnnnnnnnnnnnnnnnnnnnnnnnnnnnnnnnnnnnnnnnnnnnnnnnnnnnnnnnnnnnnnnnnnnnnnnnnnnnnnnnnnnnnnnnnnnnnnnnnnnnnnnnnnnnnnnnnnnnnnnnnnnnnnnnnnnnnnnnnnnnnnnnnnnnnnnnnnnnnnnnnnnnnnnnnnnnnnnnnnnnnnnnnnnnnnnnnnnnnnnnnnnnnnnnnnnnnnnnnnnnnnnnnnnnnnnnnnnnnnnnnnnnnnnnnnnnnnnnnnnnnnnnnnnnnnnnnnnnnnnnnnnnnnnnnnnnnnnnnnnnnnnnnnnnnnnnnnnnnnnnnnnnnnnnnnnnnnnnnnnnnnnnnnnnnnnnnnnnnnnnnnnnnnnnnnnnnnnnnnnnnnnnnnnnnnnnnnnnnnnnnnnnnnnnnnnnnnnnnnnnnnnnnnnnnnnnnnnnnnnnnnnnnnnnnnnnnnnnnnnnnnnnnnnnnnnnnnnnnnnnnnnnnnnnnnnnnnnnnnnnnnnnnnnnnnnnnnnnnnnnnnnnnnnnnnnnnnnnnnnnnnnnnnnnnnnnnnnnnnnnnnnnnnnnnnnnnnnnnnnnnnnnnnnnnnnnnnnnnnnnnnnnnnnnnnnnnnnnnnnnnnnnnnnnnnnnnnnnnnnnnnnnnnnnnnnnnnnnnnnnnnnnnnnnnnnnnnnnnnnnnnnnnnnnnnnnnnnnnnnnnnnnnnnnnnnnnnnnnnnnnnnnnnnnnnnnnnnnnnnnnnnnnnnnnnnnnnnnnnnnnnnnnnnnnnnnnnnnnnnnnnnnnnnnnnnnnnnnnnnnnnnnnnnnnnnnnnnnnnnnnnnnnnnnnnnnnnnnnnnnnnnnnnnnnnnnnnnnnnnnnnnnnnnnnnnnnnnnnnnnnnnnnnnnnnnnnnnnnnnnnnnnnnnnnnnnnnnnnnnnnnnnnnnnnnnnnnnnnnnnnnnnnnnnnnnnnnnnnnnnnnnnnnnnnnnnnnnnnnnnnnnnnnnnnnnnnnnnnnnnnnnnnnnnnnnnnnnnnnnnnnnnnnnnnnnnnnnnnnnnnnnnnnnnnnnnnnnnnnnnnnnnnnnnnnnnnnnnnnnnnnnnnnnnnnnnnnnnnnnnnnnnnnnnnnnnnnnnnnnnnnnnnnnnnnnnnnnnnnnnnnnnnnnnnnnnnnnnnnnnnnnnnnnnnnnnnnnnnnnnnnnnnnnnnnnnnnnnnnnnnnnnnnnnnnnnnnnnnnnnnnnnnnnnnnnnnnnnnnnnnnnnnnnnnnnnnnnnnnnnnnnnnnnnnnnnnnnnnnnnnnnnnnnnnnnnnnnnnnnnnnnnnnnnnnnnnnnnnnnnnnnnnnnnnnnnnnnnnnnnnnnnnnnnnnnnnnnnnnnnnnnnnnnnnnnnnnnnnnnnnnnnnnnnnnnnnnnnnnnnnnnnnnnnnnnnnnnnnnnnnnnnnnnnnnnnnnnnnnnnnnnnnnnnnnnnnnnnnnnnnnnnnnnnnnnnnnnnnnnnnnnnnnnnnnnnnnnnnnnnnnnnnnnnnnnnnnnnnnnnnnnnnnnnnnnnnnnnnnnnnnnnnnnnnnnnnnnnnnnnnnnnnnnnnnnnnnnnnnnnnnnnnnnnnnnnnnnnnnnnnnnnnnnnnnnnnnnnnnnnnnnnnnnnnnnnnnnnnnnnnnnnnnnnnnnnnnnnnnnnnnnnnnnnnnnnnnnnnnnnnnnnnnnnnnnnnnnnnnnnnnnnnnnnnnnnnnnnnnnnnnnnnnnnnnnnnnnnnnnnnnnnnnnnnnnnnnnnnnnnnnnnnnnnnnnnnnnnnnnnnnnnnnnnnnnnnnnnnnnnnnnnnnnnnnnnnnnnnnnnnnnnnnnnnnnnnnnnnnnnttgttttaagttttcaaatatcttgagaaatagtagactgtatgttgaaaattgtactgaaataaagtagaaaattgttacgtaccatatttgtaactatcaacttttaaaaaaaacttttaacgtttttgttacatgcattgtaattctgctttgtctataagatacggtcaagtacagctctgtgaaagttctgattctcttccttccctgtttgtcaatgttttattctgaagtaaacgttagctctacatataaatcctggaacagaaattgtttatagagattacactaattattttaactgtatacatctgtttaatttgaacacactacattgtatggtgactaatttttgaagtataccacagacaaaaggttgttactttggtaaactaagctagtttaacacttgagcaaatgcttaagaaggnnnnnnnnnnnnnngctttgccaatagctaaaaagtacaagctattaaaaattagactgaaaagttttgagaaaatgttatttttactgaaagcaagcagtggcctataaagaacattcttatgagccttttcttattgcgttcaaaaccgagtgttctctttctattcctatttgatagtttgagtcatggtcttagatattagctatttgtgagaggaaactggtttgtaataatactgcaaatagaaaccccatttctactgaacatcctagttttaaacagaagaaaaactgtaat

SEQ ID NO: 23448 - DNA, 1379 bp, Macaca Mulatta
  misc_feature (1)...(1379): n = A,T,C or G
catttgtttacctgagcaatctgctgtatcctgtgcccctgatccacagggtggccatcgtcagtgagaaaggtgaagtgcggggatttctgcgtgtggctgtacaggccattgcagnnnnnnnnnnnnnnnnnnnnnnnnnnnnnnnnnnnnnnnnnnnnnnnnnnnnnnnnnnnnnnnnnnnnnnnnnnnnnnnnnnnnnnnnnnnnnnnnnnnnnnnnnnnnnnnnnnnnnnnnnnnnnnnnnnnnnnnnnnnnnnnnnnnnnnnnnnnnnnnnnnnnnnnnnnnnnnnnnnnnnnnnnnnnnnnnnnnnnnnnnnnnnnnnnnnnnnnnnnnnnnnnnnnnnnnnnnnnnnnnnnnnnnnnnnnnnnnnnnnnnnnnnnnnnnnnnnnnnnnnnnnnnnnnnnnnnnnnnnnnnnnnnnnnnnnnnnnnnnnnnnnnnnnnnnnnnnnnnnnnnnnnnnnnnnnnnnnnnnnnnnnnnnnnnnnnnnnnnnnnnnnnnnnnnnnnnnnnnnnnnnnnnnnnnnnnnnnnnnnnnnnnnnnnnnnnnnnnnnnnnnnnnnnnnnnnnnnnnnnnnnnnnnnnnnnnnnnnnnnnnnnnnnnnnnnnnnnnnnnnnnnnnnnnnnnnnnnnnnnnnnnnnnnnnnnnnnnnnnnnnnnnnnnnnnnnnnnnnnnnnnnnnnnnnnnnnnnnnnnnnnnnnnnnnnnnnnnnnnnnnnnnnnnnnnnnnnnnnnnnnnnnnnnnnnnnnnnnnnnnnnnnnnnnnnnnnnnnnnnnnnnnnnnnnnnnnnnnnnnnnnnnnnnnnnnnnnnnnnnnnnnnnnnnnnnnnnnnnnnnnnnnnnnnnnnnnnnnnnnnnnnnnnnnnnnnnnnnnnnnnnnnnnnnnnnnnnnnnnnnnnnnnnnnnnnnnnnnnnnnnnnnnnnnnnnnnnnnnnnnnnnnnnnnnnnnnnnnnnnnnnnnnnnnnnnnnnnnnnnnnnnnnnnnnnnnnnnnnnnnnnnnnnnnnnnnnnnnnnnnnnnnnnnnnnnnnnnnnnnnnnnnnnnnnnnnnnnnnnnnnnnnnnnnnnnnnnnnnnnnnnnnnnnnnnnnnnnnnnnnnnnnnnnnnnnnnnnnnnnnnnnnnnnnnnnnnnnnnnnnnnnnnnnnnnnnnnnnnnnnnnnnnnnnnnnnnnnnnnnnnnnnnnnnnnnnnnnnnnnnnnnnnnnnnnnnnnnnnnnnnnnnnnnnnnnnnnnnnnnnnnnnngctggatcattgcatccagccggctgtcatcaccaaggatgtgtgcatggtcttctattcccgagatgccaagatctcaccaccacgctctctgcgtagcctctttggcagtggctactcgaagtcaccagattcgn

SEQ ID NO: 23449 - DNA, 771 bp, Macaca Mulatta
  misc_feature (1)...(771): n = A,T,C or G
ggtgctcctggggagttgaccaacattntgggaagataataggaggcaatggggaaactgctccccaatatattcctcttttcctttcttcaagctgcctggcagggggtcttttgctactttctcctgagaggggtgggaagtacagcttgtggggacagtgctgggagatgatcagaaatcgcagggcacagcctcaggtctacctggacacttgtccgctgttggagattctcaacagccagacacccaatctgtggcctcctgctctgaggccatcccccagcttccctagaacacagcagacatctgagaaagcttcagcagttctcttgctaacagattcagaaaagtgtctcaaagcagagcacagagttatttggtgtatgctgaagatggcctttgtgccacaatcatttagtaagtaagcaatcaatttcccattgaactgaaaatgcaacgtttatcatacattcgattctcattcacactccttaagatttgtgtcagaatctttatttctgttcatgtgttctacttttctactcctgtatgaataaaatattgatttggttacagtggctttgactataatgtgggagccaatttttgcctcagtcttcattttcatatttaccttgcgattctcaggcattttttttcttctatgtgaaaattaaaatcattgtgtaatttnnnnnnnnnnnnnnnnnnnnnnattggtattctagttgggcaatgtcttacatttatgtttaagtttgaggggaa

SEQ ID NO: 23450 - DNA, 130 bp, Macaca Mulatta
agtgcagccaagccggaagaattcattccgagtttggtgtcttattctctcaaatcaaccagccagactctaactataccctcagcattgccaacaggctctacgggacaaagacaatggcattccatca

SEQ ID NO: 23451 - DNA, 262 bp, Macaca Mulatta
cttccaaaataccagctgttacttctcctaataatgagagtacacccccttctgaagagctagaattggataagtggaaaactaccatgaaatctagtgtgcaagaagaatgtgtttcaacagtctcaagcagtaaggatgaagatcctctagctgccaccagagagttcattgagatgtggagattgcttggcaaagaagtaccagaacacatcactgaagaagagctcaaaaccattatggaatgtgtttctaaaacagc

SEQ ID NO: 23452 - DNA, 438 bp, Macaca Mulatta
atcctttcttctcttaggtctaaagagtctagaaagatgtaagtgtgagttgcttacaattccattttattctcaggaggaacaatccaacaccaatctagctaaattccgcaagctccagcatgagctggaggaggctgaggaacgggctgacattgctgagtcccaggtcaacaaactgcgggtgaagagccgggaggttcacacaaaagtcataagtgaagagtgaccacgtcctgatgccatggagtgactgaagacaggcacaaaatgtgacatctttggtcatttccctctgtaattattgtgtattctaccctgttgcaaaggaaataaagcatagggtagtttgcaaacaatatccttagactggtcttgtcttttctctttcctgaagccatgtcaaagtttgaagagtcacagagctgtcaaacaatc

SEQ ID NO: 23453 - DNA, 715 bp, Macaca Mulatta
  misc_feature (1)...(715): n = A,T,C or G
gtgcagcgccggggctgagcgacagcaagtgcagcgggctcctatcccgggtgaggggtggcctcagcgcgggatcgtgccctcctcagcccgctcctgtccccaacttcacgtgtattccgcacgtcccctccgcgctgtgtgtctactgagacggggaggcgtgaaagggcccgggtcccttctcagtcgtgctctgtgcttcggggcaagctccccgtctccgggcgcacttccctcgcctgggttcagtctatcctcctttctccagcctcctcccctcgcaggtgggatcgtcggtgggaccggagcgcgggcgggcgcggccccccgggaccatggccgggtccgacaccgcgcccttcctcagccaggcggatgacccggacgannnnnnnnnnnnnnnnnnnnnnnnnnnnnnnnnnnnnnnnnnnnnnnnnnnnnnnnnnnnnnnnnnnnnnnnnnnnnnnnnnnnnnnnnnnnnnnnnnnnnnnnnnnnnnnnnnnnnnnnnnnnnnnnnnnnnnnnnnnnnnnnnnnnnnnnnnnnnnnnnnnnnnnnnnnnnnnnnnnnnnnnnnngtgttcatctccagttacatggtgttggcacctgtgtttggctacctgggtgacaggtacaatcggaagtatctcatgtgcgggggcattgccttctggtccctggtgacactggggtcatccttcatccccggaga

SEQ ID NO: 23454 - DNA, 230 bp, Macaca Mulatta
tccatcatctgtggacactggagtatggaataaatgctgtttgtcacatcaacactatcctgtggccagagcttcctctgggagtagggaagggaagggcgatgcaggtgattcccccctgtcagctgcccccacgtccacccccttgcaagaccttggaagaagtctgatgtcatggagaaagaaatgagacagggctgggcaccgtggttcattcttgtaatctcagt

SEQ ID NO: 23455 - DNA, 1001 bp, Macaca Mulatta
  misc_feature (1)...(1001): n = A,T,C or G
gggctctttcccatcttgcaagatggcgggtgaaaaagttgagaagccagatactaaagagaagaaacccgaagccaagaaggctgatgctggtggcaaggtgaaaaagggtaacctcaaggctgagaagcccaagaaggggaagccccattgcagccgcaaccctgtccttgtcagaggaattggcaggtattcccgatctgccatgtattccataaaggccatgtacaagaggaagtactcagccgctaaatccaagnnnnnnnnnnnnnnnnnnnntaaggttcttgcaactcttacaaaaccagttggtggtgacaagaacggcggtacccgggtggttaaacttcgcaaaatgcctagatattatcctactgaagatgtacctcaaaagctgttgagccacggcaaaaaaaacccttcattccagcacgtgaagaaaaactgtaaagccaaacaattaacaccccggggaaactatttcctgaattcattcccttccactggggaaagatccattagtgagaacccaaaaaaagagggttgggtttttttttacccacggtataagggctccccccttggcggcctcaaatattggcacccattttgggaatataaaccctatttgacttgctaacacctgggggataaccaaccacccctgtgggaccccccactctaaaaaatgaccaacaagagttattacatttactgttaaatgtttatatgtgaaatcgagtagtcannnnnnnnnnnnnnnnnnnnnnnnccgataatcctatttgttgcctcacatcctttgcgcaaacacccacatatactgcatcgcagcaaattcccacccccaaatatgtttctctcacaaatcactcccctcgaataaaacatatcgttcgtagtccaggtaaagacaaccaataactaatcttccgtcccatatctataacacttaatttcactcccacggagaaaagatcctccatggaacattagcgact

SEQ ID NO: 23456 - DNA, 1668 bp, Macaca Mulatta
  misc_feature (1)...(1668): n = A,T,C or G
tcagtcatttactagaaagcaataggaagcttgaagaccaagttcagcgttgtatctggttccagcagctgctgctttccttaacaatgctcttgcttgcttttgtcacctccttcttctatttattgtacagttaaagaagtggtgccaaataggaaccacggctccttcgtccattagttggaaaaagtaacagacctaaaactctaccaagctactaaaaacattgcacatctgtgcttcctaaaaggaaatatgcagcacttagaggggaacacatacatgtcttgaaaataaactgctagaataaagaaatgctggagaaattgattataagagactatagctatttagtaaagtaagtaaaggcatatccattgtgtaaattaatagtttaaatataatttattttttccttttnnnnnnnnnnnnnnnnnnnnnnnnnnnnnnnnnnnnnnnnnnnnnnnnnnnnnnnnnnnnnnnnnnnnnnnnnnnnnnnnnnnnnnnnnnnnnnnnnnnnnnnnnnnnnnnnnnnnnnnnnnnnnnnnnnnnnnnnnnnnnnnnnnnnnnnnnnnnnnnnnnnnnnnnnnnnnnnnnnnnnnnnnnnnnnnnnnnnnnnnnnnnnnnnnnnnnnnnnnnnnnnnnnnnnnnnnnnnnnnnnnnnnnnnnnnnnnnnnnnnnnnnnnnnnnnnnnnnnnnnnnnnnnnnnnnnnnnnnnnnnnnnnnnnnnnnnnnnnnnnnnnnnnnnnnnnnnnnnnnnnnnnnnnnnnnnnnnnnnnnnnnnnnnnnnnnnnnnnnnnnnnnnnnnnnnnnnnnnnnnnnnnnnnnnnnnnnnnnnnnnnnnnnnnnnnnnnnnnnnnnnnnnnnnnnnnnnnnnnnnnnnnnnnnnnnnnnnnnnnnnnnnnnnnnnnnnnnnnnnnnnnnnnnnnnnnnnnnnnnnnnnnnnnnnnnnnnnnnnnnnnnnnnnnnnnnnnnnnnnnnnnnnnnnnnnnnnnnnnnnnnnnnnnnnnnnnnnnnnnnnnnnnnnnnnnnnnnnnnnnnnnnnnnnnnnnnnnnnnnnnnnnnnnnnnnnnnnnnnnnnnnnnnnnnnnnnnnnnnnnnnnnnnnnnnnnnnnnnnnnnnnnnnnnnnnnnnnnnnnnnnnnnnnnnnnnnnnnnnnnnnnnnnnnnnnnnnnnnnnnnnnnnnnnnnnnnnnnnnnnnnnnnnnnnnnnnnnnnnnnnnnnnnnnnnnnnnnnnnnnnnnnnnnnnnnnnnnnnnnnnnnnnnnnnnnnnnnnnnnnnnnnnnnnnnnnnnnnnnnnnnnnnnnnnnnnnnnnnnnnnnnnnnnnnnnnnnnnnnnnnnnnnnnnnnnnnnnnnnnnnnnnnnnnnnnnnnnnnnnnnnnnnnnnnnnnnnnnnnnnnnnnnnngtttgttttctcattaatatggccagtttgtttgggtctatgttgcttcacatgtgcaccttctttatttgaaagaaaaaacagtctgcctgtaaaatgttgagttttgattgagccatgtttagagattttacttactattctgaagggtagtgttgttggctttcatcttcaagaagttgattccaaaattgagttatgaagaatgatataacagaattccttcaaaattggcctagaaaataaaaccttaaaaggaca

SEQ ID NO: 23457 - DNA, 568 bp, Macaca Mulatta
  misc_feature (1)...(568): n = A,T,C or G
ttgaggagctgctggagcaggtgggcggctttgggcccttccaactgcggaatgtggcactgctggccctgccccgagtgctgctaccactgcatttcctcctgcccatcttcctggctgctgtgcctgcccaccgatgtgccctgccgggtgcccctgccaacttcaaccatcaggatgcgtggctggaggcctacattccccgggagcccgatggtacgctttagctcctgcctccactttgcctacccccaggctctcactaacaccacgttgggggaaagaaagggagatctcttcgggagctggaggatgaacctgccaannnnnnnnnnnnnnnnnnnnnnnnnnnnnnnnnnnnnnnnnnnnnnnnnnnnnnnnnnnnnnnnnnnnnnnnnnnnnnnnnnnnnnnnnnnnnnnnnnnnnnnnnnnnnnnnnnnnnnnnnnnnnnnnnnnnnnnnnnnnnnnnnnnnnnnnnnnnnnnnnnnnnnnnnnnnnnnnnnnnnnnnnnnnnnnnncaggtttgggcggaggcgtctgctgctggtggcctacgtgagtaccctgg

SEQ ID NO: 23458 - DNA, 293 bp, Macaca Mulatta
ggtaccaacacagcagtaagagggggtccagggctgaagggatcacttggtgactgggacgagtgacctacacgtgtgtttactcaaacaggtgtgaagtggcccgttctgacctcagctagcagagcagctctgaccagcagcctctgttcccatcacatttgaaattcatttacagacggggacatagcacaggacacagaggagccccaggagccaagcttccgacacaccccttttcatctccagagtcagtaaggccatctgcacatgtgagctggggacaggctctg

SEQ ID NO: 23459 - DNA, 435 bp, Macaca Mulatta
  misc_feature (1)...(435): n = A,T,C or G
ncttccttccctcactatatatctttatgcagtcagaatatttccaacagtgttttttgcaaactagagcaggacaaacttttatgtttacagggcacatctgttgtaatgcaaagcatatttggcaagcagttcatcaccaggacactagctatgattctagatgtcaaaaggtgtctatagaactagtgggacttctgcatgtgaaaacggttttccataggcattaaagtgctgaatgctcagtctgatccccaagtgggcacctgcactaccgatttttagaggaaattcactccctcatagtaagaattgaaaggtcaaattattttgaagtgattttttttaaaaaagtcttctgtttattaacaggaaaatttatttatttgacaggattttgagtaatgtaggaatacaaaaggtaaattagcagca

SEQ ID NO: 23460 - DNA, 288 bp, Macaca Mulatta
  misc_feature (1)...(288): n = A,T,C or G
gcctggcccgggacctgctgctgctccagtcatctccatggcaaccagcgcctgggaggagctagatggcggcctgggcagctgccaggccctggaggaccactctgcgctggccgagccccaggaggacagggcncagcaacacccaggctggccgactccggcagcccgccccacnnnnnnnggtggctgaaggccgcagtgtggacaccaggcccaagaagatggaaaaagaggctgccgccagggggaccccaggaacggggaaggagaggctgaaagccggag

SEQ ID NO: 23461 - DNA, 438 bp, Macaca Mulatta
gcgacccggtgcctgcctgcatgtcccctcatgcccacccccctggctctggggccagcagcgtcaccgacttcctgagtgtgtctggggctggcagtcacgtgggccagacgcacatgggcagcctgtttggagcagccagcctcagcccaggcctcaatggctacgagctcaatggcgagccggaccgcaagacctcaagcatcgcggccctccgcatgaaggccaaggagcacagtgcggccatctcctgggccacatgacagggcacccctgccccgtccccacctcgggacaccatgggccacgcccatgttttccaggcccccagcctcccactcgactttcctcttaggaacctggcctgggccaggggcctgaccctcagcactttcagccgccccaagtctgaggccccgtggcctgctgggagggagg

SEQ ID NO: 23462 - DNA, 2563 bp, Macaca Mulatta
  misc_feature (1)...(2563): n = A,T,C or G
ctctgtcctaagaagaaggcagagtgcagtgacgaccccacacctcagaggaagataccaatccctccattaccctctaaactgccacctgttaatctgattcaccgggacattctgcgggcnnnnnnnnnnnnnnnnnnnnnnnnnnnnnnnnnnnnnnnnnnnnnnnnnnnnnnnnnnnnnnnnnnnnnnnnnnnnnnnnnnnnnnggattttcctagcacagcaaaagaggccaaaatccggaaatcattgaaaaaaaaattaaaggtggaaaaaggggaaacgtccctgcaaagttctgagacacatcctcctgaagtggcccttccccctgcggaggggccgcctgccctggaagattccactgctctccttgagggagttaatacagttgtggtgacgacttctgccccagaggctttgctggcctcctgggcgagaatttcggccagggcgaggacgccagaggcagtggaatctccacaagaggnnnnnggtgtcaggtggtgtgtggtccatgggaaaagtctccctgcagacacagatggttgggttcacctgcagtttcatgctggtcaagcctgggttccagaaaagcaagaagggagagtgagtgcactcttcttgcttcctgcctccaattttccacccccgcatcttgaagacaatatgttgtgccccaaatgtgttcacagnnggaacaaggtcttaataaaaagcctccaatgggaatagaatatcaggaaaaaggccacatctatggtaattaatggcagaaagtctggagagtcggattccgcggggctgctgacaggtgaactctggttctctgcacacctgtttatggaccatgcagactggtggggtggcagatgttagcctaagagccctagcagtgcctgttgctttgtgagtggagatagagactctcagatttaaaaatggaaaaacatttcacaaattaccataaattgtagttaatatgtagaaaaactcattcagactactttgcgaaaatagacatgacttcagcagcagctnnnnnnnnnnnnnnnnnnagacagtgtctcactctgttgcccagaccagagtgcactggtgcaatctcagttcagtgcaatctccgcctcctggcttcaagtgattctcctgcctcagcctcccaagttgctaggattacaggcacctgccannnnnnnnnnnnnnnnnnngtatttttagtaaagatggggtttccccatgttggccaggctggtctcaaactcctggactcaagtgatcaacccgccttggcctcccaaaatactgggattatgggcatgagccactgtgcctgaccttcaacagctcttttaagtgagaagttcttcagctgagcattgtgaaggagttgaataaaacagtagctggctcttgttctcaattttctcttcctctgaacactgactactttaggagctgcttcattccaattgcaatttcataaaatgtaaagtattttaaagcaaagagaggctgttaactctctcccccaaacacatgatttttaatattcaaaacaatatttttcaaagttctcttaataacctgagatttctatggtttgactccaggatgaaaacacaagggactttgtattatttcactgataattattttgtatatgcctggtgtttaaaatgtttaaggttgnnnnnnnnnnnnnnnnnnnnnnnnnnnnnnnnaaaatgtgtttattaaccgattctccataaataaaaataagatgtgtatataaaataattcatctgttgtatttagggaaccgtattcattacatgcaaattttattgttagtgttcttaactcaaaagtaggagtaaaccaaaatgtgtgatttttcttttgtatgactcatttgtttgttctttattagttggcggtatgggtcggatcatttgtttttaaaactacttaggtatgattgacatacaaaaactgtacatatttaatgtatcctattgagtgtaattaatttttaatttttttgtgtacttcctaaatttatagaactgtgaggactgggaacagatctgtttttcacttgtcctgatttaatgacagtttccaacattgttttgttattgcaagtannnnnnnnnnnnnnnngcccctttaatgaagatactaaaaataatgcactggaaggagtggcagagttggaaaatttgtaaccatcataattcagatgtaataggtttgggaaagaatcctcaaaaatgttaaagcaaaggaggaaagtttgttgagaagcaagatgttcttctctcctggaccccattggttgttggtggtcagaattgttcagtgtaataaataataagacatttttttcttacactatgtgtattgttcgttttaattttgtttcctttttaaacttctatcctgctttctttggatgggtcaagtttctattccgtttccttcctttctattaatttggaaatttcctttgctttattattctgctggtagatacctccctggttctaacatacttcaataaacttaaatttctc

SEQ ID NO: 23463 - DNA, 258 bp, Macaca Mulatta
  misc_feature (1)...(258): n = A,T,C or G
aaagagtctttggagcacaccctagaggagaccaaagcccgttacagcagccagttagccaaccttcagtcgctgttgagctctctggaggcccaactgatgcagattcggagtgacatggaacgccagaacaatgaataccatatccttcttgacataaagactcggcttgagcagganattgctacttaccgccgccttctggaaggagaagacgtaannnctacagaatatcagttaagcaccctggaagagaga

SEQ ID NO: 23464 - DNA, 546 bp, Macaca Mulatta
taaggatgttgaagattcacaaaaccacactggtgagcctgttggagatgactacaagaaaatgggaacactttttggtgaactgaacaaaaaccttatcaacatgggcttcacaaggatgtattttggagaacgaattgtggaaccagtaatagtcattttcttttgggttatgctgtggttccttggcctgcaagcccttggactagtttctgttctttgccttgttattatttatgtgcaacagtaaaacatggctgaatggaattgtttgacatttggtagccatatatgtaattgaagaagttatatgtttcattttttgacaaccgaaaaagtttgccttgtttcaaattgtgtgctggatgttttgtaagtaaatttatacatggatgttacttaaaactaaactcttgatcataacagggttgaatatatattttgaatatacattagcttattcaaaactcttgtttcactactatgatctctgtcccctttatacacctctatccccatgccaaatcttaactaacaccaccagaa

SEQ ID NO: 23465 - DNA, 101 bp, Macaca Mulatta
aaaaactaacccaagagtgtgtattcagagaacagttcgaagaaaactggtacaatacgtactcatcaaacctatataagcacgtggacactggaaggcga

SEQ ID NO: 23466 - DNA, 1423 bp, Macaca Mulatta
  misc_feature (1)...(1423): n = A,T,C or G
gaataacatctcttcaggccacgtaccccatggacctctcacgagaccctctgaacaactggactatctttccagagtccagggattccaggtnnnnnnnnnnnnnnnnnnnnnnnnnnnnnnnnnnnnnnnnnnnnnnnnnnnnnnnnnnnnnnnnnnnnnnnnnnnnnnnnnnnnnnnnnnnnnnnnnnnnnnnnnnnnnnnnnnnnnnnnnnnnnnnnnnnnnnnnnnnnnnnnnnnnnnnnnnnnnnnnnnnnnnnnnnnnnnnnnnnnnnnnnnnnnnnnnnnnnnnnnnnnnnnnnnnnnnnnnnnnnnnnnnnnnnnnnnnnnnnnnnnnnnnnnnnnnnnnnnnnnnnnnnnnnnnnnnnnnnnnnnnnnnnnnnnnnnnnnnnnnnnnnnnnnnnnnnnnnnnnnnnnnnnnnnnnnnnnnnnnnnnnnnnnnnnnnnnnnnnnnnnnnnnnnnnnnnnnnnnnnnnnnnnnnnnnnnnnnnnnnnnnnnnnnnnnnnnnnnnnnnnnnnnnnnnnnnnnnnnnnnnnnnnnnnnnnnnnnnnnnnnnnnnnnnnnnnnnnnnnnnnnnnnnnnnnnnnnnnnnnnnnnnnnnnnnnnnnnnnnnnnnnnnnnnnnnnnnnnnnnnnnnnnnnnnnnnnnnnnnnnnnnnnnnnnnnnnnnnnnnnnnnnnnnnnnnnnnnnnnnnnnnnnnnnnnnnnnnnnnnnnnnnnnnnnnnnnnnnnnnnnnnnnnnnnnnnnnnnnnnnnnnnnnnnnnnnnnnnnnnnnnnnnnnnnnnnnnnnnnnnnnnnnnnnnnnnnnnnnnnnnnnnnnnnnnnnnnnnnnnnnnnnnnnnnnnnnnnnnnnnnnnnnnnnnnnnnnnnnnnnnnnnnnnnnnnnnnnnnnnnnnnnnnnnnnnnnnnnnnnnnnnnnnnnnnnngacactatataaaattgtcatttgagagtttctcatctgtatctagttatatcgcatagtttggaaacttgtctgaaactgactttatcaataatctaatcaacaaagatcatatccatgtgtatgtggttagacatttttatttcatcgactaacccaggaccatttcagtgatgcaaattgtgtgccctctggttcagctgaaacagtcctggactttcaaaaatcttgaataagtctcccacagttgtacaaattgggcaatttaggaatttaaaactttagatgaccatttggttccnnnnnnnnnnnnnnnnnnnnnngttaatgcaaataggacttaaatgaactttgatctccattttaaatattattttaaaaagtcgtgtatctatacatacggctcttgaggactcagctttcactacaatacaggatatgatctccatgtagttcacataaacctgcaggctgattttccagagtgctcgatact

SEQ ID NO: 23467 - DNA, 613 bp, Macaca Mulatta
ccaaggctgggcttgccaccttcctgaggggagtattgctgatgattcctttcccattcgtggtcaagcatttgcctttctgccaaagcaatatcatctcccatacatactgcgaccacatgtctgtggtaaagctatcttgtgccagcatcaaggtcaatgtaatctatggtctaatggttgctctcctgattggagtgtttgacatttgttgtatatctttgtcttacactatgatcgtcaaggcagtgatcagcttctcttcatcagatgctcgacagaaggctttcagcacctgcactgctcatatatctgccatcatcatcacctatgttccagcattcttcactttctttacccaccgttttggggggcacaaaattcccccttctcttcacgtcattgtggctaatctttatcttcttcttcccccaactgtaaaccctattgtttatggagtaaagacaaaacagatatgagagagtgtcataaagttcttccagggtgataaggctgcaggttgatataagactacttaattcagatggaacaaagataaatgaaaaataacaaagaaaaaccttacgtgtgatattttacatttattcatgtg

SEQ ID NO: 23468 - DNA, 713 bp, Macaca Mulatta
gatataggcactggggcagctgaggaacatgaataagtcaagagcgttggctttggtagcctcctggcaggagcagcaatttgccacaggtccggacctctccctccacacagccacactgcctcatgcagtctgacccacccagtgagggtgcatttgaaccctggttatattctccatctgtttttaagctctgctttgtgatagagcttgtgactgccaaaaatcttgtgcacagtgatatgactgttttaggatcttaagggtaggattttatgaaaggtgagatcctttggaattgagttctttctcattgggtatgaaaatggatgtatatttagaatatatgcctcacgaggcaggaccatgtagatagattccatttgtttccttgacctggtataataaaaactgataaaagccgtgcagtacccagcatcttggaggcaggtgatctggcttttctgttacctggcattttcatttcctatatatctgtagtgcactgataattgatattgttaatgagaactttaaggcacgacaagatctggaagagcttcctgaaccatcacagtcagattgcttatgttgagtagtgatttaacattgaacatttctgtactactctgactctttggaaactggacatttcagaatgatatagtgtggatgagctctttacaagtggcatatcatttttcctgactttg

SEQ ID NO: 23469 - DNA, 300 bp, Macaca Mulatta
gatcgatctggaatagaaaacgtcaactctgtggagcctttgcaggaaactctcattcgtgcactaaggaccttaataatgaaaaaccatccaaatgaggcctctatttttacaaaactgcttctaaagttgccagatcttcgatctttaaacaacatgcactctgaggagctcttggcctttaaagttcacccttaaggcctttgtttatttaaacatgaactgatggtaactgtacattttgtgctaaaatgcttatttatatgtgtataccatatgtggagatagaaaagaccttta

SEQ ID NO: 23470 - DNA, 1714 bp, Macaca Mulatta
  misc_feature (1)...(1714): n = A,T,C or G
ncagggcacagactccatcaagatggagaacgggcagagcacagccgccaagctggggctgcctcccctgacgcctgagcagcaggaggcccttcagaagnnnnnnnnnnnnnnnnnnnnnnnnnnnnnnnnnnnnnnnnnnnnnnnnnnnnnnnnnnnnnnnnnnnnnnnnnnnnnnnnnnnnnnnnnnnnnnnnnnnnnnnnnnnnnnnnnnnnnnnnnnnnnnnnnnnnnnnnnnnnnnnnnnnnnnnnnnnnnnnnnnnnnnnnnnnnnnnnnnnnnnnnnnnnnnnnnnnnnnnnnnnnnnnnnnnnnnnnnnnnnnnnnnnnnnnnnnnnnnnnnnnnnnnnnnnnnnnnnnnnnnnnnnnnnnnnnnnnnnnnnnnnnnnnnnnnnnnnnnnnnnnnnnnnnnnnnnnnnnnnnnnnnnnnnnnnnnnnnnnnnnnnnnnnnnnnnnnnnnnnnnnnnnnnnnnnnnnnnnnnnnnnnnnnnnnnnnnnnnnnnnnnnnnnnnnnnnnnnnnnnnnnnnnnnnnnnnnnnnnnnnnnnnnnnnnnnnnnnnnnnnnnnnnnnnnnnnnnnnnnnnnnnnnnnnnnnnnnnnnnnnnnnnnnnnnnnnnnnnnnnnnnnnnnnnnnnnnnnnnnnnnnnnnnnnnnnnnnnnnnnnnnnnnnnnnnnnnnnnnnnnnnnnnnnnnnnnnnnnnnnnnnnnnnnnnnnnnnnnnnnnnnnnnnnnnnnnnnnnnnnnnnnnnnnnnnnnnnnnnnnnnnnnnnnnnnnnnnnnnnnnnnnnnnnnnnnnnnnnnnnnnnnnnnnnnnnnnnnnnnnnnnnnnnnnnnnnnnnnnnnnnnnnnnnnnnnnnnnnnnnnnnnnnnnnnnnnnnnnnnnnnnnnnnnnnnnnnnnnnnnnnnnnnnnnnnnnnnnnnnnnnnnnnnnnnnnnnnnnnnnnnnnnnnnnnnnnnnnnnnnnnnnnnnnnnnnnnnnnnnnnnnnnnnnnnnnnnnnnnnnnnnnnnnnnnnnnnnnnnnnnnnnnnnnnnnnnnnnnnnnnnnnnnnnnnnnnnnnnnnnnnnnnnnnnnnnnnnnnnnnnnnnnnnnnnnnnnnnnnnnnnnnnnnnnnnnnnnnnnnnnnnnnnnnnnnnnnnnnnnnnnnnnnnnnnnnnnnnnnnnnnnnnnnnnnnnnnnnnnnnnnnnnnnnnnnnnnnnnnnnnnnnnnnnnnnnnnnnnnnnnnnnnnnnnnnnnnnnnnnnnnnnnnnnnnnnnnnnnnnnnnnnnnnnnagtccacagtgatggttctgcgcaacatggtggaccccaaggacatcgatgatgacctggaaggggaggtgacagaggagtgtggcaagttcggggccgtgaaccgcgtcatcatctaccaagagaaacaaggcgaggaggaagatgcggaaatcattgtcaagatctttgtggagttttccatagcctccgagactcataaggccatccaggccctcaatgggcgctggtttgctggccgcaaggtggtggctgaagtgtacgaccaggagcgttttgataacagtgacctctctgcgtgacattggcccctctccctggacttgcacttgttccttgtttcctctgggttttatagtgatacagtggtgtccccggggccaggcgcactgtgcccagcccggcctatagtgcggataaaggtgcggatgctgctggccctga

SEQ ID NO: 23471 - DNA, 2679 bp, Macaca Mulatta
  misc_feature (1)...(2679): n = A,T,C or G
cgccccaggccacgagcccgggggcagcccccaagacgagcttgacttctccatcctcttcgactatgagtatttgaatccgaacgaagnnnnnnnnnnnnnnnnnnnnnnnnnnnnnnnnnnnnnnnnnnnnnnnnnnnnnnnnnnnnnnnnnnnnnnnnnnnnnnnnnnnnnnnnnnnnnnnnnnnnnnnnnnnnnnnnnnnnnnnnnnnnnnnnnnnnnnnnnnnnnnnnnnnnnnnnnnnnnnnnnnnnnnnnnnnnnnnnnnnnnnnnnnnnnnnnnnnnnnnnnnnnnnnnnnnnnnnnnnnnnnnnnnnnnnnnnnnnnnnnnnnnnnnnnnnnnnnnnnnnnnnnnnnnnnnnnnnnnnnnnnnnnnnnnnnnnnnnnnnnnnnnnnnnnnnnnnnnnnnnnnnnnnnnnnnnnnnnnnnnnnnnnnnnnnnnnnnnnnnnnnnnnnnnnnnnnnnnnnnnnnnnnnnnnnnnnnnnnnnnnnnnnnnnnnnnnnnnnnnnnnnnnnnnnnnnnnnnnnnnnnnnnnnnnnnnnnnnnnnnnnnnnnnnnnnnnnnnnnnnnnnnnnnnnnnnnnnnnnnnnnnnnnnnnnnnnnnnnnnnnnnnnnnnnnnnnnnnnnnnnnnnnnnnnnnnnnnnnnnnnnnnnnnnnnnnnnnnnnnnnnnnnnnnnnnnnnnnnnnnnnnnnnnnnnnnnnnnnnnnnnnnnnnnnnnnnnnnnnnnnnnnnnnnnnnnnnnnnnnnnnnnnnnnnnnnnnnnnnnnnnnnnnnnnnnnnnnnnnnnnnnnnnnnnnnnnnnnnnnnnnnnnnnnnnnnnnnnnnnnnnnnnnnnnnnnnnnnnnnnnnnnnnnnnnnnnnnnnnnnnnnnnnnnnnnnnnnnnnnnnnnnnnnnnnnnnnnnnnnnnnnnnnnnnnnnnnnnnnnnnnnnnnnnnnnnnnnnnnnnnnnnnnnnnnnnnnnnnnnnnnnnnnnnnnnnnnnnnnnnnnnnnnnnnnnnnnnnnnnnnnnnnnnnnnnnnnnnnnnnnnnnnnnnnnnnnnnnnnnnnnnnnnnnnnnnnnnnnnnnnnnnnnnnnnnnnnnnnnnnnnnnnnnnnnnnnnnnnnnnnnnnnnnnnnnnnnnnnnnnnnnnnnnnnnnnnnnnnnnnnnnnnnnnnnnnnnnnnnnnnnnnnnnnnnnnnnnnnnnnnnnnnnnnnnnnnnnnnnnnnnnnnnnnnnnnnnnnnnnnnnnnnnnnnnnnnnnnnnnnnnnnnnnnnnnnnnnnnnnnnnnnnnnnnnnnnnnnnnnnnnnnnnnnnnnnnnnnnnnnnnnnnnnnnnnnnnnnnnnnnnnnnnnnnnnnnnnnnnnnnnnnnnnnnnnnnnnnnnnnnnnnnnnnnnnnnnnnnnnnnnnnnnnnnnnnnnnnnnnnnnnnnnnnnnnnnnnnnnnnnnnnnnnnnnnnnnnnnnnnnnnnnnnnnnnnnnnnnnnnnnnnnnnnnnnnnnnnnnnnnnnnnnnnnnnnnnnnnnnnnnnnnnnnnnnnnnnnnnnnnnnnnnnnnnnnnnnnnnnnnnnnnnnnnnnnnnnnnnnnnnnnnnnnnnnnnnnnnnnnnnnnnnnnnnnnnnnnnnnnnnnnnnnnnnnnnnnnnnnnnnnnnnnnnnnnnnnnnnnnnnnnnnnnnnnnnnnnnnnnnnnnnnnnnnnnnnnnnnnnnnnnnnnnnnnnnnnnnnnnnnnnnnnnnnnnnnnnnnnnnnnnnnnnnnnnnnnnnnnnnnnnnnnnnnnnnnnnnnnnnnnnnnnnnnnnnnnnnnnnnnnnnnnnnnnnnnnnngatgggcaacaaatctgggagatggaagccacggtggataaggacaagagccagcccnnnnnnnnnnnnnnnnnnnnnnnnnnnnnnnnnnnnnnnnnnnnnnnnnnnnnnnnnnnnnnnnnnnnnnnnnnnnnnnnnnnnnnnnnnnnnnnnnnnnnnnnnnnnnnnnnnnnnnnnnnnnnnnnnnnnnnnnnnnnnnnnnnnnnnnnnnnnnnnnnnnnnnnnnnnnnnnnnnnnnnnnnnnnnnnnnnnnnnnnnnnnnnnnnnnnnnnnnnnnnnnnnnnnnnnnnnnnnnnnnnnnnnnnnnnnnnnnnnnnnnnnnnnnnnnnnnnnnnnnnnnnnnnnnnnnnnnnnnnnnnnnnnnnnnnnnnnnnnnnnnnnnnnnnnnnnnnnnnnnnnnnnnnnnnnnnnnnnnnnnnnnnnnnnnnnnnnnnnnnnnnnnnnnnnnnnnnnnnnnnnnnnnnnnnnnnnnnnnnnnnnnnnnnnnnnnnnnnnnnnnnnnnnnnnnnnnnnnnnnnnnnnnnnnnnnnnnnnnnnnnnnnnnnnnnnnnnnnnncgaccaatcagcaggcctcgcctgtgatccactactcacccaccaatcagcagctgcgctgcggaagccaccaggagttccagcacatcatgtactgcgagaatttcgcaccaggcaccaccaggcctggcccgcccccggtcagtcaaggtcagaggctgagcccgggttcctaccccacagtcattcagcagcagaatgccacgagccaaagagccgccaaaaacggacccccggtcagtgaccaaaaggaagtattacctgcgggggtgaccattaaacaggagcagaacttggaccagacctacttggatgat

SEQ ID NO: 23472 - DNA, 4026 bp, Macaca Mulatta
  misc_feature (1)...(4026): n = A,T,C or G
atgagcttggggctggcgggggcacaggacatcgagctgacactagagacggttatccannnnnnnnnnnnnnnnnnnnnnnnnnnnnnnnnnnnnnnnnnnnnnnnnnnnnnnnnnnnnnnnnnnnnnnnnnnnnnnnnnnnnnnnnnnnnnnnnnnnnnnnnnnnnnnnnnnnnnnnnnnnnnnnnnnnnnnnnnnnnnnnnnnnnnnnnnnnnnnnnnnnnnnnnnnnnnnnnnnnnnnnnnnnnnnnnnnnnnnnnnnnnnnnnnnnnnnnnnnnnnnnnnnnnnnnnnnnnnnnnnnnnnnnnnnnnnnnnnnnnnnnnnnnnnnnnnnnnnnnnnnnnnnnnnnnnnnnnnnnnnnnnnnnnnnnnnnnnnnnnnnnnnnnnnnnnnnnnnnnnnnnnnnnnnnnnnnnnnnnnnnnnnnnnnnnnnnnnnnnnnnnnnnnnnnnnnnnnnnnnnnnnnnnnnnnnnnnnnnnnnnnnnnnnnnnnnnnnnnnnnnnnnnnnnnnnnnnnnnnnnnnnnnnnnnnnnnnnnnnnnnnnnnnnnnnnnnnnnnnnnnnnnnnnnnnnnnnnnnnnnnnnnnnnnnnnnnnnnnnnnnnnnnnnnnnnnnnnnnnnnnnnnnnnnnnnnnnnnnnnnnnnnnnnnnnnnnnnnnnnnnnnnnnnnnnnnnnnnnnnnnnnnnnnnnnnnnnnnnnnnnnnnnnnnnnnnnnnnnnnnnnnnnnnnnnnnnnnnnnnnnnnnnnnnnnnnnnnnnnnnnnnnnnnnnnnnnnnnnnnnnnnnnnnnnnnnnnnnnnnnnnnnnnnnnnnnnnnnnnnnnnnnnnnnnnnnnnnnnnnnnnnnnnnnnnnnnnnnnnnnnnnnnnnnnnnnnnnnnnnnnnnnnnnnnnnnnnnnnnnnnnnnnnnnnnnnnnnnnnnnnnnnnnnnnnnnnnnnnnnnnnnnnnnnnnnnnnnnnnnnnnnnnnnnnnnnnnnnnnnnnnnnnnnnnnnnnnnnnnnnnnnnnnnnnnnnnnnnnnnnnnnnnnnnnnnnnnnnnnnnnnnnnnnnnnnnnnnnnnnnnnnnnnnnnnnnnnnnnnnnnnnnnnnnnnnnnnnnnnnnnnnnnnnnnnnnnnnnnnnnnnnnnnnnnnnnnnnnnnnnnnnnnnnnnnnnnnnnnnnnnnnnnnnnnnnnnnnnnnnnnnnnnnnnccagagtgacagagctgggcctggcagtggagcgtcttcagaagcagaatctggagaaggatcaggtcaacaaggacctcaccgagaagcttgaggccctgnnnnnnnnnnnnnnnnnnnnnnnnnnnnnnnnnnnnnnnnnnnnnnnnnnnnnnnnnnnnnnnnnnnnnnnnnnnnnnnnnnnnnnnnnnnnnnnnnnnnnnnnnnnnnnnnnnnnnnnnnnnnnnnnnnnnnnnnnnnnnnnnnnnnnnnnnnnnnnnnnnnnnnnnnnnnnnnnnnnnnnnnnnnnnnnnnnnnnnnnnnnnnnnnnnnnnnnnnnnnnnnnnnnnnnnnnnnnnnnnnnnnnnnnnnnnnnnnnnnnnnnnnnnnnnnnnnnnnnnnnnnnnnnnnnnnnnnnnnnnnnnnnnnnnnnnnnnnnnnnnnnnnnnnnnnnnnnnnnnnnnnnnnnnnnnnnnnnnnnnnnnnnnnnnnnnnnnnnnnnnnnnnnnnnnnnnnnnnnnnnnnnnnnnnnnnnnnnnnnnnnnnnnnnnnnnnnnnnnnnnnnnnnnnnnnnnnnnnnnnnnnnnnnnnnnnnnnnnnnnnnnnnnnnnnnnnnnnnnnnnnnnnnnnnnnnnnnagggagaagagcaacctggcccacagcctgcaggtggcccagcagcaggccgaggagctgcggcaggagcgggagaagctgcaggctgcccaggaggagctgagacgccagtgggaccggctggaggaagagcaggaggacnnnnnnnnnnnnnnnnncgggtgcgccgggagcttgagcgcannnnnnnnnnnnnnnnnnnnnnnnnnnnnnnnnnnnnnnnnnnnnnnnnnnnnnnnnnnnnnnnnnnnnnnnnnnnnnnnnnnnnnnnnnnnnnnnnnnnnnnnnnnnnnnnnnnnnnnnnnnnnnnnnnnnnnnnnnnnnnnnaggctgaggctggccgcgtggagctcgagctctccatgaccaagctgagggcagaggaggcctccctgcaggactccctgtccaagctgagcgccctcaacgagagccttgctcaggacaagctggatctgaaccgccttgttgcccannnnnnnnnnnnnnnnnnnnnnnnnnnnnnnnnnnnnnnnnnnnnnnnnnnnnnnnnnnnnnnnnnnnnnnnnnnnnnnnnnnnnnnnnnnnnnnnnnnnnnnnnnnnnnnnnnnnnnnnnnnnnnnnnnnnnnnnnnnnnnnnnnnnnnnnnnnnnnnnnnnnnnnnnnnnnnnnnnnnnnnnnnnnnnnnnnnnnnnnnnnnnnnnnnnnnnnnnnnnnnnnnnnnnnnnnnnnnnnnnnnnnnnnnnnnnnnnnnnnnnnnnnnnnnnnnnnnnnnnnnnnnnnnnnnnnnnnnnnnnnnnnnnnnnnnnnnnnnnnnnnnnnnnnnnnnnnnnnnnnnnnnnnnnnnnnnnnnnnnnnnnnnnnnnnnnnnnnnnnnnnnnnnnnnnnnnnnnnnnnnnnnnnnnnnnnnnnnnnnnnnnnnnnnnnnnnnnnnnnnnnnnnnnnnnnnnnnnnnnnnnnnnnnnnnnnnnnnnnnnnnnnnnnnnnnnnnnnnnnnnnnnnnnnnnnnnnnnnnnnnnnnnnnnnnnnnnnnnnnnnnnnnnnnnnngggagttggcgggcctgcggcagcaaataatagctatacaggagaaagccagtctagacaaggagctgatggcccagaagctggtacaggctgagcgggaggcccaggcctctctgcgggagcagcgggcagcccacgaggaggacttgcagcgactnnnnnnnnnnnnnnnnnnnnnnnnnnnnnnnnnnnnnnnnnnnnnnnnnnnnnnnnnnnnnnnnnnnnnnnnnnnnnnnnnnnnnnnnnnnnnnnnnnnnnnnnnnnnnnnnnnnnnnnnnnnnnnnnnnnnnnnnnnnnnnnnnnnnnnnnnnnnnnnnnnnnnnnnnnnnnnnnnnnnnnnnnnnnnnnnnnnnnnnnnnnnnnnnnnnnnnnnnnnnnnnnnnnnnnnnnnnnnnnnnnnnnnnnnnnnnnnnnnnnnnnnnnnnnnnnnnnnnnnnnnnnnnnnnnnnnnnnnnnnnnnnnnnnnnnnnnnnnnnnnnnnnnnnnnnnnnnnnnnnnnnnnnnnnnnnnnnnnnnnnnnnnnnnnnnnnnnnnnnnnnnnnnnnnnnnnnnnnnnnnnnnnnnnnnnnnnnnnnnnnnnnnnnnnnnnnnnnnnnnnnnnnnnnnnnnnnnnnnnnnnnnnnnnnnnnnnnnnnnnnnnnnnnnnnnnnnnnnnnnnnnnnnnnnnnnnnnnnnnnnnnnnnnnnnnnnnnnnnnnnnnnnnnnnnnnnnagctgcatgagagccaggagggcgggaggtgcagcgccaggagtcaggcaagctgcagggcagtctgggcgacggcgccaaggagagcgaggccctgtggagctccaaggagaaacttccggccgctgtgaaaaaggcagannnnnnnnnnncagcctgaagcttgccagtgaggacaaggagcagaagctggcactcctagaggaggcatggacagccatgggcaaggaggccagggagctgcgaactgggctgcaggagctggagcgctcatggctggaggctcggcagcagctgcaggagctcnnnnnnnagatgaagatgctggacagtgagaacactagactgggccgggagctggcggagctgcagggccgcctggcactgggcgagcgggcagagaaggagagccggcgggagaccctgggcctccggcagaggctgctgaagggcgaggccagcctggaggtgatgcggcaggag

SEQ ID NO: 23473 - DNA, 2862 bp, Macaca Mulatta
  misc_feature (1)...(2862): n = A,T,C or G
agaaacgctccagaggacaagtgctgtttgataaagtgtgtgaacacttgaacttgctagagaaagactactttgggcttacgtatcgagatgctgaaaaccagaannnnnnnnnnnnnnnnnnnnnnnnnnnnnnnnnnnnnnnnnnntggtgcttggcacttttcatttaatgtgaaattttacccaccagaccctgcccagctatcnnnnnnnnnnnnnnnnnnnnnnnnnnnnnnnnnnnnnnnnnnnnnnnnnnnnnnnnnnnnnnnnnnnnnnnnnnnnnnnnnnnnnnnnnnnnnnnnnnnnnnnnnnnnnnnnnnnnnnnnnnnnnnnnnnnnnnnnnnnnnnnnnnnnnnnnnnnnnnnnnnnnnnnnnnnnnnnnnnnnnnnnnnnnnnnnnnnnnnnnnnnnnnnnnnnnnnnnnnnnnnnnnnnnnnnnnnnnnnnnnnnnnnnnnnnnnnnnnnnnnnnnnnnnnnnnnnnnnnnnnnnnnnnnnnnnnnnnnnnnnnnnnnnnnnnnnnnnnnnnnnnnnnnnnnnnnnnnnnnnnnnnnnnnnnnnnnnnnnnnnnnnnnnnnnnnnnnnnnnnnnnnnnnnnnnnnnnnnnnnnnnnnnnnnnnnnnnnnnnnnnnnnnnnnnnnnnnnnnnnnnnnnnnnnnnnnnnnnnnnnnnnnnnnnnnnnnnnnnnnnnnnnnnnnnnnnnnnnnnnnnnnnnnnnnnnnnnnnnnnnnnnnnnnnnnnnnnnnnnnnnnnnnnnnnnnnnnnnnnnnnnnnnnnnnnnnnnnnnnnnnnnnnnnnnnnnnnnnnnnnnnnnnnnnnnnnnnnnnnnnnnnnnnnnnnnnnnnnnnnnnnnnnnnnnnnnnnnnnnnnnnnnnnnnnnnnnnnnnnnnnnnnnnnnnnnnnnnnnnnnnnnnnnnnnnnnnnnnnnnnnnnnnnnnnnnnnnnnnnnnnnnnnnnnnnnnnnnnnnnnnnnnnnnnnnnnnnnnnnnnnnnnnnnnnnnnnnnnnnnnnnnnnnnnnnnnnnnnnnnnnnnnnnnnnnnnnnnnnnnnnnnnnnnnnnnnnnnnnnnnnnnnnnnnnnnnnnnnnnnnnnnnnnnnnnnnnnnnnnnnnnnnnnnnnnnnnnnnnnnnnnnnnnnnnnnnnnnnnnnnnnnnnnnnnnnnnnnnnnnnnnnnnnnnnnnnnnnnnnnnnnnnnnnnnnnnnnnnnnnnnnnnnnnnnnnnnnnnnnnnnnnnnnnnnnnnnnnnnnnnnnnnnnnnnnnnnnnnnnnnnnnnnnnnnnnnnnnnnnnnnnnnnnnnnnnnnnnnnnnnnnnnnnnnnnnnnnnnnnnnnnnnnnnnnnnnnnnnnnnnnnnnnnnnnnnnnnnnnnnnnnnnnnnnnnnnnnnnnnnnnnnnnnnnnnnnnnnnnnnnnnnnnnnnnnnnnnnnnnnnnnnnnnnnnnnnnnnnnnnnnnnnnnnnnnnnnnnnnnnnnnnnnnnnnnnnnnnnnnnnnnnnnnnnnnnnnnnnnnnnnnnnnnnnnnnnnnnnnnnnnnnnnnnnnnnnnnnnnnnnnnnnnnnnnnnnnnnnnnnnnnnnnnnnnnnnnnnnnnnnnnnnnnnnnnnnnnnnnnnnnnnnnnnnnnnnnnnnnnnnnnnnnnnnnnnnnnnnnnnnnnnnnnnnnnnnnnnnnnnnnnnnnnnnnnnnnnnnnnnnnnnnnnnnnnnnnnnnnnnnnnnnnnnnnnnnnnnnnnnnnnnnnnnnnnnnnnnnnnnnnnnnnnnnnnnnnnnnnnnnnnnnnnnnnnnnnnnnnnnnnnnnnnnnnnnnnnnnnnnnnnnnnnnnnnnnnnnnnnnnnnnnnnnnnnnnnnnnnnnnnnnnnnnnnnnnnnnnnnnnnnnnnnnnnnnnnnnnnnnnnnnnnnnnnnnnnnnnnnnnnnnnnnnnnnnnnnnnnnnnnnnnnnnnnnnnnnnnnnnnnnnnnnnnnnnnnnnnnnnnnnnnnnnnnnnnnnnnnnnnnnnnnnnnnnnnnnnnnnnnnnnnnnnnnnnnnnnnnnnnnnnnnnnnnnnnnnnnnnnnnnnnnnnnnnnnnnnnnnnnnnnnnnnnnnnnnnnnnnnnnnnnnnnnnnnnnnggcgctggctcaggcaattaaagaggccaaagagcagcaccctgacatgtcagtgaccaaagtagtggtccataaagagacagagatcacaccagaagatggagaggattgaccagaggnaggaataacttagcttgcacatgaatgcagtcatgcaaaccgttaggaaaaccagagcctatatggaattccctcttctaacccaactgacttgtatctgtccatggaaaatttcagtccagaagaattgnnnnnnnnnnnnnnnnnnnnnnnnnnnnnnnnnnnnnnnnnnnnnnnnnnnnnnnnnattccgcatcactaaactgataatgcatgaagcaacgacaaaattacaaaagagcagcatttttaattttcacaaaatgtctcagttttcagctatacctgcacgttcataaccaacaatataaaccgtgatctcatgtaacacatacacaattcatgcctttcatagtttattattattaaagtctaaacaaaattgcaatttcttaggtaacaaaccttttgtttacaattagcgaagattaccctcaaatgctagaagctgtctaggtccgtccggtgtgtcagattttccccaggttagatgtgccagtaaccaagtttattcagtaaacaacttgtacttgtttcatctggttttattactctcacccataaacattaatgactctctgaccctctggaaataattaacgcttccgatcttgctttgtgtatctcatttaatgtgt

SEQ ID NO: 23474 - DNA, 821 bp, Macaca Mulatta
tgagagcaaacacgatgaagctgaggatgccagcagtggacgattggaaatagacaccagtgcccagaataagcataaccctttgctcatagtgttttctgatgaccaaagcagtgacaaggagaggaaggaggaactaaatgaaatgatttcccatgagcaacttccagagctagacaacttgggcctggatggcttttccggtggacctggggaagaggctttgttgcagatgagatcaaacatcatctacgactccactgcccgaatcagaaggaacgccaaaggaaactactgtaagaggaccccgctctacatcgacttcaaggagattgggtgggactcctggatcatcgctccgcctggatacgaagcctatgaatgtcgtggtgtttgtaactatcccctggcagaacatctcacacccacaaagcatgcaattatccaggccttggtccacctcaagaattcccagaaagcttccaaagcctgctgtgtgcccacaaagctagagcccatctccatcctctatttagacaaaggcgtcgtcacctacaagtttaaatacgaaggcatggccgtctccgaatgtggctgtagatagaagaatagtcctgtggcttatttaataactgtaaatgtgtatatttggtgttcctatttaatgagattatttaataagggtgtacagtaatagaggcttgctgccttcaggaaatggacaggtcggtttgttgtaggaaatgcatattttcctctccagttaagtccctttcaatgtgttttctctttggacttgccatttcctggcaatgccacct

SEQ ID NO: 23475 - DNA, 392 bp, Macaca Mulatta
tcagcagtgaagatattggatcacaggttattgatgtttgcaaaattggacaataaccacgttatttttatcctcaacttcttatggtcacaggatatttatgcgaataaaatcttaaaatgggtagctctagtaattcctatccatactgagatgctgaaagaatccatctcctcctctaaattaaacagcatttaaataaattgagatcattataaaccacgtgaagacactgatgacaccgtttttatactcattggaaaaagtacagagcaaggtgcaatgacaaagtaaactttaaaaaaaaattataaagcttaaagcaattaaaaagttatggagagtctgactgtagataatactttaaagatataaacttgacttgtctaacc

SEQ ID NO: 23476 - DNA, 1605 bp, Macaca Mulatta
  misc_feature (1)...(1605): n = A,T,C or G
atgaatgtgggaaatccttcagtgaaaagtcaacccttactcaacatcagagaacacacacaggggagaaaccatatgaatgtcatgaatgtgggaaaaccttttcctttaagtcagtccttactgtgcatcagaaaacacacacaggggagaagccctatgaatgctatgcatgtgggaaagcgtttctcagaaaatcagacctcattaaacatcaaagaattcacacaggcgaaaaaccttatgaatgtaataaatgtgggaaatccttcagtgaaaagtcaacccttactcaacatcagagaacacacacaggggagaaaccatatgaatgtcatgaatgtgggaaaacctttnnnnnnnnnnnnnnnnnnnnnnnnnnnnnnnnnnnnnnnnnnnnnnnnnnnnnnnnnnnnnnnnnnnnnnnnnnnnnnnnnnnnnnnnnnnnnnnnnnnnnnnnnnnnnnnnnnnnnnnnnnnnnnnnnnnnnnnnnnnnnnnnnnnnnnnnaattcatacaggggagagaccttatagatgtcatgaatgtgggaaatccttcagtgaaaagtcaacccttactcaacatcagagaacacacacaggggagaaaccatatgaatgtcatgaatgtgggaaanagaacacacacagggggaaaacactatgaatgtcacgaatgtgggaaatccttcagtgaaaagtcaacccttactcaacatcagagaacacacacaggggagaaaccatatgaatgtcatgaatgtgggaaatccttcagtgaaaagtcaacccttactcaacatcagagaacacacacaggggagaaaccatatgaatgtcatgaatgtgggaaaaccttnnnnnnnnnnnnnnnnnnnnnnnnnnnnnnnnnnnnnnnnnnnnnnnnnnnnnnnnnnnnnnnnnnnnnnnnnnnnnnnnnnnnnnnnnnnnnnnnnnnnnnnnnnnnnnnnnnnnnnnnnnnnnnnnnnnnnnnnnnnnnnnnnnnnnnnnnnnnnnnnnnnnnnnnnntccttcatttacaacagagaacacatacaggagaaaaaccttatgaatgtcatgaatgtggaaaaaccttcacccagaagtcagcccatacaagacatcagagaacacacacagggggaaaacactatgaatgtcacgaatgtgggaagaccttttataagaattcagacctcattaaacatcaaagaattcatacaggggagagaccttatagatgtcatgaatgtgggaaatccttcagtgaaaagtcaacccttactcaacatcagagaacacacacaggggagaaaccatatgaatgtcatgaatgtgggaaaaccttttcctttaagtcagtccttactgtgcatcagaaaacacacacaggggagaagccctatgaatgctatgcatgtgggaaagcgtttctcagaaaatcagacctcattaaacatcaaagaattcacacaggcgaaaaaccttatgaatgtaataaatgtgggaaatcattctctgagaagtcaacccttactaaacatctaagaactcacacaggtgagaaaccttatgaatgtattcagtgtggaaaatttttc

SEQ ID NO: 23477 - DNA, 933 bp, Macaca Mulatta
  misc_feature (1)...(933): n = A,T,C or G
aacccgttgggcggtagaggcggccgggtcactttaaggccccgccgtgcctgcgccttgggctctcctgatgcggccgaactggaccctgaggagacagcgggctgcagggtaggggctgggtggcggttgagacagcggcggtactgggaggggaaggtgagggtggcgaggctgtctgagtttctgagtgagcgcggtgcttttgggaacgcgggaccgcgacttgcggcgcnnnnnnnnnnnnnnnnnnnnnnnnnnnnnnnnnnnnnnnnnnnnnnnnnnnnnnnnnnnngcgaagtccacccggcgtttcggaggtgagggccccgcgccaggcnnnnnnnnnggcaatctgaaggcaaatcctgtttagacccaggcgaaggttcctggtgacccaggctctcaccagccgattgtcccttcctgtcctcctgagggtgtctggagcttcagtgttgtgtgctctcgacctccacgctggggtgccaccgactcccactgtccagggcttccggtggactctgcgaggcactgatgcagaaacttccccattcggtgcaccaagagcagcctcacacggtgtgggccgacatgaagagctgccagatctaacannnnnnnnnnnnnnnnnnnnnnnnnnnnnnnnnnnnnnnnnnnnnnnnnnnnnnnnnnnnnnnnnnnnnnnnnnnnnnnnnnnnnnnnnnnnnnnnnnnnnnnnnnnnnnnnnnnnnnnnnnnnnnnnnnnnnnnnnnnnnnnnnnnnnnnnnnnnnnnnnnnnnnnnnnnnnnnnnnnnnnnnnnnnnnnnnnnnnnnnnnnnnnnnnnnnatgaagagtgcaaagacctcctaaaatctatgctgcgggatgagcttcagttgaaggaggagaagcttgcagagcagctcgggcaagctgaggagctcagg

SEQ ID NO: 23478 - DNA, 815 bp, Macaca Mulatta
  misc_feature (1)...(815): n = A,T,C or G
ttcaagatcttcacgtaaaactttcctctgaatccaaaagggcagacacactagcgtttgaaatgaaacggctgaaagaaaaacacgaagctttacttaaggagaaagagnnnnnnnnnnnnnnnnnnnnnnnnnnnnnnnnnnnnnnnnnnnnnnnnnnnnnnnnnnnnnnnnnnnnnnnnnnnnnnnnnnnnnnnnnnnnnnnnnnnnnnnnnnnnnnnnnnnnnnnnnnnnnnnnnnnnnnnnnnnnnnnnnnnnnnnnnnnnnnnnnnnnnnnnnnnnnnnnnnnnnnnnnnnnnnnnnnnnnnnnnnnnnnnnnnnnnnnnnnnnnnnnnnnnnnnnnnnnnnnnnnnnnnnnnnnnnnnnnnnnnnnnnnnnnnnnnnnnnnnnnnnnnnnnnnnnnnnnnnnnnnnnnnnnnnnnnnnnnnnnnnnnnnnnnnnnnnnnnnnnnnnnnnnnnnnnnnnnnnnnnnnnnnnnnnnnnnnnnnnnnnnnnnnnnnnnnnnnnnnnnnnnnnnnnnnnnnnnnnnnnnnnnnnnnnnnnnnnnnnnnnnnnnnnnnnnnnnnnnnnnnnnnnnnnnnnnnnnnnnnnnnnnnnnnnnnnnnnnnnnngtacaaaagatcaatgaacttgaaactgctcttcagaagaaagatgaagatatgaaagcaatggaggaaagatataaaatgtacttggagaaagccagaaatgtnataaaaactttagatcccaagttaaatccagcatcagctgaaataatgctactaagaaagcagttggcagagaaagagagaagaattgagattctggag

SEQ ID NO: 23479 - DNA, 1600 bp, Macaca Mulatta
  misc_feature (1)...(1600): n = A,T,C or G
ggggcactggtctgcattctaagggaagaaagctttgaacgaaaaggtttaatagactacaacttccactgtttccgaaaagctattcatgaggtttttgaggtgggtgtgacttctcacaggagctgtggtcaccagactagtgcctccagtctgaaagcgctgacacacaatggcacaccacgaaacgccatctagtctgaatcccagcgtcggggctctgtgccagcttactcttcactccagggtcggatgccacgtgctacaggacatgagagccgccgcttgtgggaatctggtgcctgttccactagagacaaggggtagagtttctcatttggatgaaaaccccttcagctggtggtgtacaactgaagctactatttcttttttgaaaatnnnnnnnnnnnnnnnnnnnnnnnnntctggagaccacagaactcaagtgtgtatttctcctcttttgggtccactttacgtagttgggatattttggacctggagttatatgacaccagttacccatccttaccagggaatgttgccatcaattccagttgaaaataatagaaaagactgaatttttatatgcttcacttaggctttcatttgagtagactctaaaaatcctgccttgcttaagttctaacactgccctctcagatttcagttttggacattgcacaactaagaccttttaaatgcatttgcttgctaactcagaagacacatagtctgcagcaagacattcctgtattgaagaaatgagagaaaattttatgctgcatcaggtggagagcaaggctcaacagtggttgcattagttccctcggaagtgttgaaaaaacttcgaaatggaagaaaatttttgcacctatgttctgggtaccggatatctgggttctttcttctgcattagataaatgatcatgctcagtgtaacaaagggaattaaaagttttttccacagtcccctttctaggggagaaaactcattatgtccactgaaatgtttagacttactttaatcctgaaaacagccttttacaagacacctttatttcttaaactattcgaggcctccttcattgcatttttggttggaccccaaagtgaaccccccaaaggactgggggggagatggtccccccagggcaatttgggaagtggagccaccacggttggcctgccaaaccaggcaaatggtgttttaaataaatatttggtccgcccggtaagttctttgacaacccacagaggacaccccggggggggacagttttcttttgtcgcgccgcggagaataaaacccaataacacgggattgcctctttgataagaagggggtgggaaaaccccctttccacactcggaatgtgaaaagctcacacaacaaaatagaatttttaatttgcacgaccggcgcgccgccaaggttaaataatctttttttagaaaacagacaccgggttcccgacgctggagggtaacatctntgatgacgcacatgggttcataatggaagacactcttaaagttttaccgcgggcatgtgtgagaccgcacatagaacatagtgtgaacggtgaggataaagcac

SEQ ID NO: 23480 - DNA, 844 bp, Macaca Mulatta
  misc_feature (1)...(844): n = A,T,C or G
ggatccttctgggcccctggggtgtggacctgagctggctgtttcctgctctgcctgcacattgttctcccttcctcccaactcctcagggcctccagtatctgtgcctggccactggcagcactagcagtggtattagcttatgccaaatacagctttgaaaggatctttgtttctttaactagatggtcaccttcttccgtaccacacatgggtgggaaggtggacaggctaacctctccagctgtgagtctcttagactactgcatgtagcaaatgttcagcagctcaggcccccatgtccagttctgtccccactcttctcaaccctgtcctgaaaattctactgctctgatggctggggccagtctcttgtcactttggaagctggggacacttggattctacccaagcctccaagtagtggcatatcagttttggagctcctacctggtgatacacacagggctttggacgacctgggacacctgggtcaattttctttggcccagtgcgtgggcctgctacccccctggactacaactggaatctgggactcctctggcctttgcaccgactcctggcctaggccgccggggtctttacccttgcgatgaccttcgcgcctaggcccaaccctaccctaccgcacttcccatccgctctgtccctgggcgtgcccgtcccggtcccctccgagtagaagctcctttctctgtcagcccgcccccgttttttgtcggagtgccccccgttccctccagcttcggggtcccagttcntccacccccccgtgccccccatgataggcctcagccccatccaccccctaatcgcccgtgca

SEQ ID NO: 23481 - DNA, 104 bp, Macaca Mulatta
aggaagacctccgcgtggatggccgtggctgtgaggactaccgatgtgttgaagtggaaaccgatgtggtgtccaacaccagtgggtccgccagggtcaagctg

SEQ ID NO: 23482 - DNA, 1976 bp, Macaca Mulatta
  misc_feature (1)...(1976): n = A,T,C or G
gcctctccatggctcctgcatctgagacagctggcctgccctccaaatcatccatccacccctgccgtcatctgttttcacggcgtgagatcaacccacaggaatatccatggctttcgtgctcattttggttctcagtttctacaagctggtgtcaggnnnnnnnnnnnnnnnnnnnnnnnnnaagtttgtccagccctcggtgggggaggacgcagtgttctcctgctccctctttcctgagaccaaagcagaggccatggaagtgcgtttcttcaggaatcagctccatgctgtggtccacctctacagagatggggaagactgggaatttatgcagatgccacagtatcaagggagaactgagcttctgaaggtctccattgcaagggggcatgtctctctaagactaaaaaacatcactcccttggacatgggcctgtatgggtgcaggttcagttcccagatttacgacaaggaggccacctgggagctgcaggtnnnnnnnnnnnnnnnnnnnnnnnnnnnnnnnnnnnnnnnnnnnnnnnnnnnnnnnnnnnnnnnnnnnnnnnnnnnnnnnnnnnnnnnnnnnnnnnnnnnnnnnnnnnnnnnnnnnnnnnnnnnnnnnnnnnnnnnnnnnnnnnnnnnnnnnnnnnnnnnnnnnnnnnnnnnnnnnnnnnnnnnnnnnnnnnnnnnnnnnnnnnnnnnnnnnnnnnnnnnnnnnnnnnnnnnnnnnnnnnnnnnnnnnnnnnnnnnnnnnnnnnnnnnnnnnnnnnnnnnnnnnnnnnnnnnnnnnnnnnnnnnnnnnnnnnnnnnnnnnnnnnnnnnnnnnnnnnnnnnnnnnnnnnnnnnnnnnnnnnnnnnnnnnnnnnnnnnnnnnnnnnnnnnnnnnnnnnnnnnnnnnnnnnnnnnnnnnnnnnnnagaattgagagaggcccggaaacacgcncagtggaggtgactctggacccggagacggctcacccacagctctgcgtttctgatctgaaaactgtaacccatagaaaaggtccccagaaggtgccttactctacgaagagattcacaaggaagagtgtggtggcgtctcagggtttccaggcagggaaacattactgggaggtggacgtgggacaacatgtanggtggtgtgtgggagtgtgccaggatgacacagacaggaggaaggactctgtgactttgtctcccaacaatgggtactgggtcttcggactgacgacagaatatttgtatttcacattcaatccccattttatcaacctctccctcgagacccctcctacacgagtaggggtcttcctggactatgannnnnnnnnnnnnnnnnnnnnnnnnnnnnnnnnnnnnnnnnnnnnnnnnnnnnnnnnnnnnnnnnnnnnnnnnnnnnnnnnnnnnnnnnnnnnnnnnnnnnnnnnnnnnnnnnnnnnnnnnnnnnnnnnnnnnnnnnnnnnnnnnnnnnnnnnnnnnnnnnnnnnnnnnnnnnnnnnnnnnnnnnnnnnacaccgcagacccagacacagccaagggagagtgcgccccacaggcggccccagcttcctctccgaagcctgtgcacaggaagtcacgcctcccactctcctttagggtgctgaggttcttctctcctaagcccggcagcagcagcagcttccagatgagggaggattggcctgtccctgtgggagtcagaagccatggctgccctgaagtggggatggaatagactcacataagatttactttgtgaaaactccatccagctaagtgatcttgaacaagtcacaacctcccaggctcctcacttgttagtcaggaatagtgattcccacctcgcaggtaaagattaaagagatgatgaatgtgaatcctgcttgcaggtttgatggcacagtgttttctaatgatgtgtttttatattatacattttcccaccataaactctgtttgcttattc

SEQ ID NO: 23483 - DNA, 2426 bp, Macaca Mulatta
  misc_feature (1)...(2426): n = A,T,C or G
tgtctctgtggggtctggtctccaagatgcccccagaaaaagtgcagcggctctatgtcgactttccccaacacctgcggcatcttctgggtgactggctggagagccagccctggnnnnnnnnnnnnnnnnnnnnnnnnnnnnnnnnnnnnnnnnnnnnnnnnnnnnnnnnnnnnnnnnnnnnnnnnnnnnnnnnnnnnnnnnnnnnnnnnnnnnnnnnnnnnnnnnnnnnnnnnnnnnnnnnnnnnnnnnnnnnnnnnnnnnnnnnnnnnnnnnnnnnnnnnnnnnnnnnnnnnnnnnnnnnnnnnnnnnnnnnnnnnnnnnnnnnnnnnnnnnnnnnnnnnnnnnnnnnnnnnnnnnnnnnnnnnnnnnnnnnnnnnnnnnnnnnnnnnnnnnnnnnnnnnnnnnnnnnnnnnnnnnnnnnnnnnnnnnnnnnnnnnnnnnnnnnnnnnnnnnnnnnnnnnnnnnnnnnnnnnnnnnnnnnnnnnnnnnnnnnnnnnnnnnnnnnnnnnnnnnnnnnnnnnnnnnnnnnnnnnnnnnnnnnnnnnnnnnnnnnnnnnnnnnnnnnnnnnnnnnnnnnnnnnnnnnnnnnnnnnnnnnnnnnnnnnnnnnnnnnnnnnnnnnnnnnnnnnnnnnnnnnnnnnnnnnnnnnnnnnnnnnnnnnnnnnnnnnnnnnnnnnnnnnnnnnnnnnnnnnnnnnnnnnnnnnnnnnnnnnnnnnnnnnnnnnnnnnnnnnnnnnnnnnnnnnnnnnnnnnnnnnnnnnnnnnnnnnnnnnnnnnnnnnnnnnnnnnnnnnnnnnnnnnnnnnnnnnnnnnnnnnnnnnnnnnnnnnnnnnnnnnnnnnnnnnnnnnnnnnnnnnnnnnnnnnnnnnnnnnnnnnnnnnnnnnnnnnnnnnnnnnnnnnnnnnnnnnnnnnnnnnnnnnnnnnnnnnnnnnnnnnnnnnnnnnnnnnnnnnnnnnnnnnnnnnnnnnnnnnnnnnnnnnnnnnnnnnnnnnnnnnnnnnnnnnnnnnnnnnnnnnnnnnnnnnnnnnnnnnnnnnnnnnnnnnnnnnnnnnnnnnnnnnnnnnnnnnnnnnnnnnnnnnnnnnnnnnnnnnnnnnnnnnnnnnnnnnnnnnnnnnnnnnnnnnnnnnnnnnnnnnnnnnnnnnnnnnnnnnnnnnnnnnnnnnnnnnnnnnnnnnnnnnnnnnnnnnnnnnnnnnnnnnnnnnnnnnnnnnnnnnnnnnnnnnnnnnnnnnnnnnnnnnnnnnnnnnnnnnnnnnnnnnnnnnnnnnnnnnnnnnnnnnnnnnnnnnnnnnnnnnnnnnnnnnnnnnnnnnnnnnnnnnnnnnnnnnnnnnnnnnnnnnnnnnnnnnnnnnnnnnnnnnnnnnnnnnnnnnnnnnnnnnnnnnnnnnnnnnnnnnnnnnnnnnnnnnnnnnnnnnnnnnnnnnnnnnnnnnnnnnnnnnnnnnnnnnnnnnnnnnnnnnnnnnnnnnnnnnnnnnnnnnnnnnnnnnnnnnnnnnnnnnnnnnnnnnnnnnnnnnnnnnnnnnnnnnnnnnnnnnnnnnnnnnnnnnnnnnnnnnnnnnnnnnnnnnnnnnnnnnnnnnnnnnnnnnnnnnnnnnnnnnnnggctgattatcggcttcatcagcaaacagtacgttactagccttcttctgaacgagcccgacggaacctttctcctccgcttcagcgactcagagattgggggcatcaccattgcccacgtcatccggggccaggatgnnnnnnnnnnnnnnnnnnnnnnnnnnnnnnnnnnnnnnnnnnnnnnnnnnnnnnnnnnnnnnnnnnnnnnnnnnnnnnnnnnnnnnnnnnnnnnnnnnnnnnnnnnnnnnnnnnnnnnnnnnnnnnnnnnnnnnnnnnnnnnnnnnnnnnnnnnnnnnnnnnnnnnnnnnnnnnnnnnnnnnnnnnnnnnnnnnnnnnnnnnnnnnnnnnnnnnnnnnnnnnnnnnnnnnnnnnnnnnnnnnnnnnnnnnnnnnnnnnnnnnnnnnnnnnnnnnnnnnnnnnnnnnnnnnnnnnnnnnnnnnnnnnnnnnnnnnnnnnnnnnnnnnnnnnnnnnnnnnnnnnnnnnnnnnnnnnnnnnnnnnnnnnnnnnnnnnnnnnnnnnnnnnnnnnnnnnnnnnnnnnnnnnnnnnnnnncctcacctgcagatgccccccagcctgggccagatgagcctgtcctttgaccagcctcacccccagngggcctgctgccatgccagcctcaggagcatgctgtgtccagtcctgaccccctgctctgctcagatgtgaccatggtggaagacagctgcctgagccagccagtgagagcgttttctcagggcacttggnggattggtgaagacatattccctcctctgctgcctcccactgaacaggacctcactaagcttctcctggn

SEQ ID NO: 23484 - DNA, 676 bp, Macaca Mulatta
cgtggcgctgtacgtgcgcatctactgcgtggtcctttcaagccacgctgatgtggctggcccgcagaccctagccctgctcaagacggtcaccatcgtgctaggtgtctttatcgtctgctggctgcccgccttcagcatcctccttctggactatgcctgtcccgtccactcctgcccgatcctctacaaagcccactactttttcgccttcgccaccctgaattcgctgctcaaccctgtcatctacacgtggcgcagccgggacctgcgtcgggaggtgcttcggccgctgcagtgctggcggccgggggtgggggtgcaaggacggaggcgggacgggaccccgggccaccacctcctgccactccgcagctccagctccctggagaggggcatgcacatgcccacgtcgcccacgtttctggagggcaacacggtggtctgaggtgggggtggaccaacaaccaggccaaggcagaggggttcatggagaggccactgggtgaccccagacagagacgtggggctgccgagccagatgcccccgccccacagacctgggtgatgttacaaatatttcacacctggaaaggccagataaggcactgactagtcacatagcagtgttgcagtggggtcctgagggccagtccggtgactggtgtgacccctt

SEQ ID NO: 23485 - DNA, 844 bp, Macaca Mulatta
aagtactttgttaaaagtatcccatctgcagctcaggcctgcagccccttaccttttggtggctcctcaggcgtctacaccttattcacctttcccctctcctatgccacttctcctccagggcgcgaggctgtccttggtatggtccggaaggccaaataccaggagctgctcctttcagagctcctgggccggcgggctcctgccgttgtacggcttggtctcacctaccatgtgcacgacctcattggggcccagctaatggactggtgagtcttgcccgggcctctggcagatgacggagcaatgacccaaggtcggatttcctcccagctcatgcttaattccctagtgaaggccagtggatctcattcttctctggaacccgggaacaccccttcccaagttctaagttctcctcacaacttgagcctaggcgtctggctccagccttgtctttctcctgcacagcatctctaccacttctggaaccctcctccgcctgccagagacatgaagattctgctcatcattgctcagctccccagagtgggcctggaggggactggaattgctgcatgatggtggctgaaacagggtcaccttgggaaggcttgggagccaggaagagtgttgggctctcgtgtatgcaaagggtcagatgtggctgctgctgtttgcctgggctctgacccggtggtggggtttgagcagtgcttctctgcccttccacggaaagtggaaccagaaatggtgccaaggctgtggctgttccctttcgtgtaaaatggtgctgttattactctgtcttgaaataggaaggtgggatttctggggaggctgg

SEQ ID NO: 23486 - DNA, 907 bp, Macaca Mulatta
gggcagaggacccattcattgcttctgcttttgctgctgaccctgctggggctggggctggtccagccctcctatggccagaatggcatgtaccagcgattcctgaggcaacatgtgcaccctgaggagacaggtggcaatgatcgctactgcaacatgatgatgcaaagacggaagatgactttgtatcattgcaagcgcttcaacaccttcatccatgaagatatctggaacattcgtagtatctgcagcaccaccaatatccaatgcaagaacggcaagatgaactgccatgagggtgtagtgaaggtcacagactgcagggatacaggaagttccaaggcacccaactgcagatatcgggccatggcgagcactagacgtgttgtcattgcctgcgagggtaacccacaggtgcctgtgcactttgacggttagatgccaccctgtagggattattgcgaatggttgaccttacacttactccttaaatagcagagagtaatgcgtttgagctgtcccaggctctgtctcctcagctcatttcttattctttttctctatataactcgttctatttaatacatttgcaccaaagagaaaatgggagacataaaacctattatggaatgaggcttgggctttttctgttataagccttccctttttataataactggctcagctttagctttcttcagatccctatctttgtgggaattttaagttacttatgtgtatttatgtagtatttcaaacatttcaaaaatgctttcatctatgttttatcacattttaataccacagcacttataatgatgtcattacatataggaagctcaaagttaaagggattttgctgaaagacctataaaatttagttggaaagaatttgaaaacaaaaatt

SEQ ID NO: 23487 - DNA, 169 bp, Macaca Mulatta
aaataattgcatcagttcattgacctcatcattaataagtgaagaatacatcggaaaataaaatattcactctccattagaaaattttgtaaaacaatgccatgaacaaattctttagtactcaatgtttctggacatactctttgataacaaaaaataaattttaaaa

SEQ ID NO: 23488 - DNA, 214 bp, Macaca Mulatta
gccatggcatgaaccctgccgatattgagtccctgcagcgtgagatccagatggactccccaatgctgctggctgacctgcctgacctccaggacccctgaggcccacagcctgtgccttgctgccacggtagacctagttccaagatccatgggaacattctcaaaggctttagccctggacccagcaggtgaggctcggcttggattattct

SEQ ID NO: 23489 - DNA, 251 bp, Macaca Mulatta
  misc_feature (1)...(251): n = A,T,C or G
cctcagtaccaggggctgcaggtggccgtatccaaggtgccacgctcgcccctgttccgcgaggccgatacggagatccaggtggtgctagtggagaccgggcccgagacgggcggcgccgggcagctggcccgggccctcctggcggacgtcgccnnnnnngcgaggccctcggcgtcctggaggcgaccatgcgggagtcgggcgcacatgtctgggacagttccgcggctgggctggcgggaggcgtg

SEQ ID NO: 23490 - DNA, 1053 bp, Macaca Mulatta
  misc_feature (1)...(1053): n = A,T,C or G
nggccatgaggcgcccccgatgtggtgttccagacaagtttggggctgagatcaaggccaatgttcgaaggaagcgctatgccatccagggtctcaaatggcaatataatgaaatcactttctnnnnnnnnnnnnnnnnnnnnnnnnnnnnnnnnnnnnnnnnnnnnnnnnnnnnnnnnnnnnnnnnnnnnnnnnnnnnnnnnnnnnnnnnnnnnnnnnnnnnnnnnnnnnnnnnnnnnnnnnnnnnnnnnnnnnnnnnnnnnnnnnnnnnnnnnnnnnnnnnnnnnnnnnnnnnnnnnnnnnnnnnnnnnnnnnnnnnnnnnnnnnnnnnnnnnnnnnnnnnnnnnnnnnnnnnnnnnnnnnnnnnnnnnnnnnnnnnnnnnnnnnnnnnnnnnnnnnnnnnnnnnnnnnnnnnnnnnnnnnnnnnnnnnnnnnnnnnnnnnnnnnnnnnnnnnnnnnnnnnnnnnnnnnnnnnnnnnnnnnnnnnnnnnnnnnnnnnnnnnnnnnnnnnnnnnnnnnnnnnnnnnnnnnnnnnnnnnnnnnnnnnnnnnnnnnnnnnnnnnnnnnnnnnnnnnnnnnnnnnnnnnnnnnnnnnnnnnnnnnnnnnnnnnnnnnnnnnnnnnnnnnnnnnnnnnnnnnnnnnnnnnnnnnnnnnnnnnnnnnnnnnnnnnnnnnnnnnnnnnnnnnnnnnnnnnnnnnnnnnnnnnnnnnnnnnnnnnnnnnnnnnnnnnnnnnnnnnnnnnnnnnnnnnnnnnnnnnnnnnnnnnnnnnnnnnnnnnnnnnnnnnnnnnnatggatggatacccaatgcccattggccagttcttgaggggcctgcctgcgtccatcaacactgcctatgagaggaaggatggcaaatttgtattcttcaaaggnaggagacaagcattgggtgtttgatgaggcgtccctggaacctggctaccccaagcacattaaggagctgggccgagggctgcctaccgacaagattgatgctgctctcttctggatgcccaatggaaagacctacttcttccgtggaaacaagta

SEQ ID NO: 23491 - DNA, 245 bp, Macaca Mulatta
attcagcagcagagtttatgtcattctagccctgagaaccatagtaatgcaaaggtgagtttattgttgcataatttcttttcaatttctaattccctgattttggtgttaagatttgcattactatcagaataattaatctactaattatcctacagggtagagaagttatatgtgacatgtttatcagtttatttctctgtgtacctattgtatgatatgtccattagggttattacaagtat

SEQ ID NO: 23492 - DNA, 1868 bp, Macaca Mulatta
  misc_feature (1)...(1868): n = A,T,C or G
cagcttccgccacctttgaagactttcagattcgtccccacgccctctttgttcattcatacagagctccagctttctgtgatcactgtggagaaatgctgtgggggctggtgcgtcaaggtcttaaatgtgannnnnnnnnnnnnnnnnnnnnnnnnnnnnnnnnnnnnnnnnnnnnnnnnnnnnnnnnnnnnnnnnnnnnnnnnnnnnnnnnnnnnnnnnnnnnnnnnnnnnnnnnnnnnnnnnnnnnnnnnnnnnnnnnnnnnnnnnnnnnnnnnnnnnnnnnnnnnnnnnnnnnnnnnnnnnnnnnnnnnnnnnnnnnnnnnnnnnnnnnnnnnnnnnnnnnnnnnnnnnnnnnnnnnnnnnnnnnnnnnnnnnnnnnnnnnnnnnnnnnnnnnnnnnnnnnnnnnnnnnnnnnnnnnnnnnnnnnnnnnnnnnnnnnnnnnnnnnnnnnnnnnnnnnnnnnnnnnnnnnnnnnnnnnnnnnnnnnnnnnnnnnnnnnnnnnnnnnnnnnnnnnnnnnnnnnnnnnnnnnnnnnnnnnnnnnnnnnnnnnnnnnnnnnnnnnnnnnnnnnnnnnnnnnnnnnnnnnnnnnnnnnnnnnnnnnnnnnnnnnnnnnnnnnnnnnnnnnnnnnnnnnnnnnnnnnnnnnnnnnnnnnnnnnnnnnnntttttaaggtgtacaaatgaagtgcctatcactcttcagagtaacccactttcagaaccatggtgcctgacaatacgttttactaaannnnnnnntccatcaacaagcaacaatatcccactcatgagagtagtgcagtctgtcaaacacacgaagaggaaaagcagcacagtcatgaaagaaggatggatggtccactacaccagcaaggacacgctgnnnnnnnnnnnnnnnnnnnnnnnnnnnnnnnnnnnnnnnnnnnnnnnnnnnnnnnnnnnnnnnnnnnnnnnnnnnnnnnnnnnnnnnnnnnnnnnnnnnnnnnnnnnnnnnnnnnnnnnnnnnnnnnnnnnnnnnnnnnnnnnnnnnnnnnnnnnnnnnnnnnnnnnnnnnnnnnnnnnnnnnnnnnnnnnnnnnnnnnnnnnnnnnnnnnnnnnnnnnnnnnnnnnnnnnnnnnnnnnnnnnnnnnnnnnnnnnnnnnnnnnnnnnnnnnnnnnnnnnnnnnnnnnnnnnnnnnnnnnnnnnnnnnnnnnnnnnnnnnnnnnnnnnnnnnnnnnnnnnnnnnnnnnnnnnnnnnnnnnnnnnnnnnnnnnnnnnnnnnnnnnnnnnnnnnnnnnnnnnnnnnnnnnnnnnnnnnnnnnnnnnnnnnnnnnnnnnnnnnnnnnnnnnnnnnnnnnnnnnnnnnnnnnnnnnnnnnnnnnnnnnnnnnnnnnnnnnnnnnnnnnnnnnnnnnnnnnnnnnnnnnagaaccttcatcaccctggtgttgtaaatttggagtgtatgtttgagacgcctgaaagagtgtttgttgttatggaaaaactccatggagacatgctggaaatgatcttgtcaagtgaaaagggcaggttgccagagcacataacgaagtttttaattactcagnnnnnnnnnnnnnnnnnnnnnnnnnnnnnnnnnnnnnnnnnnnnnnnnnnnnnnnnnnnnnnnnnnnnnnnnnnnnnnnnnnnnnnnnnnnnnnnnnnnnnnnnnnnnnnnnnnnnnnnnnnnnnnnnnnnngtgaaactctgtgattttggttttgcccggatcattggagagaagtctttccggaggtcagtggtgggtaccccagcttacctggctcctgaggtccttaggaacaagggctacaatcgctctctcgacatgtggtctgttggggtcatcatcaatgtaagc

SEQ ID NO: 23493 - DNA, 709 bp, Macaca Mulatta
  misc_feature (1)...(709): n = A,T,C or G
tccacagcaccccagttagacgctcatctgggccagcaccacaaagcctgttgagcgcacggcgtgtgtcagccttgcccacacccgccaggcggcgcttctctggccttccaccgatgacccccaaaatgatgcccagggccgtggcctctcccctgtgtgtgccggcccagagactttcctctgagccccgcaagaactctgcgatgannnnnnnnnnnnnnnnnnnnnnnnnnnnnnnnnnnnnnnnnnnnnnnnnnnnnnnnnnnnnnnnnnnnnnnnnnnnnnnnnnnnnnnnnnnnnnnnnnnnnnnnnnnnnnnnnnnnnnnnnnnnnnnnnnnnnnnnnnnnnnnnnnnnnnnnnnnnnnnnnnnnnnnnnnnnnnnnnnnnnnnnnnnnnnnnnnnnnnnnggctcttcttgtagatatcaaactggacccactcgcagtcactccagatgctgcaagccagcccctcgttgacccccctctcattgacttctgcaataccccagaagcaaacgtggctgtgggatctgaaagcaggcctctgatcgacctcatgataaacactccagacatgaataaaaatgtggccaaaccttcaccggtggtgggacagncagctcatagacctgagctcccctctgatccagctgagccccgaggctgacaaggagaacgtggattccccactcctcaagttctaa

SEQ ID NO: 23494 - DNA, 677 bp, Macaca Mulatta
tctgtaagataaactgtatatttcatatgtacctgttaaggtactttttaaagcttgtacatgaatctttgtataaaaaacaccagtgctctttcattgtatttttctcatttttgctttttgaaattcctttaaaaaatgtgctgttaagccagtattaggtatctttattttgtaagtgaacattccagctgttttttctggcagatctgatgctgatttgatgctgtatgatctttaaattttattgttgcagttaaattcatttagtgaatgttctattattttatacatacacattaagtactcagctaagtaatggcactatgaggattttcttttctcccctttcctgtcagcagcagttctgtgaatgcatcttaggtataaaaatgcaatacagatttttatattttggtgtggacatggctcatttttgttttaccagttatttgcaagcaaaatgtaatttaatgtatagatgatttctagtgtctcctgacaaactgtaaatactgcatttcttttgcgtatataattgcttacagcttttctcatttgatatatagcattgtacatatgacaagtcttttgcaaaactgtgtgatctctgtgaaagtagtacagtatatgacctttaatttcttttttatgttaaatatactgtcacattgaag

SEQ ID NO: 23495 - DNA, 266 bp, Macaca Mulatta
  misc_feature (1)...(266): n = A,T,C or G
aggtccaggtcaagacctcgtctccgttctcatagtcgtagcagtgaaaggtccagtcacagaagaacgcgtagtcggtctcgggatagagaacgacgtaaaggcagagataaagagaaaagagaaaaggagaaggacaaagggaaggacaaggaattacataacatcaaacgtgggnnnnnnnnnnnnnnnnnnnnnnnnnnnnnnnnnnngccaccagctgaacaggccacacgccagactacagctggttcttgaagctgctg

SEQ ID NO: 23496 - DNA, 605 bp, Macaca Mulatta
ggggcctcgctctcgcagcggcccgcgggccgggcgtcatgggcggcctcttctggcgctccgcactgcgggggctgcgctgcggcccgcgggccccggacccgagcctgctcgtgcgccccagctcgggagggccctcctggacccgggaacggaccctggtggcggtgaagccagatggggtgcaacggcggctcgttgggcacgtgatccagcgcttcgagaggcggggcttcacaccggtggcgatgaagatgctgcaggctccagagagcgtccttgccgatcactacccggacttgccgcggaagcccttctatcctgccctcatccgctacatgatctctgggcccatgttgttcttgctcaggctagggcactatgtcgtcctcgcctcaattgccatgattgtacacactgattcagcagaggctgccctttcaaccatgagggtgccaatatgtgctccttctagcctgatgctgcatctttacaacctatttatcaaagttcttttctaccgtccatttttcttccttattgtctgcttattactatattattagttctccctctcaccccccatttatttttctatactcgta

SEQ ID NO: 23497 - DNA, 146 bp, Macaca Mulatta
ttaaaaattacaggtgatgctaaagaaaacagctgtgtttacatctcacagacatctgtgtattctgagtactgtagtacagaaatgaaatggatctgccaaaaagaactaacacttgtgagaaataaagtgtctcctgactcttg

SEQ ID NO: 23498 - DNA, 677 bp, Macaca Mulatta
gtaatttcttatttccctgtttctgcgggtctttgtccacatccagctgttgaaccatagcttcaccctccataccctgctcacctatgccactcgagatgacctcatctatacccgcatcaggtacatcctgggtcccccaagggtgaaccatgcatgtggcctcatcctggccaactgcaggcctgcctaggttccttcctggaaaccaaaggggcacctgggtcccctaaggacagagggggcactgggcaggcagtgggtgcaagagagagtccagggccaccttctggctgagccacacagagtccattacccccaggggagggatggtatgccgcatctggagggccatcttggcacagcgagcaggatccacgccagtcacccctggaccccgagaggctgaatgagggcatcagaggccagacagatccaaggatggatgaatggagaggacaaaggcagcttctgacacaccagccccaggacctggggtgactggaggaagccaggcgagtgggggccaggactggttccagtgagagaaaccaaccacaggcacccaagcactaccagacaaaacgtattaaacagaacacttttgaacctttgtcaaggcaattttggaggtgtatggggggaggggtaccctgggaagagcctcctaggtcttt

SEQ ID NO: 23499 - DNA, 1830 bp, Macaca Mulatta
  misc_feature (1)...(1830): n = A,T,C or G
agcctgaaaaaggactgcacggactgacttcttggctacagaaagcaaagctccannnnnnnnnnnnnnnnnnnnnnnnnnnnnnnnnnnnnnnnnnnnnnnnnnnnnnnnnnnnnnnnnnnnnnnnnnnnnnnnnnnnnnnnnggagggactgaccttcaaggatgtggcagtggtcttcactgaggaggagctggggctgctggaccctgtnnnnnnnnnnnnnnnnnnnnnnnnnnnnnnnnnnnnnnnnnnnnnnnnnnnnnnnnnngggcatcaccccttcaaacatgatgtattccctttagaaaaggaaaaaaagcttggtatgatgaagacagcaactcaaagaaaagggaaatcannnnnnnnnnnnnnnnnnnnnnnnnnnnnnnnnnnnnnnnnnnnnnnnnnnnnnnnnnnnnnnnnnnnnnnnnnnnnnnnnnnnnnnnnnnnnnnnnnnnnnnnnnnnnnnnnnnnnnnnnnnnnnnnnnnnnnnnnnnnnnnnnnnnnnnnnnnnnnnnnnnnnnnnnnnnnnnnnnnnnnnnnnnnnnnnnnnnnnnnnnnnnnnnnnnnnnnnnnnnnnnnnnnnnnnnnnnnnnnnnnnnnnnnnnnnnnnnnnnnnnnnnnnnnnnnnnnnnnnnnnnnnnnnnnnnnnnnnnnnnnnnnnnnnnnnnnnnnnnnnnnnnnnnnnnnnnnnnnnnnnnnnnnnnnnnnnnnnnnnnnnnnnnnnnnnnnnnnnnnnnnnnnnnnnnnnnnnnnnnnnnnnnnnnnnnnnnnnnnnnnnnnnnnnnnnnnnnnnnnnnnnnnnnnnnnnnnnnnnnnnnnnnnnnnnnnnnnnnnnnnnnnnnnnnnnnnnnnnnnnnnnnnnnnnnnnnnnnnnnnnnnnnnnnnnnnnnnnnnnnnnnnnnnnnnnnnnnnnnnnnnnnnnnnnnnnnnnnnnnnnnnnnnnnnnnnnnnnnnnnnnnnnnnnnnnnnnnnnnnnnnnnnnnnnnnnnnnnnnnnnnnnnnnnnnnnnnnnnnnnnnnnnnnnnnnnnnnnnnnnnnnnnnnnnnnnnnnnnnnnnnnnnnnnnnnnnnnnnnnnnnnnnnnnnnnnnnnnnnnnnnnnnnnnnnnnnnnnnnnnnnnnnnnnnnnnnnnnnnnnnnnnnnnnnnnnnnnnnnnnnnnnnnnnnnnnnnnnnnnnnnnnnnnnnnnnnnnnnnnnnnnnnnnnnnnnnnnnnnnnnnnnnnnnnnnnnnnnnnnnnnnnnnnnnnnnnnnnnnnnnnnnnnnnnnnnnnnnnnnnnnnnnnnnnnnnnnnnnnnnnnnnnnnnnnnnnnnnnnnnnnnnnnnnnnnnnnnnnnnnnnnnnnnnttcagaatgaaaattcattatcaagtgcatctggtagtccacacaggggagaaaccctataaatgtgaagtatgtgggaaagccttccgtcagagttcatatcttaaaatccatctgaaagcacatagtgtacagaaaccttataagtgtgaggagtgtgggcagggcttcaatcagagctcacgacttcagattcaccagctgatccataccggcgagaaaccatacaaatgtgaagagtgtggcaagggatttagtcgtagagcagatcttaaaattcattgtaggatccacacaggagagaaaccatataattgtgaggagtgtgggaaggtcttcagtcaggcctcgcatcttttaacccatcagagagttcacagtggggaaaaaccatttaaatgtgaagagtgtgggaagagcttcagtgggagaacacaccttcaagcccatcaaaaagtccacactggagaaaagcca

SEQ ID NO: 23500 - DNA, 669 bp, Macaca Mulatta
gcatgaagctccacaaatgcgccctgtgcagcaagtccttcagccgccgtgcccaccttgccgagcaccagcgtgcccacacgggcaactacaagttccgctgtgctggctgcgccaagggcttttcccgccacaaatacctcaaagatcaccgctgtcgtctcggcccccaaaaggacaaggacctgcaaacccggcgccccccccagaggagggcagccccccgcagtggcggcagtggtgggcgcaaggtggtgacccccttgcctgacccgctggggttggaggagctgaaggatgcaggggctgggctggtgcccgaggctgtccctggcaagccgcccttcgcagagccggacgccgtgctgtccatcgttgtgggtggtgcggtgggcgcggaacctgagctggtggtacctggacatgctgaggggctgggctccaacctggctctggcggagctgcaggctggggccgagggcccatgtgccatgctcgctgtgcctgtctacatccaggcctcggagtgacgaacctcaggtgtgtttcctgggcaggcctgatgctcctgtttgggtccagggccctgggggcagactgctgatccttaccagtggaagcgagccattgagccattggcagaaatcctgctgaatgtcattcagaaac

SEQ ID NO: 23501 - DNA, 146 bp, Macaca Mulatta
aagatccatccaaaagctatgtgccattacgagactttgtgcttgtgaagctttgtcaagatttccctctgtttttcccgggaaaaattaatgcaaggattcaatgaagatatggcaatagaggcacaacagaagttcaaaataaa

SEQ ID NO: 23502 - DNA, 492 bp, Macaca Mulatta
cccgcctcaaatgtgccagaggattatcctgatcagtttgatgatgtcatggattttattcaagccaccattaaaagactgaaaaggtcaccagataaacaaatggcagtgcttcctagaagagagcggaatcggcaggctgcagctgccaacccagagaattccaaaggaaaaggtcggagaggccagaggggcaaaaaccggggttgtgtcttaactgcaatacatttaaatgtcactgacttgggtttgggctacgaaaccaaggaggaactgatttttaggtactgcagcggctcttgcgatgcagctgagacaacatatgacaaaatattaaaaaacttatccagaaatagaaggctggtgagtgacaaagtagggcaggcatgttgcagacccaccgcctttgatgatgacctgtcgtttttagatgataacctggtttaccatattctaagaaagcattccgctaaaaggtgtggatgtatctga

SEQ ID NO: 23503 - DNA, 1080 bp, Macaca Mulatta
  misc_feature (1)...(1080): n = A,T,C or G
gggggggtacttcccggttacagtgttgatgttttcaggctcctgctgctcctgttgcggctaggggaactgtcgtggggaaggatggtgtgcgaaaaatgtgaaaagaaacttggtactgttatcactccagatacatggaaagatggtgctaggaataccacagaaagtggtgggagaaagctgaatgaaaataaagctttgacttcaaaaaaagcaagatttgatccatatggaaagaataagttctccacttgcagaatttgtaaaagttctgtgcaccaaccaggttctcattactgccagggctgtgcctacaaaaaaggcatctgtgcgatgtgtggaaaaaaggttttggataccaaaaactacaagcaaacatctgtctagatgtattgatggaatttctgactttctaaatgattttactttctgccttgaattttcaaggcatagatgtcaacttacagaataacgtgttttaagacaattacgtttaaaccagagaatttgattgttattcattttgctctcatgctctaaacagcaacagtgtaactagtcttttgccgtaaatggttttttccttatgagcattttattgaactaagtggcaaattccatgaaaaatttctcagttctgtatgcacttttaacattattcatgtaattctcccccccacacactttatttatagatactgcaaaaagtgagaaggaggtaatagatattttgctctgaatttggcatccagagttaacagttctcccctaactcccttactcgtgtcatagttattaggatcagcagcctcttaactaattgcagtttcataggatatataaatgtttcaagccattattgctgaatggttctttagttattaaccttagacccaattcaaaagaccagttttttatttgttcttggccgccaaangtgccagtttccttttaatattgtgacccaggaacacaagggaattaatcccatatgtccaaaataaaaacacactgaaattttttagaaaacttactgatcatgctgaacnacngtgtctgaaacaaaatgtgcgtcta

SEQ ID NO: 23504 - DNA, 882 bp, Macaca Mulatta
  misc_feature (1)...(882): n = A,T,C or G
ggggctgcagaacaaaagaaaacagattttaagccagaagatgaaaacaatgttttgattcaatatactaatgcttgtgtaaaagtctgtgcttacgtaagaaaacaagtgggagaagattaaaaattccatggatgggaagaatgtggatacggttttgatggaacttggagtacgttttcatcgacttatctatgagcatcttccaacatattcctaccgttgtatggggtggcatgttggcaattttgtgatgtaactgaatataggaaagtgtggccaaaaactttcaagattcccaatgggtattaacttcttttttgaaaaccccgggcaggccccttttgcaatccttccggggaaattggccccccaaataatttaaaagccaggtccggcctcagggaaaaacaaaccttgggcaaaatctnnnnnnnnnnnnnnnnnnnnnnnnnaaccccctttcggaaaaaaattttcgggggggggaatannnnnnnnnnnnnnnnnnnnnnnnnnnggcccagaaaaacttttttcccccgggaaaaattggaaatttttcccaccaggggagaatgtctcaaggggtgccagatttcccccctttttccggggggggggaatttttcttttgggggaacactctccccacccaggggcccccccccgcggggtgnnnnnnnnnnnnnnnnnnnnnnnnnnnnnnnnnnnnnnnnnnnnnnnnnnnnnnnnncaagggccgnnnnnnnnnnnnnnnnnnnnnnnnnnnnnnnnnnnntttctcctgtggnnnnnnnnnnnnnnnnnnnnnnggcgcccccccaaaaacatttacacccccttttttggaaggggnnnnnnnnnnnnnnnnnnnnnnnc

SEQ ID NO: 23505 - DNA, 1143 bp, Macaca Mulatta
  misc_feature (1)...(1143): n = A,T,C or G
gggattcaggggcggccggctttgttgggtgtgcttggtttggtgtccctgcggctgaccgtgattggtgattcgcagcatcttcgtaaccgctaacaggtcaaaatgcagnnnnnnnnnnnnnnnnnnnnnnnnnnnnnnnnnnnnnnnnnnnnnnnnnnnnnnnnnnnnnnnnnnnnnnnnnnnnnnnnnnnnnnnnnnnnnnnnnnnnnnnnnnnnnnnnnnnnnnnnnnnnnnnnnnnnnnnnnnnnnnnnnnnnnnnnnnnnnnnnnnnnnnnnnnnnnnnnnnnnnnnnnnnnnnnnnnnnnnnnnnnnnnnnnnnnnnnnnnnnnnnnnnnnnnnnnnnnnnnnnnnnnnnnnnnnnnnnnnnnnnnnnnnnnnnnnnnnnnnnnnnnnnnnnnnnnnnnnnnnnnnnnnnnnnnnnnnnnnnnnnnnnnnnnnnnnnnnnnnnnnnnnnnnnnnnnnnnnnnnnnnnnggggaggggcggccggctttgttgggtgtgcttggtttggtgtccctgcggctgaccgtgattggtgattcgcagcatcttcgtaaccgctaacaggtcaaaatgcagatcttcttgaagaccctgaccggcaagaccatcacccttgaggtggagcccagtgacaccattcgaaaatgtgaaaggccaggatcccaggttaaggaaggcattccctcccgaccagcagaggctccttcttttgcaggcaagcagcttggaagaatggcccgcacttctttctgactacaacatccagaaagagtcgaccctgcaccttgtcctgcgcctgataggtggtatgcagatcttcctgaagaccctgaccggccaagaccatcaccctggaaatggagcccattgaccccctcacaaatgtaaaggccaatatcccgattaagaaagcatccctcccgaccactaaagctcttctttgcaggctaccacttggaaaatgccgcctcttttgattcacttccaaaggatcgaccctgacctgcctgccctgacagtggatgacaactcctggaaaccctgctcgcaaacctcctttgagtggacctcgtaccctcaaattgaagccattccataaaaaggcccccccccttttcatttttttgttgtaacc

SEQ ID NO: 23506 - DNA, 712 bp, Macaca Mulatta
  misc_feature (1)...(712): n = A,T,C or G
gtcttgacgctttggtcttgagccttgcctggctcttctaaaggacttttggangggcagataatttcatctggttaaatccaacacacatttctttcaggggaaaaacaatgtcaccaaattttcagagttctaaactcctttccttcaagccgggattttcctttattcagcaccagtacgtactaagtctccagatggggaaatgactaaaatgggtttttctgctttgtttgctctacttctgagaaaggtttccagtctggactcgctgtaccaatatccgtggtggaatatgggagcgtttcattctccttgtacgctgaagtcagtctgacttgaaggaggctggtttggatctaagcaaacacccagatggggttctttggtctcagcaaggcttttcctgttgggattcacagtaaacagaaacccagaaatctcaccttgggtgttttcaggggtcattttgagttttgctgaatagggagcacgagataccctgagccttcctctcttcactggtggtgatcagaggagctgtctggtgtgtcagggtcgtgaagccgttacatttcaggacgatcctctttccttcagcagcacttcttactggctctggctggaatctgccttttatcacagctgtcaccattctcacgtgattctcgtgagactctctggttataattactatttaatatttagactg

SEQ ID NO: 23507 - DNA, 106 bp, Macaca Mulatta
acataaaatttcctttgtaatacttagtaagagtttcctggaacaggagatcctgatattaattgactcattgtgaatacttccttcagcccccttctaaggcaga

SEQ ID NO: 23508 - DNA, 1093 bp, Macaca Mulatta
  misc_feature (1)...(1093): n = A,T,C or G
aaatgatgaaagacaacacctggtacgccacctggatgcctgtgagaccatggggcatgccacagccatctgctcagacaagacgggcacgctgacacccatcgcatgacagtgggacagnnnnnnnnnnnnnnnnnnnnnnnnnnnnnnnnnnnnnnnnnnnnnnnnnnnnnnnnnnnnnnnnnnnnnnnnnnnnnnnnnnnnnnnnnnnnnnnnnnnnnnnnnnnnnnnnnnnnnnnnnnnnnnnnnnnnnnnnnnnnnnnnnnnnnnnnnnnnnnnnnnnnnnnnnnnnnnnnnnnnnnnnnnnnnnnnnnnnnnnnnnnnnnnnnnnnnnnnnnnnnnnnnnnnnnnnnnnnnnnnnnnnnnnnnnnnnnnnnnnnnnnnnnnnnnnnnnnnnnnnnnnnnnnnnnnnnnnnnnnnnnnnnnnnnnnnnnnnnnnnnnnnnnnnnnnnnnnnnnnnnnnnnnnnnnnnnnnnnnnnnnnnnnnnnnnnnnnnnnnnnnnnnnnnnnnnnnnnnnnnnnnnnnnnnnnnnnnnnnnnnnnnnnnnnnnnnnnnnnnnnnnnnnnnnnnnnnnnnnnnnnnnnnnnnnnnnnnnnnnnnnnnnnnnnnnnnnnnnnnnnnnnnnnnnnnnnnnnnnnnnnnnnnnnnnnnnnnnnnnnnnnnnnnnnnnnnnnnnnnnnnnnnnnnnnnnnnnnnnnnnnnnnnnnnnnnnnnnnnnnnnnnnnnnnnnnnnnnnnnnnnnnnnnnnnnnnnnnnnnnnnnnnnnnnnnnnnnnnnnnnnnnnnnnnnnnnnnnnnnnnnnnnnnnnnnnnnnnnnnnnnnnnnnnnnnnnnnnnnnnnnnnnnnnnnnnnnnnnnnnnnnnnnnnnnnnnnnnnnnnnnnnnnnnnnnnnnnnnnnnnnnnnnnnnnnnnnnnnnnnnnnnnnnnnnnnnnnnnnnnnnnnnnnnnnnnnnnnnnnnnnnnnnnnnnnnnnnnnnnnnnnaggcatcatcgacagcacacacactgagcagcggcaggtggtggccgtgacgggggacgggaccaacgacgggcctgcactcaagaaggctgacgtgggctttgccatgg

SEQ ID NO: 23509 - DNA, 590 bp, Macaca Mulatta
tgcacttacaattatttgatggggtggattcgtggtcggaggcctcgacacaacttggagatgagtgaatttcataattataagttgggtctagcaaagagtgatttttcaacacgatgccaaaagcaaagatgtccagtaatcaaaagcaaatgtagagaaaacgcattattcaaccaagaagttcaaattcccttgactgaaagttactgtggcccatgtcctaaaaactggatatgttataaaaataactgctaccagttttttaatgagagtaaaaactggtatgagagccaggcttcttgtatgtctcaaaatgccagccttctgaaagtatacagcaaagaggaccaggatttacttaaactggtgaagtcatatcactggatgggattagtacacatttcaacaaatggatcttggcagtgggaagatggctccattctctcacccaacctactaacaataattgaaatgcagaagggagactgtgcactctatgcctcaagctttaaaggctacatagaaaactgttcgattccaaatacatacatctgcatgcagaggactgtgtaaagatgatcagcctt

SEQ ID NO: 23510 - DNA, 875 bp, Macaca Mulatta
gtggtggttctggcattcgtagtttgctgcttgccattccacgttggcagaatcatttacataaacacagaagatctgcggatgatgtacttctctcagtactttaacatcgtcgctctgcaacttttctatctgagcgcatctatcaacccaatcctctacaacctcatttcaaagaagtacagagcggcggcctgtaaactgctgctcgcaaggaagcccaagccgacaggcttacacagaagcagggacactgcgggggaagttgcaggggacactggaggagacacagcaggctacacccagacaagtgctaacatgaagacgacggggtaaccagcacgaccaagccaggctcctctcgcagttctaagacttaggggaaaacaggtgtgtagagaaataaagactgaaagtgaggaacagatcctgttaagaagaatggaaagagggttgcagttgtgccagttggttaagaaatagaccgtatgatttatttaaccaaggtatgaaatgtaactgtgccaacctttctagtttccttcccaagtacctcctaagggatgtctgttttaccatcacgaaatcccacatctcaaagtgtgctctgtgtgatggtttcatgaagtcctcattctcctactcttaggaaggatgtttgttcattttacagttaagtgatacatagagatgctggccccaaaactgccacctctgagatcatgagtgtattttatgttttggatgtaaatataacagtacatctacaaggaaccaggataatgacagtttggatccaagaaatgatttaatacctatgtatggctgcaaaaactttcagaagtaaaaggaattctaggtagactccagtgttt

SEQ ID NO: 23511 - DNA, 91 bp, Macaca Mulatta
ggaatggagcaaagaggtaacagcgaatgcccaaaggtgggcaaacaagtgcactttacagcacagtgatccagaggaccgcaaaaccagt

SEQ ID NO: 23512 - DNA, 546 bp, Macaca Mulatta
  misc_feature (1)...(546): n = A,T,C or G
aggtgaaaatcctttggctgatgaccagagtaaccatgatattaactcagttgctggcgttctgaagctctatttccgtgggctggaaaaccccctctttcctaaggaaagatttaatgatctgatttcttgtatcannnnnnnnnnnnnnnnnnnnnnnnnnnnnnnnnnnnnnnnnnnnnnnnnnnnnnnnnnnnnnnnnnnnnnnnnnnnnnnnnnnnnnnnnnnnnnnnnnnnnnnnnnnnnnnnnnnnnnnnnnnnnnnnnnnnnnnnnnnnnnnnnnnnnnnnnnnnnnnnnnnnnnnnnnnnnnnnnnnnnnnnnnnnnnnnnnnnnnnnnnnnnnnnnnnnnnnnnnnnnnnnnnnnnnnnnnnnnnnnnnnnnnnnnnnnnnnnnnnnnnnnnnnnnnnnnnnnnnnnnnnnnnnnnnnnnnnnnnnnnnnnnnnnnnnnnnnnnnnnnnnnnnnnncgacagcccatacagtgagcacggtacattggaggaagtggaccaagatgctggtacagagccccacacaagcgaagatg

SEQ ID NO: 23513 - DNA, 1461 bp, Macaca Mulatta
  misc_feature (1)...(1461): n = A,T,C or G
gagaaggactcagaattgaaccagaagcggcctcagtacatcaaagccaaggagaacacctcccacaaaatcaagaagctggaagcagccaagaagtctctgcagaatgctcagaagcactataagaagcgtaaaggtgacatggatgagctggagaaggagatgctgtcagtggagaaggcccggcaggagtttgaagaacggatggaagaagagagtcagagtcagggcagagatttgaccttggaggagaatcaggtnnnnnnnnnnnnnnnnnnnnnnnnnnnnnnnnnnnnnnnnnnnnnnnnnnnnnnnnnnnnnnnnnnnnnnnnnnnnnnnnnnnnnnnnnnnnnnnnnnnnnnnnnnnnnnnnnnnnnnnnnnnnnnnnnnnnnnnnnnnnnnnnnnnnnnnnnnnnnnnnnnnnnnnnnnnnnnnnnnnnnnnnnnnnnnnnnnnnnnnnnnnnnnnnnnnnnnnnnnnnnnnnnnnnnnnnnnnnnnnnnnnnnnnnnnnnnnnnnnnnnnnnnnnnnnnnnnnnnnnnnnnnnnnnnnnnnnnnnnnnnnnnnnnnnnnnnnnnnnnnnnnnnnnnnnnnnnnnnnnnnnnnnnnnnnnnnnnnnnnnnnnnnnnnnnnnnnnnnnnnnnnnnnnnnnnnnnnnnnnnnnnnnnnnnnnnnnnnnnnnnnnnnnnnnnnnnnnnnnnnnnnnnnnnnnnnnnnnnnnnnnnnnnnnnnnnnnnnnnnnnnnnnnnnnnnnnnnnnnnnnnnnnnnnnnnnnnnnnnnnnnnnnnnnnnnnnnnnnnnnnnnnnnnnnnnnnnnnnnnnnnnnnnnnnnnnnnnnnnnnnnnnnnnnnnnnnnnnnnnnnnnnnnnnnnnnnnnnnnnnnnnnnnnnnnnnnnnnnnnnnnnnnnnnnnnnnnnnnnnnnnnnnnnnnnnnnnnnnnnnnnnnnnnnnnnnnnnnnnnnnnnnnnnnnnnnnnnnnnnnnnnnnnnnnnnnnnnnnnnnnnnnnnnnnnnnnnnnnnnnnnnnnnnnnnnnnnnnnnnnnnnnnnnnnnnnnnnnnnnnnnnnnnnnnnnnnnnnnnnnnnnnnnnnnnnnnnnnnnnnnnnnnnnnnnnnnnnnnnnnnnnnnnnnnnnnnnnnnnnnnnnnnnnnnnnnnnnnnnnnnnnnnnnnnnnnnnnnnnnnnnnnnnnnnnnnnnnnnnnnnnnnnnnnnnnnnnnnnnnnnnnnnnnnnnnnnnnnnnnnnnnnnnnnnnnnnnnnnnnnnnnnnnnnnnnnnnnnnnnnnnnnnnnnnnnnnnnnnnnnnnnnnnnnnnnnnnnnnnnnnnnnnnnnnnnnnnnnnnnaggaaaaatccaagctggagagtgagctagccaactttgggcctcgcattaatgatatcaagaggatcattcagagccgagagagggagatgaaagacttgaaggagaagatgaaccaggtt

SEQ ID NO: 23514 - DNA, 455 bp, Macaca Mulatta
aggctaaagttctctggaggatgtggctgcagggcctgctgctcttgggcactgtggcctgcagcatctctgcacccgcccgctcacccagccccggcacgcagccctgggagcatgtgaatgccatccaggaggcccggcgtctcctgaacctgagtagagacactgctgctgagatgaataaaaccgtagaagtcgtctcagaaatgtttgacctccaggagccgagctgcctacagacccgcctggagctgtacaagcagggcctgcagggcagcctcaccaagctcaagggccccttgaccatgatggccagccactacaagcagcactgccctccaaccccggaaacttcctgtgcaacccagattatcaccttccaaagtttcaaagaaaacctgaaggactttctgcttgtcatcccctttgactgctgggagccagtccaggagtga

SEQ ID NO: 23515 - DNA, 1011 bp, Macaca Mulatta
  misc_feature (1)...(1011): n = A,T,C or G
tgttcatggtggacaacggggctgatgactggcgcatcgccatgacctgcgagcgcgtgttcctcatctcactggagctggcggtgtgcgccattcacccggtgcccggccactaccgcttcacgtggacagcgcggctggccttcacgtacgcgccctcagtggccgaggctgacgtggatgtgctgctgtccatccccatgttcctgcgcctctacctgctgggccgggtgatgctactgcacagcaaaatcttcacggacgcctcgagccgcagcattggggccctcaacaagatcaccttcaacacgcgctttgtcatgaagacgctcatgaccatctgccccggcacggtgctgctggtctttagcatctcctcctggatcatcgcagcctggacagtgcgcgtctgcgagaggnnnnnnnnnnnnnnnnnnnnnnnnnnnnnnnnnnnnnnnnnnnnnnnnnnnnnnnnnnnnnnnnnnnnnnnnnnnnnnnnnnnnnnnnnnnnnnnnnnnnnnnnnnnnnnnnnnnnnnnnnnnnnnnnnnnnnnnnnnnnnnnnnnnnnnnnnnnnnnnnnnnnnnnnnnnnnnnnnnnnnnnnnnnnnnnnnnnnnnnnnnnnnnnnnnnnnnnnnnnnnnnnnnnnnnnnnnnnnnnnnnnnnnnnnnggtaaaaaacgccgctgctaacgttctcagggagacgtggctcatctacaaacacaccaggctggtgaagaagccagaccaagcccgggttcggaaacaccagcgtaagttcctccaagccatccatcannnnnnnnnnnnnnnnnnnnnnnnnnnnnnnnnnnnnnnnnnnnnnnnnnnnnnnnnnnnnnnnnnnagacccagagcgtcatgtatgaccttgtatcggagttgcacgctcagcacgaggagctggaggcccgtctggccacgctggaaagccgcctggatgcgctgggtgcctctctgcaggccctgcccggcctcatagcccaagccata

SEQ ID NO: 23516 - DNA, 98 bp, Macaca Mulatta
ccttaaaatccagactctgtcaatacccaggaccaagccacagcgggtcctccatcccaacagccatgcccgcattagctcttagacccacagactgg

SEQ ID NO: 23517 - DNA, 432 bp, Macaca Mulatta
actagtggctttgctttaaagaaacaaatggaatcctaaatttacgactaaaaattctcccaaaagatgaaagatctacagtgtttttgtcagtattatatttgactcaggaactaatgattaagggagctttgacacctgcagatggaggactgatcttgtgtcaagttaacaggaacactgcccacagatgacactgcatttgtatcccgctggatgtagagtattgggaaggcatttgttcagtttcatacctccaaaccatgcattgtctttgatgtatctgcctagccttctcagaactcagtgttgtacatttttccccctaggacctgaattggtcttggaggtggcttttagaaatcatctatgtagttcctgtccacatgacactgtatatttgtttcttctttctcctgtcatgaatctgct

SEQ ID NO: 23518 - DNA, 80 bp, Macaca Mulatta
gttccccagaaagggaaccttctcatttacactgagtttggcaagatgcttgtacagcccaatgagatctgcgtcattca

SEQ ID NO: 23519 - DNA, 105 bp, Macaca Mulatta
attgctggaacttgtcttgcattatgtttatcaagtgatttgaaatcattatcagtggtcacagaagtctctaccagtggtgcttcagaagtttcatactttcag

SEQ ID NO: 23520 - DNA, 109 bp, Macaca Mulatta
gaatgtgacccattgaaatgccccagtatttcaacaccagaatgcagagaagaccaattcatgattcaagttcaacaggaagaaccttgttgtttttcccctctttgtg

SEQ ID NO: 23521 - DNA, 394 bp, Macaca Mulatta
gaggcagggtcgctaagacctccagggcctgggcaggagtcatgtttgccattgtgtccagggcaccaggagccccaccaaccccaaagcatgcagagaattagagctcagctcagctgggcatggagtaaggtccctcacaggacccagaagctcaccaaaaactatttcttcagccccttctctggcccaggccctgtgggcatggagatggacagacctgggcctggcacttgagaggtcctagtcagccatagagagctggggaaacctttttaaggtgctcacaaaaatacagtgtgacgtgtactatcatcaaggggtatgttccatgctttgagtcaccaatgaagcgggtgagggaagatgagagtgggaagtgagatcttctggt

SEQ ID NO: 23522 - DNA, 423 bp, Macaca Mulatta
gcagaatggtcctgccagccacagcagggtcccagtggggattttctctgcgcactccaatcctggagaggatgccaggaatggggatgctgaggaaatcagagagcttggtacggttcaagaaaactgagtctcgggcaatttgtgttaaaactaggtgagttgccaaacccaaggcatcttaccaacagctggtttgggggctggtttccctggtgttgtgtgttagctaccctttggcttggcttgttctctccttgtgagctcacctgagccctcccagggccatgttcctgacagtgttggtttttgcacatccactggaaaggtgtcattagtgacccagtgttagaatgcttgaggtcaggttatttcttctagccctcatggctggaggcccattcctggctccaccactcctcc

SEQ ID NO: 23523 - DNA, 783 bp, Macaca Mulatta
gggagaagcgtccgtgccgcgaggaggaggccctgctggtttccgtgcgggctcttgtcaggatggtgaagctgttcatcggaaacctgccccgggaggctacagagcaggagattcgctcactcttcgagcagtatgggaaggtgctggaatgtgacatcattaagaattacggctttgtgcacatagaagataaaactgcagctgaagatgccatacgcaacctgcaccattacaagcttcatggggtgaacatcaacgtggaagccagcaagaataagagcaaaacctcaacaaagttgcatgtgggcaacatcagtcccacttgcaccaataaggagcttcgagccaagtttgaggagtatggtcccgtcatcgaatgtgacatcgtgaaagattatgccttcgtacacatggagcgggcagaggatgcagtggaggccatcaggggccttgataacacagagtttcaaggtgggatgtgtgtgggctgaaattccgagctgcggttgtgcatgagaatacacccttcgtggtaccccatctccgggacgttctcggctctgtgcgttcagtcccctcagaaaccgggaccttaatttaccttgctaaattcagaccttctcctcctttccttttcctttcctctccctgcccattttccctgttcttccgtccttcacaacctctggtagctttcccattcatggttcctgttccccccacagggctccttgttgggcaaaaactgtgggtggggggctgtgcctgtctcctccccgg

SEQ ID NO: 23524 - DNA, 873 bp, Macaca Mulatta
  misc_feature (1)...(873): n = A,T,C or G
ggaactaatctttgcttgttttctactctgtgatctttccataccatatttcattaatgatcagttagtgtcaaggagtcaaatcagattaaaattaatttcatatgtatattgtggaaatttgtggctagtgtgatttttgtttgtttgtttccttttaagtactgttgatcagttgtgacacttactggttaaacttacgttgctaaagatttctctataataagccacacattatatttagactatattaaggaaccttggttttcttctagatagcagctgtcccaaagaaaatatttcttctttgcctgttaagatttatctattatctgccagttgttacgaggttttggttccaaactcaaccagcaatgttgagagcagaacttaagatagctgttgtactttttgctttccatctgttactgtccttcattcttggctccctactatctataaacagctgctgtgaaggagaaaagttgagtaagagttggctnnnnnnnnnnnnnnnnnnnnnnnnnnnnnggttttaggattttcatggtaacaagctctggtatagctaaggctggcaagttcagatactaaaatattatttggtcgtatcttggatccttttgaaaaagttaagactatatgaaggtaaattagaaataagtatgaatattaataaaatagcatttatcttatttctctattttatggttgtgacttaacctaattttatttttttaacattttcttaatttcttgtaatatgaatggctgatattttaaggtagatctatggggggtttcttttggggtttcctaaatggtttatcccctaaactcttaagaaatatttggggagatctgaattttatg

SEQ ID NO: 23525 - DNA, 107 bp, Macaca Mulatta
agatgataaaggatgtagagatgcataacctagccaagagctatttggctgaacttatcaaagaagaatgttggaattcgatggctgtgaaaggtcgagctcttaag

SEQ ID NO: 23526 - DNA, 353 bp, Macaca Mulatta
aaaaggctaataaggaagcaccattaaatggaataacgtgactagaagtagaacacccaaagaagggaagggtcagtcctctgtcattgcagagctcgtggggagtttgtttgttttataattggagagatgagttcactgaattctgacaaaaattgtttctttttttctagggcctgttcttcttgatgaatttgttgagtggcaaaaagtccgtcaaacatcatagcaagaactattgtgaagaaaatgcaaaccttttgattcccacgtgtatacaagctaatgtgatgagggggaaaaaaaatccaacgggtgcattttcattcatgtgaaagacttctcatagtact

SEQ ID NO: 23527 - DNA, 770 bp, Macaca Mulatta
ggggcctcctcccggggaaccgcgtgtgaccttccaacccgcggaccgatgctgccggcggccgctcgccccctgtgggggccttgccttgggcttcgggctgctgcgttccgccttgctaggcgacaggtgccatgcgtctgtgccatgcgacatatgaggagtagcggccatcggaggtgtgaggcccttgctggtgcacccctggataacgcccccaaggagtacccccccaagattcagcaactggtccaggacatcgccagcctcactctcctggaaatctcagacctcaacgagctcctgaagaaaacgttgaagatccaggatgttgggcttgtgccgatgggtggtgtgatgcctggggctgtccctgctgcagcagcccaggaggtggtggaagaagagatccccagagtgaaagaacggacacatttcaccgtccgcctgactgaggcgaaccccgtggacaaagtgaagctgatcaaggaaatcaagaactacgtccagggcatcaacctcgtccaggcaaagaagctggtggagtccctgccccaggaaatcaaagccaatgtcgccaaagccgaggcggagaagatcaaggcggccctggaagcggtgggcggcacggtggttctggagtagctccagctcagaggacttgtattcaggggtccttgggaccctggcgaggtcccgccctcctgtggccactgggcaccacccccagcaccagggcgcccactggaacccgtttggggaaaaccttc

SEQ ID NO: 23528 - DNA, 496 bp, Macaca Mulatta
acacatgtgtcttttcagctggaatatactaattctctagattttggtggtaacaacagaggcaaaaggaatgagtagataggtgtgaaaaaatgttcagagtgcttcttagcttcaaagtacatttttctctcccacaggaagtacttctgtttccggccatgaaacccgaagacaagaaagagaatgtagcaaccactgatacgctggaaagcacaacggttggcacttctgtctagaaaataataattgcaagttgtataactcaggcgtctttgcatttctgcgaaagatcaagtctgcaagggaattcttgtgtgctgctttccatttgacaccgcagttcggttcagccattagaagagagacaaggaattaaaattttctttttaatccttgttaccaaataaaccatttgtctgttctctttacctttagaatgtcaactttgtttcccagactgctggcctaatgaatgtttaggattttaccatct

SEQ ID NO: 23529 - DNA, 285 bp, Macaca Mulatta
aaacttacgatcactcccagactcagccctagtctccttgttacctcagagcccttatggctccaatttcttgccagacacagtcattccctgacttcgcagagctcctcccacccctggaccagttcgagggatccttggtctcaaccaccacatctcagtaccaagatgggaatggctctacggacaaaaagactcgggccccaggtgattaatgaatttataggcggcctgtgtctgcaaagtcctgtggatcccagtggatctggagtggctggttggtct

SEQ ID NO: 23530 - DNA, 4036 bp, Macaca Mulatta
  misc_feature (1)...(4036): n = A,T,C or G
atgatgcgtctccggctcttctgcatcctgctcgccgcggtctcagaagccgagggctggggctacnnnnnnnnnnnnnnnnnnnnnnnnnnnnnnnnnnnnnnnnnnnnnnnnnnnnnnnnnnnnnnnnnnnnnnnnnnnnnnnnnnnnnnnnnnnnnnnnnnnnnggcataagcgggtggtcaccacggattggggatccgaatccctggctccagatagacttaatgaagaagcaccggatccgggccgtggcgacacaaggctcctttaattcttgggactgggtcacacgttacatgctgctctatggcgaccgagtggacagctggacaccgttctaccagcgagggcacaactcnnnnnnnnnnnnnnnnnnnnnnnnnnnnnnnnnnnnnnnnnnnnnnnnnnnnnnnnnnnnnnnnnnnnnnnnnnnnnnnnnnnnnnnnnnnnnnnnnnnnnnnnnnnnnnnnnnnnnnnnnnnnnnnnnnnnnnnnnnnnnnnnnnnnnnnnnnnnnnnnnnnnnnnnnnnnnnnnnnnnnnnnnnnnnnnnnnnnnnnnnnnnnnnnnnnnnnnnnnnnnnnnnnnnnnnnnnnnnnnnnnnnnnnnnnnnnnnnnnnnnnnnnnnnnnnnnnnnnnnnnnnnnnnnnnnnnnnnnnnnnnnnnnnnnnnnnnnnnnnnnnnnnnnnnnnnnnnnnnnnnnnnnnnnnnnnnnnnnnnnnnnnnnnnnnnnnnnnnnnnnnnnnnnnnnnnnnnnnnnnnnnnnnnnnnnnnnnnnnnnnnnnnnnnnnnnnnnnnnnnnnnnnnnnnnnnnnnnnnnnnnnnnnnnnnnnnnnnnnnnnnnnnnnnnnnnnnnnnnnnnnnnnnnnnnnnnnnnnnnnnnnnnnnnnnnnnnnnnnnnnnnnnnnnnnnnnnnnnggcgccgcgcggaagaatctagcctatcggcataacttccgcggctgcatagaaaacgtaatcttcaatcgcgtcaacatcgcagacctggctgtgcggcgccattcccggatcaccttcgaggccagnnnnnnnnnnnnnnnnnnnnnnnnnnnnnnnnnnnnnnnnnnnnnnnnnnnnnnnnnnnnnnnnnnnnnnnnnnnnnnnnnnnnnnnnnnnnnnnnnnnnnnnnnnnnnnnnnnnnnnnnnnnnnnnnnnnnnnnnnnnnnnnnnnnnnnnnnnnnnnnnnnnnnnnnnnnnnnnnnnnnnnnnnnnnnnnnnnnnnnnnnnnnnnnnnnnnnnnnnnnnnnnnnnnnnnnnnnnnnnnnnnnnnnnnnnnnnnnnnnnnnnnnnnnnnnnnnnnnnnnnnnnnnnnnnnnnnnnnnnnnnnnnnnnnnnnnnnnnnnnnnnnnnnnnnnnnnnnnnnnnnnnnnnnnnnnnnnnnnnnnnnnnnnnnnnnnnnnnnnnnnnnnnnnnnnnnnnnnnnnnnnnnnnnnnggttgtcccaagccagccagtcgatgggactgccactccaaccagacgtcattccatgtctgcatggagctgctcaaggtggatgttcagctggtcaacctgactctggtggagttccggcggcttggattctatgctgaggtcctttttgatacatgtggcatcactnnnnnnnnnnnnnnnnnnnnnnnnnnnnnnnnnnnnnnnnnnnnnnnnnnnnnnnnnnnnnnnnnnnnnnnnnnnnnnnnnnnnnnnnnnnnnnnnnnnnnnnnnnnnnnnnnnnnnnnnnnnnnnnnnnnnnnnnnnnnnnnnnnnnnnnnnnnnnnnnnnnnnnnnnnnnnnnnnnnnnnnnnnnnnnnnnnnnnnnnnnnnnnnnnnnnnnnnnnnnnnnnnnnnnnnnnnnnnnnnnnnnnnnnnnnnnnnnnnnnnnnnnnnnnnnnnnnnnnnnnnnnnnnnnnnnnnnnnnnnnnnnnnnnnnnnnnnnnnnnnnnnnnnnnnnnnnnnnnnnnnnnnnnnnnnnnnnnnnnnnnnnnnnnnnnnnnnnnnnnnnnnnnnnnnnnnnnnnnnnnnnnnnnnnnnnnnnnnnnnnnnnnnnnnnnnnnnnnnnnnnnnnnnnnnnnnnnnnnnnnnnnnnnnnnnnnnnnnnnnnnnnnnnnnnnnnnnnnnnnnnnnnnnnnnnnnnnnnnnnnnnnnnnnnnnnnnnnnnnnnnnnnnnnnnnnnnnnnnnnnnnnnnnnnnnnnnnnnnnnnnnnnnnnnnnnnnnnnnnnnnnnnnnnnnnnnnnnnnnnnnnnnnnnnnnnnnnnnnnnnnnnnnnnnnnnnnnnnnnnnnnnnnnnnnnnnnnnnnnnnnnnnnnnnnnnnnnnnnnnnnnnnnnnnnnnnnnnnnnnnnnnnnnnnnnnnnnnnnnnnnnnnnnnnnnnnnnnnnnnnnnnnnnnnnnnnnnnnnnnnnnnnnnnnnnnnnnnnnnnnnnnnnnnnnnnnnnnnnnnnnnnnnnnnnnnnnnnnnnnnnnnnnnnnnnnnnnnnnnnnnnnnnnnnnnnnnnnnnnnnnnnnnnnnnnnnnnnnnnnnnnnnnnnnnnnnnnnnnnnnnnnnnnnnnnnnnnnnnnnnnnnnnnnnnnnnnnnnnnnnnnnnnnnnnnnnnnnnnnnnnnnnnnnnnnnnnnnnnnnnnnnnnnnnnnnnnnnnnnnnnnnnnnnnnnnnnnccggctccgagtggatcaccggccctgggttctgcggcctatgccactgcagacctacatctggatggagtatgaccagcccctctatgtgggnggatctgcagagcttaatagacgcccctttgtgggttgcttgagggccatgcgtctgaatggactgactctgaacctggagggccgtgacaatgcctctgagggaacctcacccaactgtacaggccactgtgcccacccccggctcccctgcttccnnnnnnnnnnnnnnnnnnnnnnnnnnnnnnnnnnnnnnnnnnnnnnnnnnnnnnnnnnnnnnnnnnnnnnnnnnnnnnnnnnnnnnnnnnnnnnnnnnnnnnnnnnnnnnnnnnnnnnnnnnnnnnnnnnnnnnnnnnnnnnnnnnnnnnnnnnnnnnnnnnnnnnnnnnnnnnnnnnnnnnnnnnnnnnnnnnnnnnnnnnnnnnnnnnnnnnnnnnnnnnnnnnnnnnnnnnnnnnnnnnnnnnnnnnnnnnnnnnnnnnnnnnnnnnnnnnnnnnnnnnnnnnnnnnnnnnnnnnnnnnnnnnnnnnnnnnnnnnnnnnnnnnnnnnnnnnnnnnnnnnnnnnnnnnnnnnnnnnnnnnnnnnnnnnnnnnnnnnnnnnnnnnnnnnnnnnnnnnnnnnnnnnnnnnnnnnnnnnnnnnnnnnnnnnnnnnnnnnnnnnnnnnnnnnnnnnnnnnnnnnnnnnnnnnnnnnnnnnnnnnnnnnnnnnnnnnnnnnnnnnnnnnnnnnnnnnnnnnnnnnnnnnnnnnnnnnnnnnnnnnnnnnnnnnnnnnnnnnnnnnnnnnnnnnnnnnnnnnnnnnnnnnnnnnnnnnnnnnnnnnnnnnnnnnnnnnnnnnnnnnnnnnnnnnnnnnnnnnnnnnnnnnnnnnnnnnnnnnnnnnnnnnnnnnnnnnnnnnnnnnnnnnnnnnnnnnnnnnnnnnnnnnnnnnnnnnnnnnnnnnnnnnnnnnnnnnnnnnnnnnnnnnnnnnnnnnnnnnnnnnnnnnnnnnnnnnnnnnnnnnnnnnnnnnnnnnnnnnnnnnnnnnnnnnnnnnnnnnnnnnnnnnnnnnnnnnnnnnnnnnnnnnnnnnnnnnnnnnnnnnnnnnnnnnnnnnnnnnnnnnnnnnnnnnnnnnnnnnnnnnnnnnnnnnnnnnnnnnnnnnnnnnnnnnnnnnnnnnnnnnnnnnnnnnnnnntttggtggcctttctgctgctggggctggtgggaatgttggtgctcttctatctgcaaaatcatcgctacaagggctcctaccataccaacgagcccaaagctgcccacgagtaccatcctggcagcaaacctcccctacccacttcaggccctgcccaggcgcccaccccta

SEQ ID NO: 23531 - DNA, 1177 bp, Macaca Mulatta
  misc_feature (1)...(1177): n = A,T,C or G
gaatgtgtgacccccacagcagccctctcgtgccagagccactttccagcagatacaaactgtacgaggcagagtttaccagcccgagctggccctcnnnnnnnnnnnnnnnnnnnnnnnnnnnnnnnnnnnnnnnnnnnnnnnnnnnnnnnnnnnnnnnnnnnnnnnnnnnnnnnnnnnnnnnnnnnnnnnnnnnnnnnnnnnnnnnnnnnnnnnnnnnnnnnnnnnnnnnnnnnnnnnnnnnnnnnnnnnnnnnnnnnnnnnnnnnnnnnnnnnnnnnnnnnnnnnnnnnnnnnnnnnnnnnnnnnnnnnnnnnnnnnnnnnnnnnnnnnnnnnnnnnnnnnnnnnnnnnnnnnnnnnnnnnnnnnnnnnnnnnnnnnnnnnnnnnnnnnnnnnnnnnnnnnnnnnnnnnnnnnnnnnnnnnnnnnnnnnnnnnnnnnnnnnnnnnnnnnnnnnnnnnnnnnnnnnnnnnnnnnnnnnnnnnnnnnnnnnnnnnnnnnnnnnnnnnnnnnnnnnnnnnnnnnnnnnnnnnnnnnnnnnnnnnnnnnnnnnnnnnnnnnnnnnnnnnnnnnnnnnnnnnnnnnnnnnnnnnnnnnnnnnnnnnnnnnnnnnnnnnnnnnnnnnnnnnnnnnnnnnnnnnnnnnnnnnnnnnnnnnnnnnnnnnnnnnnnnnnnnnnnnnnnnnnnnnnnnnnnnnnnnnnnnnnnnnnnnnnnnnnnnnnnnnnnnnnnnnnnnnnnnnnnnnnnnnnnnnnnnnnnnnnnnnnnnnnnnnnnnnnnnnnnnnnnnnnnnnnnnnnnnnnnnnnnnnnnnnnnnnnnnnnnnnnnnnnnnnnnnnnnnnnnnnnnnttacaagccatccctgttggggtcggtcaggtgtacggctgtgacaatccctggacaggcggtgtgttcctggtggctctgttcatctcctcgccactcatctgcttgcatgcagccattggctcaatcgtggggctgctagcannnnnnnnnnnnnnnnnnnnnnnnnnnnnnnnnnnnnnnnnnnnnnnnnnnnnnnnnnnnnnnnnnnnnnnnnnnnnnnnnnnnnnnnnnnnnnnnnnnnnnnnnnnnnnnnnnnnnnnnnnnnnnnnnnnnnngccctgttctgtgcatacatggaagcagccatctccaacatcttgtcagtgg

SEQ ID NO: 23532 - DNA, 1929 bp, Macaca Mulatta
  misc_feature (1)...(1929): n = A,T,C or G
gaatgtaatctgattgaaggggaagatcatgtagaagtaaatggggaagtttttcaaaagccatttgtagaaaagccagtcagtgcagaagatcacaatgtttacatttattacccaacttctgctggtggtggaagtcaaagactctttagaaagnnnnnnnnnnnnnnnnnnnnnnnnnnnnnnnnnnnnnnnnnnnnnnnnnnnnnnnnnnnnnnnnnnnnnnnnnnnnnnnnnnnnnnnnnnnnnnnnnnnnnnnnnnnnnnnnnnnnnnnnnnnnnnnnnnnnnnnnnnnnnnnnnnnnnnnnnnnnnnnnnnnnnnnnnnnnnnnnnnnnnnnnnnnnnnnnnnnnnnnnnnnnnnnnnnnnnnnnnnnnnnnnnnnnnnnnnnnnnnnnnnnnnnnnnnnnnnnnnnnnnngcaaacagtttgtggctttgatttgttacgggccaatggacagtcctatgtctgtgatgtcaatggcttcagttttgtgaaaaattccatgaagtattatgatgactgtgcaaaaatacttggnnnnnnnnnnnnnnnnnnnnnnnnnnnnnnnnnnnnnnnnnnnnnnnnnnnnnnnnnnnnnnnnnnnnnnnnnnnnnnnnnnnnnnnnnnnnnnnnnnnnnnnnnnnnnnnnnnnnnnnnnnnnnnnnnnnnnnnnnnnnnnnnnnnnnnnnnnnnnnnnnnnnnnnnnnnnnnnnnnnnnnnnnnnnnnnnnnnnnnnnnnnnnnnnnnnnnnnnnnnnnnnnnnnnnnnnnnnnnnnnnnnnnnnnnnnnnnnnnnnnnnnnnnnnnnnnnnnnnnnnnnnnnnnnnnnnnnnnnnnnnnnnnnnnnnnnnnnnnnnnnnnnnnnnnnnnnnnnnnnnnnnnnnnnnnnnnnnnnnnnnnnnnnnnnnnnnnnnnnnnnnnnnnnnnnnnnnnnnnnnnnnnnnnnnnnnnnnnnnnnnnnnnnnnnnnnnnnnnnnnnnnnnnnnnnnnnnnnnnnnnnnnnnnnnnnnnnnnnnnnnnnnnnnnnnnnnnnnnnnnnnnnnnnnnnnnnnnnnnnnnnnnnnnnnnnnnnnnnnnnnnnnnnnnnnnnnnnnnnnnnnnnnnnnnnnnnnnnnnnnnnnnnnnnnnnnnnnnnnnnnnnnnnnnnnnnnnnnnnnnnnnnnnnnnnnnnnnnnnnnnnnnnnnnnnnnnnnnnnnnnnnnnnnnnnnnnnnnnnnnnnnnnnnnnnnnnnnnnnnnnnnnnnnnnnnnnnnnnnnnnnnnnnnnnnnnnnnnnnnnnnnnnnnnnnnnnnnnnnnnnnnnnnnnnnnnnnnnnnnnnnnnnnnnnnnnnnnnnnnnnnnnnnnnnnnnnnnnnnnnnnnnnnnnnnnnnnnnnnnnnnnnnnnnnnnnnnnnnnnnnnnnnnnnnnnnnnnnnnnnnnnnnnnnnnnnnnnnnnnnnnnnnnnnnnnnnnnnnnnnnnnnnnnnnnnnnnnnnnnnnnnnnnnnnnnnnnnnnnnnnnnnnnnnnnnnnnnnnnnnnnnnnnnnnnnnnnnnnnnnnnnnnnnnnnnnnnnnnnnnnnnnnnnnnnnnnnnnnnnnnnnnnnnnnnnnnnnnnnnnnnnnnnnnnnnnnnnnnnnnnnnnnnnnnnnnnnnnnnnnnnnnnnnnnnnnnnnnnnnnnnnnnnnnnnnnnnnnnnnnnnnnnnnnnnnnnnnnnnnnnnnnnnnnnnnnnnnnnnnnnnnnnnnnnnnnnnnnnnnnnnnnnnnnnnnnnnnnnnnnnnnnnnnnnnnnnnnnnnnnnnnnnnnnnnnnnctcaggaatatggtataactaaagctgaaaaactggagattgccaaaggctactgtactcctctggttagaaaaattcgctcagaccttcagaggacacaagatgatgacactgtaaataaacttcatcctgtgt

SEQ ID NO: 23533 - DNA, 791 bp, Macaca Mulatta
cagcagctcccagagccgcaagagcagctgcagccacaagctatcgtcctgcaaccccgagactcgcgacgagacgcagctctgagccagccctgcacggagctcgggccaccaagcccagggtcctcaggaaggacgtggaggagcgtgtgaggacacagtggcactagcgtgaccctggggatgccacactctgctcaccgtggctcctgggactccaccctggaaaggagcgcctcgtgcggggggagggccaactcgggtacctgaaggctagtgaggagagttttttaacctatttttacagaccgatgcagtccacgtctctttacacagatgtaccgtaactcgtgaccagggctggctgggagggcaacgcggggaccagacgccccgcagggccgagcccaggctgtcctggagggtggggctggctggggtgcatggggaggggaagagaacccaggagccctgcatgggccacacccaactcagagccagcctgagctttcatggccaagcggcctcacttccttccagccaaggcctgaggcccggggctgccatgctgcactctgtggggccggtgaggggcaccctctgctctttgctgtcctgagtcccttctggaagtcagaagcagcaaagggcccggggaagccgggcgtgtgtgaggggtgcatccctcaggtgccccagagggccctgttgccaaggacctttctgaaggtcacgagcagaagcagaagacgccatttcctctacttcacactgaactttcccggccactg

SEQ ID NO: 23534 - DNA, 831 bp, Macaca Mulatta
  misc_feature (1)...(831): n = A,T,C or G
cttactcaacatcaaagaattcatactggagagaaaccctataaatgtnnnnnnnnnnnnnnnnnnnnnnnnnnnnnnnnnnnnnnnnnnnnnnnnnnnnnnnnnnnnnnnnnnnnnnnnnnnnnnnnnnnnnnnnnnnnnnnnnnnnnnnnnnnnnnnnnnnnnnnnnnnnnnnnnnnnnnnnnnnnnnnnnnnnnnnnnnnnnnnnnnnnnnnnnnnnnnnnnnnnnnnnnnnnnnnnnnnnnnnnnnnnnnnnnnnnnnnnnnnnnnnnnnnnnnnnnnnnnnnnnnnnnnnnnnnnnnnnnnnnnnnnnnnnnnnnnnnnnnnnnnnnnnnnnnnnnnnnnnnnnnnnnnnnnnnnnnnnnnnnnnnnnnnnnnnnnnnnnnnnnnnnnnnnnnnnnnnnnnnnnnnnnnnnnnnnnnnnnnnnnnnnnnnnnnnnnnnnnnnnnnnnnnnnnnnnnnnnnnnnnnnnnnnnnnnnnnnnnnnnnnnnnnnnnnnnnnnnnnnnnnnnnnnnnnnnnnnnnnnnnnnnnnnnnnnnnnnnnnnnnnnnnnnnnnnnnnnnnnnnnnnnnnnnnnnnnnnnnnnnnnnnnnnnnnnnnnnnnnnnnnnnnnnnnnnnnnnnnnnnnnnnnnnnnnnnnnnnnnnnnnnnnntcagccaaacttccaatcttactcaacatcaaagaattcatactggagagaaaccctataaatgtactgaatgtggaaaggcttttagtgatagctcatcctgtgctcaacatcaaagactccacactggccaaaggccctatcagtgttttgaatgtgggaaggcattcagaagaa

SEQ ID NO: 23535 - DNA, 471 bp, Macaca Mulatta
cctctgtgactcagcataacctaccctgtatttctcccacactgcagtgatgaactgccacctcctcatcctggagaccttcctcatgaccgtgctgacacgaatgtactaccgaaggaaagaccacaaggttgggtacgaaactttctcctctctagacccggacttgaacctccaagcctaaggtggatggcttggatggtgaaaggatgctgtactcattagaatgtaagatttctgtaccgtccctcaaccttgaccaaacggaaagcattccgcttgtcaacacaagctggcagatgacatttgactctacagatgaaggggaacaatgtgtaggataaaattgtatcttgcctggggaaggtgttttaagttttgtaataaacaagatgacgtatgaaaatgtgtaactgggcccactgcctctgtccatgtcactattagcccttcagggttgtatattgctgg

SEQ ID NO: 23536 - DNA, 513 bp, Macaca Mulatta
  misc_feature (1)...(513): n = A,T,C or G
gcgggaaagcgccacaatcccgcctactgtgcggaggaatctgcgagtctcccagctccaccccctcaacagtgatgcaaagaggacaaacaccgacgtagggagnnnnnnnnnnnnnctccagggagcggggagtaggcaaccagcagtcttcggtcaatagggcgagagggagcgcgtcccgaggaaacaagcaccgcataaatacttgagttgggaaccccgtgcttccggaagctcgagctcaccttcccgacttcgccgaagttgaaaaaaggcagagcagggacaggggccggctcaccctgctgagagctgctcagtgggcaggccagacgctgctccgggagacgcccactggagggatcgcagagccaggcaagcggcgagcgcgccaagaacggtgcgcttcgggcgaggagcccaagtcctccgaggcgggagggagcggccctcgagggctggggctccgaagagggccaagtaggcgctggaagacagcatgcgtttctc

SEQ ID NO: 23537 - DNA, 200 bp, Macaca Mulatta
cagaggctctgtgtttggaggtcccgctatcacggccccccagatggggcctggacgatgcctcctgacggccttgctgcttctggctctggcgtcactgccggaagcctcccagtactgcggccgccttgaatactggaacccagacaacaagtgctgcagcagctgcctgcatcgcttcgggccgcccccctgcccgg

SEQ ID NO: 23538 - DNA, 167 bp, Macaca Mulatta
ccgaccgcctgctgcttcagctacacctcccggcagattccacagaatttcatagctgactactttgagacgagcagccagtgctccaagcccggtgtcatcttcctaaccaagcgaagccggcaggtctgtgctgaccccagtgaggagtgggtccagaaatatgt

SEQ ID NO: 23539 - DNA, 300 bp, Macaca Mulatta
tgtgtgaggattgggtccccctctttgttctgtgggggtagatcagtcacaacccctctttggagtcagatttccaatctaaagtggggtggggacccggaggctgctcctggtggcctgagtggcactgccctatgtttctccctctagaataatggacacgttggtatggtagtggtattcctgctcaggatggccaggtgcgagcagtctggcatgaggctcgcctcgtctgtctggttctggactgggtcaaggttcagtccccttgaatcatctgatcctgctttgcgctaaagg

SEQ ID NO: 23540 - DNA, 783 bp, Macaca Mulatta
  misc_feature (1)...(783): n = A,T,C or G
ttttcccagggcactgttgttaccttttttggacctcccaaccaccccaaggggttgcatcctggtcttcaaatccattaaatttttttccactagggaaattgaactttcaaaaactttcccaaattagctttcaggtttccagtggaacaacccattaaaccntatataaagatcccaaatcaatcaaagcaggctgctgctttccttggtaccatcaaatgaatgcaccactccccctacacagcgatctctatttcttttcattatgtccaaaaattcagcatgtgagtttcgacaatgaagaaacattggtaattttgtttgttctgacagttcaaattgtttttcaaaatatttgagttgagtatctttgggacaaaactgtagtcggtcaaaatcaagtccacattctcctattgccacaactttctctttattgttttcagcaagatttagcaactcctttaagtaaagatcagggttattcttttcaaattcaccacatcttgtaggatgacatccaactgtactgaaaaacatatcatttgtttgtgccaaatgcagtgcatctttactgtcttgtagatttccacctgtaatcataaactttttaacaccaatctcgacagctctccctattacatcctgtaagtcatcttgatgcttttgaacccccctataaattcctctgaacatagggtcagtcaagttgataccaatatcgacaaacttgaagcgacccatgaccgcggataggagacctccccggcggaagccccc

SEQ ID NO: 23541 - DNA, 890 bp, Macaca Mulatta
  misc_feature (1)...(890): n = A,T,C or G
gggggaccaaccggacctgaagttgaactggggaganncgatgccctggcngatagacatgtacaccaggaaccgtgtggatacatcccccagacctgtttcttggaatgtcatgtgtatgcacctcttcggtttcctggctttcatgacattcatgttctgggtgggggacgtgtacccttcctaccagcctgtgggaccaaggcagtatccttacnataatctgtacctggaacgaggcggcgatccctccaaagaacctgagctggtggttcactatgagatctgaggaggcttcgtgggcttttgtgtcctcttaactaggactcccttattcctagaaatttaatcttaatgaaatccctaataaaaactcagtgctgtggtcaannnnnnnnnnnnnnnnnnnnnnttaccaaagaacgccaaagaaaaaccgcgcaccgagggaaaaacaatgtaggaacgtcagtcacagcagacgcctcgagcacctaactgaacacnnnnnnnnnnnnnnnnnnnnnnnnnnnnnntggcccctctaagcccctcnnnnnnnnnnnnnnnnnnnnnnnnnnnnnggccccgcgccccccctaggggaaaggtaaaaaagtaggttaagaggtttttttcaaaaaatttctgggacaaaaacacaaggggcggtgttttannnnnnnnnnnnnnnnnnnnnnncggggcgaacaacaaaggttttttcgccacaaatcacagagaggggggtttttggaggagctcttcggggggtcttttaggagaagaaagtgcgcgcgcgggggcccgcaatcctaaatattgtacacccccgccgcggcgcgcccttcttgagagaaaaaacgggcgatctcactccacccaccccc

SEQ ID NO: 23542 - DNA, 426 bp, Macaca Mulatta
aggcaggagacgtgctgccgggctgggctgcccgggggagatgactccacgccagaagggcgcctctgggaagaagaccacgggagaagcaaagtttcagggcagctgaggagccttcgccgcagcccttccgagtctaatcatccccctggctatggagggcgaactctaagatgaatcccgatctggacaccggccacaacacatcagcacctgcccattggggagagttgaaaaatgccaacttcactggccccaaccagacctcgagcaactccacactgccccagctggacatcaccagggccatctctgtggggcctggtgctgggcgcctttctcctcttcgccatcgtgggcaacatcctagtcatccttgtctgtggcctgcaacccgcacctgcggacgccccccaattatttcat

SEQ ID NO: 23543 - DNA, 127 bp, Macaca Mulatta
tgtggagggcagctgtggcttctaatactgggtggcatcccttgtgacccctcccaattgccactcctggccatggaaggtgccactccagtgtccaacagccttgtcctaataaaattaagttgca

SEQ ID NO: 23544 - DNA, 652 bp, Macaca Mulatta
  misc_feature (1)...(652): n = A,T,C or G
tgcaatgactacttggtctatgatagttacctcactccgaggatgatgtgtgctggggaccttcgtgggggccgtgactcctgccaggnagggagacagtggggggcctcttgtctgcgagcagaacaaccgctggtacctggcaggtgtcaccagctggggtacaggctgtggccagagaaacaaacccggtgtgtacaccaaagtgacagaagttcttccctggatttacagcaagatggaggtaagatccctgcaccaggacactgcacccagcagactgggaacttcgtaaggtggggaccctggaggagcacccagggtgtaggcagagatcccctcagcagtctcatattcgggggtgttctggacagggtcaaacgtgatgcctggggtcaatcccagctgcctgtgtttctttccctgcttttcttccctcagaacagagctcagagggttgcaaaagggtgggcctagaggctgggcaggcagttgctaggcagatattcccccagaagtgattttttgtgtcaggttgcaatggactttgaaaacgtttcagtttctgcagaggattttgtgatagtttttgttatcaagcatttatgcatggggaacccgttcttcatggcctttcccagctctgtttgtt

SEQ ID NO: 23545 - DNA, 433 bp, Macaca Mulatta
tatcagctgggcaccagtccctacgtgtaccagctaaccacccgcccagtgaccgacggccagccccacagtgtcaacatcacccgtgtttaccggaacctcttcatccaggtggactacttcccactgacagagcagaagttctcgctgttggtggacagccagttggactcacccaaggccttgtatctagggcgtgtgatggagacaggagtcattgacccggagatccagcgctacaacaccccaggtttctcgggctgcctgtctggtgttcgattcaacaatgtggctcccctcaagacccacttccgaacccctcgacccatgaccgctgagctagctgaagcccttcgagttcagggagaactgtccgaatctaattgcggagctatgccacgtcttgtttcagaggtgccaccagagcttgata

SEQ ID NO: 23546 - DNA, 1779 bp, Macaca Mulatta
  misc_feature (1)...(1779): n = A,T,C or G
gataacaaaagaaaaatggatgagacagatgcttcatcagcagtgaaagtgaaaagagcagtccagaaaacatccgatttaatagtgttgggtctcccatggaaaacaactgaacaggacctgaaagagtattttagtacctttggagaagttcttatggtgcaggtnnnnnnnnnnnnnnnnnnnnnnnnnnnnnnnnnnnnnnnnnnnnnnnnnnnnnnnnnnnnnnnnnnnnnnnnnnnnnnnnnnnnnnnnnnnnnnnnnnnnnnnnnnnnnnnnnnnnnnnnnnnnnnnnnnnnnnnnnnnnnnnnnnnnnnnnnnnnnnnnnnnnnnnnnnnnnnnnnnnnnnnnnnnnnnnnnnnnnnnnnnnnnnnnnnnnnnnnnnnnnnnnnnnnnnnnnnnnnnnnnnnnnnnnnnnnnnnnnnnnnnnnnnnnnnnnnnnnnnnnnnnnnnnnnnnnnnnnnnnnnnnnnnnnnnagattgcgcagtctctttgtggagaggacttgatcattaaaggaatcagcgttcatatatccaatgccgaacctaagcacaatagcaatagacagttagaaagaagtggaagatttggtggtaatccaggtggctttgggaatcagggtggatttggtaatagcagagggggtggagctggtttgggaaacaatcaaggtagtaatatgggtggtgggatgaactttggtgcattcagcattaatccagccatgatggctgctgcccaggcagcactacagagcagttggggtatgatgggcatgttagccagccagcagaaccagtcaggcccatcgggtaataaccaaagccaaggcaacatgcagagggagccaaaccaggccttcggttctggaaataactcttatagtggttctaattctggtgcagcaattggttggggatcagcatcaaatgcagggtcgggcagtggttttaatggaggctttggctcaagcatggattctaagtcttctggnnnnnnnnnnnnnnnnnnnnnnnnnnnnnnnnnnnnnnnnnnnnnnnnnnnnnnnnnnnnnnnnnnnnnnnnnnnnnnnnnaattggtttgttcagtgcggagtatattcagcagtatttttgacatttttctttagaaaaaggaacagttaaaggaatcttataagttttgttacatgaaaggttgaaatagtgagtggttgaaagtgaactgctgtttgcctgattggtaaaccaatacactacaattggtagtaaaaggtttctcctgtaatattttatccctggacttgtcaagtgaattctttgcatgttcaaaatggaaaccacggattagaactacattctttaccccttgttttaatttgaaccccaccatatgcatttttttccttaagaaaatctccttttaggagatcatggtgtcacagtgtttggttctttcactttgttttttaacatttgtctccccttaaatacaaaagtacaatatgaagccttcatttaatctctgcagttcatctcatttcaaatgtttatagaagaagcacttcattgaaagtagtgttgtaaatattctgccatcgtaatacttctgtctacatgctttctcattcaagaattcgtcatcacgcatcacaggccgcgtctttgacggtgggtgtcccatttttatccgctactctttatttcatggagtcgtatcaacgctatgaacgcaaggctgtgatatggaaccagaaggctgtttgaacttttgaaaccttgtgtggcattgatgg

SEQ ID NO: 23547 - DNA, 658 bp, Macaca Mulatta
  misc_feature (1)...(658): n = A,T,C or G
gggcaaggcatattatcaatactagttctcgtttattaaatttgcgtcaagtctctaaaactcgcctttctgaaccaggaactgatctcgtagaaccttcaccaaaacacacacccaacacgtcagacaacgaaggcagtgacacggaggtctgtggtccaaacagtccttctaaacggggaaacagcacaggaataaagttagtgagaaaagagggtggtctggatgacagtgttttcattgcagttaaagaaattggtcgtgatctgtacaggggcttgcctacagaggaaaggatccagaaacctagagttcatgtttggaatagcctacagaatgaaattgatcaggaattggaaccacaatatttccccccnnnnnnnnnnnnnnnnnnnnactggatccaggggaaaaatccctttctcctctgccggcctaacaaaaatcaggtgaaaaggggtaaaaacctctaaaccctttttttagttccccccacaaaaccgggggttttnnnnnnnnnnnnnnnnnnnnnnnnnnnttgttttataaccccgccccctccaaaaaataaacccccctcccccctataatnnnnnnnnnnnnnnnnnnnnnnnnnnnnnnnnnnnaatnnnnnnnnnnnnnnnnnnnccacaaataa

SEQ ID NO: 23548 - DNA, 424 bp, Macaca Mulatta
tcagtatttaacacaaatccagatatcgtggtcatcgttttcatcttaatgatttaacatgccactcagtattaccattattgctgacaacatcacaccataatgcattaaggacaccagatgttgataacccaaagcaaccttttgatgctctaaatactgaagaatgctcttggacacaacaaaataaaagcactgttgatgtggcgtttcaggatcccaatgcagtttacagtgagcttattctttggagggttgacccagttgggccattgtctttttctggaggagtttcagagcttgcccggattaattctcttcatgtttctgccttttccaatgtggcatggctacccactcttatacccagttattgtctgggtaagtattctgattgtttttcagtaatttagatttgctgaca

SEQ ID NO: 23549 - DNA, 3869 bp, Macaca Mulatta
  misc_feature (1)...(3869): n = A,T,C or G
catgaggtaaaaagactcaggtttgacaaagaaagtgaagtcagagaaacagccagtcagacaacttccagtgaaatttcttcagttatggtagaagaaacagaagcatcatcttcatctcaggataaagacaaagaaagccgttgtacccggcagcactgtacagaagaggatgaagaagaggatgaagaggaagaagaagnagagtcttttatgacatcaagagaaatgatcccagaaagaaaaaatcaagaaaaagaatctgatgatgccttaactgtgaatgaagagacttctgaggaaaataatcaaatggaggaatctgatgtgtctcaagctgagaaagatttactacattctgaaggtggtgaaaacgaaggccctgtaagtagtggttcttctgactgccgtgaaacagaagaattagtaggatccaattccagtaaaactggagagattctttcagaatcatccatggaaaatgatgatgaagccacagaagtcaccgatgaaccaatggaacaagactaactatttagaaacatttagatgcagtattttacatacagttctggttttaacactgtataaaacttttatgtaataaagtggacctttagttttacaagagaagcaggttgtaaaataaagtactttatggataattcctgaaagagttgtacannnnnnnnnnnnnnnnnnnnnnnnnnnnnnnnnnnnnnnnnnnnnnnnnnnnnnnnnnnnnnnnnnnnnnnnnnnnnnnnnnnnnnnnnnnnnnnnnnnnnnnnnnnnnnnnnnnnnnnnnnnnnnnnnnnnnnnnnnnnnnnnnnnnnnnnnnnnnnnnnnnnnnnnnnnnnnnnnnnnnnnnnnnnnnnnnnnnnnnnnnnnnnnnnnnnnnnnnnnnnnnnnnnnnnnnnnnnnnnnnnnnnnnnnnnnnnnnnnnnnnnnnnnnnnnnnnnnnnnnnnnnnnnnnnnnnnnnnnnnnnnnnnnnnnnnnnnnnnnnnnnnnnnnnnnnnnnnnnnnnnnnnnnnnnnnnnnnnnnnnnnnnnnnnnnnnnnnnnnnnnnnnnnnnnnnnnnnnnnnnnnnnnnnnnnnnnnnnnnnnnnnnnnnnnnnnnnnnnnnnnnnnnnnnnnnnnnnnnnnnnnnnnnnnnnnnnnnnnnnnnnnnnnnnnnnnnnnnnnnnnnnnnnnnnnnnnnnnnnnnnnnnnnnnnnnnnnnnnnnnnnnnnnnnnnnnnnnnnnnnnnnnnnnnnnnnnnnnnnnnnnnnnnnnnnnnnnnnnnnnnnnnnnnnnnnnnnnnnnnnnnnnnnnnnnnnnnnnnnnnnnnnnnnnnnnnnnnnnnnnnnnnnnnnnnnnnnnnnnnnnnnnnnnnnnnnnnnnnnnnnnnnnnnnnnnnnnnnnnnnnnnnnnnnnnnnnnnnnnnnnnnnnnnnnnnnnnnnnnnnnnnnnnnnnnnnnnnnnnnnnnnnnnnnnnnnnnnnnnnnnnnnnnnnnnnnnnnnnnnnnnnnnnnnnnnnnnnnnnnnnnnnnnnnnnnnnnnnnnnnnnnnnnnnnnnnnnnnnnnnnnnnnnnnnnnnnnnnnnnnnnnnnnnnnnnnnnnnnnnnnnnnnnnnnnnnnnnnnnnnnnnnnnnnnnnnnnnnnnnnnnnnnnnnnnnnnnnnnnnnnnnnnnnnnnnnnnnnnnnnnnnnnnnnnnnnnnnnnnnnnnnnnnnnnnnnnnnnnnnnnnnnnnnnnnnnnnnnnnnnnnnnnnnnnnnnnnnnnnnnnnnnnnnnnnnnnnnnnnnnnnnnnnnnnnnnnnnnnnnnnnnnnnnnnnnnnnnnnnnnnnnnnnnnnnnnnnnnnnnnnnnnnnnnnnnnnnnnnnnnnnnnnnnnnnnnnnnnnnnnnnnnnnnnnnnnnnnnnnnnnnnnnnnnnnnnnnnnnnnnnnnnnnnnnnnnnnnnnnnnnnnnnnnnnnnnnnnnnnnnnnnnnnnnnnnnnnnnnnnnnnnnnnnnnnnnnnnnnnnnnnnnnnnnnnnnnnnnnnnnnnnnnnnnnnnnnnnnnnnnnnnnnnnnnnnnnnnnnnnnnnnnnnnnnnnnnnnnnnnnnnnnnnnnnnnnnnnnnnnnnnnnnnnnnnnnntatgcttttgggtgatttggggggcaacccaagttttgcgttttgactacttaaatcgtcatgactataaataccaaaactatttggatccatttatgtttgtaggatagtatactactgactgacttgactgtcaagttcacaacagctagatgatatatttatgactatgtctaatagttaaaatctgaatattgatttactatatccaagaggggagaaaaattaannnnnnnnnnnnnnnnnnnnnnnnnnnnnnnnnnnnnnnnnnnngcaaatttaagtttagaaattttgagattttcttttgaatatttatgaaattgtcagtaaacctacctaagatcctgtgacctttgatattttttattttaattgtagtgccatggaccatttgtaaacaaattgatttacttttgttggttacaagttgaagatttagcattatgactttgaggtctgtggttttatttgtaaacttgcaattgctgtatttgcaagggcaaatgtatttctttattaaataaagtacaataatggtgaatgtaccaaaatgacatcacttaactctatgagagatctgcagtttaatctatagttttaatatttattagatattcatatgttgatcatagatcaaacttgttgctgtttatacagataattgtagaatgctcatggaatatctttagggtaggtggaatacttctgtagttaaattgggaaagcttgttcagctggttttagataatgatggccatttggaagtaaatttccacaagtattcataggtgcacttaacacagactttgcttaatgaaaatgtcaattctaataataactgattcacttnnnnnnnnnnntgattttacgcatgtttcttaacgtacatcaagcaaagtcctgttaaaagatctaaatgaagaatggagacctcagtgattaaagatactttgtttctgaccttgagcagattacttacctgttctctagactataacccaacatgtnnnnnnnnnnnnnnnnnnnnnnnnnnnnnnnnnnnnnnnnnnnnnnnnnnnnnnnnnnnnnngtattatgtttttagcacttttcccttttaaaaagtgaaaatatccttgtacatttttgaaaaatatatattttcagttctgaaaaatgtagcaaaagtagtgaaaatgtcatattttaaatgttgattattagataaatttaacctgcttagagtttattgtaactacatctttcagaagtgtgttttggagcagtgaaattgccagccaggccttgtggcttggaaaggcatcccagaaatcctcggccagaaagtgtggcctgttaaaagcattgagattcgagtattttgttttgccggtgtagataggcatgtatttatgcatttttgcatttgtaaaatcagcgatttttcaaataatgtaatatactagtttacttaaaggtacttgggcagaatctaaagctgctacaatgtttgattatgaaaaaatgtaacatggtaaggatgaaaatgcaacttataaaaccaaaggaattgaaaattttcggtggtatttcaaattgtcttctgaacaggaatttaacattggttttgataaaatgagggtcagttctcaagatttgtgctaatcataaaatgaatgaatgcaaaacaccttgtaatttcatatggaattataaaaattaggtttactgggttttggcctaataagagtgctagtatgtattggtta

SEQ ID NO: 23550 - DNA, 926 bp, Macaca Mulatta
  misc_feature (1)...(926): n = A,T,C or G
ctacattttcanaatgcgacttggaagagcagcaccatcattatgctgacctggcctgcacagatctgctgtatctgaccagctnnccttttctgatcnactactatgccagtggtgaaaactggatctttggagatntcatgtgtagtttatccgcttcagcttccatttcaacctgtatagcagcatcttcttcctcacctgtttcagcatcttccgctactgtgtgatcattcacccaatgagctgcttttccattcacaaaactcgatgtgcagttgtagcctgtgctgtggtgtggatcatttcactggtagctgtcattcctatgaccttcttgatcacatcaaccaccaggaccaacagatcagcctgtctcgacctcaccagttcggatgaactcactactattaagtggtacaacctaattttgactgcaaccactttctgcctccccttggtgatagtgacactttgctataccacgattattcacactctgacccatggactgcaaacccacagctgccttaagcagaaagctcgaaggctaaccattctgctactcctcgtattttacgtatgttttttacccttccatatcttgagggtcattcggatcgaatctcgcctgctttcgatcagctgttccattgagaatcagatccacgaagcttacatcgtttctagaccattagccgctctgaacacctttggtaacctgttactgtatgtggtggtcagcgacaactttcagcagactgtgtgctcaatagtgagatgtaaagtaagcgggaaccttgagcaagcaaagaaaatcagttactcaaacaacccttgaaatacttcatttacttaaccaaacaataaatacttgctgatactttacctagcactgctaagacgttcaggatgtctccctcaat

SEQ ID NO: 23551 - DNA, 718 bp, Macaca Mulatta
  misc_feature (1)...(718): n = A,T,C or G
tgaagaccaaagaactgattggaagcatgaaaattaatggaagggttgcagcatccacattctcttcagatagtaagaaagtgtatgcctcttcgggggatggagaagtttatgtttgggatgtgaactcaaggaagtgccttaacagatttgttgatgaaggcagtttatatggattaagcattgccacatctaggaatggacagtatgttgcttgtggttccaattgtggagtggtaaatatatacaatcaagattcttgtctccaagaaacaaacccaaagccaataaaagctataatgaacttggttacaggtgttacttctctgaccttcaatcctacttcagaaatcttggcaattgcttcagaaaaaatgaaagaagcagtcagattggttcatcttccttcctgtacagtattttcaaacttcccagtggttaaaaagaagaatatttctcatgttcataccatggatttttctccaagaagtggatactttgccttggggaatgaaaagggcaaggccctgatgtataggttgcaccattactcagacttctaaagagactatttgaagtccagttgagtcacaagataagcctgtcttgatatatcgtctcagaaactttcccgaatgtgtgataatatatggaaaatgatttatagnagtcagtgtgcttaagagccggtaatgtcntaataaacatgtggcagctt

SEQ ID NO: 23552 - DNA, 377 bp, Macaca Mulatta
  misc_feature (1)...(377): n = A,T,C or G
gtgaaagagtttctagccaaagccaaagaagactttttgaaaaaatgggagaatccaactcagnagaataatgccggacttgaagattttgaaaggaaaaaaacccttggaacaggttcatttggaagagtcatgttggtaaaacacaaagctactgaacagtattatgccatgaagatcttagataagcagaaggtnnnnnnnnnnnnnnnnnnnnnnnnnnnnnnnnnnnnnnnnnnnnnnnnnnnnnnnnnnnnnnnnnnnnnnnnnnnnnnnnnnnnnnnnnnnnnnnaggataattctaatttatacatggttatggaatatgtccctgggggtgaaatgttttcacatctaagaagaattggaaggttcag

SEQ ID NO: 23553 - DNA, 865 bp, Macaca Mulatta
  misc_feature (1)...(865): n = A,T,C or G
gggcctttcatcctggtgtttgcctgcagcaagatggcggcggtctcaatgtcagtggcgctgaggcaggcgttgtggcgaagggtagtggctgtagctgccctttccgtttccagggttccgaccaggtcattgagcacttccacatggagattggcacaggaccagactcaagacacacaactcataacagttgatgaaaaattggatatcactactttaactggcgttccagaagagcatataaaaactagaaaagtcaggatctttgttcctgctcgcaataacatgcagtctggagtaaacaacacaaagaaatggaagatggagtttgataccagggagcgatgggaaaatcctttgatgggttgggcatcaacggctgatcccttatccaacatggttctaaccttccgtactaaagaagatgcagtttcctttgctgaaaaaaatggatggagctatgacgtttgaaaagaggaaggttcccaaaccccacgtccaaatccttaatggggcaaacttttttcttggaaccaaaagaacccggagctatcccccaagataaggttgggcgctgcactaatagtccgtggcttggactggcgaataaacggccggcccgcgccaggaattttataatggcctcacacaactgccgctaaattcgtccctaacgacaattttcaaccgttgattaggcttctgcgcgcttagctagtgcatgtgtggacgcatctgccggtanactgtgggcggtggcttgtactttgaagggcgatgagcatgccgcccgggctgtagcgcattaacgatgagcccgaccgacgccgtggcgtgtctgatgattccctcggccggcagc

SEQ ID NO: 23554 - DNA, 147 bp, Macaca Mulatta
agctccagaacaagaataagctgacaatgctagaaggagacattctggatgagtcatgcctgaagagagcctgccaggacatctaagtggtcatccacactgcctctatcattgacgtctttggatcgctcacagagagtctatcat

SEQ ID NO: 23555 - DNA, 170 bp, Macaca Mulatta
agagactcagcagggcccagaaccgtcagcaggtgtgtggttatcactcccccatggctgaggcctccctagagaggaacatgggaaccctaggtggtgtcaacttccctccacagatctcaaaggcttttttggactcaccctggggcaaaggcatgaaaaacagtatt

SEQ ID NO: 23556 - DNA, 815 bp, Macaca Mulatta
  misc_feature (1)...(815): n = A,T,C or G
ggggaagacatagctgcgggtggctgtgctggtggcgttcaagatgtcgaccaagaatttccgagtcagtgacggggactggatttgccctgacaaaaaatgtggaaatgtaaactttgctagaagaaccagctgtaatcgatgtggtcgggagaaaacaactgaggccaagatgatgaaagctgggggcactgaaataggaaagacacttgcagaaaagagccgaggcctatttagtgctaatgactggcaatgtaaaacttgcagcaatgtgaattgggccagaagatcagagtgtaatatgtgtaatactccaaagtatgctaaattagaagaaagaacaggatatggtggtggttttaatgaaagagaaaatgttgaatatatagaaagagaagaatctgatggtgaatatgatgagtttggacgtaaaaagaaaaatacagacggaaagcagttggtcctgcatctatattaaaggagtttgaagataaagaatcctannnnnnnnnnnnnnnnnnnnnnnnngatctttccaaatacaaattagaatgaggatgaagattaaacatgaatgcttaatctcctcaaaaatataaatcttgaatgccccttggagaaaaaaaattgttattaaaaaagaattttttctacaaccaaagtcccctcaaaagatctcggattctttacgtttcacgaattctttcttcaagcttcaatctctcccccctcaagtttcaaggggctaaggttctaggtccccgtttctaaaaactgttctttcccgtttccgcggtcaagaatctcatctttcn

SEQ ID NO: 23557 - DNA, 1798 bp, Macaca Mulatta
  misc_feature (1)...(1798): n = A,T,C or G
gagtcatcctttttgaacttccatgactcagactgtgaacccaagggatcaccaccctgtgactccttgctttccctcaacactgaaaagattctgnnnnnnnnnnnnnnnnnnnnnnnnnnnnnnnnnnnnnnnnnnnnnnnnnnnnnnnnnnnnnnnnnnnnnnnnnnnnnnnnnnnnnnnnnnnnnnnnnnnnnnnnnnnnnnnnnnnnnnnnnnnnnnnnnnnnnnnnnnnnnnnnnnnnnnnnnnnnnnnnnnnnnnnnnnnnnnnnnnnnnnnnnnnnnnnnnnnnnnnnnnnnnnnnnnnnnnnnnnnnnnnnnnnnnnnnnnnnnnnnnnnnnnnnnnnnnnnnnnnnnnnnnnnnnnnnnnnnnnnnnnnnnnnnnnnnnnnnnnnnnnnnnnnnnnnnnnnnnnnnnnnnnnnnnnnnnnnnnnnnnnnnnnnnnnnnnnnnnnnnnnnnnnnnnnnnnnnnnnnnnnnnnnnnnnnnnnnnnnnnnnnnnnnnnnnnnnnnnnnnnnnnnnnnnnnnnnnnnnnnnnnnnnnnnnnnnnnnnnnnnnnnnnnnnnnnnnnnnnnnnnnnnnnnnnnnnnnnnnnnnnnnnnnnnnnnnnnnnnnnnnnnnnnnnnnnnnnnnnnnnnnnnnnnnnnnnnnnnnnnnnnnnnnnnnnnnnnnnnnnnnnnnnnnnnnnnnnnnnnnnnnnnnnnnnnnnnnnnnnnnnnnnnnnnnnnnnnnnnnnnnnnnnnnnnnnnnnnnnnnnnnnnnnnnnnnnnnnnnnnnnnnnnnnnnnnnnnnnnnnnnnnnnnnnnnnnnnnnnnnnnnnnnnnnnnnnnnnnnnnnnnnnnnnnnnnnnnnnnnnnnnnnnnnnnnnnnnnnnnnnnnnnnnnnnnnnnnnnnnnnnnnnnnnnnnnnnnnnnnnnnnnnnnnnnnnnnnnnnnnnnnnnnnnnnnnnnnnnnnnnnnnnnnnnnnnnnnnnnnnnnnnnnnnnnnnnnnnnnnnnnnnnnnnnnnnnnnnnnnnnnnnnnnnnnnnnnnnnnnnnnnnnnnnnnnnnnnnnnnnnnnnnnnnnnnnnnnnnnnnnnnnnnnnnnnnnnnnnnnnnnnnnnnnnnnnnnnnnnnnnnnnnnnnnnnnnnnnnnnnnnnnnnnnnnnnnnnnnnnnnagctatgggtttggctgccttggaggtcatgcaagccgtacagcgtacatggaccaactcgaaagttcgaatgaatggaaagacacggttgatgcagtggagagacatgtttgacattgcggttaaatggagaaggnnnnnnnnnnnnnnnnnnnnnnnnnnnnnnnnnnnnnnnnnnnnnnnnnnnnnnnnnnnnnnnnnnnnnnnnnnnnnnnnnnnnnnnnnnnnnnnnnnnnnnnnnnnnnnnnnnnnnnnnnnnnnnnnnnnnnnnnnnnnnnnnnnnnnnnnnnnnnnnnnnnnnnnnnnnnnnnnnnnnnnnnnnnnnnnnnnnnnnnnnnnnnnnnnnnnnnnnnnnnnnnnnnnnnnnnnnnnnnnnnnnnnnnnnnnnnnnnnnnnnnnnnnnnnnnnnnnnnnnnnnnnnnnnnnnnnnnnnnnnnnnnnnnnnnnnnnnnnnnnnnnnnnnnnnnnnnnnnnnnnnnnnnnnnnnnnnnnnnnnnnnnnnnnagttggcaatatattattttctgtggaaactcaaaccacggaagaaaggacacaattatatcatgctgaaatagatgcgctttataaagatttgacagcaaaaggaaaagtattgattctttcatcagaatttgggg

SEQ ID NO: 23558 - DNA, 847 bp, Macaca Mulatta
  misc_feature (1)...(847): n = A,T,C or G
ggaagtgcgctcggtgtatttcctgtggtgggtgtacatgcagctagacacagctaacttgagtcttggagctcctagaggggagcttctggaaaggaagcttcttcaggacctcnnnnnnnnnnnnnnnnnnnnnnnnnnnnnnnnnnnnnnnnnnnnnnnnnnnnnnnnnnnnnnnnnnnnnnnnnnnnnnnnnnnnnnnnnnnnnnnnnnnnnnnnnnnnnnnnnnnnnnnnnnnnnnnnnnnnnnnnnnnnnnnnnnnnnnnnnnnnnnnnnnnnnnnnnnnnnnnnnnnnnnnnnnnnnnnnnnnnnnnnnnnnnnnnnnnnnnnnnnnnnnnnnnnnnnnnnnnnnnnnnnnnnnnnnnnnnnnnnnnnnnnnnnnnnnnnnnnnnnnnnnnnnnnnnnnnnnnnnnnnnnntggaacgctgaccttatcctgtacggcctgcagccgcttccccaacttcagcatgctctactggctgggcaatggttccttcattgagcacctcccaggccagctgtgggaggggagcaccagnnnnnnnnnnnnnnnnnnggctgggctgaggacaaccttgccccccacccaagaagccctgccctccagccacagcangccacagcagcccacagcagcagggttaagactcagcacagggccagcagcagcacgaccttgaccagagcctgggtcctacccgtctacctgaagtcaacagtccctgactgcctgcaggctgtgtgggcgagcaacgcgccccctcctcctctgctttgggtcccttctctcaccaaattccaactccattcccacctacctggaaaatcgcagcctccttataat

SEQ ID NO: 23559 - DNA, 1530 bp, Macaca Mulatta
  misc_feature (1)...(1530): n = A,T,C or G
gagctggtggagaagagttcggggttctagagtactggatgaggctgcgtttccccataaaacccagcctacaggcatgcaataaacgaaagaaaggccagggcgacctgtcaannnnnnnnnnnnnnnnnnnnnnnnnnnnnnnnnnnnagttcagattggagtcttgggaacctcagaacgagctgcagattgaaatcaccaagtgctgtggcctccggagtcgatggctgggaactcaacccagtccatatgctgtgtaccgcttcttcaccttttctgaccatgacactgccatcattccagctagtaacaacccctactttagagaccaggctcgattcccggtgcttgtgacctctgacctggaccaatatctgagacgggaggccctgtctatacatgtttttgatgatgaagacttagagcctggctcatatcttggccgagcccaagtgcctatactgcctcttgcaaaaaatgaatctatcaaaggtnnnnnnnnnnnnnnnnnnnnnnnnnnnnnnnnnnnnnnnnnnnnnngtgcaactggattggaagtttccctacataccccctgagagtttcctgaaaccagaagctcagactaaggggaaggataccaaggacagttcaaagatctcatctgaagaggaaaaggcttcatttccttcccaggnnnnnnnnnnnnnnnnnnnnnnnnnnnnnnnnnnnnnnnnnnnnnnnnnnnnnnnnnnnnnnnnnnnnnnnnnnnnnnnnnnnnnnnnnnnnnnnnnnnnnnnnnnnnnnnnnnnnnnnnnnnnnnnnnnnnnnnnnnnnnnnnnnnnnnnnnnnnnnnnnnnnnnnnnnnnnnnnnnnnnnnnnnnnnnnnnnnnnnnnnnnnnnnnnnnnnnnnnnnnnnnnnnnnnnnnnnnnnnnnnnnnnnnnnnnnnnnnnnnnnnnnnnnnnnnnnnnnnnnnnnnnnnnnnnnnnnnnnnnnnnnnnnnnnnnnnnnnnnnnnnnnnnnnnnnnnnnnnnnnnnnnnnnnnnnnnnnnnnnnnnnnnnnnnnnnnnnnnnnnnnnnnnnnnnnnnnnnnnnnnnnnnnnnnnnnnnnnnnnnnnnnnnnnnnnnnnnnnnnnnnnnnnnnnnnnnnnnnnnnnnnnnnnnnnnnnnnnnnnnnnnnnnnnnnnnnnnnnnnnnnnnnnnnnnnnnnnnnnnnnnnnnnnnnnnnnnnnnnnnnnnnnnnnnnnnnnnnnnnnnnnnnnnnnnnnnnnnnnnnnnnnnnnnnnnnnnnnnnnnnnnnnnnnnnnnnnnnnnnnnnnnnnnnnnnnnnnnnnnnnnnnnnnnnnnnnnnnnnnnnnnnnnnnnnnnnnnnnnnnnnnnnnnnnnnnnnnnnnnnnnnnnnnnnnnnnnnnnnnnnttaaagtttacagtggtaagtgatcctctggatgaagaaaagaaagaatgtgaagaagtaggatatgcgtatcttaaactgtggcagatcctggagtcaggaagagatattctagagcaagagctagaca

SEQ ID NO: 23560 - DNA, 106 bp, Macaca Mulatta
aggttgcttccataagacagcatcttgcatctatatatgagaaagaagaagattggagaaatgcagcccaagtgttggtgggaattcctttggaaacaggacaaaa

SEQ ID NO: 23561 - DNA, 723 bp, Macaca Mulatta
  misc_feature (1)...(723): n = A,T,C or G
aggggggatggtggttttcttcacaccggggatgggccatccttgggtttatggtgaagatccacccaagaacatccaggctttattttatgagcttgaatccctcaggctgctactggatttgtggctgataaaaaagagaggccannnnnnnnnnnnnnnnnnnnnnnnnnnnannnnnnnnnnnnnnnnnnnaggtggaccacctgacgccaggagtttgaaacacgcccggccaacatggtgaatatcgtatctacttaaaaatacaaaaagtagccgggcatggtggtgagnnnnnnnnnnnnnnnnnnnnnnncaggctgaagnnnnnnnnnnnnnnnnnnntaggaggccgcaggttccagtgagccaagatggcgccactgtnnnnnnnnnnnnnnnnnnnncagagattctctcaacaacaacaaacagagcacagctgtgttgttagttcttaagcaagggcaagcttaccaaggacttagacagaaggttgacgaggatgacagggaactaagagggagggatgccatggttgaaaacatggctgcggcagcgagaagtctaagatgagatcccaagagtcgcacgaacatgcagttccagcacgtaattctccccagggatgcggatcgacggcagccacaagtctatagccagtgacaactgatctctgagatcccatcagagtcgatttcaagatgaaggagaaacccc

SEQ ID NO: 23562 - DNA, 636 bp, Macaca Mulatta
  misc_feature (1)...(636): n = A,T,C or G
ttgagtagcagtgtccctcaccaccattccccctcaggattacaacacctgctatcaaatcatctaagctgaaaacattagatgcacttggaaaggcctagtcagaagccatttcctcttatcatttccctctcctatgcaccagtgaggcccatccagagccccagcagggggtgggccctgagtccacactgtccctgagtgatccaggaggctgcccacatccccacatgtgcactgtggttccagtgtagctgctgtgggcccactgccaccgcctcaggagggagccactgtgaaccacttgagtggctccaaagagcagtggctttttgagaatggcccatactactggccaagctggatgaaggggatgccgaccccttggcctctcccactcctccttccatctcttccgtctcttgccctctctctctttctacttnnnnnnnnnnnnnnnnnnnnnnnnnnnnnnnnnnnnnnnnnnnnnnnnnnnnnnnnnnnnnnnnnnnnnnnnnnnnnnnnnnnnnnnnnnnnnnnnnnnnnnnnnnnnnnnnnnnnnnnnnnnnnnnnnnnnnnnnnnnnnnnnnnnnnnnnnnnnnnnnnnnnnnnnnnnnnnnnnnnnnnnnnnnnnnn

SEQ ID NO: 23563 - DNA, 689 bp, Macaca Mulatta
ggtcctcatgttatttattgccgaaaccaggcaggcaaccccaagggcaccaaccagggcctccccaaagcctgggcctttgtggccgccactgaccaaagggaccttgctcgtgcctctggctgcccatatgtggctgccactgaccactcagttgttatctgtgtccatttttctacttgcagacttaaggtggagtaacaaggagtattaccaccacatggctactgaccgtgtcatcggggaagagggggccttatggcagggaaaataggtaccgtcttgatggaagtcacaccctctggaaaaaagaactctcaactctccagcacacatacacatggactcctggcagcttgagcctagaagccatgtctctcaaatgccctgagaaagggaacaagcagataccaggtcaagggcaggaggttcatttcagccttcacatggacagctagaggttcaatctctgtgggtccttccaggcaaaaggagggaggtgagagcaagagaaggctgaagtcccaccctagagcccagcctgccccctgggcggaggaaacttaaccactccccagacccacctaagcaggcatataggctgccatcctggaccagggatcctggctgtgcttttgcagtcatgcccctgagtcacctttcacagtgctgttcctccatgaaactga

SEQ ID NO: 23564 - DNA, 701 bp, Macaca Mulatta
tacaatagtataaattttataatgatgaatttataatgattaagggacatttctatcaaaatactacaatagttttatgcacaacttcccattaaaaataagatttcttatttgtttgttagtttgtttttactctgggagtaatactttttaaattacctttacatatatagtcgctggtatacttagaatatacaatgatcttggaaactgcggtaacaaaagcacacaatgattatagtaactatcagatacaataaaacaaataaatgtgaaaatagattcatgaaaatgtattcctttaaagtattgttttcctacaggcctatttaacaagaggtttcattttattgtatattttgtacttaatataaatgttgctctaatcagattgcttaaaagcatttatatttatgttgttgaactaatatatgaaataagtaaatgtagctcccacaaggtaaacttcattggtaagattgcactgttttgattatgtaaacatttatacatcttctttgaaaataaaatataaaagagctatatacaaagctttcttttctaacttttccaagcaaaatctgaaatgttttatgactggcatttatctggctgtgatcttaaaataattcacatctaaatagtattttgtctagaagatgctttctctctagtagttagaaattaaacctgtgtcagca

SEQ ID NO: 23565 - DNA, 170 bp, Macaca Mulatta
atgtatggacacacacaaacaaaaaagcatgaaggaagatttggatccaagcagtgccacactttacgtcatcactacaagtgttcaagtgtaaagaaaaccaattttgaaactatgaaattcctgattcataaatacacagttatttctactttagtacatataagata

SEQ ID NO: 23566 - DNA, 698 bp, Macaca Mulatta
aattcagtgaaaacaaatcccttaagctcctagtctgatactaggactacatgagtcattctctttttagaaatcggtaagttctcttcccacagttctttacctgaaacatggtggaaagtccctaaatccctacaaggcattaagctagtctactagtaggaagaggtcatggcatttttctctcaagaaagtcctattcttattgtccaatctttttgtgcgtttgtccctagcatggcctggctctccttcacctgctgcatggcgtcagctgtcaccaccttcaacacgtacaccaggatggtgctggagttcaagtgcaagcatagtaagagcttcaaggaacccccgaactgccgaccacatcaccaccggtgtttccctcggcagctgtcaagtgcagcccccaccacgggttctttgaccggctaccaccagtatcataatcagcccatccactctgtctctgagggagtcgacttctactctgagctgcggaacaagggatttcaacgagaggccagccaggagctgaaagaagcagttaggtcatctgtagaggaagagcagtgttaggagttaagcgggtttggggagtaggcttgagccccaccttacacgtctgcggattatcaacatgtgcttaagccaacgtccgtctcttgagcatggtttttagaggctatgaataaggg

SEQ ID NO: 23567 - DNA, 1363 bp, Macaca Mulatta
  misc_feature (1)...(1363): n = A,T,C or G
tggaggtggaggaggcgttccaggcggtgggggagatgggcatctaccagatgtacttgtgcttcctgctggccgtgctgctgcagnnnnnnnnnnnnnnnnnnnnnnnnnnnnnnnnnnnnnnnnnnnnnnnnnnnnnnnnnnnnnnnnnnnnnnnnnnnnnnnnnnnnnnnnnnnnnnnnnnnnnnnnnnnnnnnnnnnnnnnnnnnnnnnnnnnnnnnnnnnnnnnnnnnnnnnnnnnnnnnnnnnnnnnnnnnnnnnnnnnnnnnnnnnnnnnnnnnnnnnnnnnnnnnnnnnnnnnnnnnnnnnnnnnnnnnnnnnnnnnnnnnnnnnnnnnnnnnnnnnnnnnnnnnnnnnnnnnnnnnnnnnnnnnnnnnnnnnnnnnnnnnnnnnnnnnnnnnnnnnnnnnnnnnnnnnnnnnnnnnnnnnnnnnnnnnnnnnnnnnnnnnnnnnnnnnnnnnnnnnnnnnnnnnnnnnnnnnnnnnnnnnnnnnnnnnnnnnnnnnnnnnnnnnnnnnnnnnnnnnnnnnnnnnnnnnnnnnnnnnnnnnnnnnnnnnnnnnnnnnnnnnnnnnnnnnnnnnnnnnnnnnnnnnnnnnnnnnnnnnnnnnnnnnnnnnnnnnnnnnnnnnnnnnnnnnnnnnnnnnnnnnnnnnnnnnnnnnnnnnnnnnnnnnnnnnnnnnnnnnnnnnnnnnnnnnnnnnnnnnnnnnnnnnnnnnnnnnnnnnnnnnnnnnnnnnnnnnnnnnnnnnnnnnnnnnnnnnnnnnnnnnnnnnnnnnnnnnnnnnnnnnnnnnnnnnnnnnnnnnnnnnnnnnnnnnnnnnnnnnnnnnnnnnnnnnnnnnnnnnnnnnnnnnnnnnnnnnnnnnnnnnnnnnnnnnnnnnnnnnnnnnnnnnnnnnnnnnnnnnnnnnnnnnnnnnnnnnnnnnnnnnnnnnnnnnnnnnnnnnnnnnnnnnnnnnnnnnnnnnnnnnnnnnnnnnnnnnnnnnnnnnnnnnnnnnnnnnnnnnnnnnnnnnnnnnnnnnnnnnnnnnnnnnnnnnnnnnnnnnnnnnnnnnnnnnnnnnnnnnnnnnnnnnnnnnnnnnnnnnnnnnnnnnnnnnnnnnnnnnnnnnnnnnnnnnnnnnnnnnnnnnnnnnnnnnnnnnnnnnnnnnnnnnnnnnnnnnnnnnnnnnnnnnnnnnnnnnnnnnnnnnnnnnnnnnnnnnnnnnnnnnnnnnnnnnnnnnnnnnnnnnnnnnnnnnnnnnnnnnnnnnnnnnnnnnnnnnnnnnnnnnnnnnnnnnnnnnnnnnnntcaggaatgttgggcttggaacttgttccatgttctcccgagttggtgggattattgctcccttcatcccctcact

SEQ ID NO: 23568 - DNA, 1229 bp, Macaca Mulatta
  misc_feature (1)...(1229): n = A,T,C or G
ggggcagttcggcggtcccgcgggtctgtctcttgcttcaacagtgtttggacggaacagatccggggactctttcttccagcctccgagcgccctccgatttcctctccacttgcaacctccgggaccatcttctcggccatctcctgcttctgggacctgccagcaccgtttttgtggttagctccttcttgccgaccaaccatgagctcccagattcgtcataattattccaccgtacgtggaggcagccgtcaacaacctggtcaatatgtacctgcaggcctcttacacctacctctctctgggcttctatttcaaccgcgatgatgtggctctggaaggcgtgagccactttcatccgcgaattgggcgatagataaccgcgaggggccactagcgttctccagaaatatggcaaaaccatgccgtgggcgagccgaaactctttttttcaaggaacggtcaaagaaatcacaacctagcaaaaaatttaaatttggggggtataaaaacccccccgagcaaaagccccattttaaaaatgacccctgagaccattctgggtacccacccattgggctaatagaaaaataacatataccttttgtttaatatatctcccgcgggagacgtccacccccattttgctttagcgtgggtgcgtaaattttattctctttttttcaccatataaatggagccatccccccaccctgaagatgggggggggttctttttttgtcagtagggggcggcatgccctccgaaaaaaatattacaaatgctaaatattttcgctaccccccgctgattgctcaatttccccgagtgtgggggtgggaaaaaaaatctgtaaccatgttggggaggagaaaatggtaactctcaccgaagctcgttttttttccgttaaaatggataaatttgtaaatggggtccaaaaaaaatatgggaataaacccttttcctttttacacaaacgnacttcaattgtattcatgcgggggggggtagataaaccctcaaatcgagtggtgatacccataatgttaccgctacttctaccccataaggggcctaatggggactctgaagggcccaaaagtgcacataatactattagggaactacagctggtgctacngagaactgaccactccgtcttattcgtataaaataatgcttatcatatatagtttccaagaaacacacctctatattatttt

SEQ ID NO: 23569 - DNA, 250 bp, Macaca Mulatta
agaacatcatgaaaaataaatgaactttgcttagtggattcattcctttgctgaagtcaggtattcatcaaaaatgcagttagactaattgtgaataaatgattgaattaagatataataaataaaagctataattatagatagctcttgttagaattttctttagcaatattcctgccccttaccccttgttttgcccttaatgttttttcctttgatggggatggtatacactgtactgagaaattgt

SEQ ID NO: 23570 - DNA, 276 bp, Macaca Mulatta
ttactatagcatctgctcccacccctaggacaagatcccctaatgaggggccggcaggtgggcgtgggggccacaggcacagcttggtttctcagctttgctcccctatcctctgcttccccatgaatctctcatccagccctgcagggatctgcctggccagcggtgagcctgagcccctttcatccggggacctgccgacctgccgtccgtggctcacatcctcctgggtgaagaatgtcaccttgcttcctatctgcctctctcgtggttggc

SEQ ID NO: 23571 - DNA, 345 bp, Macaca Mulatta
  misc_feature (1)...(345): n = A,T,C or G
cagatccaggtgttcctgctggggggcagccgcaagcgtgtgctggtgcgtgtggagcgggccacggtgttcagcgtggagcaggacaatgttctggaactggccgacgcctactacctggggggcgcgccgcccgaccagctgcccccgagnagcctgcgacggctcttccccatgggaggctcagtccgtggctgcgtcaaagggatcaaggccctgggcaagtatgtggacctcaagcggctgaacacaacaggcgtgagcgccggctgcaccgctgacctgctggtgnggtggggcgcgccatgactttccacggccacggcttccttcacctggcgctct

SEQ ID NO: 23572 - DNA, 988 bp, Macaca Mulatta
  misc_feature (1)...(988): n = A,T,C or G
taacaggacagggagttctgctcaggcacgtggccacagaaaactacttgggaagcctgcggtgagaacaacagctcctggagaatcccaccactctggtgaagtgagccccaaggatgaggctgctcgcctggccgattttcctggcccactggggaggtgccagggctgaaccaggnnnnnnnnnnnnnnnnnnnnnnnnnnnnnnnnnnnnnnnnnnnnnnnnnnnnnnnnnnnnnnnnnnnnnnnnnnnnnnnnnnnnnnnnnnnnnnnnnnnnnnnnnnnnnnnnnnnnnnnnnnnnnnnnnnnnnnnnnnnnnnnnnnnnnnnnnnnnnnnnnnnnnnnnnnnnnnnnnnnnnnnnnnnnnnnnnnnnnnnnnnnnnnnnnnnnnnnnnnnnnnnnnnnnnnnnnnnnnnnnnnnnnnnnnnnnnnnnnnnnnnnnnnnnnnnnnnnnnnnnnnnnnnnnnnnnnnnnnnnnnnnnnnnnnnnnnnnnnnnnnnnnnnnnnnnnnnnnnnnnnnnnnnnnnnnnnnnnnnnnnnnnnnnnnnnnnnnnnnnnnnnnnnnnnnnnnnnnnnnnnnnnnnnnnnnnnnnnnnnnnnnnnnnnnnnnnnnnnnnnnnnnnnnnnnnnnnnnnnnnnnnnnnnnnnnnnnnnnnnnnnnnnnnnnnnnnnnnnnnnnnnnnnnnnnnnnnnnnnnnnnnnnnnnnnnnnnnnnnnnnnnnnnnnnnnnnnnnnnnnnnnnnnnnnnnnnnnnnnnnnnnnnnnnnnnnnnnnnnnnnnnnnnnnnnnnnnnnnnnnnnnnnnnggtgtacattgttggcaacgtgcccccagggttctttgagaagacacaaaacaaggcatggtcccaggagggcttcaacgaaaaatacctgaaggtggtccggaagcatggtcgcgtcatagcagggcagttcttcaggcaccaccacactgacagctttcggatgctctatgatgacgcagg

SEQ ID NO: 23573 - DNA, 800 bp, Macaca Mulatta
  misc_feature (1)...(800): n = A,T,C or G
ggggtgcttcaggactttttgcttctatatttaagtatattgtttttatagcaagaacatattctgaatgtgttttataaatctttaataatttatatataggtaatatttttgtatcacagtgcattatttttttcctcctttccttccaaagtataccactgtatttaccacttctaagagtgactgacgacaggccagatgacccttgaagtagtcattatgtagcaataaatgaagcctgaaacaggtttttttacttccactttaatccttagaaatttcttggcaactcagcatattttcactgacaccaatgtataagtataaatttaaatgaactaattacttttgcatattttaaattctttatatggtagttattttttataacaggatattaacataagttaaatcctatgtatttgaaattgttacagagctttcctcttcaaacatcaaaaaagtggggggcatactgtagtcctgtcatttatgtaaaaaatttaatcattattttgatgctttaaatattcttatgtgtaatatgtttttgtatcaaaaacactgatatatttcaagaaaaataaattatgttaaatagccctgtttttagaaaaatatttatgaagcatctccacttgaagatcaagtcaaagttataactcaggatctgaggtctcaagctaggaaagactganaattttaatcagtttgggcatatagtttggactgaatcccatctgtagtactagccaaggacattttgaaggaagatatccgcctttctgggaagtaca

SEQ ID NO: 23574 - DNA, 544 bp, Macaca Mulatta
  misc_feature (1)...(544): n = A,T,C or G
ctcagcatgctcaggaacgggggcctcctcttcagaatgaccctgctcacctccggaggggctgggatgctctatgtgcgctggaggatcatgggcacgggcccgccggccttcaccgaggtggacaacccggcgtcctttgctgacagcatgctggtgagggnggccataaactacaattactactattcattgaatgcctggctgctgctgtgtccctggtggctgtgttttgattggtcaatgggctgcatccccctcattaagtccgtcagtgactggagggtaattgcacttgcagcactctggttctgcctaattggcctaatatgccaagccctgtgctctgaagacagccacaagagaaggnaggatccttactctgggcctgggatttctcgttatcccatttctccccgcgagtaacctgttcttccgagtgggcttcgtggtggcggagcgagtcctctacctccccagtgttgggtactgtgtgctgctgacttttggatttggagccctgagcaaacataccaagaaaaag

SEQ ID NO: 23575 - DNA, 782 bp, Macaca Mulatta
acgaggcattcgcttagccagtctccattgaatcaatgggtgcagacagaaagccagtcagactaatttccttctttcctcgcacttctccccactcgtcatcttttaactagtgtttcacaaggatcctctgaaaccctctctgtgccccaagcacagatcccattacttctgctttcgtatctcctcaggcaaaagtggagggtgccttatgggccctcctcataggttgtctctgcatacacgaacctaacccaaatttgctttggtgccagaaaaactgagctatgtttgaacaaagatatcgtgcaaagtgtactgtgaacaacagttgatttaaaatatgaggggcaaggaggaggatgtatttcaaaagcttgattgatgtgttaagagccaaattaagaggagttttcagatcaaaaattggttaccattttttgtcacagtgtctgatgcagccactcattcggctccccagaattcctagactgggttaatagggtcatattgtgaatgtctcactacaaagtgacttgagtccagtgaaatcttattagggttaagaatatttcagggatccttaatgttttgattttagttttctgaaattggattttattttatcttataatttcagttcatctaaattgtgtgttctgtacatgtgatgtttgactgtaccattgactggtctgggaagtttcacgttggatgtctctctctatactggggtgcactttactttgtggaattttatacttaaaatgtcgaataagact

SEQ ID NO: 23576 - DNA, 756 bp, Macaca Mulatta
  misc_feature (1)...(756): n = A,T,C or G
ggggggcagaggtttctgggagcccggagtcgtaatggcgtctgtatgatcttcggagattgctgcatcggacctcggccagtcataaaagatgacaacagcagccaggccaacctttgaacctgcaagaggtggaaggggaaaaggagaaggtgatttgagccaactttcaaagcagtattcaagcagagacctaccctctcacacaaagataaaatacagacaaactactcaggatgcccctgaagaggttcgtaaccgtgacttcaggagagagttggaagaaagagagagagctgctgcaagagagaaaaacagagatcgtccaacccgagaacatacaacctcctcttcagtgtcaaaaaagccacggttagaccagattcctgctgccaaccttgatgcagatgaccctctannnnnnnnnnnnnnnnnnnnntttgaagaagaaagtgatgatgatgatactgcagctcttcttgcagaactggaaaaaattaaaaaggaaagagctgaagagcaggccaggaaggaacaagaacaaaaagctgaagaagagaggattcgtatggaaaacattctgagcggaaaccctctccttaatctcactggcccatcgcagcctcaggccaacttccaagttaaaagaaaggtgggaatgatgatgtttgtctttcaagaaactgttgcaaaaaagttggtagatggacccaggaagaaaagatccaaaggaattttgtaaaatggacacaactt

SEQ ID NO: 23577 - DNA, 225 bp, Macaca Mulatta
actcggtgcgggagatgttcgagtcgcagaggatcggcttgaacaactctccagtgaacgggaatagtagctgtcaaatggccttcccttccagccagtataagtaccgcacgtccggagctttcgtctatgactgtagcaagttctgacaccctctcaaagccgaactgaatcgaaccccaaagcaggaaaagccaaaggaacccatcaaggcaaaatcgaaac

SEQ ID NO: 23578 - DNA, 624 bp, Macaca Mulatta
  misc_feature (1)...(624): n = A,T,C or G
aggagtgtgccgaccctgagaaccataaggtccgccagaaactgaaggccaaggagtgggatgagttcctggctaaggggaagcgctttcgcgtcctgcagcccgtcaagattggctgcgtgtgggcagctgacagagactgcgcaggcgacgacctgaaggtactgcagcagttcgcagcctgcttcctggagaccgtgcctgtccaggaggagcagacgcccaaggcctccaannnnnnnnnnnnnnnnnnnnnntcctggcccagctgctgccgctcctgcaaaacaacgtgaacgggagcaaggtcatcatccgggaattccaggagcactgccgccggggactgctcagcaagcacaccggcagccccccaagcccctccactacctgcctgcacaccaccagcgaggacgctgccataccctctaagtcccggctcaagcggctcatttccgagaactcagtgtacgagaagcggcccgacttcaggatgtgctggtacgtgcacccgcaggtgctacagagcttccagcaggagcacctgcccgtgccatgccagtggagctacgtgacctcagtgcctacggcccccagagaggacagtggcagcgtcccctccac

SEQ ID NO: 23579 - DNA, 3064 bp, Macaca Mulatta
  misc_feature (1)...(3064): n = A,T,C or G
ggctgccctgcagagaccaggtctgcgcagcaaacccaggaaggtgtggcgtccctgctccgcggccaagatggtgctggtgctgcaccgtcctttgtgtgcctgggaagggcgttccaggagccgggtcgggggctcctgactcgcagtgggcagcatgacggtgagccggctgtcactgctgtgccgggacctctgggcactgtggctgctgctgaaggctggcgcagnnnnnnnnnnnnnnnnnnnnnnnnnnnnnnnnnnnnnnnnnnnnnnnnnnnnnnnnnnnnnnnnnnnnnnnnnnnnnnnnnnnggtgggcgggggcaggacggaagcccggtcatcaccttccctgactacccggccttcagcgagattccggacaaggagttccagaatgtcatgacctacctcaccagcatccccagnnnnnnnnnnnnnnnnnnnnnnnnnnnnnnnnnnnnnnnnnnnnnnnnnnnnnnnnnnnnnnnnnnnnnnnnnnnnnnnnnnnnnnnnnnnnnnnnnnnnnnnnnnnnnnnnnnnnnnnnnnnnnnnnnnnnnnnnnnnnnnnnnnnnnnnnnnnnnnnnnnnnnnnnnnnnnnnnnnnnnnnnnnnnnnnnnnnnnnnnnnnnnnnnnnggtcataatgctgagctccgtaccagacttacacggttacatcgataagtcgcagctgaccgaggacctgggcgggaccctggactattgccactcccggtggctgtgccagcgcacggnggccatcgaaagtttcgccctcatggtgaagcatacggctcagatgctgcagtccttcgggaccgagctggccgaaacagagctgcccaatgacgtccagtcgacgagctcagtgctgtgtgcgcacacagagaagaaggacaaggcgaaggnnnnnnnnnnnnnnnnnnnnnnnnnnnnnnnnnnnnnnnnnnnnnnnnnnnnnnnnnnnnnnnnnnnnnnnnnnnnnnnnnnnnnnnnnnnnnnnnnnnnnnnnnnnnnnnnnnnnnnnnnnaggctcctggcccagctgaacgaaaccgaggctgccttcgatgagttctgggcgaaacatcagcagaaactggagcagtgcctgcagctccggcacttcgagcaggcttccgggaggnnnnaggtcaaagccatcttggatgcagtgtgccagaagatagcaaccttcacggacattggcaacagtctggcgcatgtggagcacctgctgagggacctggccagcttcgaggagaaatcaggcgtnnnngtggagagggcccgggccctgtctctggatggcgagcagctcatcgagaacaagcactacgccgtagannnnnnnnnnnnnnnnnnnnnnnnnnnnnnnnnnnnnnnnnnnnnnnnnnnnnnnnnnnnnnnnnnnnnnnnnnnnnnnnnnnnnnnnnnnnnnnnnnnnnnnnnnnnnnnnnnnnngtccctgaagtggtgtgatgaagggatttacctgctggcctcacaacctgtggacaagtgccagtcccaagacggtgcggaggctgccctccaggaaatcgagaagtttttggagaccagtgcagaaaataagatccaggagctcaacacaatttacaaggaatatgaatccatcctcaaccaagacctcatggnnnnnnnnnnnnnnnnnnnnnnnnnnnnnnnnnnnnnnnnnnnnnnnnnnnnnnnnnnnnnnnnnnnnnnnnnnnnnnnnnnnnnnnnnnnnnnnnnnnnnnnnnnnnnnnnnnnnnnnnnnnnnnnnnnnnnnnnnnnnnnnnnnnnnnnnnnnnnnnnnnnnnnnnnnnnnnnnnnnnnnnnnnnnnnnnnnnnnnnnnnnnnnnnnnnnnnnnnnnnnnnnnnnnnnnnnnnnnnnnnnnnnnnnnnnnnnnnnnnnnnnnnnnnnnnnnnnnnnnnnnnnnnnnnnnnnnnnnnnnnnnnnnnnnnnnnnnnnnnnnnnnnnnnnnnnnnnnnnnnnnnnnnnnnnnnnnnnnnnnnnnnnnnnnnnnnnnnnnnnnnnnnnnnnnnnnnnnnnnnnnnnnnnnnnnnnnnnnnnnnnnnnnnnnnnnnnnnnnnnnnnnnnnnnnnnnnnnnnnnnnnnnnnnnnnnnnnnnnnnnnnnnnnnnnnnnnnnnnnnnnnnnnnnnnnnnnnnnnnnnaggaaatgctgaaatacagcaagaactgcgagggggctgaggacctgcaggaggcgctgagctccatcctgggcatcctgaaggccgtgaatgactccatgcacctcattgccatcaccggctatgacgngggaatctcggcgacctgggcaagctgctgatgcagggctcgttcagcgtctggaccgaccacaagaggggccacaccaaggtgaaggagctggccaggttcaagcccatgcagcggcacctgttcctgcacgagaaggcggtgctcttctgtaagaagcgggaggagaacggggaggggtacgagaaagccccctcctacagctacaagcagtccttaaacnnnnnnnnnnnnnnnnnnnnnnnnnnnnnnnnnnnnnnnnnnnnnnnnnnnnnnnnnnnnnnnnnnnnnnnnnnnnnnnnnnnnnnnnnnnnnncagtccctcgagaggaaactcaaggaacctcaaaaagctggaagaaaggaaaacagaccccctgagcctggagggatatgtcagctcagcaccactgccaaagccccccgaaaagggcaaagnagagccctaggacctcacagaagagcccctccctctccattgctctgcacccctgtgtcagcaaggtcagccccagaaacagccccggcccagacccagcgtgcaacccggagccgccctgggccctccccgcagcagctggacccgcctccacgccgggttgcgatgctctctgcatagtttctttctcttccttcatagatgacacggtcactagctctgcctcagaaagctctgcgctttccagaaagcgctttaccctgcagggctttgctaacctcaaaggtcagaaaggtaaaagtagcacctgccc

SEQ ID NO: 23580 - DNA, 1063 bp, Macaca Mulatta
  misc_feature (1)...(1063): n = A,T,C or G
ggacgaggactctgtgttaattcctgnaattgcgaatttggaaccttcttggtgctcatatatactgtggactgtaagcatgagtgaattctggttgtgttcaactgctgtattgcagaacagcctcagcctaaaaggcgacgacggattgacagaagtatgattggagagcccacaaactttgtgcacacggctcatgttggatcaggagacctgttcagtggaatgaattcagttagctccattcagaaccaaatgcagtccaagggaggctacggaggtggaatgcctgccaatgtgcagatgcagctcgtggatacgaaggcgggatagccctggtcctttctccaaagtgtgatggcaccttgtctaccctgtcgtgattattccagtgagatgttactgttctgctctgaagaagatactgtcagacgaatcctgcatttccttcagctggcctgcatgcctttggactcatggacagagttctttggattgtcactgaattttcaatgtttaatcagtatggatctgatcttcgcatgatcttttttgtgaatgctaacaccattttgcagacttgtattttctattttaaaacatttttcttttcactgccgaccccctgccttacgattttactggaaagcaaggacctgctattatttgtttttgccatcatttatgtatattttggaaggtatgagacccacaagcacaatgatcatttttgtttgaaacttcagcagaataggtatctgcatgctttatgaagttgcttcggtgagagctcatgggatgccagaaatgaacatttctttgctgccatgggctgatgatgctgctattagataaagtttagctgtggcaccaagtcacatcattttcattgaaaaagattacttgtagctttagaagtatgaccttttggtctgtttgattagaattgcaataaaagaaaagcttgcattcataaggcattcattctgttgtaaatgttcaatatatatttattttgagagcaaggacctgtggttgtaaacaggtgtggttacgtatctga

SEQ ID NO: 23581 - DNA, 2039 bp, Macaca Mulatta
  misc_feature (1)...(2039): n = A,T,C or G
gtaccaataataaagctcacagatcaggagactgaagtgaaagttgacatcagctttaacatggnnnnnnnnnnnnnnnnnnnnnnnnnnnnnnnnnnnnnnnnnnagaaatattcattgctgccttacttgattttagtattgaaacagttccttctgcagagggacctgaatgaagtttttacaggtggaattagctcatacagcctaattttaatggccattagctttctacannnnnnnnnnnnnnnnnnnnnnnnnnnnnnnnnnnnnnnnnnnnnnnnnnnnnnnnnnnnnnnnnnnnnnnnnnnnnnnnnnnnnnnnnnnnnnnnnnnnnnnnnnnnnnnnnnnnnnnnnnnnnnnnnnnnnnnnnnnnnnnnnnnnnnnnnnnnnnnnnnnnnnnnnnnnnnnnnnnnnnnnnnnnnnnnnnnnnnnnnnnnnnnnnnnnnnnnnnnnnnnnnnnnnnnnnnnnnnnnnnnnnnnnnnnnnnnnnnnnnnnnnnnnnnnnnnnnnnnnnnnnnnnnnnnnnnnnnnnnnnnnnnnnnnnnnnnnnnnnnnnnnnnnnnnnnnnnnnnnnnnnnnnnnnnnnnnnnnnnnnnnnnnnnnnnnnnnnnnnnnnnnnnnnnnnnnnnnnnnnnnnnnnnnnnnnnnnnnnnnnnnnnnnnnnnnnnnnnnnngacaacaggatcaagattaaagagcgaatagccacatgcaatggggagcagacgcagaaccgagagcccgagtctccctacggccagcgcttgactttgtcgctgtccagcccccagctcctgtcttcaggctcctcagcctcatctgtgtcttcactttctgggagtgacgttnnnnnnnnnnnnnnnnnnnnnnnnnnnnnnnnnnnnnnnnnnnnnnnnnnnnnnnnnnnnnnnnnnnnnnnnnnnnnnnnnnnnnnnnnnnnnnnnnnnnnnnnnnnnnnnnnnnnnnnnnnnnnnnnnnnnnnnnnnnnnnnnnnnnnnnnnnnnnnnnnnnnnnnnnnnnnnnnnnnnnnnnnnnnnnnnnnnnnnnnnnnnnnnnnnnnnnnnnnnnnnnnnnnnnnnnnnnnnnnnnnnnnnccgtccaccacatgtcttccccgcccattccctcagcgtcccccaacccgctctcgagccctcatctgtatcataangcagcacaacggcatgaaactgtccatgaagggctctcatggccacacccaaggcggcggctacagctctgtgggtagcggaggtgtgcggccccctgtgggcaacaggggacaccaccagtataaccgcaccggatggaggaggaaaaannnnnnnnnnnnncgggacagtctgcccgtgagcctcagcagataatggctcctggctgcgtcggcctcccccacccctccgcagactgccccgcggcctcggccaccggcaggggaaccgagaccagcaccccgcacgtcagccgggctcacggcacgcccgccgctgatcactctgcatgtttctttgtgtggtggtcgcgtccatcttcaagaacagctcgttgtgctcatctgtgaagccttattaaacgtggacgttgttttctgccttcccaggattcttccttcagtgctgaggcaggtcaggctcaggaactgcagggacgtgaacatgcgcttgcggtttgcggtagccgtgtctgttccttcgcggtttgctattttcatttcctgtttgtcaaagcagcagaggagatcaaaccccgttcgtgtgtctttcctccatggataggcttgggaggtcattgttttactgccctcacattttgtttgaaatttcagaactgtttttctatgtaaatattgaaaacctatgatttgtgcaataactcagatattttttatttaatttcctattttcacataagttatatttaagggaggagggaattttttttaaacaagcttaggtcctttcccgagctgcattttctaagttgggtcatcatgtcggctggttgtctgacgagcatcgttacaaacaccatgatga

SEQ ID NO: 23582 - DNA, 115 bp, Macaca Mulatta
agaatgtcttccaagcaagccacctctccatttgcctgtgcagctgatggagaggatgcgataacccaggatttaacctcaagggaaaaggaagaagtcagcgatcaacatgtgg

SEQ ID NO: 23583 - DNA, 289 bp, Macaca Mulatta
agttgccttgtcactgattttatcattcttattgtgacttcctctaatcatgaattaaaatgtaatcttgtatacaatataggaatattttttgcctgcctcattttgttatatgattaactccttcatttctttggttctaagtttgtcttatttcagaataactgaagtacttcagaatgaaactggatacagtatattcaattcataagtgtaattgaacatacttgaatgtgtttaagtttataagtaacatcaggtgttatgaaattaatataaataagatgtg

SEQ ID NO: 23584 - DNA, 1125 bp, Macaca Mulatta
  misc_feature (1)...(1125): n = A,T,C or G
ggggggtgtcggggatctttcaattgtgttcgcagccgccgccgcgccgccgtcgctctctaacgccagcgccgcctctcgctcgccgagctacagccgaaggagaaggggggtaagtaaggaggtctctgtaccatggctcgtacaaagcagactgcccgcaaatcgaccggtggtaaagcacccaggaagcaactggctacaaaagccgctcgcaagagtgcgccctctactggaggggtgaagaaacctcatcgttacaggcctggtactgtggcactccgtgaaattagacgttatcagaagtccactgaacttctgattcgcaaacttcccttccagcgtctggtgcgagaaattgctcaggactttaaaacagatctgcgcttccagagcgcagctattggtgctttgcaggaggcaagtgaggcctatctggttggcctttttgaagacaccaacctgtgtgctatccatgccaaacgtgtaacaattatgccaaaagacatccagctagcacgccgcatacgtggagaacgtgcttaagaatccactatgatgggaaacatttcattctcaaaaaaaacnnnnnnnnnnnnnnnnnnnnttcttcctgttattggtagttctgaacgttagatattttttttccatgggggtcaaaaggtacctaagtatatgaattgcgagtgggaaaaatagggggacagaaaattcaggtattgggccagtttttttccatttttccatttgggtgtgaatttttaatataaatgcaaaggcgctaaagccatttaatgcaaggttaaaaaggtttccaactgaaaaaaatttttcaaccggggtcaaactgtttattaaaaaannnnnnnnnnnnnnnnnncgnnnnnnnnnnnnnnntgggaaaaaatgtcccaacatatttnnnnnnnnnnnnnnnnnnnnnagggtaaaattttccttaatttgaccgggcaaacctaaattgggggcttcgtgtacccattttttatttccaatcacggttggtaagtccccttccccgttcccccaaaagaacttcttcccaaaccggaagttgatgccctcacattgcccaagttcgcaggggttgttttaaatgtc

SEQ ID NO: 23585 - DNA, 1805 bp, Macaca Mulatta
  misc_feature (1)...(1805): n = A,T,C or G
ttaataagaaatggaaacactttcagttttcagaagttatgaacctggtgaaccaaactgtagaatttatgtaaagaatttagctaaacatgttcaagaaaagnnnnnnnnnnnnnnnnnnnnnnnnnnnnnnnnnnnnnnnnnnnnnnnnnnnnnnnnnnnnnnnnnnnnnnnnnnnnnnnnnnnnnnnnnnnnnnnnnnnnnnnnnnnnnnnnnnnnnnnnnnnnnnnnnnnnnnnnnnnnnnnnnnnnnnnnnnnnnnnnnnnnnnnnnnnnnnnnnnnnnnnnnnnnnnnnnnnnnnnnnnnnnnnnnnnnnnnnnnnnnnnnnnnnnnnnnnnnnnnnnnnnnnnnnnnnnnnnnnnnnnnnnnnnnnnnnnnnnnnnnnnnnnnnnnnnnnnnnnnnnnnnnnnnnnnnnnnnnnnnnnnnnnnnnnnnnnnnnnnnnnnnnnnnnnnnnnnnnnnnnnnnnnnnnnnnnnnnnnnnnnnnnnnnnnnnnnnnnnnnnnnnnnnnnnnnnnnnnnnnnnnnnnnnnnnnnnnnnnnnnnnnnnnnnnnnnnnnnnnnnnnnnnnnnnnnnnnnnnnnnnnnnnnnnnnnnnnnnnnnnnnnnnnnnnnnnnnnnnnnnnnnnnnnnnnnnnnnnnnnnnnnnnnnnnnnnnnnnnnnnnnnnnnnnnnnnnnnnnnnnnnnnnnnnnnnnnnnnnnnnnnnnnnnnnnnnnnnnnnnnnnnnnnnnnnnnnnnnnnnnnnnnnnnnnnnnnnnnnnnnnnnnnnnnnnnnnnnnnnnnnnnnnnnnnnnnnnnnnnnnnnnnnnnnnnnnnnnnnnnnnnnnnnnnnnnnnnnnnnnnnnnnnnnnnnnnnnnnnnnnnnnnnnnnnnnnnnnnnnnnnnnnnnnnnnnnnnnnnnnnnnnnnnnnnnnnnnnnnnnnnnnnnnnnnnnnnnnnnnnnnnnnnnnnnnnnnnnnnnnnnnnnnnnnnnnnnnnnnnnnnnnnnnnnnnnnnnnnnnnnnnnnnnnnnnnnnnnnnnnnnnnnnnnnnnnnnnnnnnnnnnnnnnnnnnnnnnnnnnnnnnnnnnnnnnnnnnnnnnnnnnnnnnnnnnnnnnnnnnnnnnnnnnnnnnnnnnnnnnnnnnnnnnnnnnnnnnnnnnnnnnnnnnnnnnnnnnnnnnnnnnnnnnnnnnnnnnnnnnnnnnnnnnnnnnnnnnnnnnnnnnnnnnnnnnnnnnnnnnnnnnnnnnnnnnnnnnnnnnnnnnnnnnnnnnnnnnnnnnnnnnnnnnnnnnnnnnnnnnnnnnnnnnnnnnnnnnnnnnnnnnnnnnnnnnnnnnnnnnnnnnnnnnnnnnnnnnnnnnnnnnnnnnnnnnnnnnnnnnnnnnnnnnnnnnnnnnnnnnnnnnnnnnnnnnnnnnnnnnnnnnnnnnnnnnnnnnnnnnnnnnnnnnnnnnnnnnnnnnnnnnnnnnnnnnnnnnnnnnnnnnnnnnnnnnnnnnnnnnnnnnnnnnnnnnnnnnnnnnnnnnnnnnnnnnnnnnnnnnnnnnnnnnnnnnnnnnnnnnnnnnnnnnnnnnnnnnnnnnnnnnnnnaggtcagagattgtcgtctgagtggtcttcttgatcttgcgctggagaaggattatgtgcgttccgagattgccgaatatatgaacaagctcattgacatgggagttgcagggttcagacttgatgcttccaagcacatgtggcctggagacataaaggcaattttggacaaactgcataatctcaacagtaactggtttcctcaaggaagtaaacctttcattttccaggaggta

SEQ ID NO: 23586 - DNA, 222 bp, Macaca Mulatta
aggtcgactccgggccatcaaccctgagaacggcttctttggggttgcccctggtacctctgccaccaccaatcccaacgccatggctacaatccagagtaacactatttttaccaacgtggctgagaccagcgatggtggcgtgtactgggagggcattgaccagcctcttccacctggtgttactgtgacttcctggctgggcaaaccctggaaacctgg

SEQ ID NO: 23587 - DNA, 438 bp, Macaca Mulatta
atgaaatctttttaccaatataccccaaaccctggcatgcatattcaaggtttccattttgtcaaaatgaattgttcttgtatcctctagaaatttagttagagatcaatttaccttttttttaaacaagcatttttagttagtaaggttctggcctaatttggtattctggatttcttatttatcttaatattaaaaataaaggaggaaagctaaattcacattaaaaatgactaaattttgaaaatttttttcaacaggttatatcaatcagtgaaaattctgtattcctttggcatttttgtgacatattcaattcagttctatgttccagcagagatcattatccctgggatcacatccaaatttcatactaaatggaagcaaatctgtgaatttgggataagatccttcttggttagtattacttgtaagtat

SEQ ID NO: 23588 - DNA, 4552 bp, Macaca Mulatta
  misc_feature (1)...(4552): n = A,T,C or G
gcacaacgatagaaaaattaagagctatttgtttagaccatgccaaacttggggaaagcagccttagtccatctcttgactcgcttttctttggtccttcagcctcacaagtgctatatctaacagagnnnnnnnnnnnnnnnnnnnnnnnnnnnnnnnnnnnnnnnnnnnnnnnnnnnnnnnnnnnnnnnnnnnnnnnnnnnnnnnnnnnnnnnnnnnnnnnnnnnnnnnnnnnnnnnnnnnnnnnnnnnnnnnnnnnnnnnnnnnnnnnnnnnnnnnnnnnnnnnnnnnnnnnnnnnnnnnnnnnnnnnnnnnnnnnnnnnnnnnnnnnnnnnnnnnnnnnnnnnnnnnnnnnnnnnnnnnnnnnnnnnnnnnnnnnnnnnnnnnnnnnnnnnnnnnnnnnnagatcaaccaagttacccatgatcaagcagtggtgctacaaagtgcccttcagagcattcctaatccatcatccgagtgcatgcttagaaatgtgtcagttcgtcttgctcagcagatatctgatgaggnnnnnnnnnnnnnnnnnnnnnnnnnnnnnnnnnnnnnnnnnnnnnnnnnnnnnnnnnnnnnnnnnnnnnnnnnnnnnnnnnnnnnnnnnnnnnnnnnnnnnnnnnnnnnnnnnnnnnnnnnnnnnnnnnnnnnnnnnnnnnnnnnnnnnnnnnnnnnnnnnnnnnnnnnnnnnnnnnnnnnnnnnnnnnnnnnnnnnnnnnnnnnnnnnnnnnnnnnnnnnnnnnnnnnnnnnnnnnnnnnnnnnnnnnnnnnnnnnnnnnnnnnnnnnnnnnnnnnnnnnnnnnnnnnnnnnnnnnnnnnnnnnnnnnnnnnnnnnnnnnnnnnnnnnnnnnnnnnnnnnnnnnnnnnnnnnnnnnnnnnnnnnnnnnnnnnnnnnnnnnnnnnnnnnnnnnnnnnnnnnnnnnnnnnnnnnnnnnnnnnnnnnnnnnnnnnnnnnnnnnnnnnnnnnnnnaagacaccttcttaattatgcttacaatagtaatattaatgtacccaatgctgaagttcttctcaataatgaaattgattggcttaaaagaattaggnnnnnnnnnnnnnnnnnnnnnnnnnnnnnnnnnnnnnnnnnnnnnnnnnnnnnnnnnnnnnnnnnnnnnnnnnnnnnnnnnnnnnnnnnnnnnnnnnnnnnnnnnnnnnnnnnnnnnnnnnnnnnnnnnnnnnnnnnnnnnnnnnnnnnnnnnnnnnnnnnnnnnnnnnnnnnnnnnnnnnnnnnnnnnnnnnnnnnnnnnnnnnnnnnnnnnnnnnnnnnnnnnnnnnnnnnnnnnnnnnnnnnnnnnnnnnnnnnnnnnnnnnnnnnnnnnnnnnnnnnnnnnnnnnnnnnnnnnnnnnnnnnnnnnnnnnnnnnnnnnnnnnnnnnnnnnnnnnnnnnnnnnnnnnnnnnnnnnnnnnnnnnnnnnnnnnnnnnnnnnnnnnnnnnnnnnnnnnnnnnnnnnnnnnnnnnnnnnnnnnnnnnnnnnnnnnnnnnnnnnnnnnnnnnnnnnnnnnnnnnnnnnnnnnnnnnnnnnnnnnnnnnnnnnnnnnnnnnnnnnnnnnnnnnnnnnnnnnnnnnnnnnnnnnnnnnnnnnnnnnnnnnnnnnnnnnnnnnnnnnnnnnnnnnnnnnnnnnnnnnnnnnnnnnnnnnnnnnnnnnnnnnnnnnnnnnnnnnnnnnnnnnnnnnnnnnnnnnnnnnnnnnnnnnnnnnnnnnnnnnnnnnnnnnnnnnnnnnnnnnnnnnnnnnnnnnnnnnnnnnnnnnnnnnnnnnnnnnnnnnnnnnnnnnnnnnnnnnnnnnnnnnnnnnnnnnnnnnnnnnnnnnnnnnnnnnnnnnnnnnnnnnnnnnnnnnnnnnnnnnnnnnnnnnnnnnnnnnnnnnnnnnnnnnnnnnnnnnnnnnnnnnnnnnnnnnnnnnnnnnnnnnnnnnnnnnnnnnnnnnnnnnnnnnnnnnnnnnnnnnnnnnnnnnnnnnnnnnnnnnnnnnnnnnnnnnnnnnnnnnnnnnnnnnnnnaggtacgaatgtgaagaatcttttacgaccctaaacgtagacattagaaatcaccaaaatcttcttgattctttggaacaatatgtcaaaggagatttactagaaggtgcaaatgcatatcattgtgaaaaatgcaataaaaaggnnnnnnnnnnnnnnnnnnnnnnnnnnnnnnnnnnnnnnnnnnnnnnnnnnnnnnnnnnnnnnnnnnnnnnnnnnnnnnnnnnnnnnnnnnnnnnnnnnnnnnnnnnnnnnnnnnnnnnnnnnnnnnnnnnnnnnnnnnnnnnnnnnnnnnnnnnnnnnnnnnnnnnnnnnnnnnnnnnnnnnnnnnnnnnnnnnnnnnnnnnnnnnnnnnnnnnnnnnnnnnnnnnnnnnnnnnnnnnnnnnnnnnnnnnnnnnnnnnnnnnnnnnnnnnnnnnnnnnnnnnnnnnnnnnnnnnnnnnnnnnnnnnnnnnnnnnnnnnnnnnnnnnnnnnnnnnnnnnnnnnnnnnnnnnnnnnnnnnnnnnnnnnnnnnnnnnnnnnnnnnnnnnnnnnnnnnnnnnnnnnnnnnnnnnnnnnnnnnnnnnnnnnnnnnnnnnnnnnnnnnnnnnnnnnnnnnnnnnnnnnnnnnnnnnnnnnnnnnnnnnnnnnnnnnnnnnnnnnnnnnnnnnnnnnnnnnnnnnnnnnnnnnnnnnnnnnnnnnnnnnnnnnnnnnnnnnnnnnnnnnnnnnnnnnnnnnnnnnnnnnnnnnnnnnnnnnnnnnnnnnnnnnnnnnnnnnnnnnnnnnnnnnnnnnnnnnnnnnnnnnnnnnnnnnnnnnnnnnnnnnnnnnnnnnnnnnnnnnnnnnnnnnnnnnnnnnnnnnnnnnnnnnnnnnnnnnnnnnnnnnnnnnnnnnnnnnnnnnnnnnnnnnnnnnnnnnnnnnnnnnnnnnnnnnnnnnnnnnnnnnnnnnnnnnnnnnnnnnnnnnnnnnnnnnnnnnnnnnnnnnnnnnnnnnnnnnnnnnnnnnnnnnnnnnnnnnnnnnnnnnnnnnnnnnnnnnnnnnnnnnnnnnnnnnnnnnnnnnnnnnnnnnnnnnnnnnnggtatgatgcattgtgtatcctccttcgtcacagcaagaatgtacgtttttggtttgctcataatgtcctttttaatgtttcaaatnnnnnnnnnnnnnnnnnnnnnnnnnnnnnnnnnngaagtgaggggtgcgtttgcaaccttatagtctttattgcacatttttccttgcaagatgggccatgtccttcaccttttgcctctcctggaccttctagtcaggncaggcttatgacaacttaagcttgagtgatcacttactaagagcagtactaaatctcttgagaagggaagtttcagagcatgggcgtcatttacagcagtatttcaacctgtttgtaatgtatgccaatttaggtnnnnnnnnnnnnnnnnnnnnnnnnnnnnnnnnnnnnnnnnnnnnnnnnnnnnnnnnnnnnnnnnnnnnnnnnnnnnnnnnnnnnnnnnnnnnnnnnnnnnnnnnnnnnnnnnnnnnnnnnnnnnnnnnnnnnnnnnnnnnnnnnnnnnnnnnnnnnnnnnnnnnnnnnnnnnnnnnnnnnnnnnnnnnnnnnnnnnnnnnnnnnnnnnnnnnnnnnnnnnnnnnnnnnnnnnnnnnnnnnnnnnnnnnnnnnnnnnnnnnnnnnnnnnnnnnnnnnnnnnnnnnnnnnnnnnnnnnnnnnnnnnnnnnnnnnnnnnnnnnnnnnnnnnnnnnnnnnnnnnnnnnnnnnnnnnnnnnnnnnnnnnnnnnnnnnnnnnnnnnnnnnnnnnnnnnnnnnnnnnnnnnnnnnnnnnnnnnnnnnnnnnnnnnnnnnnnnnnnnnnnnnnnnnnnnnnnnnnnnnnnnnnnnnnnnnnnnnnnnnnnnnnnnnnnnnnnnnnnnnnnnnnnnnnnnnnnnnnnnnnnnnnnnnnnnnnnnnnnnnnnnnnnnnnnnnnnnnnnnnnnnnnnnnnnnnnnnnnnnnnnnnnnnnnnnnnnnnnnnnnnnnnnnnnnnnnnnnnnnnnnnnnnnnnnnnnnnnnnnnnnnnnnnnnnnnnnnnnnnnnnnnnnnnnnnnnnnnnnnnnnnnnnnnnnnnnnnnnnnnnnnnnnnnnnnnnnnnnnnnnnnnnnnnnnnnnnnnnnnnnnnnnnnnnnnnnnnnnnnnnnnnnnnnnnnnnnnnnnnnnnnnnnnnnnnnnnnnnnnnnnnnnnnnnnnnnnnnnnnnnnnnnnnnnnnnnnnnnnnnnnnnnnnnnnnnnnnnnnnnnnnnnnnnnnnnnnnnnnnnnnnnnnnnnnnnnnnnnnnnnnnnnnnnnnnnnnnnnnnnnnnnnnnnnnnnnnnnnnnnnnnnnnnnnnnnnnnnnagaataaccatgtgcatggacagccatatacaggcccagcagcacatcacatgaacaaccctcagagaactggccaacgagcacaagaaaattatgaaggcagtgaagaagtatccccacctcaagccaaggatcaatga

SEQ ID NO: 23589 - DNA, 455 bp, Macaca Mulatta
taggggccaataaattccctaacatccacagtgttttcatttactctgcttgtctttatgttgctggaacatttctaaaagacagtgatgaccgcacgcattcataaagcaaaggagtattacagcatcaaggcacaacacagaaaccaacacaaagcataacacaaaaaagaagctacctatgatcctggatttagccaaagtgctagcgctttcctgagaagtcagttagtccaattgccagagaagactgtccttttgagtgactcaacctgcaaacctttaagagtttgccgcctggtgcaactggagcagtggttggaacttgcatttgaaacaaagtgctggcttttttgaagacttgtgtaggaacacattcaaaaagcccctttctggttgtgagagaggaaaaaaagtatggaggccttattttcaaaaatgagaaatataaggca

SEQ ID NO: 23590 - DNA, 343 bp, Macaca Mulatta
gctatcagatttttgacaccacagttgcagaagatgtaatctaatattgccatccaatttagcatacataaaatgttgccactcaccatcccggtttgagcttcttttcctgccctgagttttgtatcagcaatgttgatgattttagcatgggtatgggattagaaaatgtcctttctttaaatctcttggcttttactgggtgcaaggtaaataatggctgtagattttattttgctttctgttttgcttttgcacaaacagacctgcttttaacaagtactgctgagataagtgtttgtctgatcaagctaaagtgtactttaagtagaaatggcaaagt

SEQ ID NO: 23591 - DNA, 556 bp, Macaca Mulatta
ttcatcctgcaaagttctggcagaagattcttcgttgaatgtgctcacctgcacttcagcctcaggagtcctgctggctgaagtccagagggtcctttctgattcctgaagtagatgaacagcccgggccccaaggaagagcaggcccagcacaaagcccccaactccactcagcatcttgctctgtgcagattcagaccgtgctcctgagagaggaagccaggtttagtgatgtttgttccaaactgaacctctttaattgagaccctaagattcagagctttgaaaatgggtaagaaggctgccccacaagaactaaaataactagccatttctggagagaaaaaggatttcaaagcacactgaacagttacaaggttcagatatcaaactcattcaaatattacagccttgatgtaaggcacgagttcaacatctgatccacagaaagcctgagactcagtgaggctaagtagtttgtctagagtgacagagctcataaaaggcagagctgagactgtactcccttcatgtcaggtaggcccctacacttctc

SEQ ID NO: 23592 - DNA, 1135 bp, Macaca Mulatta
  misc_feature (1)...(1135): n = A,T,C or G
ggagaagctgcgctacctccagcagcagctgcaggatgagacgccgcgacggcaggagaccgagcagcaggagccggagcagcagcagaagccggaggnnngcaggagccggagcagcagcagaagccggaggctggcctttcccggaacggcctgggccccgccgccacgtcccagggctgccccggcccgccagggagtcctgacaaaccctcgcggcctcgcggcctggtccccgcaggctggggaatggggcctcgggcaggtgagggcccctacgtgagcgagcaggaattgcagaaggtgttcaccggcatcgaggagctgaggnnnnnnnnnnnnnnnnnnnnnnnnnnnnnnnnnnnnnnnnnnnnnnnnnnnnnnnnnnnnnnnnnnnnnnnnnnnnnnnnnnnnnnnnnnnnnnnnnnnnnnnnnnnnnnnnnnnnnnnnnnnnnnnnnnnnnnnnnnnnnnnnnnnnnnnnnnnnnnnnnnnnnnnnnnnnnnnnnnnnnnnnnnnnnnnnnnggtggagcggtcagcagtgtctgtggcttcactgaggagcgaactggaggggctgggcccactgaaacccattctggaggagttcgggcggcaatttcagaactctcgaagagggcctgacctctccatgaacctggatcggtcccaacaaggcaactgtgcccgctgtgccannnnnnnnnnnnnnnnnnnnnnnnnnnnnnnnnnnnnnnnnnnnnnnnnnnnnnnnnnnnnnnnnnnnnnnnnnnnnnnnnnnnnnnnnnnnnnnnnnnnnnnnnnnnnnnnnnnnnnnnnnnnnnnnnnnnnnngagctggagcgccaggccttagccaaacacgtcagggcagaggccctgagctccacccttcggctggcccaagacgaggccctgcgggccaagaatctactgctgacagacaagatgaagccnnngagaagatggccactctggaccatctacatttgaagacgtgctccctccacgatcatctcagcaacctgccacttgaggggtccacaggaacaatggggggaggcagcagtgcgggaacccccccaaaacatgggggcttagcccctgaacaataaatggcccctcatgctggcatga

SEQ ID NO: 23593 - DNA, 700 bp, Macaca Mulatta
  misc_feature (1)...(700): n = A,T,C or G
ccataagccccggtctgttgctactcggcagcgccgtccttctccccttatggcctaagctgcacttatcgtgcagtgcgctggcagccgctacgaacacatccccgggccgtcgcggcccagnagtttccttctaggacacctcccctgcttttggaaaaaggatgaggttggtggccgtgtgctccaagatgtgtttttggattggnnnnnnnnnnnnnnnnnnnnnnnnnnnnnnnnnnnnnnnnnnnnnnnnnnnnnnnnnnnnnnnnnnnnnnnnnnnnnnnnnnnnnnnnnnnnnnnnnnnnnnnnnnnnnnnnnnnnnnnnnnnnnnnnnnnnnnnnnnnnnnnnnnnnnnnnnnnnnnnnnnnnnnnnnnnnnnnnnnnnnnnnnnnnnnnnnnnnnnnnnnnnnnnnnnnnnnnnnnnnnnnnnnnnnnnnnnnnnnnnnnnnnnnnnnnnnnnnnnnnnnnnnnnnnnnnnnnnnnnnnnnnnnnnnnnnnnnnnnnnnnnnnnnnnnnnnnnnnnnnnnnnnnnnnnnnnnnnnnnnnnnnnnnnnnnnnnnnnnnnnnnnnnnnnnnnnnnnnnnaggcagcttttgggatggagaccagtatgctgctgggtgcccagaagcctctgtcccaggcagtgaaactgatgttggagggaatcaccgcatcccgcaacactctggcaaag

SEQ ID NO: 23594 - DNA, 171 bp, Macaca Mulatta
gtccgtgggccacatccacaggcgagtcactgaccacctgggtgtcgtctactatgtgggagacactttctccgaggagtacacaggctccagcctcaaaacagtcgagcggaatgtggaggatgattatatcgccgacatccggaacaactgcggaaggagaagcaacag

SEQ ID NO: 23595 - DNA, 823 bp, Macaca Mulatta
ggggctcctctttcggctagcagccgtgtggctagagactacctctgatgatctttggtatcctggcgtccatttgtggtggcctcgtggtgcttttgcccgaaaccaagggtattgccttgccagagacagtggatgatgtagaaaaagttggcagtccacattcctataaatgcggcgggaataaaaccccagtttccagctctcacctttgaggcccctgacaaagacagaaggaaggagctatccaggagctgatcctccttgcaaaactgtgccttgcggagatgcacatgtgcgtttgagtacaacatgccgcgctgttgtaatactgtataaagactgcaaactatccagagtattttgaaatcgtgttggaggaagtaggatttgtgatgctgttgaagtgttcgggaacacatgagaggtagccaggttgacaaaaaactgtcaggggcgcaggcctttccagggtgttgtggcttgaggacgcctgggggactcggagccggttagggccgaaaaaaaaaagcaaggacaaagcccccccacgctgttccgccgtggcgacctccaatcaggaaatatagggaacggtgacgcgaaccgaggggataagaggaaaaattagaacgaaagaaggcctctcggtcaaaatcgggatcgagtccgagggagacggaaacccccgagaactggaggcaattcgcaaaaacactaacaggcaagagaaacaaagaataaaagggaaaccccggtggagaagaaaaaaaggctgaaatcagcagacaacccagaaacgcaaagagaacaaacaaaccag

SEQ ID NO: 23596 - DNA, 1086 bp, Macaca Mulatta
  misc_feature (1)...(1086): n = A,T,C or G
gacgtgttctcagactcggcctatgtggtcgcgcctctcgctcctggctccgaagacaactttgccaggnnnnnnnnnnnnnnnnnnnnnnnnnnnnnnnnnnnnnnnnnnnnnnnnnnnnnnnnnnnnnnnnnnnnnnnnnnnnnnnnnnnnnnnnnnnnnnnnnnnnnnnnnnnnnnnnnnnnnnnnnnnnnnnnnnnnnnnnnnnnnnnnnnnnnnnnnnnnnnnnnnnnnnnnnnnnnnnnnnnnnnnnnnnnnnnnnnnnnnnnnnnnnnnnnnnnnnnnnnnnnnnnnnnnnnnnnnnnnnnnnnnnnnnnnnnnnnnnnnnnnnnnnnnnnnnnnnnnnnnnnnnnnnnnnnnnnnnnnnnnnnnnnnnnnnnnnnnnnnnnnnnnnnnnnnnnnnnnnnnnnnnnnnnnnnnnnnnnnnnnnnnnnnnnnnnnnnnnnnnnnnnnnnnnnnnnnnnnnnnnnnnnnnnnnnnnnnnnnnnnnnnnnnnnnnnnnnnnnnnccacagcaggaggtgcagaacatcttcaaagcaaagcacccaatggacacagaagtcaccaaagccaagnagatcattggatttggttctgcacttcttgaagaagttgatcctaatcctgcaaatttcgtgggagctggaatcatccacacgaaaaccacccagatcggatgcctgctacgcctggagccgaacctgcaagcccagnnnnnnnnnnnnnnnnnnnnnnnnnnnnnnnnnnnnnnnnnnnnnnnnnnnnnnnnnnnnnnnnnnnnnnnnnnnnnnnnnnnnnnnnnnnnnnnnnnnnnnnnnnnnnnnnnnnnnnnnnnnnnnnnnnnnnnnnnnnnnnnnnnnnnnnnnnnnnnnnnnnnnnnnnnnnnnnnnnnnnnnnnnnnnnnnnnnnnnnnnnnnnnnnnnnnnnnnnnnnnctttgggctggacaggaacacacgtgtgtggctcaggaagaaaagctcagcctggactgcggcagccgcggcagaaggtggatcttgggatcagtttttataaaaatcaagacagttctgtggttcaatctacaaattaaagggaaatta

SEQ ID NO: 23597 - DNA, 641 bp, Macaca Mulatta
  misc_feature (1)...(641): n = A,T,C or G
ccagcctgggcgacagagctgaannnnnnnnnnnnnnnnnnnnnnnnnnnnnnnnnnncaagacttactgcaaaaatatttttccaaggatttaggaaagaaaaattgccttgtattctcaagtcaggtacactcaaaggaggaaagtgatccaaatgtagagtatgagtttgcactccaaaaatttgacattactgtaaattatcttgtggaatttttgccagaattcagagatacaggaagttcacaatctaccttattgtagacatgaaatgggaacacttacttagatattaatgttaactcaacctgagggacctggaatggttgcattaatgctataatcgttggatctccacatttcccgaaaagaaaaaaaatcactaaccttttttaagggaaatatttaaagttttacaaaattcagtattgcagttatcaatgtaaagtacatttgaatgcttattaattaaaactttcccaattaattttaactgtgttactgagtttacttttactaaactactgttctcttttttaactagtctctggttttgacccctaatttaagctttaaggatagaaatcagctaatatagaatcagacaaaaacggtattaaatgagaagcagtatgagtta

SEQ ID NO: 23598 - DNA, 814 bp, Macaca Mulatta
  misc_feature (1)...(814): n = A,T,C or G
gggaggctttggagggcgaggcggcttccgaggaggcagaggaggaggaggtgaccacaagccacaaggaaagaagacgaagtttgaatagcttctgtccctcggctttcccttttccatttgaaagaaaggactctggggtttttactgttacctgatcaatgacagagccttctgaggacattccaagacagtatacagtcctgtggtctccttggaaatccgtctagttaacatttcaagggcaataccgtgttggttttgactggatattcatataaactttttaaagagttgagtgatagagctaacccttatctgtaagttttgaatttatattgtttcatcccatgtacaaaaccattttttcctacaaatagtttgggttttgttgttgtttcttttgnnnnnnnnnnnnnnnnnnnnnnngttcgtggggttgtaaaagaaaaagaaagccgaatgttttatggtttttgcttcaacggctttaggacaaattaaaagtcctctctggtgcccaggataatattgatacttaaactcatacatatcataaaattgttttgatctccaactgataaattgttatctttttgataatacttttgttgggcctcccttggcccctaacaaatatttctcacagaaccatcttttttttgggcgggcggggccccaaatgtgaaatcaaaacaggcgcccataagtttattcataagaaaaactcttgtgtctgtgtttgtggtcattggctactccccctataataaatcctccggtccggatcaacagaatcctatttgttaaaaaa

SEQ ID NO: 23599 - DNA, 2546 bp, Macaca Mulatta
  misc_feature (1)...(2546): n = A,T,C or G
gtgtgaggtgggcacagataactggtcgcagtgcaatgacacacctgtgaagtttgctcgttttcctgtcactggattgatcgaaggtcgttcctatatcttccgagttcgagctgtgaataaaacgggaataggtttcccatctcgagtttccgagcccgtggctgctctggatccagctgagaaagctagacttaaaagnnnnnnnnnnnnnnnnnnnnnnnnnnnnnnnnnnnnnnnnnnnnnnnnnnnnnnnnnnnnnnnnnnnnnnnnnnnnnnnnnnnnnnnnnnnnnnnnnnnnnnnnnnnnnnnnnnnnnnnnnnnnnnnnnnnnnnnnnnnnnnnnnnnnnnnnnnnnnnnnnnnnnnnnnnnnnnnnnngtgtgaggcaggaacagaaaactggcagcgagtgaacacggagctccctgtgaagtctnnnnnnnnnnnnnnnnnnnnnnnnnnnnnnnnnnnnnnnnnnnnnnnnnnnnnnnnnnnnnnnnnnnnnnnnnnnnnnnnnnnnnnnnnnnnnnnnnnnnnnnnnnnnnnnnnnnnnnnnnnnnnnnnnnnnnnnnnnnnnnnnnnnnnnnnnnnnnnnnnnnnnnnnnnnnnnnnnnnnnnnnnnnnnnnnnnnnnnnnnnnnnnnnnnnnnnnnnnnnnnnnnnnnnnnnnnnnnnnnnnnnnnnnnnnnnnnnnnnnnnnnnnnnnnnnnnnnnnnnnnnnnnnnnnnnnnnnnnnnngatttacttgtcatggattggtgactggtcagagttatattttccgggtcagaacagtcaatgcagctggacttagtgaatattcccaggattcagaannnnnnnnnnnnnnnnnnnnnnnnnnnnnnnnnnnnnnnnnnnnnnnnnnnnnnnnnnnnnnnnnnnnnnnnnnnnnnnnnnnnnnnnnnnnnnnnnnnnnnnnnnnnnnnnnnnnnnnnnnnnnnnnnnnnnnnnnnnnnnnnnnnnnnnnnnnnnnnnnnnnnnnnnnnnnnnnnnnnnnnnnnnnnnnnnnnnnnnnnnnnnnnnnnnnnnnnnnnnnnnnnnnnnnnnnnnnnnnnnnnnnnnnnnnnnnnnnnnnnnnnnnnnnnnnnnnnnnnnnnnnnnnnnnnnnnnnnnnnnnnnnnnnnnnnnnnnnnnnnnnnnnnnnnnnnnnnnnnnnnnnnnnnnnnnnnnnnnnnnnnnnnnnnnnnnnnnnnnnnnnnnnnnnnnnnnnnnnnnnnnnnnnnnnnnnnnnnnnnnnnnnnnnnnnnnnnnnnnnnnnnnnnnnnnnnnnnnnnnnnnnnnnnnnnnnnnnnnnnnnnnnnnnnnnnnnnnnnnnnnnnnnnnnnnnnnnnnnnnnnnnnnnnnnnnnnnnnnnnnnnnnnnnnnnnnnnnnnnnnnnnnnnnnnnnnnnnnnnnnnnnnnnnnnnnnnnnnnnnnnnnnnnnnnnnnnnnnnnnnnnnnnnnnnnnnnnnnnnnnnnnnnnnnnnncaaagaggttgtgtaaaatgtggatgatgatggagtcatttcattgaacttcgaatgtgatcagatgactccaaagtccgagttcacctggtccaaagattatgtatccactgaggactctccacggttagaagtcgaaagcaagggcaacaannnnnnnnnnnnnnnnnnnnnnnnnnnnnnnnnnnnnnnnnnnnnnnnnnnnnnnnnnnnnnnnnnnnnnnnnnnnnnnnnnnnnnnnnnnnnnnnnnnnnnnnnnnnnnnnnnnnnnnnnnnnnnnnnnnnnnnnnnnnnnnnnnnnnnnnnnnnnnnnnnnnnnnnnnnnnnnnnnnnnnnnnnnnnnnnnnnnnnnnnnnnnnnnnnnnnnnnnnnnnnnnnnnnnnnnnnnnnnnnnnnnnnnnnnnnnnnnnnnnnnnnnnnnnnnnnnnnnnnnnnnnnnngaaatataaaatgcatattgaccgaaacactggcatcattgaaatgttcatggagaagctacaggatgaggatgagggaacgtacactttccagcttcaagatggaaaagcaactaaccattctactgttgttctcattggagatnnnnnnnnnnnnnnnnnnnnnnnnnnnnnnnnnnnnnnnnnnnnnnnnnnnnnnnnnnnnnnnnnnnnnnnnnnnnnnnnnnnnnnnnnnnnnnnnnnnnnnnnnnnnnnnnnnnnnnnnnnnnnnnnnnnnnnnnnnnnnnnnnnnnnnnnnnnnnnnnnnnnnnnnnnnnnnnnnnnnnnnnnnnnnnnnnnnnnnnnnnnnnnnnnnnnnnnnnnnnnnnnnnnnnnnnnnnnnnnngttttccaagaaagatgctgggatttatgaagttatcctgaaggatgaccgaggaaaagataagagcagactgaagcttgtggatgaagnnnnnnnnnnnnnnnnnnnnnnnnnnnnnnnnnnnnnagctttgtctgctacagacctgaaaatccagagcacagccgagggcatccgactgtactcttttgtaacttactacgtggaggatttgaaagttaactggtcccaca

SEQ ID NO: 23600 - DNA, 102 bp, Macaca Mulatta
  misc_feature (1)...(102): n = A,T,C or G
nctgcctgcctgcctgcttgctctctggctgtgctcctgcttaaagaaatcagtccttcctttccgacttagtcctcgggaagaagtttcagcctacgaggt

SEQ ID NO: 23601 - DNA, 1143 bp, Macaca Mulatta
  misc_feature (1)...(1143): n = A,T,C or G
ggaagcagtgcnnnnnnnnnnnnnncgnnnnnnnnnnnngggctctaccggcgggatttgatggcgtgatgtctcacagaaagttctcggctcccagacatgggtcgctcggcttcctgcctcggaagcgcagcagcaggcatcgcgggaaggttaagagcttccctaaagatgatccgtctaagccggtccacctcacagccttcctgggatacaaggctggcatgacccacatcgtgcgggaagtcgacaggccaggatctaaggtgaacaagaaggaggtggtggaggctgtaaccattgtggagacgccacccatggtggttgtgggcattgtgggctacgtggaaacccctcgaggcctccggaccttcaagactgtcttcgctgagcacatcagtgatgaatgcaagaggcgtttctataagaactggcataaatctaagaagaaggcctttaccaagtactgcaagaaatggcaggatgaggatggcaagaagcagctggagaaggacttcagcagcatgaagaagtactgccaagtcatccgtgtcattgcccacacccagatgcgcctgcttcctctgcgccagaagaaggcccaacctgatggagatccaggtgaacggaggcaccgtggccgagaagctggactgggcccgccgagaggctcgagcagcaggtacctgtgaaaccaagtgtttggggcaggatgagatgatccgacgtcatccggggtcaccaagggcaaagggctacaaaaggggtcacccagtcgttggcacaaccaagaaagcctgccccgcgaagacccaccgaggcctgcgcaaagtggcctgtattggggcatggcatcctgctcctgtggccttctcctgtgcacgtgctgggcaaaaaagctacactccccgccctgaaatcaataaaaaaatctttaaaatgggccagggctactttatcaggaagggcagctgaatcaaaaaaaaggcccccccggaaataaacctgctgaaaaaaacctaacccctgtgggttggggcgtttggggccactggaaaccccctgggcctcgggacttaaatgttttctccaaacattttgaaaaaagcaaaggttttttaaaaggcgaaataaaaaaagctc

SEQ ID NO: 23602 - DNA, 1879 bp, Macaca Mulatta
  misc_feature (1)...(1879): n = A,T,C or G
gctgtttcattcaattcagagaacctgtctggacttatcgaaagcaattgtactctatcaaaagaggatatgttnnnnnnnnnnnnnnnnnnnnnnnnnnnnnnnnnnnnnnnnnnnnnnnnnnnnnnnnnnnnnnnnnnnnnnnnnnnnnnnnnnnnnnnnnnnnnnnnnnnnnnnnnnnnnnnnnnnnnnnnnnnnnnnnnnnnnnnnnnnnnnnnnnnnnnnnnnnnnnnnnnnnnnnnnnnnnnnnnnnnnnnnnnnnnnnnnnnnnnnnnnnnnnnnnnnnnnnnnnnnnnnnnnnnnnnnnnnnnnnnnnnnnnnnnnnnnnnnnnnnnnnnnnnnnnnnnnnnnnnnnnnnnnnnnnnnnnnnnnnnnnnnnnnnnnnnnnnnnnnnnnnnnnnnnnnnnnnnnnnnnnnnnnnnnnnnnnnnnnnnnnnnnnnnnnnnnnnnnnnnnnnnnnnnnnnnnnnnnnnnnnnnnnnnnnnnnnnnnnnnnnnnnnnnnnnnnnnnnnnnnnnnnnnnnnnnnnnnnnnnnnnnnnnnnnnnnnnnnnnnnnnnnnnnnnnnnnnnnnnnnnnnnnnnnnnnnnnnnnnnnnnnnnnnnnnnnnnnnnnnnnnnnnnnnnnnnnnnnnnnnnnnnnnnnnnnnnnnnnnnnnnnnnnnnnnnnnnnnnnnnnnnnnnnnnnnnnnnnnnnnnnnnnnnnnnnnnnnnnnnnnnnnnnnnnnnnnnnnnnnnnnnnnnnnnnnnnnnnnnnnnnnnnnnnnnnnnnnnnnctgaagatggaaaaagtattttatctgccttagacaaaagcgctacacatactgcaggctcaggnnnnnnnnnnnnnnnnnnnnnnnnnnnnnnnnnnnnnnnnnnnnnnnnnnnnnnnnnnnnnnnnnnnnnnnnnnnnnnnnnnnnnnnnnnnnnnnnnnnnnnnnnnnnnnnnnnnnnnnnnnnnnnnnnnnnnnnnnnnnnnnnnnnnnnnnnnnnnnnnnnnnnnnnnnnnnnnnnnnnnnnnnnnnnnnnnnnnnnnnnnnnnnnnnnnnnnnnnnnnnnnnnnnnnnnnnnnnnnnnnnnnnnnnnnnnnnnnnnnnnnnnnnnnnnnnnnnnnnnnnnnnnnnnnnnnnnnnnnnnnnnnnnnnnagaacctgctaaggctgcctcagnnnnnnnnnnnnnnnnnnnnnnnnnnnnnnnnnnnnnnnnnnnnnnnnnnnnnnnnnnnnnnnnnnnnnnnnnnnnnnnnnnnnnnnnnnnnnnnnnnnnnnnnnnnnnnnnnnnnnnnnnnnnnnnnnnnnnnnnnnnnnnnnnnnnnnnnnnnnnnnnnnnnnnnnnnnnnnnnnnnnnnnnnnnnnnnnnnnnnnnnnnnnnnnnnnnnnnnnnnnnnnnnnnnnnnnnnnnnnnnnnnnnnnnnnnnnnnnnnnnnnnnnnnnnnnnnnnnnnnnnnnnnnnnnnnnnnnnnnnnnnnnnnnnnnnnnnnnnnnnnnnnnnnnnnnnnnnnnnnnnnnnnnnnnnnnnnnnnnnnnnnnnnnnnctgctgcggtgtcactgggctaccatgagatccaagttgaaatcaggagcctactttgattgtaggtttgaatgacgtgtcctgaagcctcagaggcagcaggagactatcaaagcttagatgcctccttctctgcccccagactctgtcccacttggaggagggctgtaggaagattccttcctgccaagccaccttccagtgagctctggatgaagctctggccaaccaaagacactgtccccacagcaggtgcctggtgggccacgtgttctcacacaggtagaggagctgggcttctcgcccaagcacaaacctttctatggaaagcagccatatttg

SEQ ID NO: 23603 - DNA, 236 bp, Macaca Mulatta
  misc_feature (1)...(236): n = A,T,C or G
ggaataagggccatcatgtgtgggtcactaaggacgagcttggtgactatttgaaaccaaaatacctggcccaagttaggaggtttctttcggacctctgatgggctgagctgcctgtggacggtgctcagacaagtctgggattagagcctcaagaacattgtgtgattgcctcacatttgcaggtaatatcaagcagnnnnnnnnnnnnnnnnnnnnnnnnnnnnnnnnnnnnc

SEQ ID NO: 23604 - DNA, 1263 bp, Macaca Mulatta
  misc_feature (1)...(1263): n = A,T,C or G
gatcgcagctgaagggtctgttgagggcttcgggaaaggcggnnnnnnnnnnnnnacaggtgaagatctctggagatcatgacaaagaaaagaattgctgtgattgggggaggagtgagcgggctctnnnnnnnnnnnnnnnnnnnnnnnnnnnnnnnnnnnnnnnnnnnnnnnnnnnnnnnnnnnnnnnnnnnnnnnnnnnnnnnnnnnnnnnnnnnnnnnnnnnnnnnnnnnnnnnnnnnnnnnnnnnnnnnnnnnnnnnnnnnnnnnnnnnnnnnnnnnnnnnnnnnnnnnnnnnnnnnnnnnnnnnnnnnnnnnnnnnnnnnnnnnnnnnnnnnnnnnnnnnnnnnnnnnnnnnnnnnnnnnnnnnnnnnnnnnnnnnnnnnnnnnnnnnnnnnnnnnnnnnnnnnnnnnnnnnnnnnnnnnnnnnnnnnnnnnnnnnnnnnnnnnnnnnnnnnnnnnnnnnnnnnnnnnnnnnnnnnnnnnnnnnnnnnnnnnnnnnnnnnnnnnnnnnnnnnnnnnnnnnnnnnnnnnnnnnnnnnnnnnnnnnnnnnnnnnnnnnnnnnnnnnnnnnnnnnnnnnnnnnnnnnnnnnnnnnnnnnnnnnnnnnnnnnnnnnnnnnnnnnnnnnnnnnnnnnnnnnnnnnnnnnnnnnnnnnnnnnnnnnnnnnnnnnnnnnnnnnnnnnnnnnnnnnnnnnnnnnnnnnnnnnnnnnnnnnnnnnnnnnnnnnnnnnnnnnnnnnnnnnnnnnnnnnnnnnnnnnnnnnnnnnnnnnnnnnnnnnnnnnnnnnnnnnnnnnnnnnnnnnnnnnnnnnnnnnnnnnnnnnnnnnnnnnnnnnnnnnnnnnnnnnnnnnnnnnnnnnnnnnnnnnnnnnnnnnnnnnnnnnnnnnnnnnnnnnnnnnncacagagctctgagtcagcatccaaccgtaaatgatgacctgccaaatcgtatcatttctgacttggtgaaagtgaaaggaaatgtgaaggaattcacggagacagctgccatatttgaggatgactccagggaggatgacattgatgctgttatctttgccacaggctatagctttgcctttccatttctggaagattccgtcgaagtggtcaaaaacaagatatccttgtataaaagggtcttccctcctaacctggaaaggccaactcttgcaatcataggcttgattcagcccttatgagccattatgcccatttcagaactccaaggacgctgggccactcaggtatttaaaggt

SEQ ID NO: 23605 - DNA, 787 bp, Macaca Mulatta
  misc_feature (1)...(787): n = A,T,C or G
gggagagcctcccacggcccacagcgcacagccctccttacagtctagaaaaaatgacagacctcgtagctgtctgggatgttgctttaagtgacggagtccacaagattgaatttgaacatgggactacatcaggcaaacgagtagtatatgtagatggaaaggaagagataaggaaagattggatgttcaaattagtgggcagagaaacattctgtgttggagctgcgaagacaaaagcgaccataaatatagatgctatcagtggttttgcttatgaatatactctggaaattaatgggaagagtcttaagaagtatatggagaacagatcaaaaaccaccaatacttgggtattacacatggatggtgagaactttagaattgttttggaaaaagacactatggacgtatggtgcaatggtaaaaaactggagacagcaggtgagtttgtagatgatgggactgaaactcacttcagtctcgggaaccacgactgttacataaaggctgtcagtagtgggaagcggaaagaagggattattcatactctcattgtggataatagagaaatcccagagattgcaagttaatgaatcttaatcttaagaagtaaagatcaggactttttaattactgtggtaattaaattgttcagtatgtacttatcagtacatttagtctgcaatgnnnnnnnnnnnnnnnnnnnnacatgaaactgtaacattccaagggtcaggaanaaaaacaattatgtatagtcataaaaattacaatgtatgatgca

SEQ ID NO: 23606 - DNA, 3676 bp, Macaca Mulatta
  misc_feature (1)...(3676): n = A,T,C or G
gagggacctccctggccttctgcggaggtggagtaagctctgtcaaggcagcttactccacccgtcccttcctgtgagtgacaccagtgacgaagcggactcctccacacaggcatcctcagggcccagggccctgggggcaccttcctcttatttgttgagaaaaaaagtggcattgtgctcacaccgggaagctggagcagagctgacatgctcgggaaagggcagaggtcactgggggtgggaagggtcatccagtctagactcagcacctcgtgggttggttaactgaggctcagagtgctggtgccaggcctgaggcctcgcggtgacccctctctctggttcccagcacctgcctgagacccgcctcaggcacccatgacctggatctccctgtttcctcgtccagggcctgaggaactgcctccccaggtctgtctctggaggctctgagggagatgggcttgggggctctaggaggaggcagggattccaggatgtcaggaaggcaggtgggctgggtcccacccagagaagtaactgtgggtgacatttgggcctccccgccttccccactnnnnnnnnnnnnnnnnnnnnnnnnnngtcagggctgcccgtgacccagacaccactgtccatcctgtgaggctcccgtctgggcatgtcctgggtggattcctcctttctgttaagtagctacatgaggcaggggctcctggatccaaagcaaatgacaggaattccagagccaggtgcatccactcagggcagccagtattcatggagctgcctctagcacatggaggagagtgaaagtcagcccgcccctctcatgagaaaagaacctgctgatccctctcagcctccagcgttgcaagtgcaaggccagtggagataatctgcaacgtgcacgagggagtgtgccaggggctgtgtgcaggagtatgagtgtgcaagagcgagagcacatggctcctgctgtacctcaaggtgtgggctcctggtggctgctcagcgttcccaggcgtgagaggccctgtgtgtcctaagctgcctgagatttctgtggctgatcgcatcctcagtttcttgtccacctgttcactagcaagagtccaaggctccaaggacaccctccctgcacatgattgggtgttcatggtggcctgggctgtgtcctcccctggggatgaaggttgggatgtccatggtggcctgnnnnnnnnnnnnnnnnnnnnnnnnnnnnnnnnnnnnnnnnnnnnnnnnnnnnnnnnnnnnnnnnnnnnnnnnnnnnnnnnnnnnnnnnnnnnnnnnnnnnnnnnnnnnnnnnnnnnnnnnnnnnnnnnnnnnnnnnnnnnnnnnnnnnnnnnnnnnnnnnnnnnnnnnnnnnnnnnnnnnnnnnnnnnnnnnnnnnnnnnnnnnnnnnnnnnnnnnnnnnnnnnnnnnnnnnnnnnnnnnnnnnnnnnnnnnnnnnnnnnnnnnnnnnnnnnnnnnnnnnnnnnnnnnnnnnnnnnnnnnnnnnnnnnnnnnnnnnnnnnnnnnnnnnnnnnnnnnnnnnnnnnnnnnnnnnnnnnnnnnnnnnnnnnnnnnnnnnnnnnnnnnnnnnnnnnnnnnnnnnnnnnnnnnnnnnnnnnnnnnnnnnnnnnnnnnnnnnnnnnnnnnnnnnnnnnnnnnnnnnnnnnnnnnnnnnnnnnnnnnnnnnnnnnnnnnnnnnnnnnnnnnnnnnnnnnnnnnnnnnnnnnnnnnnnnnnnnnnnnnnnnnnnnnnnnnnnnnnnnnnnnnnnnnnnnnnnnnnnnnnnnnnnnnnnnnnnnnnnnnnnnnnnnnnnnnnnnnnnnnnnnnnnnnnnnnnnnnnnnnnnnnnnnnnnnnnnnnnnnnnnnnnnnnnnnnnnnnnnnnnnnnnnnnnnnnnnnnnnnnnnnnnnnnnnnnnnnnnnnnnnnnnnnnnnnnnnnnnnnnnnnnnnnnnnnnnnnnnnnnnnnnnnnnnnnnnnnnnnnnnnnnnnnnnnnnnnnnnnnnnnnnnnnnnnnnnnnnnnnnnnnnnnnnnnnnnnnnnnnnnnnnnnnnnnnnnnnnnnnnnnnnnnnnnnnnnnnnnnnnnnnnnnnnnnnnnnnnnnnnnnnnnnnnnnnnnnnnnnnnnnnnnnnnnnnnnnnnnnnnnnnnnnnnnnnnnnnnnnnnnnnnnnnnnnnnnnnnnnnnnnnnnnnnnnnnnnnnnnnnnnnnnnnnnnnnnnnnnnnnnnnnnnnnnnnnnnnnnnnnnnnnnnnnnnnnnnnnnnnnnnnnnnnnnnnnnnnnnnnnnnnnnnnnnnnnnnnnnnnnnnnnnnnnnnnnnnnnnnnnnnnnnnnnnnnnnnnnnnnnnnnnnnnnnnnnnnnnnnnnnnnnnnnnnnnnnnnnnnnnnnnnnnnnnnnnnnnnnnnnnnnnnnnnnnnnnnnnnnnnnnnnnnnnnnnnnnnnnnnnnnnnnnnnnnnnnnnnnnnnnnnnnnnnnnnnnnnnnnnnnnnnnnnnnnnnnnnnnnnnnnnnnnnnnnnnnnnnnnnnnnnnnnnnnnnnnnnnnnnnnnnnnnnnnnnnnnnnnnnnnnnnnnnnnnnnnttcatatgaatgggcacgtacacgaaaaaccacggtaacgtaattagaatagtcagagaaacgtagccagannnnnnnttcatatgaatgggcacgtacacgaaaaaccacggtaacgtaattagaatagtcagagaaacgtagccagaagaatntgcaacatgctcttgtaacaccaaattcgatcagtttaaaagaaatgatagttatgtgggcgattgaaaagtaaatgtattcttctttttaaggtaaaaatttggacccttatcacgtatacacccctatgtactcttcaaatcagcgtcattaatttatatacatttttgctaatctgagtcagcacaggctgcggctgtcagaatggacacctttgggttgttgggtttctctaagtttctggggtgaagctgcgttattcagaacgtagctcttggctgccatctcggggcttattaaggactgtgaactttatccacaagccatgacaatatctgtcccaccgaacgctccctccaacacactcttactcctgtgatgtgtgttaagtgctccgatgatgctgaaaacagctcaggatgtgaaaaggcaggaacagttctgaggtcaaaggccgatgtcctgtttctctttccctctgtgaccaactcccttcccagtggtaaccagtacccacagcgtggtttgaatttccgcacgctgttgtctgtgcactcnnnnnnnnnnnnnnnnnnnnnngcatgtgggtgatgctgggcattttgtgtatgagtgggatgcacatacacacatctacatcccatatcatgcccacgtatctgtaacttgcttttcccgtgtaagaacgtttcttagaatctgttcaacacatgtgtgtgagtgattgaaggcatttctaacccattttgaagatggctacgtaggactgtacggatattgtactgatgtcaatttgaccacatccattgtttccatcttttgggctgttcttgtatattttactttccgtataacactgtgacattgagaattggtacctaaaacagtctatttgctttacattaaattcgtaggctaatttgtgt

SEQ ID NO: 23607 - DNA, 831 bp, Macaca Mulatta
  misc_feature (1)...(831): n = A,T,C or G
ggatattggcctgagaggagagtggactgagcttcgccgacacgaggtgaccatctgcaattacgaagcatctgccaacccagcagaccatagggtccatcaggttaccccacagacacactttatttcctaagggctggccaaggctcgcatagaggtgctgtgtcagtgaagatgtacgactacctgttgggaaggacaaagggatgaggctccacagagagttggctgccacagcctctgccaagctttgtctttggggcttgctgcagaaacctggactacggaagatacgataccactgagagggatgtgtaggtgccaggggaccatcgttgttctctagggcgctgtggaaattgggtcttgggctgggtagcatctggcagtcatggataacgtttgcttttccagtcaatgtggccatgtgattccaagtgtcatgtcttggcgagggcgtgtgtgtgtagacnnnnnnnnnnnnnnnnnnnnnnnnnnnnnnnnnnnnnnnnnnnnnnnnnnnnnnnnnnnnnnnnnnnnnnnnnnnnnnnnnnnnnnnnnnnnnnnnnnnnnnnnnnnnnnnnnnnnnnnnnnnnnnnnnnnnnnnnnnnnnnnnnnnnnnnnnnnnnnnnnnnnnnnnnnnnnnnnnnnnnnnnnnnnnnnnnnnnnnnnnnnnnnnnnnnnnnnnnnnnnnnnnnnnnnnnnnnnnnnnnnnnnnnnnnnnnnnnnnnnnnnnnnnnnnnnnnnnnnnnnnnnnnnnnnnnnnnnnnnnnnnnnnnnnnnnnnnnnnnnnnnnnnnnnnnnnnnnnnnnnnnnnnnnnnnnnnnnnnn

SEQ ID NO: 23608 - DNA, 357 bp, Macaca Mulatta
  misc_feature (1)...(357): n = A,T,C or G
aggtctggtagaaggaacagtatcagttgactgagtaggtctccctggcagttgtgattcagaggcctagaaagctgaacccacacctggcaggaagggggtggtttgtgggacctgngctgatgtgtgatgaaattttaagccccagctatagctactacaaagaaaagnnnnnnnnnnnnnnnnnnnnnnnnnnnagacaatgaatgtaaaactatgcaagaatcacaggaaacccacatatccaaccacctagatgaagttgttgctgctgttagcatcactaaaagtaagaagttccaaaacaagctgcctcagacagcactattccagcctcctcgagagaaactccacctc

SEQ ID NO: 23609 - DNA, 840 bp, Macaca Mulatta
  misc_feature (1)...(840): n = A,T,C or G
gggcgggctctcttcctcggcgctgcctacggaggtggcagccatctcctcctcgaaggcatcatggccgccctcagaccccttgtgaagcccaagatcgtcaaaaaaagaaccaagaagttcatccggcaccagtcagaccgatatgtcaaaattaagcgtaactggcggaaacccagaggcattgacaacagggttcgtagaagattcaagggccagatcttgatgcccaacattggttatgggagcaacaaaaaaacaaagcacatgctgcccagtggcttccggaagttcctggtccacaacgtcaaggagttggaagtgctgctgatgtgcaacaaatcttactgtgccgagattgctcacaatgtttcttccaagaaccgcaaagccatcgtggaaagagctgcccagctggccatcagagtcaccaaccccaacgccaggctgcgcagtgaagaaaatgagtagacagctcatgtgcacgttttctgtttaaataaatgtaaaaactgccaatctgaannnnnnnnannanannnnataaatgtctgatgcgcaacaaannnnnnnnnnnnnnnnnnnnnnnnncccttgtttatgggccaccttcggggnnnnnnnnnnnnnnnnnnnnnnnnnnnnnnnnnnnttcggtttgagggccccccgaggccccccatttaggggttacattgaacccttggtgtcaaaatccctggtttctccccaagaaaaaaaacctggagtcaacgagaaaatatgagggctttgggaactctctcccccccatataataaaaaaatccccctcggggcgggggaaaaacagaaaaggtat

SEQ ID NO: 23610 - DNA, 314 bp, Macaca Mulatta
atctctctaatagtattgacttggtaaagggcatttacacatgtaactggatccagtgaatgtcttatgctctgcttttgctcctggtgattttaaattctttttcctttttaaaagacatattaaaaatgtactgttgaatcaaattccaagggataccgcccctatggacttatggctttatttaactgtattaaaaagccttgatttatccaaaattgtattatagagtgtagaatgaatactagattgataagttgcaattatttgaagaacaatggtgatatgctctacttatcttggattagctaaga

SEQ ID NO: 23611 - DNA, 513 bp, Macaca Mulatta
tactactttctagttagctagctttgtagaattttgagaaaatatgttttaaacattattaaaaatcatctgtgcaaaatttgcggaccttactgtttttataagtagtttcacgactgaatgtgacagcataacaaactgtattttttccatttgtccaattaagtctgtactatccatatttttctatttctcctaaaggatgaagacctacaagagatggaaaatttagcccaaagaatggaaactcagtttggccaattttttgatcatgtgattgtgaatgacagcttgcatgatgcatgtgcccagttgttgtctgccatacagaaggctcaggaggagcctcagtgggtaccagcaacatggatttcctcagatactgagtcttaatgagacttcttgtttaatgctggagttttaacactgtgcccttgttacagcgatccacagttgcaatctaaaacagcagtatttgacccattataatgtgtacaactttaaaagtgcagt

SEQ ID NO: 23612 - DNA, 857 bp, Macaca Mulatta
  misc_feature (1)...(857): n = A,T,C or G
ggggattccagcggctgacagcacccgggccgagatgtctcgctcagtggccttagccgtgctggcgctactctctctttctggcctggaggctatccagcgtactccaaagattcaggtttactcacgccatccaccagagaatggaaagccaaatttcctgaattgctatgtgtctggatttcatccatctgatattgaagttgacttactgaagaatggagagaaaatgggaaaagtggagcattcagacttgtctttcagcaaagactggtctttctatctcttgtactacactgaattcacccccaatgaaaaagatgagtatgcctgccgtgtgaaccatgtgactttgtcagggcccaggacagttaagtgggatcgagacatgtaagcagcatcatggaggtttgaagatgccgcattttggattggaatgaattccaaattctgccttccttggctttttaataattgatatgccttaatacagttttttgccaaaaaatgcagaagtttataataatggttaacacaggcgtgatcttctgagaattctcactttgagtgtatcacccctttgagggacgggcctttccccccccctttttgagaggtgttcggggggcacctcttttttttttgggaggggggtgtggcgacaatttatnnnnnnnnnnnnnnncannnnnnnnnnnnnnnnntctttatccccaaaaattttcacacttatttttgtggtgcaaaagaattagggcccccctcttcaaaaacacccttggggcccccccgaaaaaaggtgnnnnnnnnnnnnnnnnnnnnnnnnnncgcgcacttaaaaaaaaagagtttccccc

SEQ ID NO: 23613 - DNA, 745 bp, Macaca Mulatta
  misc_feature (1)...(745): n = A,T,C or G
aaaatcctgccttgcttcgttggacctatgcaagaataaatgtctatcctaatttcagacccactcctaaaaactcactcctgggagctctgtttggaatcgggcccctcatcttcctgtattgtattatcaaagctgacagggtaagtattcagaccagatgtttagtatttgagtgacagggtccctcgctaggggccagctgcagctccttctcnnnnnnnnnncaccagtgcccctcccaccttggggctgtacgctgccttcccttcctctcttcttttatctttattcctttccagcaggagttaaaacaaagttttcagttacctttgtctatttttcttagttcatttgtttttaaaaaagatgatgtttattgggtgaagtattagcagaatacataaatcatttagtgcgtttcctgtttgtgtgaattctgtttacgttggtcacattttgcgaattaatgttaaaacctattaatactctagggacagagaagcacaagctgcctgtggggaatagctgccatcagcagcctgggtatatgattgtagagaaagtcaagctgatctttggcaccaaactgttccacatctggtactaaagcctgagctgcagcccccaggattgtgttgccactggagcccactcatctagctttgtctttaactggcccatctgctttcccattagagctcgtgtattttgattatctggtaaatgatctacttagcagaaa

SEQ ID NO: 23614 - DNA, 598 bp, Macaca Mulatta
taccctccaaaggacactatcacccagtccatgagggaagacagcactggggtgcccaggcctcagatttacctggctggtcttcgtggaggaaagagtgaaatcaccgatgaggtcaaggtgaatttaactagagctgtggatgaaacctaattagagacaacgttttaaagtagatgctactcaatatgaacactagcaagtacttaaaggtatattaacatctataaaaattaattttgtggggtggcacattcattggttgtatgtttattgggttcccacattttatcaaactgttttctgtaatacagttttcattctgttgaaaaataaaactgtccatttatcttttatttgttagaaaaagtttgtcagcattaagattgaaattataacatttagatagaaatatattacaagattattactggaatagaagtctatttctaaaccatatttagtgttaaacattacaaacttaaaacctaatcaatatttttagctttattagctattaaatgttaccatagattaaactgatacgtaacaaaaccttactaatttggaacaattggagcaaaggtccacgtgatgt

SEQ ID NO: 23615 - DNA, 2334 bp, Macaca Mulatta
  misc_feature (1)...(2334): n = A,T,C or G
ttgggattcaggagaatattccgcgcggggggacgacaatgaaggaggagccgctgggcagcggcatgaacccggtgcgctcgtggatgcacacggcgggcgtggtggacgccaacacggccgcccagagnagcggcgtggggctggcgcgggcgcacttcgagaagcagccgccttccaacctccggaaatccaatttcttccacttcgtgctggcgctctacgacaggcaggggcagccggtggagattgaaaggaccgcttttgtggactttgtggagaaagagaaagngagccaaacaacgagaaaaccaacaacggcatccactataaactccagttattgtacagcaacggnggagtcagaacagagcaagatctgtatgttcgcctcatagattcaatgaccaaacaggnnnnnnnnnnnnnnnnnnnnnnnnnnnnnnnnnnnnnnnnnnnnnnnnnnnnnnnnnnnnnnnnnnnnnnnnnnnnnnnnnnnnnnnnnnnnnnnnnnnnnnnnnnnnnnnnnnnnnnnnnnnnnnnnnnnnnnnnnnnnnnnnnnnnnnnnnnnnnnnnnnnnnnnnnnnnnnnnnnnnnnnnnnnnnnnnnnnnnnnnnnnnnnnnnnnnnnnnnnnnncaggttgttgtatcgacaacagtcaacgtggacggccacgtgctggccgtgtcagacaacatgtttgtgcacaacaattccaaacatgggaggcgggcccgccgcctcgacccgtcagaaggtacggccccttcttatctggaaaatgnnnnnnnnnnnnnnnnnnnnnnnnnnnnnnnnnnnnnnnnnnnnnnnnnnnnnnnnnnnnnnnnnnnnnnnnnnnnnnnnnnnnnnnnnnnnnnnnnnnnnnnnnnnnnnnnnnnnnnnnnnnnnnnnnagctgataactccccatgccatccgagtccagaccccgccgaggcacattcctggcgtcgtcgaagtgaccctctcctacaaatccaagcagttctgcaaaggtgctcctgggcgctttgtctacaccgncccttaatgaaaccacccatagattacggctttcagaggtggcagaaagtgatcccaagacatccggtgatccccgaaaggttacccaaggnnnnnnnnnnnnnnnnnnnnnnnnnnnnnnnnnnnnnnnnnnnnnnnnnnnnnnnnnnnnnncaggagatcatcttgaagcgagcggcggacatcgccgaggcgctgtacagcgttccccgcaatcacaaccagatccccaccctgggcaacacccctgcgcacacgggcatgatgggcgtcaactccttcagcagccagctagccgtcaacgtgtcggagacgtcacaagccaacgaccaagnagtcggctacagtcgcaatacaagcagcgtgtccccgcgaggctacgtccccagcagtactccccagcagtccaattacaacacagtcagcactagcatgaatggatatggaagtggcgccatggccaatctagggggtccctggctcgcctggatttcttaatggctcctccgctaactctccctacggcantagtgccgtccagccccaccatggcagcctcttcggtcaccctcccttcaaactgtagcagcacacacggcattttctcattctcacctgccaatgtcatctccgcagtgaaacagaagagcgccttcgcgccggtggtccggccccaagcctctcctcctccttcctgcaccagcgccaacgggaacggactgcaagnnnnnnnnnnnnnnnnnnnnnnnnnnnnnnnnnnnnnnnnnnnnnnnnnnnnnnnnnnnnnnnnnnnnnnnnnnnnnnnnnnnnnnnnagctatgtctgggctggtagtcccgccaatgtgagggactcctgtttaccttccgcagcacccagcatcaaaggacggacttcaggggacacatttagtatattaagacatgctgatggaaacagtatcttcaaaaatatcagcagcaattgaaatgctacaaaagactttgtttaaagattttatttaaactactaagaatcaacatgcaaacagcctacttcttcatgaacaattccattttattgactgaacttttctcatattttcacatttctcagtcctgaagaataaggaaaacaaagcgacgcctattttgtataaagtttctgactccgtcttggccatgtctagtaattgctatgtgttggggagaaacttttgtgaatgcaccattttgaatgatcatgaaacgctgatgaaaaatgcctccaaacatttttctgtactcatacttagattcacaatggttgtgt

SEQ ID NO: 23616 - DNA, 728 bp, Macaca Mulatta
  misc_feature (1)...(728): n = A,T,C or G
gggaaaacccccggtttttttactggaatnnnnnnnnnnnnnnnnnnnnnnnncctgggttttggtgttgccgcttcccgtagtccccaagctattggggaagatggaggcaaggggagtcactgaaacccaggaggttgaggtttccagtaagccgagatcacgccaatgcattcccagcctgggtaacacagcgagactccatctaaaaaaaataacattaatcattaaggataaaaatgaactgagcatggtggtccatttctgtagtcacagctatttgcagtactgaggtgggaggatcacttgagcctgagggagtcgagactgcagcgagctgtgatcatgccactgtactccagcctaggtgacagacagacactctgttgtcccagctccttgggaggctgaagcaggaggatcacttgagcctggaaggttgaggctgcagtgagctgtgattgtgccactgcactgcaggctgggtgacagagtgagttcctggttgacagtagtccccagagaaaataaatcaccggccgcgttgcatagggcaagtaaagtcatcttgaagcttcagtttcatggttaacctgcctcttttcgtcctttaaacaatcaaagggcagatgcactggtgtctgcagtctttgctgatgcacaagcattccattctttaactcatcttaatgccgcaggccttagaaaaagatatagtcacatacccc

SEQ ID NO: 23617 - DNA, 85 bp, Macaca Mulatta
acgtcactggcggcgcccttcagcatttcggacggaagatggcgtccgccacccgtctcatccagcggctgcggaactgggcgtc

SEQ ID NO: 23618 - DNA, 633 bp, Macaca Mulatta
  misc_feature (1)...(633): n = A,T,C or G
cagggtcggcgcgcgcggctgtatcggagctcatgcagctgttcccgcgaggtctgtttgaggacgctctgccgcccatcgtgctgaggagccaggtgtacagcctcgtgcctgacaggaccgtggccgaccggcagctgnnnnnnnnnnnnnnnnnnnnnnnnnnnnnnnnnnnnnnnnnnnnnnnnnnnnnnnnnnnnnnnnnnnnnnnnnnnnnnnnnnnnnnnnnnnnnnnnnnnnnnnnnnnnnnnnnnnnnnnnnnnnnnnnnnnnnnnnnnnnnnnnnnnnnnnnnnnnnnnnnnnnnnnnnnnnnnnnnnnnnnnnnnnnnnnnnnnnnnnnnnnnnnnnnnnnnnnnnnnnnnnttggcttcagggactcagaaatcacnnnnnnnnnnnnnnnnnnnnnnnnnnnnnnnnnnnnnnnnnnnnnnnnnnnnnnnnnnnnnnnnnnnnnnnnnnnnnnnnnnnnnnnnnnnnnnnnagggcgcgaggctgtccttggtatggtccggaaggccaaataccaggagctgctcctttcagagctcctgggccggcgggctcctgccgttgtacggcttggtctcacctaccatgtgcacgacctcattggggcccagctaatggact

SEQ ID NO: 23619 - DNA, 991 bp, Macaca Mulatta
  misc_feature (1)...(991): n = A,T,C or G
gatctgaaaggaatgcacaaaatgatgaatgaggtatttttaacaaaggtacatgggtaaattaacagcagcaatgtaaaaaagactgagggagcagcaatgtggagagggaaggaaaggaagatgaataagaacaatcatacaaatcatcatcaaaattaaactttataaatctaaacacaatatctacaacctttctgaagattatgttttgttaaattgtctcttctaagttttgtatttttacagttttcaccgtagagaaaaaaatattaatagttaccaaaggaataaaagattaaaataatttgttacacatctgcagatagctccttatggaatttggaacactaatttcataatgatatttggatcaataaatgtgaaactgtcacactgagtgtaggtactgttttccccacaacggacactactgcactggcatctagcagaaattgtaagttatttggaaggttactaaacctactgggactaaggttttcaaacttttgcctttcaaattaaaattaaaaactaattcactctgggcaattcaggtattctgcggaaattcaagtactctagttttaaatacgaattttaaaaaacgcaacccaagtatcctttcctctcaacttctgtgaggccaagccacgacctccacctatccaatctttgctgctagataagaactcttttggtagtgctaggcaacaggcatgatgtgacaaacctagacatcaaaacttttccacagaaagataaggtaaacaagatatacttagcaccacacccatttaaatgcacaagcagccaannnnnnnnnnnnnnnnnnnnnnnnnnnnnnnnnnnnnnaagctccagctggtcaggaaacattgtctttacnatcaagataaagatctggctcagggtgttcagccattcctcacctacaggccagcctaagctccattctccaatgccatcaccaccagaatcggaacattct

SEQ ID NO: 23620 - DNA, 163 bp, Macaca Mulatta
aggactgtggaggagggggctgaaagccctgtctacttggccctcctgcctccagataacactgagccacaaggccagctggtccatgacaaagttgtgcaaaactggtaaacatctgcttcggagcttgatgcttaataaaggttggtggaatgaatgaatg

SEQ ID NO: 23621 - DNA, 614 bp, Macaca Mulatta
  misc_feature (1)...(614): n = A,T,C or G
gttacacggtgtgggcacataacctcattgccattgctcgtcttcggggctctgatctgaatgtgcttgaagtcaccgaagaaagcattgattttgaccaaggtgaactggccgaccaggatgtagatccagtgcataaccttattgagcaggtatccctgggcctgggtcaaccttggcacgcagtcatggacatcgaatcactcagtgtcttcactgaaccaaatcgtcatttttacagagagatgcaaagcttcagtgaagacatttagcttttttttaaatgtagaattcctgtggttacatatgcaagtagggtcctattatgnnnnnnnnnagtagtgtgaattaatccttttgtgctgtgtttaatcagtattagctttatagaattatatatgtatattctacttcttgatcaaagaacgtagtcgggtattggtttagaagttcaaagtgacaatgtatagggctttcacggttaatggacttgttaccaaaccttaaggatatacagccgaagattgtctgaggttgctggctaactttatttttcactgagttactctgccttttcgacgtttttattctttgtgtgtcagagttcagagctc

SEQ ID NO: 23622 - DNA, 2072 bp, Macaca Mulatta
  misc_feature (1)...(2072): n = A,T,C or G
gggcctgcgcctggcgttgttcatcgcagttgctcgggatctttgcacatactccacaggccgttggaggtgagctgctgccggccacgccagaggctgcaacaccannnnnnnnnnnnnnnnnnnnnnnnnnnnnnnnnnnnnnnnnnnnnnnnnnnnnnnnnnnnnnnnnnnnnnnnnnnnnnnnnnnnnnnnnnnnnnnnnnnnnnnnnnnnctgtgaccagaagagctctgaagagacaggcgagnagttgcatccttaatgtccggtcaaggagtggtgacaccaatgggtcttnctgtgaccagaagagctctgaagagacaggcgannnnnnnnnnnnnnnnnnnnnnnnnnnnnnnnnnnnnnnnnnnnnnnnnnnnnnnnnnnnnnnnnnnnnnnnnnnnnnnnnnnnnnnnnnnnnnnnnnnnnnnnnnnnnnnnnnnnnnnnnnnnnnnnnnnnnnnnnnnnnnnnnnnnnnnnnnnnnnnnnnnnnnnnnnnnnnnnnnnnnnnnnnnnnnnnnnnnnnnnnnnnnnnnnnnnnnnnnnnnnnnnnnnnnnnnnnnnnnnnnnnnnnnnnnnnnnnnnnnnnnnnnnnnnnnnnnnnnnnnnnnnnnnnnnnnnnnnnnnnnnnnnnnnnnnnnnnnnnnnnnnnnnnnnnnnnnnnnnnnnnnnnnnnnnnnnnnnnnnnnnnnnnnnnnnnnnnnnnnnnnnnnnnnnnnnnnnnnnnnnnnnnnnnnnnnnnnnnnnnnnnnnnnnnnnnnnnnnnnnnnnnnnnnnnnnnnntgattcggaagctcccgaagacaacagtaatgattcgggaacccccgacgacaacagtaatgattcgggaacccccgacgacaacagtaatgattcgggaactcccgacgacaacagtaatgattcaggaactcccgacgacaacagtaatgattcggatgttcccgacgacaacagtaatgattcggaagttcccgaggacaacagtaatgattcggaagttcccgacaacagtaatgattcgggaactcccgacgacaacagtaatgattcagatgttcccgacgacaatagtaatgatttggaagttcccgacaacaatagtaatgatttggaagttcctgtgccagcagaagatttgtgtaatgaaggccagattgcctcaaatgaagaagagctgggtgaggctgctgtctcccagcacgattcatctgatgatgctggtgagcagaatcttggtgagaatctcagcgaaccaccaaatgatcctgaggctaaccttgaagtttcagagagaaagctgccagctgaggaagagcctgcacctgtggtggaacaatcagggaaaaggaagtcaaaaaccaaaactattgtggagccactaaaacaacagaaggcaaaaaccaaaactattgtggaaccgctgaggaaaaggcaggcaaagaccaaaaatatagtggagccactgaagaagaggaaggcaaaaaccaaaaatgtatctgtgacacctggnnnnnnnnnnnnnnnnnnnnnnnnnnnnnnnnnnnnnnnnnnnnnnnnnnnnnnnnnnnnnnnnnnnnnnnnnnnnnnnnnnnnnnnnnnnnnnnnnnnnnnnnnnnnnnnnnnnnnnnnnnnnnnnnnnnnnnnnnnnnnnnnnnnnnnnnnnnnnnnnnnnnnnnnnnnnnnnnnnnnnnnnnnnnnnnnnnnnnnnnnnnnnnnnnnnnnnnnnnnnnnnnnnnnnnnnnnnnnnnnnnnnnnnnnnnnnnnnnnnnnnnnnnnnnnnnnnnnnnnnnnnnnnnnnnnnnnnnnnnnnnnnnnnnnnnnnnnnnnnnnnnnnnnnnnnnnnnnnnnnnnnnnnnnnnnnnnnnnnnnnnnnnnnnnnnnnnnnnnnnnnnnnnnnnnnnnnnnnnnnnnnnnnnnnnnnnnnnnnnnnntctcatggtgacacatggaagtattatgccaggaaatccaacaggatacacccggagctgcccaaggtcacccgttgccataactataagattaactacaaggtccattatgaatgtactgggtgcaaaa

SEQ ID NO: 23623 - DNA, 3224 bp, Macaca Mulatta
  misc_feature (1)...(3224): n = A,T,C or G
gatttgcatccattgttgcaaaaaatggcgnnnnnnnnnnnnnnnnnnnnnnnnnnnnnnnnnnnnnnnnnnnnnnnnnnnnnnnagctcccacgtgtggacggacgacctgtcccacagagtcctggcctatctgaattcccggaatgttgccttcaccatctccagcctgcaggncaggcagccgtgggaaaccacctggagcagcgtctgcaccagccccagaagctgctggaggacctgaggaagacagatgcccagcagttccgcactgctatgaaatgcctcttagaagacaagaaggaccgcttggnggacctgaaagacatcatcatcgacttaggagagattcgagaacgagccttgcagagccctggcgtgaaccgcagcctgtttctcatcacactagagaggtgtttccaggtgctgaactccctggagtgtgtggagatcctgggcaaggtgctgagggggtcctcaggcagctttctccagccagacatcacagagcggctccctcgggacctgcgcgaggatgcctttaagaannntctgcagtgttcaaagatctctacgacaaaacctcggctcattcccagagagctctctattcctggatgagtgggatattgcagacatcctccaatgccactgngatgactctgtttcatgggtcactgcggaaaacttatggattttgggcagatacatggttcacctatcgtttgaagaaattatgagaattagtcctatagaaattgggctgtttatcagctacgacaatgccaccaagcagctggacacggtctatgacatcacacctgagctggcccaggcgtttctggagaggatcagctcctccaactttaacatgaggaatacctccaccatccacaggcaaggccttgggctctgggccctggagctctttcccaannnntggggctgctggtttgtttctacgatgacctggaattgctggatgccactgtggcccaagtcctgcttcaccagatgatcaaatgcagccacctgagcggcttccaggctggcgtccnnnagctcaaagcagaactcctggacattgccacagagaaccagacgctcaatgagaccctgggttctttgtcggatgcggttgtaggtctgacctacagccaactggaatctctctcccccgaggctgtgcacggagccatctccaccctcagccaggtctcagggtgggccaagagccaggtcatcatcttgtctgccaaatacttggcccatgagaaggnnnaggtgctgtctttctacaatgtcagccagatgggcgcgctgctggccggggtcagcacccaggccttctgcagcatgaactgcaaggacctctcgcaggtcctgagaagtgccgtttcccagtacctgtctgacttgtcacctgcccagcagcaaggtatcatgagcaannnnnnnnnnnnnnnagacactgcctcaggcattgtggagatacaaggggctttctttaaggaagtgtatacggtttgatttaaggaggcaacctggattcaactctacagtcgtgaaggataaggaactggaaggagccagnnnnnnnnnnnnnnnnnnnnnnnnnnnnnnnnnnnnnnnnnnnnnnnnnnnnnnnnnnnnnnnnnnnnnnnnnnnnnnnnnnnnnnnnnnnnnnnnnnnnnnnnnnnnnnnnnnnnnnnnnnnnnnnnnnnnnnnnnnnnnnnnnnnnnnnnnnnnnnnnnnnnnnnnnnnntcaggttaattgtttggcgtggaaatactgggaagtttccaggttgtctatgccacctttcctcttggctgcactcccnnnnnnnnnnnnnnnnnnnnnnnnnnnnnnnnnnnnnnnnnnnnnnnnnnnnnnnnnnnnnnnnnnnnnnnnnnnnnnnnnnnnnnnnnnnnnnnnnnnnnnnnnnnnnnnnnnnnnnnnnnnnnnnnnnnnnnggacaactccattgccgatgagtacactgtggacatcatggggaacctgctgtgtcacttgcccgcagccatcatcgacagggggatctcccccagggcctgggcaactgctctacacggcctcagagactgtccagacctcaaccccaagcaaaaggctgcagtgaggctcaagctcctgggacagtnnnnnnacacagtttcctgagatccttctacaagcagcttccaagatggccaggaccttgccccctaaagaattcctttgggctgtctttggatctgttcggaacagcagtgacaagatccccagctctgaccctatgcctggtnnnnnnnnnnnnnnnnnnnnnnnnnnnnnnnnnnnnnnnnnnnnnnnnnnnnnnnnnnnnnnnnnnnnnnnnnnnnnnnnnnnnnnnnnnnnnnnnnnnnnnnnnnnnnnnnnnnnnnnnnnnnnnnnnnnnnnnnnnnnnnnnnnnnnnnnnnnnnnnnnnnnnnnnnnnnnnnnnnnnnnnnnnnnnnnnnnnnnnnnnnnnnnnnnnnnnnnnnnnnnnnnnnnnnnnnnnnnnnnnnnnnnnnnnnnnnnnnnnnnnnnnnnnnnnnnnnnnnnnnnnnnnnnnnnnnnnnnnnnnnnnnnnnnnnnnnnnnnnnnnnnnnnnnnnnnnnnnnnnnggctgaatccattttgcaagggttcctggatgattcaggatacaatatccaggacctgaagagctttcatttggtaggacttggtgcaaccctgtgtgctataaacataactgaaatcccgcttataaagatctcagaattcaggnnnnnnnnnnnnnnnnnnnnnnnnnnnnnnnnnnnnnnnnnnnnnnnnnnnnnnnnnnnnnnnnnnnnnnnnnnnnnnnnnnnnnnnnnnnnnnnnnnnnnnnnnnnnnnnnnnnnnnnnnnnnnnnnnnnnnnnnnnnnnnnnnnnnnnnnnnnnnnnnnnnnnnnnnnnnnnnnnnnnnnnnnnnnnnnnnnnnnnnnnnnnnnnnnnnnnnnnnnnnnnnnnnnnnnnnnngagctgtccgcggagcagatcgcctccctgggcccggagaacgccgcggcggtgacccacgcccagcgccggcggctcagtccgctgcagctgcagagcctccagcaggcactagatggcgccaagactcactcctggcaagacgcgcccgctagcgccggtcccactaggacctcatcctcgcgttctcccgcag

SEQ ID NO: 23624 - DNA, 842 bp, Macaca Mulatta
aagtgaggtggtatctcatattggtttttatatataatcagaaaagtggttattgtgctgaggggactcaaaaggtgaactcctacgccgaaatattcgatcgctttcattcgtttaatattaattcacggaatcaaatggtatacttatttacatttgtcgtatgaaagcaagtatgagtggttacaggtctttttatattttgacacgttttaatgaaagtgttggatctttggcggataattctggatttaatttgagcgtgggaaataatttggcacctccgattttattatactattcccaacgtgcaaggatcactctgtggccaagcgtggttttacgtcgaggttttcatgttcttcgccaccgccatgtttttctcctcccattttttctttcgaccaacaagcaaagttctttctttcccggacaagccagatagacagattggaaaggcaggcgcggcctttgttgtcagtagttctttgatgtgaaaggggcagcacagtcatttaaacttgatccaacctctttgcatgttacaaagttaaacagctaaaagaagtaaaataagaaggcaatgcttgtggaatgtacagtgcatattggcggcgcacgcctcattacgattcgcctgcttgcttctcctgttcaatcgtttctttggaaggcagtggatttttctcttgcgtctctgtcttcttcagtttcgacttatcgaatttctcgatgtcagccatatcgggtttgtcagacatggttgcggaggaaaagcggagcgaggcgcacgaaaacgagcgaagtctggtctgagcagtggccaccaccgagttgtcccc

SEQ ID NO: 23625 - DNA, 774 bp, Macaca Mulatta
  misc_feature (1)...(774): n = A,T,C or G
gggacaatgaaaatgccttaaaaggaatgcatatggataaagttgcacttataacacccttcaacaaaatctgattttaaattgtctttttcttttctattaagggttttctttttcagtgtctaccattgtacttataactgttattaaataccaaatcaaataatataaaagctgtaacatttcctttaaaactaatgctaataagggatttagaattgaatggcaaaatgtttattacttggcaatacctgatgtcagtcaccggcatccagctcatgacaagagataccactgnnnnnnnnnnnnnnnnnnnnnnncattttggtactccttcaaaaattaagttggactaacattcacgtatcaaactaatataaaaagaaataaaaccaagaggtgatttttgtaacaacgggttagtaatcatttaaaaatggtatcatttcaccaagtgttattttatttctttccgttttccctagagaactattgtcagacataaccgatgaccttgtttaattgattctgtcataacattttgtgataagtattaggggtttggagagaaagagcgtctgtcagttttatcagtcccaaaataggtttaagtgtgatctaatagattgcacaaataaatctctcattttcacttagactttangagacaaagcaactggcctcatccttgggcaagtcagttttttctggcccctgttttaaccataaaagtggggagggcaatttagaccaaacaccctaangggtacttaa

SEQ ID NO: 23626 - DNA, 854 bp, Macaca Mulatta
  misc_feature (1)...(854): n = A,T,C or G
ccggggtagggggcggcttgtgcgcgggcccctcgtcgccgcccccgcgctgctcgctgctggagctgccgccggagctgctggtggagatcttcgcgtcgctgccgggcaccgacctacccagcttggcccaggtctgcacgaagttccggcgcatcctgcacaccgacaccatctggaggaggcgttgccgcgaggnnnnnnnnnnnnnnnnnnnnnnnnnnnnnnnnnnnnnnnnnnnnnnnnnnnnnnnnnnnnnnnnnnnnnnnnnnnnnnnnnnnnnnnnnnnnnnnnnnnnnnnnnnnnnnnnnnnnnnnnnnnnnnnnnnnnnnnnnnnnnnnnnnnnnnnnnnnnnnnnnnnnnnnnnnnnnnnnnnnnnnnnnnnnnnnnnnnnnnnnnnnnnnnnnnnnnnnnnnnnnnnnnnnnnnnnnnnnnnnnnnnnnnnnnnnnnnnnnnnnnnnnnnnnnnnnnnnnnnnnnnnnnnnnnnnnnnnnnnnnnnnnnnnnnnnnnnnnnnnnnnnnnnnnnnnnnnnnnnnnnnnnnnnnnnnnnnnnnnnnnnnnnnnnnnnnnnnnnnnnnnnnnnnnnnnnnnnnnnnnnnnnnnnnnnnnnnnnnnnnnnnnnnnnnnnnnnnnnnnnnnnnnnnnnnnnnnnnnnnnnnnnnnnnnnnnnnnnnnnnnnnnnnnnnnnnnnnnnnnnnnaactgcctgacctaccgccgcatctacttgccgcccagccgccccgacgacctcatcaagcctggcctcttcaaaggtacctatggcagccacggcctggagatcgtgatgctcagcttccacggccggcgtgccaggggcaccaagatcacgg

SEQ ID NO: 23627 - DNA, 2004 bp, Macaca Mulatta
  misc_feature (1)...(2004): n = A,T,C or G
ggtttcagaagttaaggctgatgtcctggctcccgtgaacctccgggagcgcccgcgccgctnnnnnnnnnnnnnnnnnnnnnnnnnnnnnnnnnnnntgtttgctgacccttgacattgagaaactgctgacagctcagatgatccatgattggaaggatgcggtcatcaccaagatgtctttctttctnnnnnnnnnnnnnnnnnnnnnnnnnnnnnnnnnnnnnnnnnnnnnnnnnnnnnnnnnnnnnnnnnnnnnnnnnnnnnnnnnnnnnnnnnnnnnnnnnnnnnnnnnnnnnnnnnnnnnnnnnnnnnnnnnnnnnnnnnnnnnnnnnnnnnnnnnnnnnnnnnnnnnnnnnnnnnnnnnnnnnnnnnnnnnnnnnnnnnnnnnnnnnnnnnnnnnnnnnnnnnnnnnnnnnnnnnnnnnnnnnnnnnnnnnnnnnnnnnnnnnnnnnnnnnnnnnnnnnnnnnnnnnnnnnnnnnnnnnnnnnnnnnnnnnnnnnnnnnnnnnnnnnnnnnnnnnnnnnnnnnnnnnnnnnnnnnnnnnnnnnnnnnnnnnnnnnnnnnnnnnnnnnnnnnnnnnnnnnnnnnnnnnnnnnnnnnnnnnnnnnnnnnnnnnnnnnnnnnnnnnnnnnnnnnnnnnnnnnnnnnnnnnnnnnnnnnnnnnnnnnnnnnnnnnnnnnnnnnnnnnnnnnnnnnnnnnnnnnnnnnnnnnnnnnnnnnnnnnnnnnnnnnnnnnnnnnnnnnnnnnnnnnnnnnnnnnnnnnnnnnnnnnnnnnnnnnnnnnnnnnnnnnnnnnnnnnnnnnnnnnnnnnnnnnnnnnnnnnnnnnnnnnnnnnnnnnnnnnnnnnnnnnnnnnnnnnnnnnnnnnnnnnnnnnnnnnnnnnnnnnnnnnnnnnnnnnnnnnnnnnnnnnnnnnnnnnnnnnnnnnnnnnnnnnnnnnnnttcacactggagagaaacgttataaatnnnnnnnnnnnnnnnnnnnnnnnnnnnnnnnnnnnnnnnnnnnnnnnnnnnnnnnnnnnnnnnnnnnnnnnnnnnnnnnnnnnnnnnnnnnnnnnnnnnnnnnnnnnnnnnnnnnnnnnnnnnnnnnnnnnnnnnncaggctgggtaaacaagaacaagcctgctcctgagcaggatgtctgtaaaactgattcatcagggatagtagcaaagagattccaagaggatgaataccaagattctacatttgaagaaaaatatgcatgtgagggcatgaaggaaaactctcctagggagattgctgaatcatgtcttttccaggaaggaggttttgggggaataactttcatccacaaagaagcaccccctgaaattattagtcaaaactacaattttgagaaaagcttgcttttgacctcaagccttgttacacgtctcagggtttgtacagaagagagtctgcatcagtgggaaacaagtaatgtacacaccaatgatttttcagaccacagtaaatgtccaactctctgcacacagaagaaatcttggaaatgtaatgaatgtggaaaaacctttactcagggctcatcccttacccaacatcagagaactcatactggagagagaccctacgcatgtgaggaatgtgggaaagcctttagtcgtagttcattccttgttcaacatcaaagaattcacactggagtgaaaccatatggatgtgagcagtgtgggaaaacatttcgatgtcgatcatttcttactcagcatcaaagagttcacactggagagaaaccttataaatgtaatgaatgtgggaattccttccgcaatcactcacatctcactgaacaccagagaattcacactggagagaaaccttataaatgtaatagatgtgggaagacattcaatcagaatacacaccttattcatcatcagagaattcacactggtgagaagcattatgtatgcagtgaatgtggctcttcttttcgaaaacattcaaatcttacacaacatcagagaatt

SEQ ID NO: 23628 - DNA, 2536 bp, Macaca Mulatta
  misc_feature (1)...(2536): n = A,T,C or G
gtgggatccactgaggagtacataggctgctggatccggtggagccagcactgggcccacgggtggcaactggctgctgtggaggggtgtacgtggggtggggggttctggggcttatcctcaggtcctgtgggtggggcagcgagtcggggcctgagcgtcaagagcatgccctagtgagcgggctggagcccagcgcgctcctggcgctggccggtttgggggtgtctcctcccggggcgccatggcggcgctggccagtagcctgatccggcagaagcgggaggtccgcgagcccgggggcagccggccggtgtcggcacagcggcgggtgtgtccccgcggcaccaagtccctttgccagaagcagctcctcatcctgctgtccaaggtgcgactgtgcggggggcggcccgcgcgacgggaccgcggcccgnnnnnnnnnnnnnnnnnnnnnnnnnnnnnnnnnnnnnnnnnnnnnnnnnnnnnnnnnnnnnnnnnnnnnnnnnnnnnnnnnnnnnnnnnnnnnnnnnnnnnnnnnnnnnnnnnnnnnnnnnnnnnnnnnnnnnnnnnnnnnnnnnnnnnnnnnnnnnnnnnnnnnnnnnnnnnnnnnnnnnnnnnnnnnnnnnnnnnnnnnnnnnnnnnnnnnnnnnnnnnnnnnnnnnnnnnnnnnnnnnnnnnnnnnnnnnnnnnnnnnnnnnnnnnnnnnnnnnnnnnnnnnnnnnnnnnnnnnnnnnnnnnnnnnnnnnnnnnnnnnnnnnnnnnnnnnnnnnnnnnnnnnnnnnnnnnnnnnnnnnnnnnnnnnnnnnnnnnnnnnnnnnnnnnnnnnnnnnnnnnnnnnnnnnnnnngtggccatgtaccgggagccttctctccacagtgtccctgaggcctccccttccagtccccctgccccctgaaatgtagtccctggactggaggttccctgcactcccagtgagccagccaccaccacaacctgtctcccagtcctgctgtcacccttgctgccacacacatgccctgagcagccaggtcccaccaggtgctctaccgtgagggagcctaggggctggctgtgacttccgaggctgctgcgacccttagatccttgggcctaggagggagtcagggagggggatgtctgaagatggtcctggctgatcacttctttctttccacactcacacaaccccatgccttttcctgagatggcactgggagttcccaaatggacagccagggcataaacatttcccaccccggctcagccagttaatggagtcccgtgccnnnnnnnnnnnnnnnnnnnnnnnnnnnnnnnnnnnnnnnnnnnnnnnnnnnnnnnnnnnnnnnnnnnnnnnnnnnnnnnnnnnnnnnnnnnnnnnnnnnnnnnnnnnnnnnnnnnnnnnnnnnnnnnnnnnnnnnnnnnnnnnnnnnnnnnnnnnnnnnnnnnnnnnnnnnnnnnnnnnnnnnnnnnnnnnnnnnnnnnnnnnnnnnnnnnnnnnnnnnnnnnnnnnnnnnnnnnnnnnnnnnnnnnnnnnnnnnnnnnnnnnnnnnnnnnnnnnnnnnnnnnnnnnnnnnnnnnnnnnnnnnnnnnnnnnnnnnnnnnnnnnnnnnnnnnnnnnnnnnnnnnnnnnnnnnnnnnnnnnnnnnnnnnnnnnnnnnnnnnnnnnnnnnnnnnnnnnnnnnnnnnnnnnnnnnnnnnnnnnnnnnnnnnnnnnnnnnnnnnnnnnnnnnnnnnnnnnnnnnnnnnnnnnnnnnnnnnnnnnnnnnnnnnnnnnnnnnnnnnnnnnnnnnnnnnnnnnnnnnnnnnnnnnnnnnnnnnnnnnnnnnnnnnnnnnnnnnnnnnnnnnnnnnnnnnnnnnnnnnnnnnnnnnnnnnnnnnnnnnnnnnnnnnnnnnnnnnnnnnnnnnnnnnnnnnnnnnnnnnnnnnnnnnnnnnnnnnnnnnnnnnnnnnnnnnnnnnnnnnnnnnnnnnnnnnnnnnnnnnnnnnnnnnnnnnnnnnnnnnnnnnnnnnnnnnnnnnnnnnnnnnnnnnnnnnnnnnnnnnnnnnnnnnnnnnnnnnnnnngaacctgcatctgtgtggggtgtattcgaacacttagctacctcagcaggaattccttccaggccccctttaaagctgaggtccttaaagtaatgtgtcctgaataagaaggacaaatggatacagcctcgaccctcccagtgaggagaccccaattcagcaataagtctcacccttctcccctataggtcaggccaaggagggtgaaggcctcttgcactccagacctcatatgccccgacagcttcttatgggatagaacttgctttaccttacagcttagaaccttagctgagctttagatacccaaaaagggcctgtctagattttttcagaaaaacatggagcgctaggggcagcctggaaaaaactgggaacctgctagtgaactaggagggagactcccatagcctcagatttggatagggtaggctgagggggccctaagggagggactagggct

SEQ ID NO: 23629 - DNA, 158 bp, Macaca Mulatta
ttacgcaaggcctggtgtttactctagaagtgggagcctcctccctccctataaagcctgatgtcgtggagagatttgccgagactaagactctggttgaagacagaggcaatcccaggagaggggcggaaagctgcaaaagttaatgcgggagtcgg

SEQ ID NO: 23630 - DNA, 689 bp, Macaca Mulatta
  misc_feature (1)...(689): n = A,T,C or G
gtggagctgccgccactgccgccgccgattccggagccggggtagtcgccgccgctgcagccactgcaggcaccgcttccgctgcctgaggagtgggcttgggaaggaagaggtcatctcgcttggagctttgctcggaagggtctttgttccctgcagccctcccacgnnnnnnnnnnnnnnnnnnnnnnnnnnnnnnnnnnnnnnnnnnnnnnnnnnnnnnnnnnnnnnnnnnnnnnnnnnnnnnnnnnnnnnnnnnnnnnnnnnnnnnnnnnnnnnnnnnnnnnnnnnnnnnnnnnnnnnnnnnnnnnnnnnnnnnnnnnnnnnnnnnnnnnnnnnnnnnnnnnnnnnnnnnnnnnnnnnnnnnnnnnnnnnnnnnnnnnnnnnnnnnnnnnnnnnnnnnnnnnnnnnnnnnnnnnnnnnnnnnnnnnnnnnnnnnnnnnnnnnnnnnnnnnnnnnnnnnnnnnnnnnnnnnnnnnnnnnnnnnnnnnnnnnnnnnnnnnnnnnnnnnnnnnnnnnnnnnnnnnnnnnnnnnnnnnnnnnnnnnnnnnnnnnnnnnnnnnnnggagctgttggacaaatatcttattcccaatgctacacaaccagaaagtaaggtgttctacttgaaaatgaaaggagattattttaggtatctttctgaagtggcatctggagacaacaaacaa

SEQ ID NO: 23631 - DNA, 816 bp, Macaca Mulatta
gggaaggacttcatctcccgctttgagggtttgaagaagatctctgcctacatgaagtccagccgattccaccgaggtcttttgtttggaacgacagccacgtggaacagcacatagggccccgtgatgccagaagatggaagggaagagccgacccttctgcctgtgacccgggagaacagcctgactccctggacccgccttctttctttctccttctttctgctctcttctcttccccaaggcctcattggcttcctttcttctaacatcatccctccctgcatcaaggctctttaaagcttcagctccccaccgtcttccatcaaagtccccctcctaacgtctttcttttcctgcactaacgccaacctgactgcttttcctgtcagtgcttgtctgttctttgaaaagccagactgatctctgagctccctagcactgtcctcaaagaccatctgcatgccctgctccctttgctaggtccctaccccaggcatgtgtgatgcccagtaaaagccccaaccactgcctggccttggggttgacttatgtcccctgaagggtcgctttgactcagggagtggggcttggaatatgggaatggggttttgtagtctgctcggatggggcacaggccggaagcttaaatgggaaggggggcggcgaagaagataatggagaaaaacgggagaaaggaggagggggggccgagcagagagaatacgggagcggggcacgagacgcaggtgtggcacaggtggcgtctcagataggacaggtggtaacagagcccctcgcgcgcgaccaaggtat

SEQ ID NO: 23632 - DNA, 660 bp, Macaca Mulatta
  misc_feature (1)...(660): n = A,T,C or G
tctccttttttttttaattggaatggtgggatatcttggatttaccacacacagttacagaatgaacactccgtacatgtgactagcagtattaagtgtgcttattttaaatgttactggtaggaaggctgttcaggtatgtgtgtatacagtatgaatgcaatgggaacaacctttgtggttacagtttgagacttccagaggtcatccttaataacaacagatgtgcagggttgttttaccgtctgcatccagccttctgttaactcctagctgactcagcatagattgtataaaatacctttgtaagggctattagcacagtcacacatgtttgaggctttcagaagctctttctaaaaactttttccttttccctgtgtattctagtgaataaagctcaagattcagtagannnnnnnnnnnnnnnnnnnnnnnnnnnnnnnnnnnnnnnnnnnnnnnnnnnnnnnnnnnnnnnnnnnnnnnnnnnnnnnnnnnnnnnnnnnnnnnnnnnnnnnnnnnnnnnnnnnnnnnnnnnnnnnnnnnnnnnnnnnnnnnnnnnnnnnnnnnnnnnnnnnnnnnnnnnnnnnnnnnnnnnnnnnnnnnnnnnnnnnnnnnnnnnnnnnnnnnnnnnnnnnnnnnnnnnnnnnnnnnnnnnnn

SEQ ID NO: 23633 - DNA, 405 bp, Macaca Mulatta
gtcttacttcgcatcaacttggatggctagcatatgacaggaaacttggactaacaaggcatggcagactgagctggaggaagatgtcagaaatgtttgccctgaaatcagctatgaacggaatgttgttttcaacttgaggagaaaaatcacccccaaaggagtggacgtttcctgacacttctgtatggaggaagaaagaataactgcattcgtctgcagtagacacgagttcctaaaaaaaatataatctcccaaagccaaggtttggtaataatgtagcccctaaatatctgaaagctgtctttaaaaatgcaggtaagcgtgtgattggccatttgtgccgagttcttatttttacagagggcttgtggccttggacgccagtttgcttatggaaatgaa

SEQ ID NO: 23634 - DNA, 1691 bp, Macaca Mulatta
  misc_feature (1)...(1691): n = A,T,C or G
agtgcagacttccctgctttggttgtgaaggccagtggtcttgcggctggaaaaggggtgattgttgcaaagagcaaagaagaggcctgcaaagctgtacaagagatcatgcagnnnnnnnnnnnnnnnnnnnnnnnnnnnnnnnnnnnnnnnnnnnnnnnnnnnnnnnnnnnnnnnnnnnnnnnnnnnnnnnnnnnnnnnnnnnnnnnnnnnnnnnnnnnnnnnnnnnnnnnnnnnnnnnnnnnnnnnnnnnnnnnnnnnnnnnnnnnnnnnnnnnnnnnnnnnnnnnnnnnnnnnnnnnnnnnnnnnnnnnnnnnnnnnnnnnnnnnnnnnnnnnnnnnnnnnnnnnnnnnnnnnnnnnnnnnnnnnnnnnnnnnnnnnnnnnnnnnnnnnnnnnnnnnnnnnnnnnnnnnnnnnnnnnnnnnnnnnnnnnnnnnnnnnnnnnnnnnnnnnnnnnnnnnnnnnnnnnnnnnnnnnnnnnnnnnnnnnnnnnnnnnnnnnnnnnnnnnnnnnnnnnnnnnnnnnnnnnnnnnnnnnnnnnnnnnnnnnnnnnnnnnnnnnnnnnnnnnnnnnnnnnnnnnnnnnnnnnnnnnnnnnnnnnnnnnnnnnnnnnnnnnnnnnnnnnnnnnnnnnnnnnnnnnnnnnnnnnnnnnnnnnnnnnnnnnnnnnnnnnnnnnnnnnnnnnnnnnnnnnnnnnnnnnnnnnnnnnnnnnnnnnnnnnnnnnnnnnnnnnnnnnnnnnnnnnnnnnnnnnnnnnnnnnnnnnnnnnnnnnnnnnnnnnnnnnnnnnnnnnnnnnnnnnnnnnnnnnnnnnnnnnnnnnnnnnnnnnnnnnnnnnnnnnnnnnnnnnnnnnnnnnnnnnnnnnnnnnnnnnnnnnnnnnnnnnnnnnnnnnnnnnnnnnnnnnnnnnnnnnnnnnnnnnnnnnnnnnnnnnnnnnnnnnnnnnnnnnnnnnnnnnnnnnnnnnnnnnnnnnnnnnnnnnnnnnnnnnnnnnnnnnnnnnnnnnnnnnnnnnnnnnnnnnnnnnnnnnnnnnnnnnnnnnnnnnnnnnnnnnnnnnnnnnnnnnnnnnnnnnnnnnnnnnnnnnnnnnnnnnnnnnnnnnnnnnnnnnnnnnnnnnnnnnnnnnnnnnnnnnnnnnnnnnnnnnnnnnnnnnnnnnnnnnnnnnnnnnnnnnnnnnnnnnnnnnnnnnnnnnnnnnnnnnnnnnnnnnnnnnnnnnnnnnnnnnnnnnnnnnnnnnnnnnnnnnnnnnnnnnnnnnnnnnnnnnnnnnnnnnnnnnnnnnnnnnnnnnnnnnnnnnnnnnnnnnnnnnnnnnnnnnnnnnnnnnnnnnnnnnnnnnnnnnnnnnnnnnnnnnnnnnnnnnnnnnnnnnnnnnnnnnnnnnnnnnnnnnnnnnnnnnnnnnnnnnnnnnnnnnnnnnnnnnnnnnnnnnnnnnnnnnnnnnnnnnnnnnnnnnnnnnnnnnnnnnnnnnnnnnnnnnnnnnnnnnnnnnnnnnnnnnnnnnnnnnnnnnnnnnnnnnnnnnnnnnnnnnnnnnnnnnggggacttacttctcacgccaaccagaatctacagccattcactgttacctatcctacgttcaggacatgtcaaagcgtttgcccatattactggtggaggattactagagaacatccccagagtcctccctgagaaacttggggtagatttag

SEQ ID NO: 23635 - DNA, 1128 bp, Macaca Mulatta
atgaacacctctcacctcctggccttgcagctgccaaaatccctacagggtgaaaacagaagcaagcccctgggcatcccatacaacttctctgatccttgccaggattctgtggacatgatggtcttcatcgtcacttcctacagcattgagactgtcgtgggggtcctgggtaacctctgcctgatgtgtgtaactgtgaggcagaaggagaaaaccaatgtgaccaacctgcttatcaccaacctggccttctctgacttcctcatgtgcctcctctgccagccgctgaccgccatctataccatcatggattactggatcttcggagagaccctctgcaagatgtcggccttcatccagtgtgtgtcggtgacggtctctatcctctcgctcgtccttgtggccctggagaggcatcagctcatcatcaacccaacaggctggaagcccagcatctctcaggcttacctggggattgtgctcatctgggtcattgcctgtgtcctctccctgcccttcctggccaatagcatcctggagaatgtcttccacaagaaccactccaaggctctggagttcctggcggataaggtggtctgtactgagtcctggccactggctcaccaccgcaccatctataccaccttcctcctcctcttccagtactgcctcccactgggcttcatcctggtctgttatgcacgcatctaccggcgcctgcagaggcaggggcgtgtgttccacaagggcacctacagcttgcgagctgggcagatgaagcaggtcaatgtggtgctggtggcgatggtggtggccttcgctgtgctctggctgcctctgcatgtgttcaacagcctggaggactggcaccatgaggccatccccatctgccatgggaacctcatcttcttggtgtgccacttgcttgccatggcctccacctgtgtcaacccattcatctacggctttctcaacaccaacttcaagaaggagatcaaggccctggtgctgacttgccagcagagtccccccctggaggagttggagcatctacccctgtccacagtacacacggaagtctccaaagtgtccctgaggctaaatggcaggtccaatcccatttaa

SEQ ID NO: 23636 - DNA, 1842 bp, Macaca Mulatta
  misc_feature (1)...(1842): n = A,T,C or G
gagttccgagcgaccgatggagatggcggccgcggctgtgtaagggacggtggaggccnnnnnnnnnnnnnnnnnnnnnnnnnnnnnnnnnnnnnnnnnnnnnnnnnnnnnnnnnnnnnnnnnnnnnnnnnnnnnnnnnnnnnnnnnnnnnnnnnnnnnnnnnnnnnnnnnnnnnnnnnnnnnnnnnnnnnnnnnnnnnnnnnnnnnnnnnnnnnnnnnnnnnnnnnnnnnnnnnnnnnnnnnnnnnnnnnnnnnnnnnnnnnnnnnnngtgtcttacaagtatcaagaacttaatatatgtggttgaataaacaatcaaagtaaacagcatcaagtaaaaacttctgcttgttgataagtacttcagacattcccccagtggctaaagtggcatatgaattacgaagttgggtcatttggaatgaatgtaagagaattgccaagnnnnnnnnnnnnnnnnnnnnnnnnnnnnnnnnnnnnnnnnnnnnnnnnnnnnnnnnnnnnnnnnnnnnnnnnnnnnnnnnnnnnnnnnnnnnnnnnnnnnnnnnnnnnnnnnnnnnnnnnnnnnnnnnnnnnnnnnnnnnnnnnnnnnnnnnnnnnnnnnnnnnnnnnnnnnnnnnnnnnnnnnnnnnnnnnnnnnnnnnnnnnnnnnnnnnnnnnnnnnnnnnnnnnnnnnnnnnnnnnnnnnnnnnnnnnnnnnnnnnnnnnnnnnnnnnnnnnnnnnnnnnnnnnnnnnnnnnnnnnnnnnnnnnnnnnnnnnnnnnnnnnnnnnnnnnnnnnnnnnnnnnnnnnnnnnnnnnnnnnnnnnnnnnnnnnnnnnnnnnnnnnnnnnnnnnnnnnnnnnnnnnnnnnnnnnnnnnnnnnnnnnnnnnnnnnnnnnnnnnnnnnnnnnnnnnnnnggtgctgtgagaagccatctttctgacttcaaaaaacaccgagctgctagaattgaccactatgttgtggaagtcaataaattaataatcaggttagagaannnnnnnnnnnnnnnnnnnnnnnnnnnnnnnnnnnnnnnnnnnnnnnnnnnnnnnnnnnnnnnnnnnnnnnnnnnnnnnnnnnnnnnnnnnnnnnnnnnnnnnnnnnnnnnnnnnnnnnnnnnnnnnnnnnnnnnnnnnnnnnnnnnnnnnnnnnnnnnnnnnnnnnnnnnnnnnnnnnnnnnnnnnnnnnnnnnnnnnnnnnnnnnnnnnnnnnnnnnnnnnnnnnnnnnnnnnnnnnnnnnnnnnnnnnnnnnnnnnnnnnnnnnnnnnnnnnnnnnnnnnnnnnnnnnnnnnnnnnnnnnnnnnnnnnnnnnnnnnnnnnnnnnnnnnnnnnnnnnnnnnnnnnnnnnnnnnnnnnnnnnnnnnnnnnnnnnnnnnnnnnnnnnnnnnnnnnnnnnnnnnnnnnnnnnnnnnnnnnnnnnnnnnnnnnnnnnnnnnnnnnnnnnnnnnnnnnnnnnnnnnnnnnnnnnnnnnnnnnnnnnnnnnnnnnnnnnnnnnnnnnnnnnnnnnnnnnnnnnnnngctggggagacaacctacagtctggaacatgccagtgaccttcgagtggaagtgcagaaagtgtatgagctgatagacgctttaaggngtaagaagatcttaaccttgggcttgaaccaggatcctccaccacatccaagcaatttgcggctgcagagaatgatcagatactcagctacactttttgtgcaggtaaagnnnnnnnnnnntgcaggaaaagttgcttggtttgatgtcactgccaaccaaagaacagtttgaggaactgaaaaagaaaaggaaggaggaaatggagaggaagagggccatggagagacaa

SEQ ID NO: 23637 - DNA, 364 bp, Macaca Mulatta
ggacctcatggatcccagggggaccaagagaggagctgataagacagaggtagctgagcctcggaacaaactaccccgtccagcaccttctctgcccacaaaccctgccctctactctgggccctttcctttctaccggcgcccttcggaactgggctgcttctccctggatgctcaacgccagtaccatggagatgcccgagccctgcgctactatagcccaccccccactaacggtccaggccccaactttgacctcagagacggatacccggatcgataccagccccgggacgaggaggtccaagaaaggctgaaccacctgctgtgctggctcctggaacaccgaggccggttggagggg

SEQ ID NO: 23638 - DNA, 752 bp, Macaca Mulatta
cttccacctagtagcaggccttacgttaagcagatgtttaatgaagtgttactgagttggagtgaaatgaatcgcaatgatccctctcccttgctcctgcctcaggcctacctcctcatcgaggaagacatccgggaccttgcggccagtgatgactacaggtaaaaccagtgggtctcctgccccttctcctctccctgcctcaaagtaggccctagaatgaggcagggcctatgtcctcacttcccccaacttccctcttcaatgtctgttccagaggatgcctggatctgaagctagaagaattgaaatcctttgtcctaccctcctggatggtggagaagatgagaaagtatatggagacactacggacagagaatgagcatcgtactgttgaagcacctccacagacctgaggccaggtgccctggccacacttggcagccctcctccaaagccctcttcttcacacggctgaggccaccgctgggactgctcctagatggatctcagcggcattaagctgtgcctgagcgagtttgtagcgactcactgcacagcacccccagactggcatgtggttctatatttgtaaaattattgggataagaaacaattaaacagtttgtaattaacacagatggtgaacctgtaccttgcaggaactaacagaacatcaagggctatagaagtggatgtaggaaaaaaggacaagataaccctcaaccataacagtatagagccaggcttga

SEQ ID NO: 23639 - DNA, 507 bp, Macaca Mulatta
tagtcactgttcctggtgacatttctgaattattatttttttaattttgctgctgttagtaacaggtacttttcccttttcttcttgcaggtttgatcccatacaatttcatctgtgtgcagacaggctccatcctgtcaaccctaacctctctggatgctcttttctcctgggacactgtcttgaagctattggccattgccatggtggcattaattcctggaaccctcattaaaaaatttagtcagaaacatctgcaattgaatgaaaccagcactgctaatcacatacacagtagaaaagacacgtgatctggattttctgtttgccacgtccctggactcagttgcttatttgtgtaatggatgtggtcctctaaagctcctcattgtttttaattgccttctataggtgatatggacactgtgcatcactgtgcagtgtcttgtcacaaaggacactctgctcttgaacgtgtattacatcacgttttcacaccagccctgc

SEQ ID NO: 23640 - DNA, 178 bp, Macaca Mulatta
tgaggccagatgggcggcaagctttggacgctgtggtaaggacttttcacggtcactgtgaagcagatctcaggcagagaaatgatgtgatttattgtagtttaccaaggaccactctggatatggtgcagagggaagaccagctggaggttcttgtgtcactctgtgaagtgcgggg

SEQ ID NO: 23641 - DNA, 668 bp, Macaca Mulatta
  misc_feature (1)...(668): n = A,T,C or G
gccaggcggcccccgggccagtgtgtttgacctgaaggccatcgcctccctgctgcggctgccagatgtcccgaggatcttcctggtcaaggtggcctccaacttccccacaggnnnnnnnnnnnnnnnnnnnnnnnnnnnnnnnnnnnnnnnnnnnnnnnnnnnnnnnnnnnnnnnnnnnnnnnnnnnnnnnnnnnnnnnnnnnnnnnnnnnnnnnnnnnnnnnnnnnnnnnnnnnnnnnnnnnnnnnnnnnnnnnnnnnnnnnnnnnnnnnnnnnnnnnnnnnnnnnnnnnnnnnnnnnnnnnnnnnnnnnnnnnnnnnnnnnnnnnnnnnnnnnnnnnnnnnnnnnnnnnnnnnnnnnnnnnnnnnnnnnnnnnnnnnnnnnnnnnnnnnnnnnnnnnnnnnnnnnnnnnnnnnnnnnnnnnnnnnnnnnnnaggggccatgctgggcctctgtgcgtctgtgcagccactgctccgaacgctggggcccaccgtcggcggcttcctgtaccgaagctttggcgtccctatcttcggccacgtgcaggttgctatcaatgtccttgtccttctggtcctctggaggaaacctatgccccagaggaaggacaaagtccggtgactgctgcccagacacagactggcaataaactcctactaaatcc

SEQ ID NO: 23642 - DNA, 2037 bp, Macaca Mulatta
  misc_feature (1)...(2037): n = A,T,C or G
agtgctaaagtctctgagggcaaggccgctgctgctgccgccgctgcttctgagtgccgcgttcgccgcctgtgttgtcaccggcgccgccgctgaggaagccactgcaaccaggactggagtggaggcgccgcagcatgaagcggcgcaggcccgctccatagcgcacgtcgggacggtccgggcggggccnnnnnnnnnnnnnnnnnnnnnnnnnnnnnnnnnnnnnnnnnnnnnnnnnnnnnnnnnnnnnnnnnnnnnnnnnnnnnnnnnnnnnnnnnnnnnnnnnnnnnnnnnnnnnnnnnnnnnnnnnnnnnnnnnnnnnnnnnnnnnnnnnnnnnnnnnnnnnnnnnnnnnnnnnnnnnnnnnnnnnnnnnnnnnnnnnnnnnnnnnnnnnnnnnnnnnnnnnnnnnnnnnnnnnnnnnnnnnnnnnnnnnnnnnnnnnnnnnnnnnnnnnnnnnnnnnnnnnnnnnnnnnnnnnnnnnnnnnnnnnnnnnnnnnnnnnnnnnnnnnnnnnnnnnnnnnnnnnnnnnnnnnnnnnnnnnnnnnnnnnnnnnnnnnnnnnnnnnnnnnnnnnnnnnnnnnnnnnnnnnnnnnnnnnnnnnnnnnnnnnnnnnnnnnnnnnnnnnnnnnnnnnnnnnnnnnnnnnnnnnnnnnnnnnnnnnnnnnnnnnnnnnnnnnnnnnnnnnnnnnnnnnnnnnnnnnnnnnnnnnnnnnnnnnnnnnnnnnnnnnnnnnnnnnnnnnnnnnnnnnnnnnnnnnnnnnnnnnnnnnnnnnnnnnnnnnnnnnnnnnnnnnnnnnnnnnnnnnnnnnnnnnnnnnnnnnnnnnnnnnnnnnnnnnnnnnnnnnnnnnnnnnnnnnnnnnnnnnnnnnnnnnnnnnnnnnnnnnnnnnnnnnnnnnnnnnnnnnnnnnnnnnnnnnnnnnnnnnnnnnnnnnnnnnnnnnnnnnnnnnnnnnnnnnnnnnnnnnnnnnnnnnnnnnnnnnnnnnnnnnnnnnnnnnnnnnnnnnnnnnnnnnnnnnnnnnnnnnnnnnnnnnnctcccagtggtggtaaaattcttagaattctatatgaagaaaatgatgaatctgaggtggaaattattcatgttacatcccctatgctggaaacaaggagggcagattcattccgttatcctaaaacaggtannnnnnnnnnnnnnnnnnnnnnnnnnnnnnnnnnnnnnnnnnnnnnnnnnnnnnnnnnnnnnnnnnnnnnnnnnnnnnnnnnnnnnnnnnnnnnnnnnnnnnnnnnnnnnnnnnnnnnnnnnnnnnnnnnnnnnnnnnnnnnnnnnnnnnnnnnnnnnnnnnnnnnnnnnnnnnnnnnnnnnnnnnnnnnnnnnnnnnnnnnnnnnnnnnnnnnnnnnnnnnnnnnnnnnnnnnnnnnnnnnnnnnnnnnnnnnnnnnnnnnnnnnnnnnnnnnnnnnnnnnnnnnnnnnnnnnnnnnnnnnnnnnnnnnnnnnnnnnnnnnnnnnnnnnnnnnnnnnnnnnnnnnnnnnnnnnnnnnnnnnnnnnnnnnnnnnnnnnnnnnnnnnnnnnnnnnnnnnnnnnnnnnnnnnnnnnnnnnnnnnnnnnnnnnnnnnnnnnnnnnnnnnnnnnnnnnnnnnnnnnnnnnnnnnnnnnnnnnnnnnnnnnnnnnnnnnnnnnnnnnnnnnnnnnnnnnnnnnnnnnnnnnnnnnnnnnnnnnnnnnnnnnnnnnnnnnnnnnnnnnnnnnnnnnnnnnnnnnnnnnnnnnnnnnnnnnnnnnnnnnnnnnnnnnnnnnnnnnnnnnnnnnnnnnnnnnnnnnnnnnnnnnnnnnnnnnnnnnnnnnnnnnnnnnnnnnnnnnnnnnnnnnnnnnnnnnnnnnnnnnnnnnnnnnnnnnnnnnnnnnnnnnnngcattgtgacttctttataagtaagtatagtaaccagaagaatccacactgtgtgtccctttacaagctatcaagttctgaagatgatctaacttgcaaaacaaaggaattttgggccaccattttggattcagcaggt

SEQ ID NO: 23643 - DNA, 305 bp, Macaca Mulatta
atgtcattacacagtactcataatagaaataaccgcggcgatattcttgatattccttcttcccaaaatagttcatcactgaatgccctcacccacagtagccgacttaagctgcatttgaagtcagatatgtcagaatgtgaaaattatgatccattattgagatctgcaggtaaagtcagagacataaatagcacttacgttatttctgccagtgaaaaaacagcagacatgccccttacccctaatcctgtaggtaaattgacacttcagagaagaactacaaggaacaaagaatcatcttt

SEQ ID NO: 23644 - DNA, 621 bp, Macaca Mulatta
acaaaaacaatccccatattaatgtatagaattgtgacactagtgccactgagaacaactttgagttgcttttctgtgatttatttttccagaactatatattttggtgtaaaagtcatgatactcaacatgaataatgactggtaaacatccctaattggagtccccttaccttttttcttcccattattgttttcagttgaaaaaggaaaacccggacatatatgaagaaaaccttcattacccgcttctgcttcttttaaccaaacacggatagaagattaagcttctcaaagacgaagaaaaatatcaagtgcacagggaatatttttacaaaaacagcaatctgtaatgggtataatcgcctgcctgccccctttgcagcatttcacgtgtgggctatggcctccacctgtcctcacccacgttattccccagctgccctctccagcttcctccctgcctctttttacactctgcttgttgctcttcctgccctaaacctttgtttgtctttaaatatgtataagctgcctatctgtgacttgaatttgactggtgaacgacctatttttccctctaattgagagagaatttcttttggtaatacccatccctcct

SEQ ID NO: 23645 - DNA, 1476 bp, Macaca Mulatta
  misc_feature (1)...(1476): n = A,T,C or G
cccgcgccagctcccgtacacggagccgcattccttggccccnnnnnnnnnnnnnnnnnnnnnnnnnnnnnnnnnnnnnnnnnnnnnnnnnnnnnnnnnnnnnnnnnnnnnnnnnnnnnnnnnnnnnnnnnnnnnnnnnnnnnnnnnnnnnnnnnnnnnnnnnnnnnnnnnnnnnnnnnnnnnnnnnnnnnnnnnnnnnnnnnnnnnnnnnnnnnnnnnnnnnnnnnnnnnnnnnnnnnnnnnnnnnnnnnnnnnnnnnnnnnnnnnnnnnnnnnnnnnnnnnnnnnnnnnnnnnnnnnnnnnnnnnnnnnnnnnnnnnnnnnnnnnnnnnnnnnnnnnnnnnnnnnnnnnnnnnnnnnnnnnnnnnnnnnnnnnnnnnnnnnnnnnnnnnnnnnnnnnnnnnnnnnnnnnnnnnnnnnnnnnnnnnnnnnnnnnnnnnnnnnnnnnnnnnnnnnnnnnnnnnnnnnnnnnnnnnnnnnnnnnnnnnnnnnnnnnnnnnnnnnnnnnnnnnnnnnnnnnnnnnnnnnnnnnnnnnnnnnnnnnnnnnnnnnnnnnnnnnnnnnnnnnnnnnnnnnnnnnnnnnnnnnnnnnnnnnnnnnnnnnnnnnnnnnnnnnnnnnnnnnnnnnnnnnnnnnnnnnnnnnnnnnnnnnnnnnnnnnnnnnnnnnnnnnnnnnnnnnnnnnnnnnnnnnnnnnnnnnnnnnnnnnnnnnnnnnnnnnnnnnnnnnnnnnnnnnnnnnnnnnnnnnnnnnnnnnnnnnnnnnnnnnnnnnnnnnnnnnnnnnnnnnnnnnnnnnnnnnnnnnnnnnnnnnnnnnnnnnnnnnnnnnnnnnnnnnnnnnnnnnnnnnnnnnnnnnnnnnnnnnnnnnnnnnnnnnnnnnnnnnnnnnnnnnnnnnnnnnnnnnnnnnnnnnnnnnnnnnnnnnnnnnnnnnnnnnnnnnnnnnnnnnnnnnnnnnnnnnnnnnnnnnnnnnnnnnnnnnnnnnnnnnnnnnnnnnnnnnnnnnnnnnnnnnnnnnnnnnnnnnnnnnnnnnnnnnnnnnnnnnnnnnnnnnnnnnnnnnnnnnnnnnnnnnnnnnnnnnnnnnnnnnnnnnnnnnnnnnnnnnnnnnnnnnnnnnnnnnnnnnnnnnnnnnnnnnnnnnnnnnnnnnnnnnnnnnnnnnnnnnnnnnnnnnnnnnnnnnnnnnnnnnnnnnnnnnnnnnnnnnnnnnnnnnnnnnnnnnnnnnnnnnnnnnnnnnnnnnnnnnnnnnnnnnnnnnnnnnnnnnnnnnnnnnnnnnnnnnnnnnnnnnnnnnnnnnnnnnnnnnnnnnnnnnnnnnnnnnnnnnnnnnnnnnnnnnnnnnnnnnnnnnnnnnnnnnnnnnnnnnnnnnngtgacctcttccatcccagtatttgacctccaggatggtggacggaaaatatgtccacggtgtaatgctcaatttcgtgttactgaagctttgagaggtcacatgtgt

SEQ ID NO: 23646 - DNA, 666 bp, Macaca Mulatta
cgttgtcaacaggctatatctgtcttttgttctttataccttgctcaaagagaccaacatttggactgtatctgaaaaatttaatatgcctcgaggatatatacaaaatcttctcactggagctgcctcattctcatcttgtgtgttacatttctgtgaggagcttgaggagttttgggtttacagagcccttttggtagaacttaccaagaagctgacttactgtgtaaaggcagaactaatccctctcatggaagttactggagttttagagggtcgagcaagacagttatacagtgcaggttacaaaagtctaatgcacttagctaatgcaaatcctgaagtgctcataaagacaattgatcatttatcaagacgtcaagccaagcaaattattgcgtcagcaaagatgctgttgcatgaaaaagcagaggccctgcaagaagaagtagaagagctactaagattaccttctgatttccctggtgctgtggcttcttccactgacaaagcatgaagctatctgatgagcattttcacatatgaattatttattgtacatgtgttttattcaaaataacttatactttataaatgaaaaaatacattttaagtatgcattaagaactatgaataatgatatacctcttctcactaacaaaaaaa

SEQ ID NO: 23647 - DNA, 783 bp, Macaca Mulatta
  misc_feature (1)...(783): n = A,T,C or G
ggccagttgcatgaaatggaccaaaatgtttttcttgatattaactcttagattggatatacataaagccataaaacttgaactttcctaatagatttcaaaaggtttttgtgtcatattgaaatactcattgcaaacaatcagattggacactaaaccaatttaatttagttgaggccatataaactcaagtacttttatttccttttnnnnnnnnnnnnnnnnnnnnnnnnagtatgctatgaagggaactcaagtactttttaagctagggttctattctcagttctagtgtcttaagaaacttaaaagtaaattattttttaaggagaaaaaggaatagacataatgtagaacagaacaaacaagttcatatcatatattacagaagaaatagtataatgagggaacataatttacgttcacttctttagaatttacaaactatttctgtaagcaaaattactgaaatagtatgaacacttgttagaacagtaaattgacatagttatcaacttagtattttactggttctgtctacnnnnnnnnnnnnnnnnnnnnnnntacttttaagttcttggttacatgtacagaatgtacatgtttgttacataggtatacatgttacacacatgatcctgaggagtgttttccaacttggttccactctccccttcactttcaggtacaccaatcaaatgtagatttggttttttcacacagtcccatatttctttggagactttgnttcataccctttttattccttttttctccaaaacc

SEQ ID NO: 23648 - DNA, 2813 bp, Macaca Mulatta
  misc_feature (1)...(2813): n = A,T,C or G
gagctcaggagctgcacggaatggtggcagtcaaaaaaacagtgcagcaggcatggatcagactgcaagctaggggcacaaggcatcagttgggaagagggaacgcacagctaggctcgaggcctcttcatcggnnnnnnnnnnnnnnnnnnnnnnnnnnnnnnnnnnnnnnnnnnnnnnnnnnnnnnnnnnnnnnnnnnnnnnnnnnnnnnnnnnnnnnnnnnnnnnnnnnnnnnnnnnnnnnnnnnnnnnnnnnnnnnncttcacagcctccagtcgggcagggggccctccagggtggcctgctcatgggatacagcccagcagggggggcgacatcccccggggtctaccaggtatccatcttttcccctccggctggtacctctgagcctcacagggccctgaaacgacaagccccacccactgagggtccccgggagctgaagagaggccctgggctgggggccagagagggactaccccctgaagaaccatatactgtggggcttttgggcccagagggactggggctgggactaggtgtggccagccagcatttctcccaccgtggcctctgtgttgtggaacagagaagtagtgtcacctcatcttggacttcagggacctggagnnnnnnnnnnnnnnatcaaatgcttcctgcaatactttgcacaccagagactgggcctccccagatccagggggacacgggtccctgggggagtccccagggccagcccctccannnnnnnnnnnnnnnnnnnnnnnnnnnnnnnnnnnnnnnnnnnnnnnnnnnnnnnnnnnnnnnnnnnnnnnnnnnnnnnnnnnnnnnnnnnnnnnnnnnnnnnnnnnnnnnnnnnnnnnnnnnnnnnnnnnnnnnnnnnnnnnnnnnnnnnnnnnnnnnnnnnnnnnnnnnnnnnnnnnnnnnnnnnnnnnnnnnnnnnnnnnnnnnnnnnnnnnnnnnnnnnnnnnnnnnnnnnnnnnnnnnnnnnnnnnnnnnnnnnnnnnnnnnnnnnnnnnnnnnnnnnnnnnnnnnnnnnnnnnnnnnnnnnnnnnnnnnnnnnnnnnnnnnnnnnnnnnnnnnnnnnnnnnnnnnnnnnnnnnnnnnnnnnnnnnnnnnnnnnnnnnnnnnnnnnnnnnnnnnnnnnnnnnnnnnnnnnnnnnnnnnnnnnnnnnnnnnnnnnnnnnnnnnnnnnnnnnnnnnnnnnnnnnnnnnnnnnnnnnnnnnnnnnnnnnnnnnnnnnnnnnnnnnnnnnnnnnnggaatcattgctgcgagcattttttgcaccatctggccacattgagggcttcacagcagaaattggagctagtgggtcatactgcccccagcatgtcacgctgcctgtcactgtcacattctttgatgtttctgagcaaaatgccccggctcccttcctggngggcatcgtggatctgaaccccctggggaggaagggttacagcgtgcccaaggtgggcaccgtccaagtgngaccttatttaaccccaaccagactgtggtaaagatgttcctcgtgacctttgacttctcggacatgcctgctgcccacatgaccttccttcgccatcgcctctttttggtgcctgtgggtgaggagggaaatgctaaccccacccaccgcctcctctgctacttgctgcacctnnctcaggttccggagctcccgctcaggccgcttaagcctgcatggagatatccgcctgcttttttcccgccggagcctggagctggacacagggctcccttacgaactgcaggctgtgaccgaggcccctcataatccacgttattcacctttgccctgattgccagcactctgaatccatgcggcctaacgacctgcccatcctgctccatcttagagaaaatatatggagagacagcaagagacccttcaggcttgaattaaagccctcaccatgctcttgcccaaatggattatttgggtgtttaaagcttctgatccttactacaccctgccctactcgggtactccatgtgcctgtcccctcccttgggtttcccaggccagcttaggtagggaggaaccggagctaccctgaggttgtcccaagttcccaggcaagttatgccagcgttgcctccccatcctgggcaggggccacnnnnnnnnnnnnnnnnnnnnnnnnnnnnnnnnnnncaaattggattgccttggtaacctcccacacctgataattggcatcactccccccccctcccactctcagatattgctccaacctcaagagttgaagaggcttacgccgggggtaggaggagaactgctctccctcagctgagggaagaggggctattccagagggactgagtcagtagccaaagactcagcttcccctgcccttcccctagtcccttcacttcccctaccctctgacctatctctgaaagccaagttaggcgtttgtgtgtgtacacgagcttgtcnnnnnnnnnnnnnnnnnnnnnnnnnnnnnnnnnnnnnnnnnnnnnnnnnnnnnnnnnnnnnnnnnnnnnnnnnnnnnnnnnnnnnnnnnnnnnnnnnnnnnnnnnnnnnnnnnnnnnnnnnnnnnnnnnnnnnnnnnnnnnnnnnnnnnnnnnnnnnnnnnnnnnnnnnnnngcctccactcacctggccagactctgacccacctacctcagctggggtgaggggcacccctcaaactcagtcatgtggttccaaactaccccattccccactccagactctgacccagcctcagtcctgactcctgaggctgggctgaggggaacaagcatttgct

SEQ ID NO: 23649 - DNA, 199 bp, Macaca Mulatta
  misc_feature (1)...(199): n = A,T,C or G
ggcgaacgaggctatgctgcttgatactgactacgacaatttcctgtttctctgcctaacggataccaccacccgcatccagtgcttgatgtgccagtacctggngccagagtcctggtggaggacgacgagatcatgaagggattcatcagggctttcaggcccctgcacaagcgtctatggtacttgctggacttga

SEQ ID NO: 23650 - DNA, 819 bp, Macaca Mulatta
tcctcttggtcctcagtcatcgtccgtggttccggaccaggcctgcatcagccagcgcttcctgcagggaaccatcattgccctggtggtggtcatggccttcaggtgacttgtcccctgggctctcagggtggttgactaggggagtggagctacccagtggagtcacctgcccatgggctcaggcctaggggaagaggaggacgtagcttgggagatcaggcagctgaggtctcagtgaggtgggcctttctgcctcctcccctctggggtgacccattttgcaggcatcacctgggagcgcagcttcaggagcaaggaccacagccttgtcctggagagagggcactggctggtggctccagctctaacagtcacccttttccgtggctccagcgtggtgtccatgtccacactgtacgtgctgagcctgcgcacagaggaggacctggtagacactgacgggtaggttcctggatgccatgccaagcctccaggccaggtggggcttcagtgggcaggcccaggtcagagagccatgagactgtcttctctaaaggagttcatccttagcctctcagcctgctggggtgctgtgggggtccagggagggcctccttggagggtgggcagcctttgccagtccctgctgacgccaatgtttgtgtctggcctgtttagtgcctctgcaggtagctgggcctgccagtcagggctgtctgaggggctggggttggaacatggggtaggtagaaggagggccagggcagggccttgggctctgtgagcccactgtcacccccagctcctggggccacc

SEQ ID NO: 23651 - DNA, 539 bp, Macaca Mulatta
  misc_feature (1)...(539): n = A,T,C or G
ggcatcatccagggcaccgttccctacctgggcacgttcctcaccgacctggtgatgctggacaccgccatgaaggactatctgtatgnnnnnnnnnnnnnnnnnnnnnnnnnnnnnnnnnnnnnnnnnnnnnnnnnnnnnnnnnnnnnnnnnnnnnnnnnnnnnnnnnnnnnnnnnnnnnnnnnnnnnnnnnnnnnnnnnnnnnnnnnnnnnnnnnnnnnnnnnnnnnnnnnnnnnnnnnnnnnnnnnnnnnnnnnnnnnnnnnnnnnnnnnnnnnnnnnnnnnnnnnnnnnnnnnnnnnnnnnnnnnnnnnnnnnnnnnnnnnnnnnnnnnnnnnnccgccaggcccccagcactgagctcagtaccagcggcagctcccactccaagtcctgtgaccagctcaggtgtggcccctacctcagcagcggggacattgctgacgcgctcagcgtgcactcggccggctcctccagctctgacgtggaggagatcaacatcagcttcgtcccggagtccccagatggccaggaaaagaa

SEQ ID NO: 23652 - DNA, 289 bp, Macaca Mulatta
aggtgttcattgtttcaacctccccatccagggaataatgccttttgtctaataggctctcatattgatttgatggaaatgcagtaagccttagtccagatgggtagagaatgtggactaagactccaccaaagcaacaggtaaagcccttctgattttttatctacaaggggtcaatcagtggtcaagaagagcccgtggaagtttgcagtctgcattcctgttactgcagaagatggctacagcagggtagagctaagctgtatggggctaaattaagcactggctt

SEQ ID NO: 23653 - DNA, 577 bp, Macaca Mulatta
  misc_feature (1)...(577): n = A,T,C or G
ctccaggaaaccggccacctccaagcagggcccatcctgtccggatttgcaaattttaggctcctganccaagtatggaaggttcagaatttgtttctttcctggaggagaagagagctccctttgttttctttctccctatttccattttatttcttctgggaagacccgtaataaatgattctgtagaggcctcgtgacctgctgtttggggctgaggcttcagttccttcaccttccgcccacaaacctctctacccacttcctcctcctcaccctctacgagtttacacctcagcttccctgggaaagcaagaggggtgcaaatctccaggggtgggtgactgtgtgcccgcttgtgtgtgcaggctcttcagcacacacacggttcgtagaagcctaagagacgccctgggagatcacccagctgcagggtgagtccagtgctcaggtggcctggcccatcctccaggaaagctgcctgcgggccccagccaggaaggaggctatcccaggaggttgttatggatgcaaacatggctgaagtcgtggcacttctcatcccacgcaagcctct

SEQ ID NO: 23654 - DNA, 784 bp, Macaca Mulatta
gatttgtattaaatcttattctgtatatttaatgtagcatttttgtatttaaattgataattcattatctttgaagtaaattatgaaatcaagacacctgtacaggcatttaatgtttttttttgtaatataaatatatacatttgtgtttccccaaaactgtttcatagtttaaaaatacaagtttaatttaattttttacacctattgattctgctgggtatgagctaaagtattattacagaaaggaaacaggttatactcttagatttaaaaagtgaaagaaactgcaggcgcctttgtaaaatgcaaaatatttaattaaaagagattttaacataatgagagccactcattactttttagaagcctcaataaactgtccattgccttggtcaaaaggtgcaaactgcaacttttttcaaagtggggattgaaaggttccacagaccttcaagtgtgccaggggaaaaacataattaggttgcaagcccgggggaacctggccctgcccagaaagcagatctggatcactgatgcgggctgtttgagagagactggaccctggaggaaggagaagagagacccaagtgtgtgcccagaagggagaaaagatggcaaagccagttagggacacgcaccacccgagcgccatcgcttaacctaattacttccaatcagtgtcgtgttttatgcaaagtaatcagctggtgaactttgctaatgagttcgattttatgccggatttagcccttattactatttcaagggtgcttcgggctaa

SEQ ID NO: 23655 - DNA, 828 bp, Macaca Mulatta
gggactaaacctggagactcgggcggccgaggggctttagaccagctgaagagcgaggagccagtggcagtcgctgatctcaccgccgctcagggtttttagaacttcagccataaaaatgggcagaattttccttgatcatatcggtggtacccgtctattttcttgtgcaaactgtgatacgatcctgaccaaccgctcagaactcatctccactcgtttcacaggcgccactggcagagcgtttctttttaacaaggtagttaacctgcagtacagtgaagttcaagatcgggtcatgctcactggccgccacatggttcgagatgtgagctgcaaaaactgcaatagcaaactgggatggatctatgagtttgccactgaagacagccagcgatataaggaaggccgcgtgatcctggaacgtgctctagttcgagagagtgagggctttgaagagcatgtaccatctgataactcttgaagatacagagagaaatccatctttttcccaggtctccttcactgaaaacaaaaatctacttacataccctgtcacctttagcatcacagtcggattaatgaactgcggaaacaacaggtttgtcagaatcccaaaatggaaccctttccttccctcctcgtttcttcccccactcccggaatctctcctctcacccaccaatttggtccgaaacgaatatttttgccccaagccccgtaatctttcttaccccctagtgcgtcccctcctccatggtgaaaaaaaccccttccacccttcttggcgccacacgctttttcccaggcaataccacccccttgcga

SEQ ID NO: 23656 - DNA, 5706 bp, Macaca Mulatta
  misc_feature (1)...(5706): n = A,T,C or G
ccatggcactgaagagggacagcaaatcttgcagcagccggtgccagagagactggactttgtntgcagttttttgcagnnnnnnnnnnnnnnnnnnnnnnnnnnnnnnnnnnnnnnnnnnnnnnnnnnnnnnnnnnnnnnnnnnnnnnnnnnnnnnnnnnnnnnnnnnnnnnnnnnnnnnnnnnnnnnnnnnnnnnnnnnnnnnnnnnnnnnnnnnnnnnnnnnnnnnnnnnnnnnnnnnnnnnnnnnnnnnnnnnnnnnnnnnnnnnnnnnnnnnnnnnnnnnnnnnnnnnnnnnnnnnnnnnnnnnnnnnnnnnnnnnnnnnnnnnnnnnnnnnnnnnnnnnnnnnnnnnnnnnnnnnnnnnnnnnnnnnnnnnnnnnnnnnnnnnnnnnnnnnnnnnnnnnnnnnnnnnnnnnnnnnnnnnnnnnnnnnnnnnnnnnnnnnnnnnnnnnnnnnnnnnnnnnnnnnnnnnnnnnnnnnnnnnnnnnnnnnnnnnnnnnnnnnnnnnnnnnnnnnnnnnnnnnnnnnnnnnnnnnnnnnnnnnnnnnnnnnnnnnnnnnnnnnnnnnnnnnnnnnnnnnnnnnnnnnnnnnnnnnnnnnnnnnnnnnnnnnnnnnnnnnnnnnnnnnnnnnnnnnnnnnnnnnnnnnnnnnnnnnnnnnnnnnnnnnnnnnnnnnnnnnnnnnnnnnnnnnnnnnnnnnnnnnnnnnnnnnnnnnnnnnnnnnnnnnnnnnnnnnnnnnnnnnnnnnnnnnnnnnnnnnnnnnnnnnnnnnnnnnnnnnnnnnnnnnnnnnnnnnnnnnnnnnnnnnnnnnnnnnnnnnnnnnnnnnnnnnnnnnnnnnnnnnnnnnnnnnnnnnnnnnnnnnnnnnnnnnnnnnnnnnnnnnnnnnnnnnnnnnnnnnnnnnnnnnnnnnnnnnnnnnnnnnnnnnnnnnnnnnnnnnnnnnnnnnnnnnnnnnnnnnnnnnnnnnnnnnnnnnnnnnnnnnnnnnnnnnnnnnnnnnnnnnnnnnnnnnnnnnnnnnnnnnnnnnnnnnnnnnnnnnnnnnnnnnnnnnnnnnnnnnnnnnnnnnnnnnnnnnnnnnnnnnnnnnnnnnnnnnnnnnnnnnnnnnnnnnnnnnnnnnnnnnnnnnnnnnnnnnnnnnnnnnnnnnnnnnnnnnnnnnnnnnnnnnnnnnnnnnnnnnnnnnnnnnnnnnnnnnnnnnnnnnnnnnnnnnnnnnnnnnnnnnnnnnnnnnnnnnnnnnnnnnnnnnnnnnnnnnnnnnnnnnnnnnnnnnnnnnnnnnnnnnnnnnnnnnnnnnnnnnnnnnnnnnnnnnnnnnnnnnnnnnnnnnnnnnnnnnnnnnnnnnnnnnnnnnnnnnnnnnnnnnnnnnnnnnnnnnnnnnnnnnnnnnnnnnnnnnnnnnnnnnnnnnnnnnnnnnnnnnnnnnnnnnnnnnnnnnnnnnnnnnnnnnnnnnnnnnnnnnnnnnnnnnnnnnnnnnnnnnnnnnnnnnnnnnnnnnnnnnnnnnnnnnnnnnnnnnnnnnnnnnnnnnnnnnnnnnnnnnnnnnnnnnnnnnnnnnnnnnnnnnnnnnnnnnnnnnnnnnnnnnnnnnnnnnnnnnnnnnnnnnnnnnnnnnnnnnnnnnnnnnnnnnnnnnnnnnnnnnnnnnnnnnnnnnnnnnnnnnnnnnnnnnnnnnnnnnnnnnnnnnnnnnnnnnnnnnnnnnnnnnnnnnnnnnnnnnnnnnnnnnnnnnnnnnnnnnnnnnnnnnnnnnnnnnnnnnnnnnnnnnnnnnnnnnnnnnnnnnnnnnnnnnnnnnnnnnnnnnnnnnnnnnnnnnnnnnnnnnnnnnnnnnnnnnnnnnnnnnnnnnnnnnnnnnnnnnnnnnnnnnnnnnnnnnnnnnnnnnnnnnnnnnncagagctagagttccattctgcagtctgagcagcaaaaagccactgagaaagaaagggtggcccaggagaaggaccagctccaggagcagctccaggccctcaaagagtccttgaaggtcaccaagggcagccttgaagaggagaagcgcagggctgcagatgccctggaagagcagcagcgttgtatctctgagctgaaggcagagacccgaagcctggtggagcagcataagcaggtttttatggagctggaagaagagaaggctgggcgcaaggggctggaggctcgattacagcagcttggagaggcccatcaggccgagactgaagccctgcggcaggagctggcagaggccatagctgcccagcgcacagctgagagtgagtgtgagcagcttgtcaaagaagtagctgcctggcgtgaacggtatgaggagagccagcaagaggaggcgcagtatggagccatgttccaggaacagctgatgactttgaaggaagaatgtgagaaggcccgccaggagctgcaggaggcaaaggagaaggtggcaggcatagaatcccacagcgagctccagataagccggcagcagaatgagctagttgagctccacgccaacctggccagagcactccaacaggtcnnnnnnnnnnnnnnnnnnnnnnnnnnnnnnnnnnnnnnnnnnnnnnnnnnnnnnnnnnnnnnnnnnnnnnnnnnnnnnnnnnnnnnnnnnnnnnnnnnnnnnnnnnnnnnnnnnnnnnnnnnnnnnnnnnnnnnnnnnnnnnnnnnnnnnnnnnnnnnnnnnnnnnnnnnnnnnnnnnnnnnnnnnnnnnnnnnnnnnnnnnnnnnnnnnnnnnnnnnnnnnnnnnnnnnnnnnnnnnnnnnnnnnnnnnnnnnnnnnnnnnnnnnnnnnnnnnnnnnnnnnnnnnnnnnnnnnnnnnnnnnnnnnnnnnnnnnnnnnnnnnnnnnnnnnnnnnnnnnnnnnnnnnnnnnnnnnnnnnnnnnnnnnnnnnnnnnnnnnnnnnnnnnnnnnnnnnnnnnnnnnnnnnnnnnnnnnnnnnnnnnnnnnnnnnnnnnnnnnnnnnnnnnnnnnnnnnnnnnnnnnnnnnnnnnnnnnnnnntgcaagaggcactggctcatgccttgacggaaaaggaaggcaaggaccaggagttggtcaagcttcgtggcctggaggcagcccagataaaagagctggaggaacttaggcaaaccatgaagcaactgaaggaacagctggctaagaaagaaaaggagcacgcatctggctcaggagcccaatctgaggctgctggcaggacagagccaacaggccccaagctggaggcgctgcgggcagaggtgagcaagctggagcagcaatgccagcagcagcaggagcaggccgacagtctggaacgcagcctcgaggctgaacgggcctcccgggctgagcgggacagtgctctggagactctgcagggccagttagaggagaaggcccgggagctagggcacagtcagagtgccttagcctcggtccaaagggagttggctgccctccgcaccaaggtacaagaccacagcaaggctgaagatgagtggaaggcccaggtggcccggggccggcaagaggctgagaggaaaaacagcctcatcagcagcttggaggaggaggtgtccatcctaaatcgccaggtcctggagaaggagggggagagcaaggagttgaagcggctggtgatggctgagtcagagaagannnnnnnnnnnnnnnnnnnnnnnnnnnnnnnnnnnnnnnnnnnnnnnnnnnnnnnnnnnnnnnnnnnnnnnnnnnnnnnnnnnnnnnnnnnnnnnnnnnnnnnnnnnnnnnnnnnnnnnnnnnnnnnnnnnnnnnnnnnnnnnnnnnnnnnnnnnnnnnnnnnnnnnnnnnnnnnnnnnnnnnnnnnnnnnnnnnnnnnnnnnnnnnnnnnnnnnnnnnnnnnnnnnnnnnnnnnnnnnnnnnnnncaccctgcagctcgagcacaccagcacacaggcctgggtgagtgagctgctgccagctaagcacctctgccagcagctgcaggccgagcaggctgctgccgagaaacgccaccgtgaggagctggagcagagcaagcaggcagctggggggctgcgggcagagctgctgagggcccagcgggagcttggggagctgattcctctgcggcagaaggtggcagagcaggagcgaacagctcagcagctgcgggcagagaaggccagctacgcagagcagctgagcatgctgaagaaggcgcatggcctgctggcagaggagaaccgggggctgggtgagcgggctaaccttggccggcagtttctggaagtggagttggaccaggcccgggagaagtatgtccaagagttggcagctgtacgtgctgatgctgagactcgtctggctgaggtgcagcgggaagcacagagcactgcccgggagctggaggtgatgactgccaagtatgagggtgccaaggtcaaggtcctggaggagaggcagcggttccaggaagagaagcagaaactcgctgctcaggtnnnnnnnnnnnnnnnnnnnnnnnnnnnnnnnnnnnnnnnnnnnnnnnnnnnnnnnnnnnnnnnnnnnnnnnnnnnnnnnnnnnnnnnnnnnnnnnnnnnnnnnnnnggctgtccaggctcagggaggtgagagccagcaggaggcccagcgcctccaggcccggctgaatgaactgcaagcccagttgagccagaaggagcaggcagctgagcactataagctgcagncagatggagaaagccaaaactcattatgatgccaagaagcagcagaaccaagagctgcaggagcagctgcagagcctggagcacctgcagaaggaaaacaaagagctgcgagctgaagccgaacggctgggccatgagctacagcaggctgggctgaagaccaaggaggctgaacagacatgccgccaccttactgcccaggtgcgcagcctggaggcacaggtncaggttgcccacgcagaccagcagcttcgagacctgggcaaattccaggtggcaactgatgctttaaagagccgtgagccccaggctaagccccagctggacttgagtattgacagcctggatctgagctgcgaggaggggaccccactcagtatcacnnnnnnnnnnnnnnnnnnnnnnnnnnnnnnnnnnnnnnnnnnnnnnnnnnnnnnnnnnnnnnnnnnnnnnnnnnnnnnnnnnnnnnnnnnnnnnnnnnnnnnnnnnnnnnnnnnnnnnnnnnnnnnnnnnnnnnnnnnnnnnnnnnnnnnnnnnnnnnnnnnnnnnnnnnnnnnnnnnnnnnnnnnnnnnnnnnnnnnnnnnnnnnnnnnnnnnnnnnnnnnnnnnnnnnnnnnnnnnnnnnnnnnnnnnnnnnnnnnnnnnnnnnnnnnnnnnnnnnnnnnnnnnnnnnnnnnnnnnnnnnnnnnnnnnnnnnnnnnnnnnnnnnnnnnnnnnnnnnnnnnnnnnnnnnnnnnnnnnnnnnnnnnnnnnnnnnnnnnnnnnnnnnnnnnnnnnnnnnnnnnnnnnnnnnnnnnnnnnnnnnnnnnnnnnnnnnnnnnnnnnnnnnnnnnnnnnnnnnnnnnnnnnnnnnnnnnnnaggaaggaacagcttctacatgggcacttgccaggatgagcctgagcagctggatgactggaaccgcattgcagagctgcagcagcgcaatcgagtgtgccccccacacctgaagacctgctatcccctggagtccagg

SEQ ID NO: 23657 - DNA, 709 bp, Macaca Mulatta
gggggttactggtccggggagtcagggtatcgtccacctccttccatggctctgaagaagaaattcagttgtttatggaccttgggtctgtatttggtagccagtaccaaaatcccatccatcactgacccaaactttataaacaactgcctcgatgcccacaacgaatggcgtggcaaagtcaaccctcccgcggccaacatgaaatacatgatttgggataaaggtttagcaaagatggctaaaacatgggcagacgagtgcaaatttgaacataacaactgtttggataaatcatttaaatgctatgcagcttttgaatatgttggagaaaatatctggttaggtggaataaagtcattcacaccaagacttgccattatggcttggtacaatgaaagccaatattatgattttgataatctgtcatgttccagagtctgtggccattatacacagttagtttgggccaattcattttatgtcggttgcgcggttgcaatgtgtcctgaccttggggaagctttcactgcaatgtttatatgcaactatggacctgcaggaaattttgcaatacgtcttcttactctaaaggaaaatcttgctctctctgctcaaagaagataatgtgtaaagaactctgcaaaatccattctaagccatggggaaacaccttccgatgctttatccttcactagtttcttctcga

SEQ ID NO: 23658 - DNA, 589 bp, Macaca Mulatta
ggagcggcggccgtcccgctcctggaggtcgtcccctggcatcctcggggccgcaggaaggaaaaggaggcagcggccggagccgtggtgggcggcctgaggtgagagcccggccagcccctctgggaatatggcgaccggtggctaccggaccagcagcggcctcggcggcagcaccacagacttcctggaggagtggaaggctaaacgcgagaagatgcgcgccaagcagaaccccccgggcccggccgccccgggagggggcggcagcgacgccgctgggaagccccccgcgggggctctgggcacctcggcggccgccgctgccaacgagctcaacaacaacctcccgggcggcgcgccggccgcacctgccgtccccggccccgggggcgtgaactgcgcggtaggctccgccatgctgacccgggcggcccccggcccgcggcggtcggaggacgagcccccagccgcctctgcctcggctgcaccgccgccccggcgtgacgaggaggagcaggacggcgtcccggagaagggcaagagctcgggccccagtgccaggaaaggcaaggggcagatcgagaag

SEQ ID NO: 23659 - DNA, 644 bp, Macaca Mulatta
  misc_feature (1)...(644): n = A,T,C or G
tatgttattggatacaaaacatgtgccttagtaatgnnnnnnnnnnnnnannnnnnnnnnnnnnacacactctcactcactcaaagatgaaaaatgtgtacactcagccaggctgctgggggatgcttcagtttcctttacagaaaactgcgtggtgggaatccaggccaatacagaaaggatcaacaagctgatgaatgagtctctaatgttggtgacagctctcaatcctcatataggtaagtgtttaaggaataataatatcattttgaatgcaaaattaaaaagctggaacatttttaagagacaagtggatcaatgtttgagaacagcaaatttcttttgaatatggttttagtaaaatcttaaaatatttgaaattgtgtggaaagatactatatgacttgtatggtgtcatagttctttcaaaacttgatctattatacctcattttatttgaaatatattgagaagtagtagttcaaacttattttaattttaatggaattcagatgccaaatattctatgcagacccttggggaaggttatttgtaagaccttcagtgggtaatgtcactaggtggcactgctgattagcaatattgaatgaactcatttttctaccttccctagatctctgcaa

SEQ ID NO: 23660 - DNA, 444 bp, Macaca Mulatta
  misc_feature (1)...(444): n = A,T,C or G
tatcggaagctttgagatcagcagggctaccatctcactcttctgtaatttcacaacattctaagggaagtaaatcaccagatttgttgatgtatcagggnnnnnnnnnnnnnnnnnnnnnnnnnnnnnnnnnnnnnnnnnnnnnnnnnnnnnnnnnnnnnnnnnnnnnnnnnnnnnnnnnnnnnnnnnnnnnnnnnnnnnnnnnnnnnnnnnnnnnnnnnnnnnnnnnnnncaatagaattgtctttacaataaaggacttccaaaatgacagatgagaaactgtatattaaacacctttaataaatactatgaaaaaaatgaaatatagaaaatttagatggacacttgtatttcctaatttatgtatcttggtcagcttctccacaagcttacctaattatttatacactttatacttattaaagtatacatttttaaatg

SEQ ID NO: 23661 - DNA, 565 bp, Macaca Mulatta
  misc_feature (1)...(565): n = A,T,C or G
aagatggctgccgctaccggtgcggtggcagcctcggccgcctcgggtcaggcggaaggtaaaaagatcaccgatctgcgggtcatcgatctgaagtccgagctgaagcggcggaacttagacatcaccggagtcaagaccgtgctcatctcccgactcaagcaggnnnnnnnnnnnnnnnnnnnnnnnnnnnnnnnnnnnnnnnnnnnnnnnnnnnnnnnnnnnnnnnnnnnnnnnnnnnnnnnnnnnnnnnnnnnnnnnnnnnnnnnnnnnnnnnnnnnnnnnnnnnnnnnnnnnnnnnnnnnnnnnnnnnnnnnnnnnnnnnnnnnnnnnnnnnnnnnnnnnnnnnnnnnnnnnnnnnnnnnnnnnnnnnnnnnnnnnnnnnnnnnnnnnnnnnnnnnnnnnnnnnnnnnnnnnnnnnnnnnnnnnnnnnnnnnnnnnnnnnnnnnnnnnnnnnnnnnnnnnnnnnnnnnnnnnnnnnnnnnnnnnnnnnnnnnnnnnnnnnnnnnnnnnnaggaaattgaagctcaagaaggtgaagatgatacctttctaacagcccaag

SEQ ID NO: 23662 - DNA, 1165 bp, Macaca Mulatta
  misc_feature (1)...(1165): n = A,T,C or G
gtaaaatttcgagagactgaaaccagatctgagtctcactgttccagtctggacctctttggtgctgtaaatcctggatatacagtagatgattactacatttttcttttatggnnnnnnnnnnnnnnnnnnnnnnnnnnnnnnnnnnnnnnnnnnnnnnnnnnnnnnnnnnnnnnnnnnnnnnnnnnnnnnnnnnnnnnnnnnnnnnnnnnnnnnnnnnnnnnnnnnnnnnnnnnnnnnnnnnnnnnnnnnnnnnnnnnnnnnnnnnnnnnnnnnnnnnnnnnnnnnnnnnnnnnnnnnnnnnnnnnnnnnnnnnnnnnnnnnnnnnnnnnnnnnnnnnnnnnnnnnnnnnnnnnnnnnnnnnnnnnnnnnnnnnnnnnnnnnnnnnnnnnnnnnnnnnnnnnnnnnnnnnnnnnnnnnnnnnnnnnnnnnnnnnnnnnnnnnnnnnnnnnnnnnnnnnnnnnnnnnnnnnnnnnnnnnnnnnnnnnnnnnnnnnnnnnnnnnnnnnnnnnnnnnnnnnnnnnnnnnnnnnnnnnnnnnnnnnnnnnnnnnnnnnnnnnnnnnnnnnnnnnnnnnnnnnnnnnnnnnnnnnnnnnnnnnnnnnnnnnnnnnnnnnnnnnnnnnnnnnnnnnnnnnnnnnnnnnnnnnnnnnnnnnnnnnnnnnnnnnnnnnnnnnnnnnnnnnnnnnnnnnnnnnnnnnnnnnnnnnnnnnnnnnnnnnnnnnnnnnnnnnnnnnnnnnnnnnnnnnnnnnnnnnnnnnnnnnnnnnnnnnncccactaggtaacaactccaggtttcctttggataatacacctgttcgaaatcggggcgatggagatggagattttcagttcaaaccattttttgtgggttctcccacagcacctgaacccagcaacagcttttttagttttgcctctccaagtcgtgaattagagcagcagcaagtttctagcagggccttcaaagtaaaaagaatttgagccacgcatggtgtcacacacctgtgatcccagctacttaggaggttgaggctggaaggatcccttgagcccaggagtctgaggctatagtgatctaagatcatgccactgcactccagcttgggcaacaaagtgagaccttgtttctaaaaaaataaagataatttagctaactttgcag

SEQ ID NO: 23663 - DNA, 1056 bp, Macaca Mulatta
  misc_feature (1)...(1056): n = A,T,C or G
gtttcctttgtccacatattggggcccaagagaataaattacccaacctctttatttagacacatatagttgtgggggtagcataccttatattgtaatggtaacaaattttatccctaccatttatttgtggggagtggaagggatattaactctctcataaaatagtgaggccccaatctcggtggtaaaaggtgtttatattgtgtggcgccctttcctttactggacaaaaggatnnnnnnnnnnnnnnnnnnnnnaccgctgaggattatgaaaggaattccgtctttcacgtacgggaaaagacttccgggaaaattaccccccttccacccatctttcttgcaagtgatattcggtattttagctcacacatataattttttttaaccccgcataaaaaagatgattttccggggggagggccacaaattttccacaaaaaggggagtgtttctattccctggaggccataaagggccataatttccggacctttccctgatagtgtgattattggggccccattaaactccctcccgtttgattagaactaaggtttccattttatcttgactttccaggattgggggtactcccccatggcatatattatggcttctacaatccttcagcatgttaattggaagccttgttgagcttcacaaaggttccattgaagatttgacgaaggcgcaaaaactgcaatacctttcggacctttgggctcacgccattgatacctctgatcctgatgacaaacgccaatttgggttcagcaggtacatagaagttgccagcttttcttgccatcctcgccattcgaatttcagttctgtacatctgcctatattccttgtgatagtgcttcgctttttcatagataagcttcctccttgcctttcgaagcatcttttgggcaaacttctttctcaggcgctttatcttcagctctgcgaaattccttcgctttttcttaagggtttctggcacagcaggaaccttcttcttctcttccgcaccctccatggttccagccgggaaaagagcccc

SEQ ID NO: 23664 - DNA, 144 bp, Macaca Mulatta
gactctcaatggccacgagggagccgtgaagtgcctgttcttcgaccagtggcatctcctctcgggaagcactgatggcctggtcatggcctggagcatggtggggaagtatgagcgctgcctgatggccttcaagcatcccaa

SEQ ID NO: 23665 - DNA, 773 bp, Macaca Mulatta
tggtgcttgatggtcgaggccatctcctgggaccgcctggcggccatcgtggctaaacaggtactgctgggccggaaggtggtggtcgtacgctgcgaaggcatcaacatttctggcaatttctacagaaacaagttgaagtacctggctttcctccgcaagcggatgaacaccaacccttccagaggcccctaccacttccgggcccccagccgcatcttctggcggaccgtgcgaggcatgctgcctcacaagaccaagcgaggccaggctgccctggaccgcctcaaggtgtttgacggcatcccaccgccctacgacaagaaaaagcggatggtggttcctgctgccctcaaggtcgtgcgtctgaagcctacgagaaagtttgcctatctggggcgcctggctcacgaggttggctggaagtaccaggcagtgacagccaccttggaggagaagaggaaggagaaagccaagatccactacaggaagaagaagcagctcatgaggttacggaaacaggctgagaagaacgtggagaagaaaattgacaaatacacacaggtcctcaagacccacggactcctggtctgagcccaataaagactgttaattcctcatgcgtggcctgcccttcctccatcgtcgccctggaatgtgcgggacccaggggcagcagtagtccaggtgccacaggcggccggggacataggaagctgggagcaaggaaagggtcttagtcactgcctcccgaagttgcttgaaaagcactc

SEQ ID NO: 23666 - DNA, 587 bp, Macaca Mulatta
ggccagattgctggtttcattggcctgccaatacctcagaaccagcgattcattcccatcaatggatacccaatacctcctggatatgcagcgtttccagctgcccactaccagccaacaggtcctcccagagtgattcagcactgcccgcctcccaagagtcggtccccaagcagtgccagtgggtcgactagcactggccatgtgactagcttgccctcatcaggatccaatcaggaagcaaatattcctttactaccacacatgtcaattccaaatcatcctggtggaatgggtatcaccgtttttggcaacaaatctcaaaaaccgtacaaaattgatgcaaagcaagcatctttgctaggagatgccaatattcatggacacaccgaatctatgatttctgcagaactgtaaaatgcacaacttttgtaaatgtggtatacaggacaaactagacggccgcagaaaagatttatattcaaatgtttctattaaagtaaggttctcatttagcagacatcgcaacaggtatcttctgtgaagtttgactgtgtcttaccaagcaggacagacactaggccaga

SEQ ID NO: 23667 - DNA, 2211 bp, Macaca Mulatta
  misc_feature (1)...(2211): n = A,T,C or G
aggtggggctggtgtccgagcacttctcgcaggccccgcagaggctgtccttctacagctggtacggcagtgccaggctcttccgcttccgcgtgcccccnnnnnnnnnnnnnnnnnnnnnnnnnnnnnnnnnnnnnnnnnnnnnnnnnnnnnnnnnnnnnnnnnnnnnnnnnnnnnnnnnnnnnnnnnnnnnnnnnnnnnnnnnnnnnnnnnnnnnnnnnnnnnnnnnnnnnnnnnnnnnnnnnnnnnnnnnnnnnnnnnnnnnnnnnnnnnnnnnnnnnnnnnnnnnnnnnnnnnnnnnnnnnnnnnnnnnnnnnnnnnnnnnnnnnnnnnnnnnnnnnnnnnnnnnnnnnnnnnnnnnnnnnnnnnnnnnnnnnnnnnnnnnnnnnnnnnnnnnnnnnnnnnnnnnnnnnnnnnnnnnnnnnnnnnnnnnnnnnnnnnnnnnnnnnnnnnnnnnnnnnnnnnnnnnnnnnnnnnnnnnnnnnnnnnnnnnnnnnnnnnnnnnnnnnnnnnnnnnnnnnnnnnnnnnnnnnnnnnnnnnnnnnnnnnnnnnnnnnnnnnnnnnnnnnnnnnnnnnnnnnnnnnnnnnnnnnnnnnnnnnnnnnnnnnnnnnnnnnnnnnnnnnnnnnnnnnnnnnnnnnnnnnnnnnnnnnnnnnnnnnnnnnnnnnnnnnnnnnnnnnnnnnnnnnnnnnnnnnnnnnnnnnnnnnnnnnnnnnnnnnnnnnnnnnnnnnnnnnnnnnnnnnnnnnnnnnnnnnnnnnnnnnnnnnnnnnnnnnnnnnnnnnnnnnnnnnnnnnnnnnnnnnnnnnnnnnnnnnnnnnnnnnnnnnnnnnnnnnnnnnnnnnnnnnnnnnnnnnnnnnnnnnnnnnnnnnnnnnnnnnnnnnnnnnnnnnnnnnnnnnnnnnnnnnnnnnnnnnnnnnnnnnnnnnnnnnnnnnnnnnnnnnnnnnnnnnnnnnnnnnnnnnnnnnnnnnnnnnnnnnnnnnnnnnnnnnnnnnnnnnnnnnnnnnnnnnnnnnnnnnnnnnnnnnnnnnnnnnnnnnnnnnnnnnnnnnnnnnnnnnnnnnnnnnnnnnnnnnnnnnnnnnnnnnnnnnnnnnnnnnnnnnnnnnnnnnnnnnnnnnnnnnnnnnnnnnnnnnnnnnnnnnnnnnnnnnnnnnnnnnnnnnnnnnnnnnnnnnnnnnnnnnnnnnnnnnnnnnnnnnnnnnnnnnnnnnnnnnnnnnnnnnnnnnnnnnnnnnnnnnnnnnnnnnnnnnnnnnnnnnnnnnnnnnnnnnnnnnnnnnnnnnnnnnnnnnnnnnnnnnnnnnnnnnnnnnnnnnnnnnnnnnnnnnnnnnnnnnnnnnnnnnnnnnnnnnnnnnnnnnnnnnnnnnnnnnnnnnnnnnnnnnnnnnnnnnnnnnnnnnnnnnnnnnnnnnnnnnnnnnnnnnnnnnnnnnnnnnnnnnnnnnnnnnnnnnnnnnnnnnnnnnnnnnnnnnnnnnnnnnnnnnnnnnnnnnnnnnnnnnnnnnnnnnnnnnnnnnnnnnnnnnnnnnnnnnnnnnnnnnnnnnnnnnnnnnnnnnnnnnnnnnnnnnnnnnnnnnnnnnnnnnnnnnnnnnnnnnnnnnnnnnnnnnnnnnnnnnnnnnnnnnnnnnnnnnnnnnnnnnnnnnnnnnnnnnnnnnnnnnnnnnnnnnnnnnnnnnnnnnnnnnnnnnnnnnnnnnnnnnnnnnnnnnnnnnnnnnnnnnnnnnnnnnnnnnnnnnnnnnnnnnnnnnnnnnnnnnnnnnnnnnnnnnnnnnnnnnnnnnnnnnnnnnnnnnnnnnnnnnnnnnnnnnnnnnnnnnnnnnnnnnnnnnnnnnnnnnnnnnnnnnnnnnnnnnnnnnnnnnnnnnnnnnnnnnnnnnnnnnnnnnnnnnnnnnnnnnnnnnnnnnnnnnnnnnnnnnnnnnnnnnnnnnnnnnnnnnnnnnnnnnnnnnnnnnnnnnnnnnnnnnnnnnnnnnnnnnnnnnnnnnnnnnnnnnnnnnnnnnnnnnnnnnnnnnnnnnnnnnagcgacaactactactacacccacagcatctggcacgtcctgctggccgggagcgcagccttgctgctgccgccacctgatgagcacgctgagccctgggcctgctcgcagaaattcccctgccactatcagatctgtaagaatgatcgggaggaactgtacacggtgacatgacaccagcctggggaca

SEQ ID NO: 23668 - DNA, 595 bp, Macaca Mulatta
cctagagatatatgtgtgcttctgagtgcgtatgctcacagtctctcaatacatgtttcccaagaatcccaataaacgtgtttttcagatgatgtagtgacacacgtatattgacacggtggtgggattgtgaacatttgtaactaggatgatcagaacaggcataacacctggctgttactgttcttccctctcaagtctctgcagttgcctggggtggggcatgctgacccagcagtagaaattgtactgatgttctgtcttgtttccttcacagcagttctcagccctgacagaggtgcttttccacttcctaactgagccaaaagaggtaaatagaacattccatgttaggaagagtgggtccgtggtccccgagatgcttaaaaagtgaaggcccaggttttcactgttccctcactgcaggtggaaaggtttctggctcagctctctgaatttgccaccaccaatcgtatcagtctcagctccctcagaagcattggaaaagcctcctcctggttccaaatggtgaatagcctctcttagcagctgtggccagagacattaacttgacattgctttagtccatggagtc

SEQ ID NO: 23669 - DNA, 995 bp, Macaca Mulatta
  misc_feature (1)...(995): n = A,T,C or G
gctgcggtgttcctgccatcaaaccagccctgagcttcagccagaggattgtcaacnnnnnnnnnnnnnnnnnnnnnnnnnnnnnnnnnnnnnnnnnnnnnnnnnnnnnnnnnnnnnnnnnnnnnnnnnnnnnnnnnnnnnnnnnnnnnnnnnnnnnnnnnnnnnnnnnnnnnnnnnnnnnnnnnnnnnnnnnnnnnnnnnnnnnnnnnnnnnnnnnnnnnnnnnnnnnnnnnnnnnnnnnnnnnnnnnnnnnnnnnnnnnnnnnnnnnnnnnnnnnnnnnnnnnnnnnnnnnnnnnnnnnnnnnnnnnnnnnnnnnnnnnnnnnnnnnnnnnnnnnnnnnnnnnnnnnnnnnnnnnnnnnnnnnnnnnnnnnnnnnnnnnnnnnnnnnnnnnnnnnnnnnnnnnnnnnnnnnnnnnnnnnnnnnnnnnnnnnnnnnnnnnnnnnnnnnnnnnnnnnnnnnnnnnnnnnnnnnnnnnnnnnnnnnnnnnnnnnnnnnnnnnnnnnnnnnnnnnnnnnnnnnnnnnnnnnnnnnnnnnnnnnnnnnnnnnnnnnnnnnnnnnnnnnnnnnnnnnnnnnnnnnnnnnnnnnnnnnnnnnnnnnnnnnnnnnnnnnnnnnnnnnnnnnnnnnnnnnnnnnnnnnnnnnnnnnnnnnnnnnnnnnnnnnnnnnnnnnnnnnnnnnnnnnnnnnnnnnnnnnnnnnnnnnnnnnnnnnnnnnnnnnnnnnnnnnnnnnnnnnnnnnnnnnnnnnnnnnnnnnnnnnnnnnnnnnnnnnnttaaagacccaggccctgtcccatcatgcattcgtgtctgtcttcctggctcaggagaaagcagaggctgttgagggttcgactccctacttggacttctggcatggacggggctgagtggctccttgagtagcagtggctcttcctagagtagtcatccccaggccggggacaccacccctcctccagggcaaccccttggtcctacagcaagaagccag

SEQ ID NO: 23670 - DNA, 742 bp, Macaca Mulatta
  misc_feature (1)...(742): n = A,T,C or G
tgtgattgactgacttagattgtatttgaancttctggaggtattagattaaccaccatgtgaagcncttaaccattttgcaatactccctctgcgacaaacatgggagatgataacaattttagaagtaggtacttagtaaaagttctgttcctgaacatcatgtgaccatgtgctagtgacttaacctgagtcagttttcttatctataatggggtatacagtcatccctcagtatctgcagggcattggttccaggataccccaatcccaccccactccctgcagataccaaaatctgtagatgttcaagtcatagaatggcataatatttgcatataacctatgcacattctcctgtatacttcaaatcatctctttattccttgtcatacctaatacagtgtgaaggctatgtcagtagttgttacaccgttgtatttttattgtatttttttgtattgttactccctattgtttgagggatttttttggaatattttcaatggtccattggttggatccacagatgtggaacccacagatactaagggccaactatacaatcccctttgtggacatattatgagaaatgaatggcaggtggaaagccctgagcccaaggcattgacagtatggagagagtaaagaccctctgtggttatgtgagaaagggagagctgcaggatttaaataataagaacctgtgtcagctgtgctttggaaaattaggagttcacct

SEQ ID NO: 23671 - DNA, 462 bp, Macaca Mulatta
tgggcatttgcaatgattgtgatgggtgtatgtcatctgtgttatttaataatattgctttctgtaatagaacatgttcataatatccaatatgcttgtgttcttatgtaagacatggccctgttcccgtagccactaatgattgatccgtggatggataatctgaccgaaggcataacccatcacctgcagggatacttacgcacctaagagactggccaatgacctacgacctgtgtggcttggctggaccagatgagctgtgcaaacagataaccacttttttgagaaattgaagcaaaaaacacagaaattattccacacaagggcgatgtttcccctggaagcagaaataggcttggcggctggagtggccactttggtgccaggtacaagctgatgagtagttagaggaaaccagtctgcccctcagagagaatggaattgagaatagagaaaaac

SEQ ID NO: 23672 - DNA, 485 bp, Macaca Mulatta
  misc_feature (1)...(485): n = A,T,C or G
agatctgcaaccgtcttttctccctcctttccttgtagtttttccccccaacactctctgcagctgtcgctcctcatccctgccttctggcaccaatcccctcctatagctcatcccccctccgtccatccctccttctcccctgtctacgttcttgttctgaagggctactaagggttaaggatcccaaagcttgcagagactgaccctgtgtaagctctctatcctgttttctgagtgtgaggcagggaatgggctggggtgggggtgggctgtgtgtcagcaggtaattagcactccagcccttagatatgggagctccagagcttgccctaaaattggatcacatccttgtcattttgggcactggggctagggtgattcctgcagttcccccatggcaccacatcactgacttaaaaggctttctccnnnttgtccgcngnccctttcntcctttatcgattttctatgggaattggaag

SEQ ID NO: 23673 - DNA, 90 bp, Macaca Mulatta
gtcaccccagctctgatctttgccatcacagttgctacaattggctctttccagtttggctacaacactggggtcatcaatgctcctgag

SEQ ID NO: 23674 - DNA, 1358 bp, Macaca Mulatta
  misc_feature (1)...(1358): n = A,T,C or G
tcggacgaggaactacttttttacaactgaagttctgacgttttcattagagaatttcatgtgacaagactggcttagaaacataaagttgcacagtcaacataaataaatacagaatgccatggttcccacttttaagtaaagacagttggcagcttctccttctctcataccaaggcttgaccttatcttaaaggtctctggtcctcccacatgggacttgtctgctggtatgtgttacacagtaggcctgcccttctaccagatcttgatgcctctgatgttctcctgcctacaagaaaatacaggcttgcaagtgtagtcaggtctggctgtatttccactgttgtttcatttaataagatgacatctcctcttgagatacgttcttcttaccttttaagaagatactgtttaagaagtgaactattcagtctttgtatactgaatgctttttccctaaaaaatgttactttaatcaagaatattgaatatttatggaactcttgatgctgcatttgaaagctgagggaattactttagataggaattgctacctttgttctggaaaggttttgtttctgcctcaaagcattttgaagtgttttaaccattaaagggtctaatttttttactgaaattaagcattttaattcattgtgggaggcatcctgaccacagacatccataacagcaaagcacaaaccgttttcatccgtagtcttatcctgaaacatacgtggacaactttaactggagacaaaaccatagtgaattgagcaaacatttagtgctttctgcattataagagctatctacctaacttgacgtgcttgaaaaaaaaaaaccggggggggcggcactgattggagtttctcggaggataacacgcggtcctactgtttggttagggggaaaaaaaacgataatgtttctttcggttaagactaaaaccgtatttttttttatacaagatatctacactatcctctcgactccaataataacagacgcacagctacgaccgcacataccctatagggatactccaagcggacggaccacagaaggcaaccgcgaaacgatacatctcagactcaaccccacagcacatagtaagaaatcacagaataaacacgcgacgaaagaagacaagaacaaaaatagagaagaaaaacagacaacacaacccagccaaccaataaaaagtagaaaacagaaaagaaaaagacgcaacgaacaagcgaaggagacaaaaagaacaaaaaaaacagcaaaaacaagacaacaaacaaaacaaagagagagaacgaaaaaaaaagacacagaaaacagaagagnnnnnnnnnnnnnnnnnc

SEQ ID NO: 23675 - DNA, 630 bp, Macaca Mulatta
acatttttgctcgccactcttttgtatgaacatgtatgtttgactgcaagtttggtgccataattcccttggctaccaagccacgtgctgccgttctctgtcctttgtttcataagcacactgagaaatctcacagctatattctttggtcttccacctgccccaccacctgctgacttgacattgtattataactgttgacagtgactggggctctgactccgtagttgcctggaccgtggctcagcccagctgggcaggtggaatgaaaagagcagtattactgtaagaaaacacaaggacagccaggagttgtggtggggtgggtggggtgggaggtgttgatttttgtgtgtttttgtgtgtgtggttttgttttggattggtaggtttcactgtggtgtggttttgctgttgttattttgcttgattctggaaaatgctgaggagacagactgagctatgaagtgcaacggttcacactttaccatgtttgcaggagatgatcgaatacagatgaccctgctgtcatgtcttcatttgtaaaattctcctacgaatggagacattgaaggattatgtgtatggaaatttttacaaaagtcctttctgtacctattctgtagatgc

SEQ ID NO: 23676 - DNA, 720 bp, Macaca Mulatta
cccccggggaaggcttccagagtgccaaagagaaccccaggtactccagctaccaaggctccaggaacggctacctgggaggacacggcttcaacgccagggtcatgctggaaactcaggagctccttcgccaggaacagaggcggaaggagcagcagatgaagaagcagcctccttccgaggggccgagcaactatgactcgtataagaaagtccaggaccctagttacgcccctcccaaggggcccttccggcaagatgtgccgccctccccttctcaggttgcgaggctgaacagacttcagactcctgagaaagggaggcccttctactcctgagcgcgcaaagaacggatgcttcatgtcacgcaataaaagacattttcctatgaagacttgtattttgggagtttttttaaaacctcgatggtactatggagtatttctgttgttggtatcagtgcctttaagcggtataggcaaagaaatggaaggccttaatgtctttgccacgatgtctcaaatgtctgtttcatggaaggatttcccaccctgtgacaatcatctgttcgaggcgttcacatgctgtgcgcctctccacagtgccgggagtctcggcccgactcatgcgctgtccgcggcttggttatagcgtccctgcaccacgtgcgagacaaattcacctgacgcggaggatgacgcgcggccctgtttctgcctc

SEQ ID NO: 23677 - DNA, 501 bp, Macaca Mulatta
cagtaggatcctagagacaacctgtcatactgtttacaaaattgtacagctggttgcgtgctgaccgttagggtgcgtctgttgggttttgttggactagaaaaatgaaaattttctgatggctttttcattcctctgactgtgatactgagctgctttggtgttaaaggtgtaatctgtacagagttgtatttaacaagaataaaagtaacttaagtttgctctatcagattttagttctgcacagaggttaagtgggaaaatgcagctgttgcaaaacgtatataaatagtgtgttcatgtttttcagtatattatctgatactgtgttagcagcaggtctgctgaaacctaatcttgttgttactgtgagtcatttcctctcctttgataactagaactaaaagcatttttaacattcttctggaagaaatgaattacttgaagcatgaaaagcacaccagggtggctatttagcaattatgactgtagatttaaaaa

SEQ ID NO: 23678 - DNA, 795 bp, Macaca Mulatta
ctttagcctgaatgccaacacttgaatgtctttttcatcatctgtatgtcgaaggtggttatttgtatgtaggaatgggactgccatcccagctttgcatgccaaagaaataaagaacacactttaaagggcaaacggaagagatgagcgagcaaagaaaggtgcccttcaggtctactgaaaagttagagtacaaagaacactgttggtctggacagaagaagaaaaatttaattaccctttttgcctgtgttgtggcaacttcatttaatatggtttaaagatttatgagactgtcagctaaaagtcttttcacaagaatgtcaacagaaaatggcatttcaaaatatatatatttgtttgtacaatttgtgaaaccttataagccattttctccaggtacaatgtagttcctgctgatagaaaggaaatattttgtcaagagctttcatttaaaagccactacctccataatcacccccaaacctagaaaatccccactggctcttgccagtctggttttcgtattgtagtttttccaattgtatttgatctccctgataatgtattttaatgtgtttggatagaagatgccaatcaggttggaagcaggagtagtcattcactgttcgtgaaattgagccttttggtgcgccacgtggtgccagattaacccttctatccttctgcactgaccacgttgtgagttgggagaccaaatacaagccatttcatggacatagcaatacacaacaaaactctgttccttggagctatattgtaaactcttgcagt
